United States Patent Application Publication US 2014/0057251 A1 - sequence listing, part 167

SEQ ID NO: 321992 - DNA, 1751 bp, Cannabis indica
taccatcatccttagaagaggaaccatctgaatcctaaacaaccgcctttcccctctagatgtaggcaaggggcaagtaggtcccgtagagctttggcccttaagcctaatttgaagggaaatgtcaccatctgagcccccgcgggccaagcgccagcggagggccctctctctcctctctagattctgagctattcgagatagaggcacgtcaacatccaagtcaaagatttgtccatcactaggacaaactccctctatagctggggctccatctacaccaactagtgggccttgggctcctacaactttagaagcaggagggtacatgctgtacttctgaaagttggccacactggccaatttgattatgtttctcttctccacaggttgagacaggatatgattcaccctatccctcatctgtaatgtagggatggagtgccattgaaacagcacccgttagaactggtaatggctagtcttctgaatgtcccaagcaacgaagtagttctggccgtgcccacctactttggacatgggtgtgttgttggagtcccccaaccactggtggccaacttggctaaagtagatgtacccagtcttgttctgcttcaaagcagacttcagatcgaaataatatccaatctcataaggagtgggctgaggccagcctagctctttatacaaaacaaacatcgctaaaaggtacttgatactttttggggtgatttgtgttggacacatgccaaaataagcagcgatgtctctgaagtaagggtagagcggcaacactacccctgctctatattaagctccgaccatgccatccaaccaagggcaagtcgatgtgccctctgatctctagtgggtatctcacaatgaacacccctcactagcctgctagcaagtatcctgctaaaagtatcagcagagaggacagatgcgggagagatccatctgtctctctgtgatctagcatccagaatctgaggcttataagactaaatcaagacataatctaagcctaacatcgaaggctaaccgagcctgttcaaaggcttcccatcgtcatcataactacccaaagggcagttgtagaggacgatacaagttttgtatctcctcttcctgactggcctaacctcctcaacctcaaactcagtattaggactctaacccccctgatcaacctcaagcacctcttcctggtcaacctctggatctacatcaacacggggctgagtagcctcctctacaactctgactcagcctcttgttgcaaacctggcaatgtggggattacatggcggggctctacgacatgtttgtttcgttctagccatgactgttagtcctggatcacacaagataacaaggggacctaatgcaactgtcacctccccaattcagtactcagaatcacctgcatagaagagacaagggaaggtgaggaacctgacaaagctacaaacacagttctagtcaactgtacctaagggtaccttccaggtaaatcacaatgtacaagactgattatcagcaaagtatcgtcttaagtacatttacttagacaaatagtgagtcctaagttgtgcactcgactacaatggactcactaccaagactcatggagagttcccaaggagaatcatgcataagactacagttgtatatgcctccaaagcggtcacgggaccctagccgaggtcaatagaggacaaaaaattggctgcccgcttggaaccttg

SEQ ID NO: 321993 - DNA, 1748 bp, Cannabis indica
caacccaaacctggactcgggacctgaacatggacccaaacttagaccaaaacccagacttgggactcgagacctgaaccagaacaaaaccaggacacttgacaaggatctagatctgggactcagaccaggattcgaacccggcccaggtgccaaacccagaacctgacccagagtcgggacccgaacctagaacctgaacaagaaccacaagaccacgaccctcgaacaagactaggattgtgaccaggtgccagacccagacctagaatcgaactcgaacatagccccaaacccaaactgagactggaactcgggcccggacacggttctgtacccagacggggactgagatccagacccagaccttaatcagggactcaatcccaaacacatactcaaacctagtaaaggatccagatatgaacctggactcgaacccagacccacatcaggatcgaaacacgggacataaatctggaccgagatcctgaatcagacccaaacatagacccacacccgagacctgaactcagacctgaacccgaacccagacctagatcgtgatccagacctgaacccaaacccggatccaaactcggacgaggactcagaccctgacccagacctagacccaaacccaaacccagaaacggaattcgagtgtgggtatgtgtccgagtctaggtcttggtctgataacaattttgggtctggatccaagtcgtggtcctgttccagggtccctatctgctctagattcggttcaagttttaagtcacagggcacgggttcagtccaagcatcaagtctcatatccaaagtcctgaggtgggtcctaggtctaggttttggtttgggatcaggttccgaatctcaatccaagttctgaggccaaagtctggtccctgtttaggggccaaatttccgagtctgggtcacatatctatttttgggttctaggaccaaatctgggtacaagtttgtgttctggttcgggttcgagtctcgggtcccggtctgagaataggtcccggtttgggttcaagtctgagttcgggttccagtgccagtcttggtccgagttttaagtcccaggtccgagtttggttcttgggtcctgagtccggcccaagtttttgggtctgagtctaggtccgggtcacgatctaggtccaagtcccggtctttgtttaggtcccaagtcataggtcccagtctgggtccaagtcccactatgggttttggtctgagtttgggtttaggtttaggtttgggtcctgttacagtcctagatttgggttctcatcccagtcttggtttgattccgattttgggtccaggatctggtcaggaaccgagttcgggtccgggtctgggtacggatctaggtacaggtcctgaattcaaacactatctacaggttaggtcgaagcctcaggtctagattcggatctcgatcttcgatcccattcttgttccaattcggctgttgggtcccgggtcaagtaataagtttgggtttgagttcgagttaggggttgttggaaattattttaccaggatcttagatctactcacaagtctgtttattaacaccctaaatatgaactttctaaaacgatgaaattaacacgtataaagtttaagaaaccttacattgggtgcagcggaataaaatgactccttccgttcagatctctaacccttgtatcctttctgtagcatagtattatcaagatctgaac

SEQ ID NO: 321994 - DNA, 968 bp, Cannabis indica
ggcggggagttacatgtaggaaaattttttagagacaaagagcatttaaagatagttgttggcttgtatgcaatgaagaaatagtttgactactccgttaggaagtccgctattgctatttggtacgccacatgtaaggatacagattgtgggtggaaattaagagcgaagaagaacgtactttctaacatgtttgaggtgagtacatttcataatgtacatacatggtcccttgattttcgagtacattttataatgtacatacatgttcccttgatcacctctgattgttgcccatctaattaaggataagttcgcaactgacggctcggatcatttggcctctgatataaggaaaagtatgcacagggattacggaatctaaatgagttatgaaaaggcatggaggtgcagggagaaggcactacacctagctcggggtacacttgaaatctaaatgagttatgaaaaggcatagaagtacatataaaatttttctaatttttttcatagctcaagcgaacatgtttcattcaatatacaataccttaattcatgtcaaacttaaacgcatagtacttactgctttcgactgaaactcctcccaaccttcattagtcatactctgaagtttctttccttgcagtgcctttaggagtcatgttgtaccaacacatcttttactgtactttgtcataaaatgaaattttcttcccatccaaaagctcgatttcaaattttgtggaagacatcatctttgaaattttttattgatctgaatcttggttcttaataccacttgttgggccctattcttccaccatgttgggtcgccatgcaccttaactcccacattagtatgatatgattcgctttgggcctaaaccctcacagttttatttttgggcaccttcccaaaaaatctcatactaatggagtaggtagaacacatatttaagacaactctt

SEQ ID NO: 321995 - DNA, 1384 bp, Cannabis indica
aaaaaaaatatataactaacaacaaaaaataaataaaaccttcacatcaggatagaataatttctttttacgagactttatgttttttagcacctctcttcgttttcctaacatattaaacaagttgattaacatttttatccatattgattgtaaacctattgaacaaaaaagatacaaagaaagagaaataagaaaataagtacaatagattaacagtaaccatataaaaataataaaaatataactgtcaacccacaccacaaacacacgaaataaaattgtcacaacgtgggatagacagttagtgcacccactataaatatcaacaataaaaggaaatagaacaatacaacatactatatcaaaccaaatacaaaaaataaaaaaaataacatcgacataataaaaaataataaaaaagtagtaaaaacataacaaaaaaattaaaaacaccaaaaacaaaaaccgaaaaaacaaaaattaaaacatataatacaaaattaaacataaaaaataaaaaaaaaataataacaaatataaccagtttgaaattaaaatagagatcaaaaaccataaaaactaaggacacaaaattaaattaattaaaaagcaatatcaacataaactattagataaataaaaaattggtttcatttaaaaaataaacaaaatacctataatggaaccggttccataaacactaaaacaacacctaataaaaacttagcatatacttaacagattcatcaaaaacgaaaataaaaaaatatcctaaaaaattcatgaagctaaaaataagaaagatctggaaaacctaaataatgaacacaacacaaaattaaagaataaaaaaaaattaaaaaaaaaataaaaatgatcaagcaaaataatagaaaaatatgaatcagaacacaaaacaaaaacacaaaaataataaaaatcaccactaatcatcacacaaacaacccatacaatcaaatatatacacaaaaatctaaataaaatactttaagctctaaactaaaagaattaacacaagaacttataagagaatgtttacacatcaactttcgaacccacacaaattgctccaacaattcaaagacatgaacaaacacaatcagaaggatgaacaacactcgcattcgcacgaacaagggaaaaaaaggagaagctgaaaaagaagaagaaaggaaacatgcctaaaaaaatcctaagcaaaatgagagaagaaataatgaaaaccaaagaaaaaaaagaataatggtagaagattgattaaaatggagatgaaaatggtagtaatgtactcaatgtggtaaatgtccatgcaaaagtaagctattacacctactgtagtgtcagcttattttgaaaaaaa

SEQ ID NO: 321996 - DNA, 524 bp, Cannabis indica
atattctctaaaaattatttgattaatttatatgagtaactatatttaattgtactaataacaatataagacttaagatgcattagatactattattgctttttagtattaatcttttaaaataacactaggctaatagaggtagagaaaatttcaataagttaaaatttaaaataccatacttaagttgtcaagttccacaacaggctacacattattattattaatacatttcattattaaatttcacatatttatataataaataatttgaaaaacttctaatggagtgtgaccttcaaaagctaaataacaaaaaatacaagaaaaaaaaaactttgttgttgacatgttcgaaaaagatttaaagcatacataaaaaagaaaatgatgatttttaactaaagagtcgtttcattaagtgatcctcatgataacttcaaattaattgatcaactggtattattttcctatgtaattactaactattttgccaaacaggatattagaaattcatatgtaat

SEQ ID NO: 321997 - DNA, 777 bp, Cannabis indica
aatatttttttaagaataatttaagtttttttaagtaatttaatatttttattagattttttaataatttttattatttttttttagaattaatagaatattataattgttttaaaaaaaaatagaattataatttttaaaataaagtattttaatagaagggggaaaaatttatgttagtcaaagtttagtgggtaaaaatactaatttataacggtaaaaaaaacgaaacttaacagaaagggtataattatagtaagtattatattttagaagaaatttttaaaaattatatattttaaatagtaaaattgctaaaaatttaaaaggtcaaaatgttaaaattttttttttttagtagaacatgctctaacttgttggaatgtgtcataatggcatcttccatttaaaataaattatagctattatagattaagtgaacttaatgattagaagtctaaagtcccttcgttgactccattttctagttcgccactagtgaaaatcatgttatactctaatgattaatccctcgcaacccaggctctcccacaaagataatgaaatagataatgggcggattgaaaccatgtgagtgagagtgagacgagtgttcgcggtgcgggtggtgcagtttttgactattttttcaaactaatccgtatatgcagtttttcaaactaatctgcacctgcggtttttcaaactaatccgcacatgcggtttttcaaattttccaaaccgaacccgcaccgtgaaattaaaaacccgcaaaaa

SEQ ID NO: 321998 - DNA, 2526 bp, Cannabis indica
aagaccattttgcccttgcttaagccaaaaagcatctttaccacctaggggtattttggtcaaacctaatacctcgaataatccagaaatttacaacgtctatctatattgccccgctattactaaaatactaaaccataagaaaatgtgactctatcggccaaatgtcgcgttccaatgttgccgggcataaaatatgaaaaatataaaatttcatatataccataaatatcacacttagaattcaaatatatctccataagttgataaatgataattcaaaatctaattttggtattaagccctaattatctagtattctcatactaaaattaagcagtctttacaattatcccccgattaaaaggatttcatactcaaaatctaccctaaacaactcttgatattgagccctcatgtcgaactccaattcctaggtggcttcctccaccttaccgtttctccagagcaccttgaccaaagctatggtcttgtttcaaaggaacttatcttttctatctaaaatttgaacttgttgctcttcgtatgataagcctggctaaagttctatgttttcataactcagcacatgagtaggctctgaaacgtattttcgtaacataaagacatgaaatacgtcatggattgctgaaagtgcaggaggcaagggtagacgatatataccagtcaaaccttctcaagaatctcaaaaggccctataaacctaggacacaacttgcccttttttcccgaaatgtttaatctccttcattggagacaatcgtaggaatacatgatctcctacataaaattctatgttactgtgcttcggatctgcataactcttttgcctactctgagaggcaagcattcttgcattgatcttttctatagcctcattggtccgttgcacttattctagacataagtattttctttctccagtctcatcccaaagaattggagatctgcacttcttgccatacaacatctcataaggagccatatctatggtactctgatagctattgttgtatgaaattctatcaatggtagatacttactccaggagtcttcaaaatcaattacacaagctcgcaccatatctttaagtatctgtattatcctctcggattgtccatcagtttgagggtgaaaagttgtactaaacttctactttgtacccatggctcgttggagacttaatttgccaaaattttgaggtaaactttggatccctatccactataattgacttcggagccccatgtgacctcattatttctttcatgtattattctgtgtactgatccacttgtagaaagttgtggacttagtaaattaatccaccacaacccaaatagaatcgtacatccatgtggttctaggtagcccaaccacaaaatcaaaagtgacaccttccctcttccactcaagaagagtcagaggttgcaacgactttgcaggtctctggtgttcaaccttaatccactggcaagtcaagcaccgggatacaaattctaccacatcctacttcatcccgaaccaccagtagaagggttttaaatcctgatacattttggtagtgccaggatgcaatgaataaggagtggtatgagcttctttgagaatctcatttctaagttacttgcctaggacctttcctactaagggcatctgccaccacattggccttcctgggatggtaaagaattttgcaatcgtattgcttggccaattccaaccattgcctctatctcatattcaaatctttctgggtaaagaaatatttgaggctcttatgatcggtggaaatctcataattttcttcgtagagataatgccgccaaatattcaaagcaaaaactatcgcgacaagttctaaatcgtgagtcatgtatcactgttcatattcctttaactgaagggaggcataagcgatgacccgatcagcttgcatcaaaacacatcccaatcctatttggatgcatcacactaaaccacgaacttctctttatcagatggtagggctaacaccagagctgtaatcaacctctgttttaattccaagaagcttgtttcacacttgtctgtccacaaaaactgcttattctttttagtgagtttggttaaaggtgtcgagatcttagaaaatccctcaacaaaccgacgacaatatcagccaaaccagaaaacttttgacttctataactatctttggtctcgaccaatccctaacggactcaatctttcttggattgacgttgatcccatccttactgataatgtgaccaagaaaagacacttgggatagccaaaatttacactttttaaacttggcatacagtttatgtttccgtaatcgctgcagaaccatccagaggtgttgttcctgttctgcttctaatatgagagtacacaaggatgtcatcgataaatactataacacatatatcgagaaaaatccttaaataccctattcatcagatccataaaagctaccggagtgttggttagtccaaaaga

SEQ ID NO: 321999 - DNA, 1435 bp, Cannabis indica
ggtgtcttatgtaattattcataatttaaaccatatggtcgaaatactatgtgggcccataggttttaatttgaccattttataagactttctctttcttttcaaaattactatttttcattctaactttataaatgccaattttatctatttaattattataattaattatcaaataaacttatcatttaacttatttattaattaaacctttcatagtctcttaattaataaataaaccttaaaatctcttattcttctcaaaattgcccttgcttagtgaaactcataaataagacatagtcttattcagaattctaatcgattaataaaatcaattaattaattctacaagacaatattatctcaagtagtgtggactgtggagaccgtaggcctacataatcaagctcccaacaagtagttttagaatttaccgaataaattctctatcttattaattcctcctgactccactatagatttggaattgcattcttgattacatagaacgctctataccaagtatagatacgctataaattatccattgtttcaatctaaataatcaatgatcctctaaagataatttacatcgagtaagaagaattttatagttttacccttcagtatattttatccttaaaatacttagctacttgtaaatgatattccagtaaactaatataattactgaaataagtactccaccatttcaactcgtttagccatagttctaaggaaactatcgtttcaattctatgtgattataaaagttatagattccatatttatgactagtgctcccactcaattgcactaccactcaattgcactaccgtgttcccaagatgaacatgttagaccaatctaattggttaactttaatgaacaagttaaaaaacacattgttatacgtggcatgtccacatggtcaagactgaggacacgtgaaatataatttgtcaataataggacaaaatcatcttacacgacatgtcaactgtcaagagttctaaagaaatcgaggaaaactaccaaacaataagcaaaatgatttaagcaggccattaggaccttgacttgccatgcctggccaaaagaagcctataggctggcctgggtaagtttgtaggccgacaagccttgagaataagctgatcgaccaaaaagtggttgtcagaccaaagaggcctgtttgaccaaggaggcttgacctttgtaaggaaagttgtacaaagaagataaaaaagctggcaggcacatagaaatattggtaggcacatagaaaggctaataggcacatagaaaggctgacatacacatcgaatgactaagaggcacatatcgaggctggtaagtgttgggaattattttaccaggatgttagatctactcacaagtatgtttattaacatcctaaataagaactttc

SEQ ID NO: 322000 - DNA, 1567 bp, Cannabis indica
cttactcataaaatatgttcatacagtccattattctttcaacttaaatggtgaagttaaagaaaaggttattcgaactggaggattacgtcaagaggatccactttcaccatacctttttcttttttgtgtgaaaattttttcaaccttgttatgtcaggcagaaaggaataaagatataattgaatataatgcagctcgctcagttctgtcgatcactcatcttttttcgccgatgatagtattctcttcagctgtgcttcttctcaacttctttgattgagctctttaatttatattctaaagcatctggtcaggtattttttcaccgattaattaatctattactaatgattcgttaggtgtctaaaaggttgttagcttataacagtacgactttagagacttatatattgaggtataactgaaacttgaaatgttcttatgataatgtagtttactttggttccatgttctactacatactatttatcatttatttcaatgtattatctttggttttgactttagaattcttttagtattaactttgaatctttgcatctaaataatttaatgaatctactatgttacaagaggttatatacttataataatatgatacttagacttatattgtggtgtagctaaatgataaaatgtccttacattaatttaagtctattttgttaatttacatattctttttttcttttttgcagctaataaattttaataaatctagtatgcactctcaccaaatagatgatatgcaatccttatatactgcaacttttcacatgcaaatcactaaagctattgataataagtattcatgattaccaatgttaagcggacaaaataaacaaagaaaatatatttaataatgttaaagagaaagtttggtctcaattaaattcctcgaataataaaccttttctcttatgggagtaaagagatacttctaaaagtttttattcaattcaatctattcccaccaacgtgatgtcttgtttttagttacctttaaaaacatgtgaggagttggaagggttaatggaaaaatattggtagacttcttttgtgaataaacaaaaagtttattagttggctgtgtataaattatattttccatagcaaaggtagcttaggcttttgttcatttgttttgcacaattaagccatgttagcagcttaagcttggggaattcttacttgtctaaatattttatcagctcaagtttataaagataaatattatcaccatactacgtaccttttcagaagattcaggttttgtgttttaatctataatacataatttttgacatgaactaaatttgaggtgaatttatttactcatattatcctattttgaataggattacagttttttttttaactaaccgaattaggagttttttggatcatttattatttctgtatttggtttttaagattttgttatgttcttttcatgtgttataagataggtaacatctatcactaaagtttaattattatattttggttgctatgttatccttttgttttttgttttttgttt

SEQ ID NO: 322001 - DNA, 1192 bp, Cannabis indica
aattaataaattacgctttaattgtttatatttcactaatcaactcataattagtttaagtaggattataatcctactctaatgcccacttaatcacatatttaataaaatatgtccaattaaaatatcaatatatttttttggaatattacaactatcccctccttatagaaatttcatcctcgaaatttattcaaacaactcgggatagagctcccgcaactacgattttaactcccaaattgcctttcaatcttgttgttctttcacagcattataactaccaatatagtctttattccacaacactttctcttttctggtcaaaaaatctgtatcgattgttactcctatgacaagtctatttgaaattcaatattctcgtaactccgtatatggatcgtttctaccccatacttctgaaaacattgaagtacatgttggaaactccagataaagtagagagtatgacaagctaataagctacccgacccaccctttttagaaactcaaacggaccgattaacctaggacttgactttcctttcttcccaatttctgaattcccctcattagaaccacatgaagaagataaaattcctaacttggaatttaatatttctacactttggatcagcatagctcttccatccattataagcaatatacaaacttgaatctttaaactgcatcagtgccacattaacagtattctaataactgttattatatgaaaattcattcagaaaatgatgcttatttcaggaactctcaaaatctatcacacatgcttatcatagactctctcagcacttagatgcaaactttaaatctcaattcgggatattacttttggagcatcacaaggttgaactattcccttgataaatagattagcacactaatccgtcacaaaacatattccgctctgaaaaagaaactatactgaccttatatatctatccttaattacccagacagaatcacagagccctactgttcttggtaatccaaccaagaagtctatggctacttccgagtataaagagtatgatgtaatatgaaactcatttagaacctactattcagcatccttatctgactaatatagcaaccttgcctttatatcgtaaaagtccttcaaatgaaatcaaaaagtcctttgtcattctagttccaagcctttccttgt

SEQ ID NO: 322002 - DNA, 1202 bp, Cannabis indica
aagaaaactacatgaaaataataggaaagcaacatccaaacaatatcaaaaataacataaaaaaataatatacaaataataaaaaatcaacaataaaacaataaaagtacaacataaaaatacaacaaaataccgtattttatgtaataaaatcttaaaaatcgtaaaaatatttaaaattatgtacaacttttgtaattttttttgttatttttgtattgtttttttttttttttttttaaattaatccctatataaaagttgaagaatatactttttttgtatatacatcaaccaaatttacatttaaataaaatttaattcaaatatacttctttttatgagtattatacccaaattacctttacaccctcacataaccaagacacaatttcaaacataatagattgtatttttttggagacggatgtgtaggtttgtgaaaaacttgaggaaaaattttggttagagaataatagagactatcatgaaatgataggggtaaaattggtagaataattaaaaaaaaaagataatcataatagattttgaataattaaaagatgtatatagtgtaatttcctctcatatatttgatcatttacatctacaaacttttttttgtatgttaataactttgactatctcatttataattttaacgtactgttttaaaaattattatacattttaatggttatagcttaactgacagctattttttttcttttcttttgtcttttatttgaacataggcttctagaagtataaaatacatctttctttctctatcttctccccaactttatgtcaaaaacaaaatcttattctcaacttcataaaaaaaaaattgtagtcataccgctagttgtgtaggctaaaaaatagtaccattgctacatacttttcaatgcgatcatttttatatatgagaagcacgtatttttttgcttattttaaaactatttaattacttactatgtcaattatatactcattagttacattctaacactagatacaaataattataaaattaaatttttataaacaagtaaccttcaatattacaatatcatgcattggtggacataaaaaaattacaatattacaattttttattggcatttgaagcaactaatttttttcaataaagtaggataattaataaggaatgaataattttgtgttgtgtgtgggaa

SEQ ID NO: 322003 - DNA, 1959 bp, Cannabis indica
cctcctagtaggcacaacctcctccacctcggactcactgttcgaactctcagcaccatggtcagccacaagcacctctgcctggccaacctcttgatctctaccattaagaggatgtgtggcctcctccagtataccaaccatacccattattgctaggcttgcaacatgagggtcaaaacgtgttactctacggtacgactgattagttctggccgtaatgtgtcaatgtcaacccagagatcacttggacacttgctagagaatagactggatgctaactcataaaatcaagactaaatagacctatgacaatacagttgtcacctccctagaccaacacttaaaaccacctgcatagaagagacaaaggaaggtgagcaacctgacaaagctacaaggtgcagacaaaactctagctaattgtacccaagggtacctgccagataaacttcattgtacaagcctaggtatcagcaaagtaccatctcaatatacctacttagaaaaatggtgagtcttaagctgtgcacttgactataataaactctctaccaagtctggtacaaacttcttaaggaaaccacctataagattacaattgtatatgcctacaaggccatcacaaaacccttgtcaaggtcaaaagaggataaaagcttagccgcctgcttggaaccttggccttggccggccagggtttccaagctcagagagggtcggtcaggtcccatgacccacctccgtcaacgcttggctcacggaggcactactagtgacactactttgtcgattaggcctagaggccaaggttctgctaggcctacttctagaggcaagggcaaggctgctgttagtgatagcagttcagatgattccacctttgtggatgatagtagttgataatacaaaacttttgaatttgtttgtaatatcccagaaatttaattatgaataattgaggtttattatatattatggattaattaggtagtaatgagcaattttatgatccctactaacctaatttagcataaattataaatttttgctataagttgataaataagcataatttgtcaattacggagatttatttgaaacatatagatataaggtaagttatttgtgaaataaaaatattttcatgtttagcgaccttgaagacccgataagtgtataaaagcgtaatttattatttacagagatttatttgaaatatgttgatataatgtaagctatttgtgaaagaaaaatattttcaggttcggtgaccatggagacccgataagtggataaataagcgtactttattaacgacagagatttatttgaaatatgtggatataatgtaagttatttgtgaaataaaaactattttcaggttcggcgaccctagagacccaattggacgctaaaaatgtcacaacggaattaggtagtaatattgatgggattattgaagtaagttaattttagaaatactggagtattttggggtactcggagttgactaaataccctacaattaaagatttcttaagtaataagataactataaacaataaaaattttattaatattattatattattagtattgttattaatattacgattattattatattattattaaaaagttatttaacgataagtttatatatatgttttaagtttataaactaaatagtacgaacaaaactattcatcctccattgaacaaaaccctactatctattttctttgatttttaacctgaaacatagtgatctaagctcaggttgtagcgacataacaaatcttaaagagggaaagcttaaggtatggttaaatttgttttaaagctaaaacaatggttttatatagtgactttgtgatttagtaatagttacggtagatttcgactttatagaaatagttctttggtagctatgtgtactagttttgtatattgagg

SEQ ID NO: 322004 - DNA, 801 bp, Cannabis indica
tattttttttttcattttcttatgtgaatattaaaattacgtgagtaattggatatccaattaaaaagtcgatccaatccaattagtaatttgattggattggattggattggattttaaggtttaattggatcagatcggatgatgatttttcaaatccaattactaattgaattggatcgaatgagggaaaaaaaaatgttggattagatcggatacccacccttaatttttatttcattagttatacgatagtacctagttattaccgcaacgaatcagtaactagttattgtaacgaaaacataaaataaaatatggtaaacaacaaccataaaaatgtacaatatatcaatttgtaacaatatttattttgtccgtatttataaaactaaatttaaatttttatattttcaggaattttcctatttgaaatagttattattattcatatacatatgaaaaagaatctcaaggtggtgggattcaattttaagttggtttgggatcaaatctcccaaaagacatgttggtatatatttttacttatctacttaaatatatatagggtaattctattgtaggagttgtagttatacatttcagataaaaagacaaaggtttaacttaaaaaatcactacagctttcttctaaaaaaacaatttggagatatacatatcacattatacaattcaaaaaatctttcaagctttcaagacaaagcaatgccctatatatatttgtagggatacgattttgtcctgtgatgtactttcacggaatgtattccgtggtatatt

SEQ ID NO: 322005 - DNA, 743 bp, Cannabis indica
ttaatggacaattccaaattgtggagcatggttctgcaagaaaaatatatgaaaggaagaagtgtctttgatattgtgagaaacattggagattcaactatgtggaaggcaattttagatactcggcctctgttgtttagtgatatctgccacaaaattagggatggagctaatacctctatctggtttgatccttggatcccccacgtggatcgttgtccagtcccttaatatggtgcaacctttggtgtggcttgggtgaagcaattcattcataatgacaatagatggagtgaggagatggtaaaggattggtatgcggatgaggatgctaaggctattttaaacattgatctgccagatggaccaaataatgatagctggatctggccaacgaaaggaagtggagagttcactattcgatcagtgtgtgtaagattattcaagggtcatttggtgaaagtgattttgatcctatatggaaacgatatggaaatatttcttcatcctcggctaaaacatctatggtggtagctacttcatgatgcattactcgctaaaggtaaattgtctgcctttatgaatatatgatcaaatctatgtatactatgtggaaattctgtggagacacaatccatctcttctgggagtgttgttatgtaagagctttgtggtatagtacaagttagggaattatcactacacaagtaaatgtgggaaactggagagaatggagtcaatgg

SEQ ID NO: 322006 - DNA, 1353 bp, Cannabis indica
tttttcaataatatatatattttatagtccataaagtaaagtgtaaataaatttagttgatgtttatattgtttttcattttgtttaaaaaaaaattgtaccaataaaacaaaagttatttgattctttctttacttttgaaaaatctcacatggtttatgtaaagttaaagtgcgagtttctcataagaatgcacaaaattaaacataaaagattacacagtctaatatttatatgggtaatattatttagactctgtgttttataaaagctaccaattggactctctattttgttaaatgataaaatagatcctgtattttctaaaatagtacaaataggaccatgaactgattttttgtcaaaataaaatttaataataattcgatctaaatgtattttatgacaaacctgtttatattttctgtatctgcttgtgttagaaattatctttaagttagttatattttaaaaaaaaaagttgtcgaaaattaagctcagggtcttatgtttacaattttggaaaatacagggtccattttgtcatttaacaaaacaaagggtctaatttataacttttgtaaaatacagggtccaaaatagtatttgctctattatatttatatttatacacatatataaattgtggaggtttaagttgttacatacttttttttttgagaaaatttgttacatacttttagttgttgaatcattattgaatagttatgattaatttaaaaattaataaaatatataatcaataaattcgttactaataaaataataataattaataaattaactgtaacttgatagtaaattgtttttattttatttttataaataaaaaataaaaatatttataaatgttaattactaaaaatgtttgtaattaatttatttaaaaataaatttttttacctattaataacatgttataatagattagaaaataattagtcataactattgaataattactctactagttatatatagggctataaattttgggggaaaaataccaaatatgaaagtaggtattttcttataaacatatggggatcatttgaagtaagtttatatggtggctacctgtacatgaggctaatatttgttagaaagatatatgaatgacactttaaggtacttaatattatatatatatatatatatatatatataattaagtgttatgatatactcaatgttatttattaattaaattttgagattaaattgtaggatatatttatttaacatggtgtttgacagtataactctaatctaagcttgtaaaaaaattgtgagaagtaattaattaataggagataaacaaatattgatcac

SEQ ID NO: 322007 - DNA, 1677 bp, Cannabis indica
agaatctgtgattttcgcctcgcctgatgcagattcgatgtatgcccaatataaaacctgatggtagtttaatgttgaaggttgaagaagatagctcgataggttcgatataaggcctaatggtcctcataattttaaattttattgtgacacgatgggtccgatatagggcccgatggtagttttatttttatatttttaaatatatatctttaaaggatttttttttttacactaaaaaacttttttttttgtattttttatagaattccacataaaaacctctatgacaattaacagagaaacttaaatcataactaaaatccatatagtaaaaactaccgaagaaattctaactgtaaattaaaaaactatatatatatatataaagtaatttccctatctttaatattataatatatatccattcctatgagttgcttcaagcttactaagaagttttagtgatcagttggaaagtatgatggccaattttggtggggtagtaatcaaaataggcaccaaattacattggtaagagatggaaatctctttgtaagtcaaaataggaaggaggtatgggttttagatctttatctacttcaatcaagcacttttggctaaacaagcatggaggattttcgatatgccagattctttgttgagtagactgctcaagcataggtacttctccaattgctcttttcttgatgcaaacataggtcactcaccctctttaacttggcaaagtatttgttggggaaaggaactgcttctcaaaggacttcggtttaaaattggagatggaaatcatgttgactgtgggaaagatccatggataccaagccacaatgagttcaaaccagttagcttttcgggttctaactcaatgccagtctcaaacttcatcactgccgatcgggtctggaatgttcaattattgagctgctattttcagcagatagacattgatcgcatcttgtctattcctttgtcttattttgctggtcatgaccgattagtttggcatcactcccctaatggcatctacagtgtaaaatcaggttttcatcttgccactaatttggaggaacaaaactcgtcctcaccttcaaataagctttgggaatggtggaaatatttttggaatctgaaactacccccgaattgcttggaaagtgtttcaaaatatatttttataaaaaaattatatttttacgctcaaagttaatttttttaaatatatttttacgatattttataaaaatataaaaaacaataaaaaaaaccacataaaagtaagaagaaaataacaacaaaataatattaaaaataacatacaaataacaaaaaattaacaacaaaataaaaagaatacatcataaaattatactaaaagactatattttatattttatttacataaaatataaaaacccgtaaaaatattaaaaaattccgtgcaaactgtatttttgttattttgtgttttttggaaattatcactgctttatatatctattttatataaagtgtgcctatataaccgaattcttggtttataagaaattcatgggtaactttttattaaaataaagaagaatatggaagaaagaagagaccattattcacatctagaaactagaaaggcagtagagataataataaaaacttttc

SEQ ID NO: 322008 - DNA, 874 bp, Cannabis indica
tgtttagatcgttggatttgttcgtttcctattgaaattcgacgggatttacagttgttttacgttcgatctggtttcattctggttcagtggccgactgcatcgatggagcttcattcatcctctccgtttgtgacgtgcggctgaaggtaagggcaagtggtatttttgtaatattttcattttgggctgtacaaatgttcattgggccggcccacagtattgttgtaatatttttccctttttagaatattcctgtttttttccctaacttttattggacttgatgttaagtagtccatttatttattttaatacattcattaataatatgagactaatttttatagttcattcaaatttattaagtgaaacctaatctatgttaaataaaatagtataactacactcaaattaaattcggtgtttcatcaataattattattattattattattattattatgcttattattattattattatgcttattattattattatatatgccatttgtaataagaaacagtactatgactgaaattagaaaacaaagaaaaataaacaggcaattaagtgttggccacattgatgatctttcaaatcttcaatatgagaactcaaaacacacgataagaagcaggtgtgccccataacttttacctatatttcataatagtttttatttaataataataataataataataatttgtcttatcattatcatgacgacaatattattatttgcaactcatatttattgttgttaattaagagcaacacgattaatgggtgttaaaccataaaattatatctctttattttcttgtattgttttcttgcttttattgtatggtgacatgtgtccct

SEQ ID NO: 322009 - DNA, 1089 bp, Cannabis indica
gcttgggtttagttttgtgttggtaagttttcccgggtgattgggaagagatctagggctcaccacgtggcaataaattagtggtgtggttgagttgttgcgttatcttgtggctggctttagtttgtgaaatggggtccagtgctgagtcagtgctttatgggacccacctcttttcccattggttggaccatgaggagaatcattctcaagagagagtcgacattagagagtataggaaatagaacaacaacgctcgctctcgtcgaccgaaccgtgttaagtttgcggagtgtgtggtgggtcccgcaaatggaaaggaaaagcacaatataattttctgccaaaatcttagaaaggaacacaattactgcatgaaaaaattgcaacaatctttaatctagacgatttttcatccaaattaaaaaattgttacaacatgttttggtgaatttcatgatcatcccgaatgagggaagagtggcttccagtaagaagttctaattctgtatagtttcactttttcttcaaaccaatattaacacaaccagagaaagacaacaacgagtcaaaataaaatgaattaataatgaagttgaggttttcctgaataagcttgagtcatgatttcttaattaatatatcctgatttgaatttgacttctaaaaattatactcacgttatagtacatatatttgaaaataaataaagtggaattctcactaaaaacttgcaaaaatataattttttctgaaaaaaaaagttattttataaaataaatttagaagaaaattaaaaaatatggaaaaaaaaatagcataaagtacccctttagtaattgtttacccttctgttatcataaggtacttggttagttggttacccttaatttttccatatgtttcaattctttcttaaattttctcataaaatcatatttttgcataaaaaggactaattagaattttttcccttttccttgttaaatttaagaattttcgtctaattttagtaaaaaaaaattctaaatgaaagttcagagggcatgatttagtacataaacaattactgaaacagtaaaattgaat

SEQ ID NO: 322010 - DNA, 823 bp, Cannabis indica
ttgcacagcttacccggtatttccccttacggatcgcgggactactgactgtcacagaaagagagaatttttgatttttgattgggattttgtttttcaaatgcgaggggtattatggggaaaaatcaaatggagtcatatatgggcaatttttataggtataaatttagggaaataattttagagatttttaaggatagtttttcaaatttccctttgtcaactacaattagttctattccgaacactttttcttataagtgggtggtgatcatctttgtctctgttttttttttgggtgatttaagatcaataaaattggtgttttaaggagtgcttagagtatgatatggggtggtgtttatttagaatagattttgaagtggtgttgtggtaggatttggggtggtgtttagagtagaattaggagtagaattccaattaggtcatgcaatgtactttacctaattgacttggaagttggtggtagaagaaatttttccattcctatacaaatagccaaaaaaatttgatcaccatatgagttaattaaacctgttaatttgcttacaaaagagtataagcaactcaagtacatcgatgtaattcttaattataataagaaataaaagatgtcacactaatcacaataacagaaaagttcaaattgtatttaaaatacaattatcagtaattgaaggtttaattaataattcaaatgatagaatttgttttatttttataaaagtagagacctttaatcattaaaccaagtatattcaattgttattgtaaagtccttttttggcaagttaggtgacaa

SEQ ID NO: 322011 - DNA, 605 bp, Cannabis indica
aaatatcatttatcttataataaatgtcttaaattttttatacatatattatgcgttaaacttttttaaatattattgtattgaacttgtctttcttacttttaatgaaatagtattttctcattttacatttacaaaaattcaatcaatcaatttttattctattttattttcttaggcctagctaaatacatctttaatggtaaacattctagtaattagaaaataggtaggttatgattattttacttttttttttttttgtaaaatttattttcgtaccccaatagtactcattttgcacactataacttaaaatacatatttattaatacatttttattttaaaatcatacatattttactattctttattttgaaatcgtacatatatatcctaagctcaaatttaattaataaagttttatcaatataatcaaactgcttttattaattatatgagtttgacaaataaatttaattatttaattacaaataattgatggtagttttgtaaaattgataaaaatttatgtatcaatttttagtgtacacaattaaaaaaaaaaaacggattatttcacaaaaacataaaagcaacaaaa

SEQ ID NO: 322012 - DNA, 1420 bp, Cannabis indica
tttttaaaaggtaatttttttatttggacccctaaaataagtgggccctaggcgcgggcctagtctgcctatggttagggccggccctgagtataggacttggttataaactgtcgcctatacctaagcataggcgacagttttaaactgtgaggaagttcaaattggcgagtgtttcaaactctcgcctattccgtccattttgtgacggtcgtataagtgacgattatagaaatcgacgagagtactttatccgactgtttaaaaatgttggaaaaaaccaatttcgtagtagtgcggagagagagagagagggattcaccatggatatacatacatatatatatacagagagagagagtcgacgttggcctactcgttcaatggtggtttggagtggtctgagagagatgttgacggagaagaagagagagagagaggtaatcgtgatgagaatattttgtgcaggtgagaatggaaaaggagagttgtaagatttcattaaatggactgttggcttccgaaaaaaaaaaataatggtgacccttcataatcgacgagaatgtccaaaaaatatataccgttttttagttttcttgacaatgacctttttaaatcgacaaaaactctttatgaccgttatagaccgatgatatactatagccatcagtttaaaatagtcacttaattttattcacatcggtcctttaaaaaatccaattttgtgattgacgagaattccctcttttatggtagtagtaatagtaacactcttggaacaatttttcattcattcaatacagaattatttctgttcattttgcttcatagcattcttatcttgtttttctattagctaactctatgccaaagaattcttattcttttctgtttagccacaaaactgtgcgtcataactgtatcaaccatatccaaatattttattttcaaatcaaacggcctaattcataatcaatataaaattacttattcgctgaagaaaagtattgattttcagtagccaaaatatataactaataatcaaagagataatgctacttatttcttacctaaatattagtgggtttggttattgggattaaaacattgaacagaaaggtataagagagtgtaattttagacgaatatatttatatttatatttatatatataatattgtcatagttatatttagtagaagaataatttgcggcataaatacttaaatttaactctcagttgtaaataaatacttaactttaatttttggcggtaataatacctaagttataattctggaacttttgtaggtacctaattgttaatttttaagtaaattgccacgtggcaattcctaattggtcaaagtcattaaattttattttatttttttaaaaaattaaatataccaataagaaa

SEQ ID NO: 322013 - DNA, 776 bp, Cannabis indica
taattaattcaatttctaacaatatatttcaattagagtgactcggatgtcgcagtctctccagttgggtctatcctctctgctgtaatccgagatgattcgggaaatattatctctatttcctctcaagaaagtagagtgactcttccaaaactggctgaagcaaaagcggtctgtttggcagcggaaaaagcgaaagaattggggctgaaaaaagtcatattccaaagtgacaacctcggtgtagtgaaggcgttcgaggcacctatggatatatgtatggacttcatgctgcaggagactaaggcgaggttcaacaagctttgctcgaagttgagtgattgggggattgtccatatctctcgcaagtgcaattacatggcccataacattgcaaaatgggcggctttgaagaatgtcttgggaaacatcagccatgtcgaatttgaggattctgtccttgatgatctcagggagtgggatcctggtgtagggagggacaccttaggatcagggaatgtttctagctagtttcgttgtttgtttctttgttagctttgttttgcctattttctgtttgagtttctgttcctgttgttttttgtgctggggcgctggtgcctttgttttgtgcctatggcactttccttaatcaaaaaaaaaaaacaatatatttcaattcatttatttttaaattaatcaataaattaaaaaattattgatttaagttggtccaggattaattaaaataaataattaatttacaacttaatcta

SEQ ID NO: 322014 - DNA, 1737 bp, Cannabis indica
ttatgtaattattcatttttaaaagttattatattaaactatataagaccaaatatttagttaaactaataacaatatcaacatatctaaacaccactagtacattttaacatttctctatcactattatcgtaaccaaagtagaattcatataatacagtcaacaattaactaagattagtaataagaaaacacaattagattaattttttttttaaaaaaaaataaaaatttatccaatagatatataccgatttgaaagtcaatgccttaggaaaaagaaaattattggattattaatttactaagaaaatatgtggtattttgaattttttaaaaatatatatgtatttttaaagagaatttttttagatcataggctaggtgggtgcactggcctagcccgtcttggctcaaacgtgctaattgatttaatcaaaagataaaaataaaaataaataaaaaaagatttatcgtagaaatagtaaagtaactaataaagtaggtgatctagctgcaattcgcatctttcagtacagctaccttgttacgactttgctccaatcactaatcctgccttcaacatcctcttcttgtggttaaggtaatgaagaacaaattacagtgtatagtgaattccttgtgattaaggtaacgaataacaaattacgaataacaaattacggtgtactgttatatttaattgtaccaaaacatgaatatatatttttcagcccctacaaaaattaacctaggcatacaaacgtaataattgaagtaaaaataattagcaattttatctcctgaactttcaacatatcggatcatgcctcctaaaatatacttattaaaaattctccctgaatttttacatttacagaaatttagttcttatgttaggttctgtcctatttgtttgtttaaatgctaataacgtatctttgtaaattcgtaactttagcccctaaattttgacaactatcaaattgtatcctatccaaataaaaataaaaaaaaatcaataattttttggtaaatattaaaaattaatttagatcttaaaaaaaatattttgaatgattaataaaattaaaaaaaaaaattaaaactaattaagcgatttaaaataaattaatttttattaagaaaatccatttagatataagaaaggtatagtaaaaattcaaattttgtaaaaattgaattttatgggaacaagtttgggactattttttttcttcaaaaaatctagttttgtttaagtaaacttaataattttgtagtttaatttctatttttttttttaaataatttatatttatgttgaatttctaattatttttttttattttttaagatatgtatttgtaaatatagataagcttgattttttcttcacaagatcttagttttatttaaattatttattagatttttaataattccgatttaattttttaagatatgtatttattaataaaataaagtttgaaaatatttttttaagaataatttaagctaagtaaacttgatattttttaacgtaacttaatacttttatccagttttttaaggatttttttactttttcagaattaataaaaattataattttaaaaattaactttttttaataaaaagaggcaaaatttaatattattcaaagtttaaaaggtgaaaatcctaacttttaacgcctaacggaatgcatatacttatgtaactattatattttag

SEQ ID NO: 322015 - DNA, 1042 bp, Cannabis indica
atgaaaaatgaaaggaatgagctacaaaatccagtagaaaaagacaccacatatacaaatgctaattagcaaacataacaatatgcctaaattcacttttgtacaatatgcttgaattcactcttatacaatatgctttaattatttgatgacttgttatgaattgtcatgaatcgaattggaatttgatgttttcttttggtgaaaaatagaaaaattattatacagttaattttttatttttttaagtaatactttttttgttttattctatttgcaaatttgattattttgttaaaattagatgttaagtaccaattgaacatacctctgtgtacacatgtatacagtagtttaaataattttaatattgtataaattattttaaaattaaaaataaataaaaatgttctttattttttctaatttactcattatatatttatttttaaatattgaaggacgactgttccctctcgtttctatgtgagtctgtctatgcatatacccttaagtcaaagatgatgttcttaattaggttttggtgttttattaataatttaattaacaaaaatctaaatttgaaattttgaattaaaactgaatcagcattcaaatcctcttttctctccatttatccattctgtctaaattaatattataacacattaaatcataaattataatcatataatataaattaaataaaaaagaaaatatatgacagagtattatataaatatgttttttttttaataagacaaaatattttatgaagttgttttctgttataattatgacacctatatctgatatctatgactattgttagttattacttgtaagcaacttacacttttttcttttcgtctacccaattaattgctttcaaaaattaaatatatatatatttattctaaaagccctacattatttatttatttacaaactaaccatgattcccaatccaaatttgtattctagtgtgcaattattaggtagtataattattagtatatgaattacactatattttaaaatg

SEQ ID NO: 322016 - DNA, 1011 bp, Cannabis indica
ggtcgaatattattttctttgtctgaatacattgctcttaaggcctcaatagcgaaaccattgaaaacaaaaatctttgttatgataccttttttcatgacacaagtctttgcttcgatcatggattggggtctaggaggaaatagaatcgaggagacaaactcaggatggagcgattttggcaacatggtggttgttccacctcgagccatcaatgcccaagttttgacaaacttcatccatgacaaagcgtccgcaatcttatcagaaaagctgataccaaccgcgattcctccacactcgaacatgttaagttgagccgcaaatagaatttgatgagcgtcatcactttcatcatgacgagaaattagaggacaaaaaatgtcaagtttgagctattggattggacataacatgggaaagtcgcccattcacttgagtttccacgaagggaacaccctcgtcgttgcaatggatgaattgtccatgcttttcgagtcttccggctaaagggtagtaatgggttaagatggctgataaggatctttttagaatgatggctggattaataatggtagtatttttctttgtgtaataaaacaccaaagggttatagaatttgggagatgattggtctaataatgagagtttgtaacgctcaagattcttaggagttggataagatggcttgatgatctcattggagattgcttcaacttcaatattcatctttattttcacaatgagatcaaaactaattaataatgttatgtatactatagtaggatatatagtaggatggcttatgatatttgtgagtgttcacttcaatatggcctcatatatatagcctttgatttttaaaaataaatatataaaataaaaataaaaattacttcattttatatacactagaacttctatttaagaatactctattcaagaataacctttaatttgttataaaaaaatcaagtctcaatttgaacttattataaataagagtataac

SEQ ID NO: 322017 - DNA, 1132 bp, Cannabis indica
tttttatctaaatactatatttttatcatgagaaactttttgttgtaagtcacaattagtcacaaaaaatttatgttttaactaaaaggttgtaactaagtaagagtataaggcactgtattgtgggtgatattctcttttttaattatatttttagttatttttttaaatgtttaatttattaataatcagtaatgttattttactttttgttatatataatttgcatcataaaatgttattgagcattgttattgggcactagtggtgcctagcaccttccatagatgtcactatatgattggttagcgatattctctaaaacatattttcttaagttatatggagcccgctatttaattacgccaatagcaatatgacactaaagaaggtgctaggcaccaataatgctttttagcaattctcaatgttattatgtattgaaatacaataataaatattgtaataaatatagtatttattagtttttttgtgacaaatttacacaatatttaaattttgattgggcatgtagagctagttaagaagttcgattattgtgtagtcaagtttgttagtagagacaagttaccttttgtaaacaacttagctattaatgttagattgcaagaatgacttatttgagttgttgtgtgggacagagcccctactttgcatcccaatctcttctagctattaataatgagaaatgaatttccagaaaaaaaaaataatttataaagtaggaagacatgtgaagtacaaaatgttcctaactttatatattccaaaggggcttgtatggaacaatgttcgaccaacttttttattagtttaactttagaatattatttgattggaacctttgactatatatatacaaaacttttataataggaacactatacaaaacttttataataggaacacttcatttacatgtcaacttttctatttttgtttttttttcttaaaaatgcattaatgtatttgaaatgaaaaaaaaaagaattattacatagaaaatataaattgacattttatttacaaaaatactttcataaggtaaagtcaacatttataccttttatgtaattttaattaccaaaataccacttacactatcatcact

SEQ ID NO: 322018 - DNA, 1554 bp, Cannabis indica
atgatattttaataaactaatataattactaaaataagaactcttccattttatgtctgttaagccaagctctaagtaaataattatttcacttctaaatagttataaaaaatatagattctatagctacgattagagctctcactcaattgcactataatgttcccaagatgtaagtatttggctgatctaattggtcaactttaatgaacaagtcaaagaacttgtataatacattttaagccataacctaaccatctcaggattgagatcttttgaactaagattaactaagtgatattgacttagaaaagacataacgttaagtttgtgatatcttttccactgtcagtattggtttagtctaaagtatagccaatacagctgatactagtatactttactaatgctctggaaaggacattccacatatcattgtgtaagtaaactttatcgttgattatcgcgtctgagtaaatccagtgcagtgataaattatgagactaaatactttgaagcatgtaatcagaactactttcaactgtgatgacatcactatttttgtgaataattatatgtcatacccgaaattcggctggtacttcagaggatgacacatgtcaaccttaggaaatacgaatcaatgaacacattcgtaattatatcaataaatattaaaatggaataactcattaaatgcagaattcatagagtatatttataactcccagactgcacagtctttagcgagacaagaatgtaaaaactattgatttacgtattgacgagaaaccattttgcgtcagaaagcataatccaacggagaacataggtaatggatagtgagacatccatttcgctgtaggaaggcatagtcctggtaaactctagctcgtggagaacctcaggatatggttgtccagtctgcaaggccttatggtcaaagagcaattcttaagtttgctagtacattggtgctcatgccattgattgaagacttatgaatgagccaagttgttaatgtaccaagcgagatgccccagcgagatacgctttacagcgtgtcttaatccatgtcagcgttgaccctttaaaagcggtttaaatcacaactgtgtgattcttaaataataactgtatttagttatgtggagcgtaaataaggccaacaattttagggaaatattattgtggaattcgaatttgaatgtaattaactgcctacctatattacgataaataggggtagattatactaaaaatgggacagaaaatacttgagagaaaaaagaataaactgattgtaaagaaccctagtttaatttgtatcaaaaaaatttggataagattgactcgtggactatggaaagttaactgcaaaaccacgttaaaacctggtgttatttttgcttctattacttttcttagattttagataatttctaagctaaacctattatgaaaatagtattggaaattattttaccaggatcttagatctactcacaagtatgtttattaacactttaaatatcaactttctaaaacgatgaa

SEQ ID NO: 322019 - DNA, 1113 bp, Cannabis indica
ctacatcaggaagactacatcacaagatcatagaaaaattttctatgaaagaagcaaaggctgtttcacagccgattaccaaccaataccacatgtctaaatctatgtgcccttagaccaagttagagcaagatgttaatgtgcatttgcgtattcaattttcacaaaatgttgcgtactaatttaattataatgagaattattttgaataaataattacaagaatgctaatttatatgcgaatagaacaccatattcctaactgccaaaaccaaaactaaaaatagtgaattcagacaagtagcttgaatatgaaaactacaagtaggtattgacaaaatttaagtcaataagaaagagctaaagcttctacttccaaaattaaaatgcttcctaaaaaaaataagatcactattaataacataaaccaacataaaaattaaaagataaataaagataagattaaatgtattgttactaatcaaaggagtttattacgcctacctgtggtttatgataggtaacatattaaaaccacttaatttataattgtatctaattaaattaaacataagaaacatactattaaaaaaattgttttttagaaagaaaaagaaattaaacttaaaattaaaccgtctacaaatttacataacttgaccatttttgacagaatagctctgatacccatcatattgctatggagagctataaatgtggtgtgctactatttttttaaaacattttgctataatttaacttcaatattaatgtaaaatatgtggcaaatttggcctaagctaaaaattgtgttaaatttgatacagaaaatagcatgagctaaattttagctcacaataaatattactttttttaattacctttttgccacttattaatactattcattgacttcaaataagatatatttataagatattaaaataatataaataaaattaatcattttgtatattttaaatgagtattaatggcaatattaacctttatagttaatttataccttgtgtattagagtaaaaatacaaaaaatagggaatatttacataaggtactattttttataaatatttatatttttacgttcaaaaa

SEQ ID NO: 322020 - DNA, 987 bp, Cannabis indica
aattatttttatattttgccagttctgaatcgtttatgcaaaactgatttttgcagtaacagaattacattctgctgcaacaggcgtaacagttttgtatatattatatttctataatatttatagatatttgcaaaaactcaattttttaactagatagaaagtgtttggagtaaagtagttgaaaagaaaagtaaactatcacaactaaaaaaaaattgtaattgttacacatgattctaaggcaacaaaaatacattatcttacaattttattgcaattgtacacttttggctattaaacgttaactaagttcgttaagtgctaactcaaaaacatatgacgagattaaaaaaaaacttctacgtttttctcttaaaaaaattatttgtttgattatagaaaaactaatttagtttttctattcaaaatttgtatatttttaattaaaagaataggataaataatagttatttaatgcatagcttaataatatgccatcacatatttttgagttgacatggttaacaacaaaaaaggtacagttgtaataaaattgtaagataaaatatttttattgccattttttttttattaaattatgtgtaataattacatacgttaagaaaatttcatcacaaatattttttttttttaattttagtcacaaatttcataataataaaatataagtatattttcttaactaatgtaattgaggactatgtctagtgactctagtccacatcatggatatttacaacaataaaagaaaatggataaagaaagttttatttgcacaccacaaaaattataagtatactaataatttaaaaaaaaaaaaaatcaatctcaacattttttttaattttttctacattatttaatgttaatttttataattactttgtaaaacattcatatatttttttttataaattatgtataattttaaaaaaaattatttattttaattttttatcttaa

SEQ ID NO: 322021 - DNA, 554 bp, Cannabis indica
ctaaggaagtgacttgttaccttaaaaagtaactcgttacctcaaataatttttttttttccatattttttaatattattttgaattttggacatattttagtatgtattgtataaacacttataaaatgaacaatttatactattcttattggttgaccatttttaaacacagaataagattaaataatattataaaaaaaatagtaataagtgtgaaatgattttattgttaaattagtgagaaaataaatattcacttttcgagtattattgattgatgcttattaaataaattaaattataaattataattttaaaaatattaaaccatcaaattttgatccaataacaaataataaaaaagaatttttaattgggttttttttttctataataggtattttaggcctaaattttacatttttagcttggtaagaaaaactaaacaaaaaaaggaaatctaaaagtttttttttcaaaatactgacaacttaacctcctgaaccacatgaatctcttttcaagaatgatatattaaataaacaagacatt

SEQ ID NO: 322022 - DNA, 1397 bp, Cannabis indica
ttttctgcgatttcagagagagaggaagagagagtgggtttcggggtgcgatttttgggcggtccgagagagtggggctgggtcggggtgttggtgcgggtggtcggaggtggcggtgagggtcggaggtcggaggtggtggtcggataccctatgtagtatatttaattttatggtcattttatatcattaattgtttttttattagttgactttttacttctttaatttaatctacgggttagcacattcaattgttgtacttttatgtttacctaacaaatacaacaagagagtagaaaatgatttttttttgtgtcagacaacgcccaaatttgttgtaaaatgaccgcttcaaatttttttcattagtttttgaatgacacaagtttgcgtttgttaaaccaaaatttttaattttttacgttagttttaaactgtcataagtagcgtcactttataaccgacacaacaaattaagacttaaaaaaagaaaaatattaaattctgggcaaaagctcattgtacgaaccctagaaaaaaccctgcccttaaatgcacacttttcttatttgaatagcagtcgcaagccaaccctttctctctttcttgggtctctctccaacaatcagccatatctcctaggtttatttaacttcgaaaatttaaagtataaaattaatctatatgttatataacaaaaaagaaaaataaaaatcttaaaaattaagctaataatattctaaatccaagacaacatccatcaatagatccctatataataattattggggtatcaacccaagttctacattggaagaatagacaagagttgtcttggatacatgtgttataccttctccattagtatgaggtcttttgggaaggtgtcaaaaaacaaaactatgaggacttacgtctaaagctaacaatatcatactaatgtgagagtcaatgtgagatagcagtctgataaggtggaagaatggagcccaacaagtggtatcagagccaaagatttaggagtgttaggatagtaagttggatttgcaacactgtcttggttttggttgcctgctgatttttttatttttttttatttttattattacataatttttgtttagattaaattgtaatattcatatttattatttattttgaatatgtatattttttttctaaattgtatcttatggatcatattgaaagatgtaaatttttcattatctaataatgcttgatttggtatatatagttttaattaattattatatttaaatttgaaaatatattgattttatttattttaattaatattatttttttgatgaaaattaatattaattattatatatttactatttacaaatatatattaaaaagtaatttaattt

SEQ ID NO: 322023 - DNA, 1103 bp, Cannabis indica
ttttcacccgaagggcatgactttgtagcaggataggcataagtctatgatgaagcttgtgtgctcttgatctagtgggtgcatcttgatttggttgtaacctaagtatgcatccatgaagcttaggatttcatggccagttgtagaatctacaagctggtcgatttttcaaagaaaaaatcagtcatttggacatgctttgttcaggttggtgacgtctatgcataccctcaactttttgtttggtttgggcaccaacacaaggtttgatacccaaagtggatagaatgctttgatgataaaattatgggcccttagccttttgacttcatatttgagcacttgggtgcactctttatccagtaacctcctttttctgttgtatagtgtggaagttttgatcaacattgagagcatgggtcatcacaaaggggtctattccgaccatgtctccatgtgaccatgtgaagtggttaaggttcacccttagaaattttttcaatacttattttatttatgtcactaaaccattcccaaccttcagtcttctagctgtaaaagtgggatcatccttcacttcctctagttcttctacaagtccaaagcattttgtaggatccccaaagtgaggatctatgtcagcgtccctgctttgggttggaaatcattgccctttcgtgggctcttgattagatctcttagcgggcatcttctctttatttgctttgttcaaggttaagttgtaacaatgatggacaaattgttggtctccccttaaacatcctatcccatgccttgttgtgaactttaggcatatgtggtagatggatgttactgcctttaggtcatacagggctggacaaccaatcacgtcgttaaaagtctaaaggcacgtttattacaacaaactgtgccatcaacgttcttgtttttggattctctttaacaattaggggcaatcaaatgtaccctatgggtcacaatgccttggccaagaagccataaattacttgtgtgcatggtgccatatcagttagctagagccctatcttttcatatattattctaaaaataatatttggaggaggctccattgtccacca

SEQ ID NO: 322024 - DNA, 1344 bp, Cannabis indica
ctaaaataattaaaaaatatatagctatattattattcttactctaattataattgggtttggtacagaaagtttaaaattaatttttttttttttgaaactgaaagtttaaaataatttgattgaacaattataataaagaataataggattgtaggaaaaatttgaaactgagtttttttgaacgcaagaatattataatattatttaaaaattctagtaaaacaaaataattatttcttaagaaatcatttatacaacaaatatatatagattagtaaatataaaatcttaaggcatttaatgtaattacatttgtactattgaaatgattgttttggtacattttgatgtattctaagattttcttttttaggtgtaatttgtagttatttaagattaattgtaaattttaaaaaaatttaaatagtttataattttataaataaggcttgaaatatttgtgaacatctaatgttaatgcccactctggattcatgtactattataaaaaaaaataaaaaatagattttttattctaaatttataattatcgaaagttgccttttttttcttctaggccagccgactttctttaaacttcggtgcagcttggtcggggttgtgttttgttattaccattcaatttttgctactgttattagtcttattttctatgacatacttttgagtgttttagtcttgtctctgtgacattgttttaagtattttagtcttgtctgtgtgacatagttttgaatattttaatcttgtctacatgacatgttttgttttattttgtttcattatggttcttctttgttcttcaatagatcaccattaaatcgttaatagttgagtgatcaagttacgaggttgaatttgctgcaaccgtttttactattgtgtcttttaagtggtggatggaacagattataggtgtttaaggttaacagtgatgcatgctgtaatttttttcatctaattttatttttatttttttgtcaaacgatctggaaattagacgactgattttttaatttatttttctaattctaattttagtcgcatctctaacaaaaaaagatatctcgattagatcgcatgttattatttaataaaatcttatgatttattaggaaaaaaaaatgttcagtaataaattatttattttatttattattttatttttaaggattaggatcatatcataaaggagaagtatttgaagctacctcaagtggtcataaggaatatgggaggcattggtctcttttatactatgatagtgtttacttctccttttatttttgattgaagcatagtagaatctctatccaagaa

SEQ ID NO: 322025 - DNA, 549 bp, Cannabis indica
atatgtttagtccgttcgtggaagactgagttctcaaaaatttaataaatgttttgttgtcacaatatataagggttgaatgtaaattattaaccccaaagtctttaagtaaagctgagcaatcatttgcaagttgtgttcatatcacggacactttattattttgaaataaaatatttgttattataataaatgtgactttatatggaaggatatctaaggatgaaatacacatcaaactaaattaaaaataatccaatttctatatccaagcattaaaagtaatcatttgatacataatcctttgccaagctaagttacgtttctatataataaaaatacatatatatgtaatacatgtactagacaaaaaattacgtgcgagagacacgtatactaaattttatgctaattttttttctactttattaaaaagtgatacaattaaaatttttttaaaaaatatattattagttattaggttcaacataataattaatatagtgacagacctaacgaataataatattatgttacctaataacaaaa

SEQ ID NO: 322026 - DNA, 1067 bp, Cannabis indica
tgactatctttcactaaaacttctagtggtatcatattacctttcatgtacatgtaacacacatctactttcagttcatacactagagagtctacatcaaactcttcatacaaaatttcctgcatcttctgtaaagtagtgtcaatctcaaacataacatcttactttttaggttaatgaatatccagttaaaaccttcaactgtccaagccccataatacaatacaaccacaaatactattgaatccacaaaaaaagggaaaacatttgtaacacccgaatttaaaacttgttaaactaaaacatgaaaacttaaatatattataaatattaaaaatttatagtcgggatcctgaactttaccaaacgtagttaaaaatatacattttactgtatacaatatagcaaactttccttagcatttatttatttttttaaacaggtaactacaaaatacaactcaaaatattgaaagatcgaaaccctccaggctgcactgctgcgatatgtacaatcactgccgagctccaactcacttttcctcaagcttagctttccctttacctacacatggtagcaaactgatgagtcaacagactcagtaagatatgcataacatatatataagcaatgctctatcggttttatgtttaagctgccctgaactcatcagccgagctcaccaaatggttaagaacattcttaatggaagcacgaccactgtaccatatgcactaaagtaccaactctatacttgtgttggtagggtctttactgtactcccaagagttactaagtgttgtaccacatgcacgacatacctcccctggtactcgtgttggtaacactgtaactattctaatatcttacactatactaacactcttaaattacattattgttagcgttagtagtgtaaacaattaacacaagcatacaatcggctatacatattatttatgctatcttacctcgttccagattcaagcgtgccgatcaacttgaatggaaaatccttgagctaaacagaggtcccaagtcacaaaacacaattgggtaaattactt

SEQ ID NO: 322027 - DNA, 1078 bp, Cannabis indica
tctgcgacagaaaggaatcaagaattagagatctgggtgggaggagacatattattctgctgcacccaatgtaaggtttctcatactttttatgtgtttaatttattatcgttttagaagttcatatttaggttgttaaatcaacatacttgtgagtagatctaagatcctggtaaaataattccaacaggtgctacttgacgatgattagattgttttacattcaggttacatgtatactcattgtggaatatggtaacctcgaacatgtcacatctcatcttcttcttccccctcaatctccatcgaaaatttggatctttgcaagtaatgtaaaacacgtcggtgccagacttcctcaccatccactcaaaattattctccattgaaaaccttgccacgacttgtttcaactcttccttgtttttgaaaaactttccaaggtatatttcacgtgactgcgtaccactcaaagatgacgtataatatctattctccttgttgtcttctcttgtaaacataggagttttgaattttgttgaatcccctacgaaagatgtgggagtactaagtcccacatgtctttctgttctaccttgacgaatactacttgtgctcggtgtttgatgattttcactacgaggtctttgttgtggctctgcttcatggttggttgaaaatatatccaatctttgggaagttacctctacagcttcatcgacttcgaactcttcatcatcatccatattcaactctacagcaagatcctcatccttattcaaatctacagcaggatcattgttgacattagattgtacccataacactggccaattggattatctgtttggtgttgatctatattgttacaaaccttctcattgacaccaacaacagaatttgtttctaggacaaaagtcccaaccacactagaagggagaggagtaggctccaaattcacaacctttttcaccttagtcacaaataatggcagaatatccgatgggctcattgttgcccttgttggatatattttaccacgatctagatttactaacaagtatgtttcattaacatc

SEQ ID NO: 322028 - DNA, 1223 bp, Cannabis indica
actcttatgtgtttatttcattgttttagaattcatattaggatgttaatgcaacatacttgttagtaaatcttgatcctggtaaaatatttccaacaagagtgaccccaccggtaccgatcgaaaacggagaagtgcgaattgtttaagcatggcccaagacgtaatgggtcgatgttggttctcccactgaaatcaggacaaggcgtctctgtcgaaacccacgattggcgtgtccaacttcatgggttccgtcaatttcatgagcaaaaaatagcgttcaactcggtatatccagcaatctgggttccctctgttgaatagtgggatgtccattcccagggattggaaatcttggttgccggtttgatttggttgaaacgatccgagttgaatcggggtcataggaggaggaatgtggggtggtacgacaaccttcgacggaaatggttgtgagaggggaacggattgaatgtcgactgagctgtgttccccaccaattgaaccacttccctctattgcccgtcgttgttgatctgcactaaccgttgcagttttcggtgtggccttctctggcggtagaagaaactgggaaatttgggacatcaggttcatcacgggttcgagttgttcggccaagatttgggcaattgacgtatgaatctcttcctacaacttttccaataccgtcgaacgtagatcagagacttcagctgcaactttttcttccacgagttcaaccattacatccttcttcgggcccatgaaagattggctctgataccaatttgataggaattatcttatcaaaactgatattaaacaattaaaggaaagaatagaggaatagttgatgaaaattggggttgtattcatataataactaggaattttgagagcctagaccctccttacaagagacaatacaatctgaataatcccactacagtaaatgaaactcatatttatacttactccctaggacttaaggtgcaccttagcactatccaaataatactcaaataatagaattagataattgtatcctctacagcaccctccttgagagacttcctgttccttctagcatacacgtatgttaagggaggtctatcaaaatgtcataatagtaaagtaaccagtttgtagcttttgtaattgtagtttttgaaagctacttttttttctatttcaagtgcttattacttattgttgctttgtgt

SEQ ID NO: 322029 - DNA, 559 bp, Cannabis indica
cttgtacaaaagaggagggaagcagcgcagagactacgtagattaacaaattagacgcttaaaaatgataacatagtattttttaaaagtactaaaattcttcacatcacttaaatatttaatattttatttttggcttattagttctaaaaatactctaataacaagctattatggttccacttattattatttattatattatttattgtagttattgtctcactaaattttaaaaatcatatattaatataaataaaacatgatttaaggtactctaaacattttgacaataataaatgttacactaaattaaaaaataacttgtaaaatatcataattataattaaacaatataacataaaatttaagttaaataaaatttaaaattaacacataaaataacataattaaatctaattatgtcataattaagaattatgacatatttaaaaaaaatgctaattaaatctactatcattagtaagaaaaataattataatattgaattatagaagaaaatgcatgaaatttatgaagaaaaattggtatgagaaat

SEQ ID NO: 322030 - DNA, 1832 bp, Cannabis indica
attttagaccaattgcatgttgcaatgtggtctacaaagctacaaccaaggtcattttctctagactaaagaatatactacctgatattgtggctcaaaatcaaggtgaatttgtcaaaagaagattcattgcacacaacataatgatttgtcaagacttagtcagacattatgggaggaaatcatctaaagctacttgcatgatcaaacttgatttgcaaaaagcctatggcactattgaattagaagaggttctatgggatttgctttttccagaccaatttattactcttgtaatgaattgtgtcagaactccaaaattctcttttttttcaatggatccttctatggattctttgaatcaaagagaggattaagacaaggagatcccctatcctcccttctctttgtcattggcatggagtatttgacaagaatcatgaaaaaagtgggctgcaaagaggattttgcttttcatgagagatgtgatgctctaaggctcaaccacctaagttttgcagatgatgttttgcttttttactaaggtgactataaaagcatcatttttttgctccaaggcttgaagctcttctcagccacttcagggttacaacccaataaaaccaaatctgcaatattctacaacaacatggcagagcagaagttagctgagtgttggatgcatcaggtttctcaaggcagcatgctccctttagatatcttggtgttcccatatgcactaagaaaatctcgaaccaataatgtaatgtcttgctagaaaaaatgacggcaagaatacaatcttggagcaccagaaacatttcttttgctggtagagttgtgctcataaactcagttctttcagcaatccatgcatattggtgccagattctcaagctaccaaagaatgccattcatgaaattgaagctatatgtagggcctttctttggaaagggcaatacatgatgaaggggctagtttactggcttggaataatgtctgccattcaagatcagaaggtggttcaggcattaaaaaaattgttgaatggaattcagcagctctcttcaaatatgtatgggcaatagcaaacaaagaggacaacctttgggttaaatggatacacaatgtgtatctcaaagagaaagattggtgggagtaccaagctcctagccatggaagtcagtactggaagcaaatagcggcagcaaagaatcaagtcagatcacttactgatgcacaacaattctctcaaaacaagtatcgaatttcagatggttatgatttgatttgtcccattcaaaacagtgtgtatttgtgtaatgaagtttgggggagattcaacatccccaaacacagttttatactgtggttagctattcaaaacaggctcaagaccaaggacaggctacagagatttcaaattgttaatgatgctacctgcaatctgtgtttgtagtaggatgagtcaattgagcaggctgctaaagtggattcacaaagccaaaatcaacaagttcaaaaagaaagtgttggctgctgccacaacccacttgatgtacatgatctggtttgtaagaaatgatcaggtgtggaacaaacacatagaaaatagagagatgtaattgtacaaagaatcaaaaatcgtgtcaagcatagagcataattggtttggccaaaagagattggtcaacaagatagagattggttccaaaagctgtaaaaagttgtacacgaggtcttttgataaaaagatgctctttcattataatagattgtaattattttgtggattaataataaacttgctgatttataaaaaaaaaaaaat

SEQ ID NO: 322031 - DNA, 1495 bp, Cannabis indica
tatggtccctcccaattatcgccaaaatccatgtgctgagtttcgagtgtttggcatgacctttcgcagaccaaatcgcctactcgcagacttcactctttaaccttggagttgaaataacgagttgttcgctgctgataggccacatttttcaaatgagcctgatcgcgcttttcttccaaaagatcgagctgtatcaattgattctctttaatactgctaaggttaaaaacatttctcattagagatcctgctctaacttcgactagtaccatggcttcgcacccataagagagcgagaagggggtttcaccaatcgtggatcgaggagttgaattataggaccatcgaacttggggagttcttctggccatgtgcctttacgttcttcgagcttacccttgatggtatgcttaatgatcttattaactacctctatttgtccattactctgtggatatgcgactgctgaaaatgcattttgaatccccaattcatcccatagttggcgcatttccttacagtcaaattgtttaccattgtcggaaattaacttataagggataccaaatctgccgatgatgacgctgtatacaaacttgagcaatttggtggctattatagtcgaaagaggcttggcttcaacccattttcgtgaagtaatcgacagtgactacggcgtattttacccctccttctccttttggcaactctccaattaagtctatgccctaggccgcaaagggccagggactggtgatagaatttaattggcttggtggtctgtttacatgagtagctatatgctgacacttgtcgcatcttttagcgaagctatatgcatctgcccgcaatgttggccagtaatacccatgcctcattacctttaaagcaagggaattgccaccagcatggttgccgcagattccaccgtgcaattctcgaagtatatagttgcactcagtcccatcgatacacttaagtaacgaatgactaaagcttctgcgatagagcttgtcgtcataaatgacatatcgagcggctcgatattgtagttttttggcttcagtttaatcttcaggaagcattcctatttttaagtagtctattatcggggtcatccaggtgaccttttttattatatcaatcttccatgatctcatatcgattgattgttgggtgagttaatacatctacaagaattatatcgagtaatttagcttctcttgtcgaggccaatcgggccaaagcatctgcatgagaattgtaagcacgaggtattctacaaacgactatctttttaaattttgtaataactcacaagtgtaagaaagatatttggccaatcgatctcctctggccagctactctccgttgacttggcaaaccacgatctgcgagtcgttaaaggcttgtagatactcgactttcatctcaagagtaagtttcaaccctgcgattagagcctcatactcggcttcgttgttagatgcag

SEQ ID NO: 322032 - DNA, 679 bp, Cannabis indica
ataatatattgttgattttaaatggattcaagctctgaagtagcttgacggtaacattaagtgaactcgtagatcaaattagtgtcttcatctttactatttttctatttgtatttctcatttaaatctctgtatatttttgagattgtgtatttgtatttgtgtgttcttggttttagatttggtgtagttgagatttagctaagaaatatttgagttcagttcttagtgttcgaaccttcaagtgtagaaagaaagatgttaagttgttaactctctttgcttgggctcttggattattgggcttaaagaagagagcaagtgtgtgagttttttaataataccatattattttatggacgcatggaataataggaaattgaaaaatattaattttatgttttggagattgtgttggaaaagttacagaattccaacagttattttaaaaatcaaataatttcacaaggtgatttttttttgttttggttcttatgtatatttttttctccgttttacatttcacgtgtttcaagttatttaaatttttaacagatcgatcataacatttgttattatatttaatggttcataagtattcattacttttttttttttttgaatggaagtattcattacttgatttgaagaaaaagaatagattaattagaattttttt

SEQ ID NO: 322033 - DNA, 668 bp, Cannabis indica
gagagagagagagagagtcgataactttctataattcaaaggaaaactatccttcaaaccatttcaatgcatccacatagccatggaagtttcaaaacacaaaaaggaaatacgtgaaacatcatttgtaaacgcatttgactcaagagaacacaaagaaaaagcaacaaaattatatttctgaaaacagatctctcaatttaagaaccagagaaacaaaacttcaccaaaaacggcttaacaaaaccttttccactcaaaatgcaaacattttccaattttaacaaagataaacaaaaccagagctatatacctcctctgaccccctaactttctgggcaaccaaacaaaagcctcagatcagacgccaaatagaaaaatagaaaagtagaaaaaacgaaagaaaaatgatggagaatggcggcgtccgtacctctatcagagagaagacccagaagaacaggaaaggaaagagatatatatatataaggaataatgcaggaagaggaagaagagaaggactaatgcgtcatttgggatctagaagcttgtagtttgtagtaatggttttcgactttgtttattctccttcttcttcttcttcttccttggttggttgcctggtaaggtttcgttaagctagttcttaagagagagagagagagaga

SEQ ID NO: 322034 - DNA, 532 bp, Cannabis indica
gcattagttgtgctgttttgagagcttggactgtgagttttgaagcgattaatctgatatgggtcaattgacacatacagattcttcaaaacgacatcgtttgaaccaacctcaacacttatacctgaacacttaatctcaaaatctgtctcttttggattcccattaatctcactcttaattgtaacatatctgtttattacttccatttttattattattattaagccttttggtacttagtgttttatgtgtataaatttatagaaagaaagaaagaaagaaaaaacttatgtaaatagagatgacaacacaagtgggtatatataattgaagtttattgggaagtcactttcaacttttgcaagtatagtattattctaattattatagaccacatatatacatggaagattttaaggatgacataattttttaaggataaaacttatctgggagaaaacaaacaacatatattgtttttgtatttttttcttcttaaaagtaggtatatatatttgttagatatgat

SEQ ID NO: 322035 - DNA, 583 bp, Cannabis indica
ggttgaataaaatgtattataaactgaccaaactaaccgacgtacacccctactaggacatgatacagcccaagctctgaaggctcaccgagcctgctcagcgggttaccattggcgtcatagcgacccaagggacaatctaggaggacagaacaaatcatgtagtacctcctcctcactggtgcagcctcctctagatcagattcagcatcagaactctcaaccccttggtcaatctctggctcaacatcagcacggggctaagcagcctcatccaccatcctaacttgaccccttatggccaccctagccacgtgagggtcatatggaggtgctctaggaagtgtctgtttcattctagccataaataagaagtaaatgagggacatatgcggctgtcacctcccctattcaacacctagtgctacctgcatggaagaaataaggggaggtgagcaacctgacaaagctacaaacacatccaagtcaacagtactcaagggtaccttctaggtaaaacacaatgtacaaggtcaatcattgcccaagtaccgtcttaagtacacttactaagacatatagt

SEQ ID NO: 322036 - DNA, 1221 bp, Cannabis indica
gcaaaaactaatcctgtaaaaactgatatgtgccataaatataatttcaaatttgattatttctaaattcaaatttatatataatttgtgtacagatattattatctttatattgggtaaataattatgtgtgtgacgccattcggtcagggctcagttctttacaaggagcaaatggacaaaacttacaatttgaattaggcagagactcaaccatgttgaaggataattttcaagtggtccctttggaaagaggaccaccagtgtaccattttcgattttcacttgagtgtgaatatatagttaatattaataggtttttttttaagggaatatctcaatagttttcaaaataattataataatctaaattaaagtttaaatattttatttgtttacacaatcatatatacagacaattatatatttagaattttaaaaaattatatttaatttttaatatgtcagtacgtattatagtaatattaagtatattatatatttttaaaaaattataaataatttatacacgatcaatcttaaagttaagacgagtgaagtgaccgccttaggctccactgtttagacccctattttgaaaaaaccaaatcaaatataattagtaatataataacaaataatacataaattattaagtatatctttgagctcaaaacttaggcttaataacttggatgttaagagccttaatttttattttctacttttttaaatagtgggatcctaatttttatttttgctcaaggcgcaaaataacatattgaatttacgatgtaaaaaatagagttcaaagattaagttgcacacatgcttgctttttttttcactcgtgcaattaaatatttgacccttattttcgacactataaattattgtaaattttttaaatgcaggttgaatgcttgttgtaactacaatgtacacacactacaaaaaactgttactttaagtgacaactttttagtcacaacataatttttttgtgactaaatgtgacttttagctacaacaaaaagttatttgtgattaaaacatagtatttagttacaagttgtcactaatttagttttagtcacaacaaatattgtgactaaaaacacatttagtcacaacaaattgtaatttttgtgactaatacatttagccaaggactttttagtcacaacacaataatgataatttataattagccataacttt

SEQ ID NO: 322037 - DNA, 1000 bp, Cannabis indica
ttagaatttatattaggatgttaatcaaacaaacttgttagtaaatctagatcctggtaaaataatttccaacagtcgcgacattgtttgcgacatcttttgatttcttctataaatgttgtggttgttctttcgattagcgatgtttcacaacatgttccgacgtgtttataagctatttttggtcagatgtgccttttgaaattttatttgtttagttatagtttaacaatgtcttacaatatgattagcaactttaaacgatatgttcaatgataatattgtcattagatgtcgttaatagtatcgctagacatcgctaaattcagttgaacaacaaaattgctaacaattaaattgatatgttaccaacatgtcgtgaaataccgctgaacactggctatgtatttgtgattctattttgcaatgattcatgacatatttgtgatacgtgttgcgatatttattttttggtttttagcgaaatttcttacaattttgtagatggctcctgaacttaaactttcagtttcccaatatttcacaggatgtcttacctattggggtacagataggtttagagatatcaaagccaaatttacggagcttgagttgattgatacaattaaggctagccctttcggatacttctggaagctggagagttgactttctcatgagctttggtccacaacctcctcttacggaagatgaacgtcgataatgaaaaggaagatgatgtttggtttcatgtgggcaaaaatggcatgagttttgggcggatagagtttgggcttattaccagcttacctttgggtagtgcccctacagaggaagaaatagaagtcaagcccaacgaccgcctagttaggacttattttgaagggaagagttttgtacaattggattcactattgctccaactacagaggtgtaaagtaaaagataatacctacaagcttggacaaatttcttttattgaaggtgtattagtatcaaa

SEQ ID NO: 322038 - DNA, 912 bp, Cannabis indica
tacttttatttaaatttgaaatacaaaaagtaataaaagtgaagatatttttgtctagatacaagttactttatttcattacaatctatattacaatttcaaagtacacatcataatagtattacctgaaggcaaacatcatctaattttgtaccgtcgattagatacaaaataacgtttatcattttaataaatgtttcattgaaatatgaaaagaaataatatagattttttctcctctaatatagtatttcaaggtaagtgttcacctgctccttccatattttactgagttgaaaggttttaaattacgtactttaaggcctttacatagtacgtcacatctaaatttcaggcattacgtgtttgcaacatttttgggtattatgagattagattttaaatttacactttattttcggacatctttctgtttatggttttgtgttaatatttcatatagtattttttagtatatgaaattagatagtacaacctactgatttgaccttatacgaattgatgattctttttatgaaaaattaaaaaggtaataatatttatttagaatcttacttgtaaggattttaaaaaaacaaaataatgtcatatcaacttaattgttttaaaactttattggaaatacaaagtcattttacaaattctattagccaattttattcaccacttgaagattgatattacgttcctgtaggagatatttacaggaattactatgccatccatagtaatcaaatgtaaggatttttaaattaatttaaatggtcgaaagatgccattctctaaataatgtacgccaaggttttgacaatgttatgtcaatcatttcagaaatcatgacctaagataatttgggggtatttggattttttaaattttacactattattt

SEQ ID NO: 322039 - DNA, 1401 bp, Cannabis indica
ggtccttagaagagtgttcttgacacaaaagatagtgcagctagagcactcggacctaactttgaaggaccataacaggtaattgaagttacggattctgaagcatataaactgggtcggtataacaaaaacatggaacttgttttagtaccaaagtattggaatcgggaacatttgagaaaatactaccagtaagtgtataaggtctgacgaccaccttcaagtacacaatgctcgaacatctactcttaagtagatggccttcggagcggacctcgctcaagggtttggataaaatgggtggcactcaggtcagatgaccatctctaaagtacagtctagaaaatacatttttttatgttttaattagctaaaaatcagttagatcatgtaatagacttcataattaaataaatgtaagttactatgataacaaaattattcataccaataaatgaataaggatattaactatcattctaattgtgtcaattattttttactatagcaagttatgaatttaccgtaaaaaatgtgtacaaaaggtctgcttgaattaaaaagctgaatagatgaaaaacaaacttgggcaatacaagtgaccaagagtcataagtctgcttggtcacttggggggcaactatacctattcaaagcataggtaaataacaagctcaaaaaaacacaacaacagtttgcatgtgcaattattaaaacttaagggaaaatattcatttcaaaagatcacaaagcatgatataaacttgggattaaaggtttcttgttcagctatatgtcttataacaaaatgaagtattaccaagtttaaaggccacttggtcgaccgcattgtactgtaaaaaggcccattggctaaactgaaaaaataaaaatgaggaaaaaaagaagatttcacacagttggagtccctggctctttgtacagattggcttggtcatcaatggttggagcatcaatgctttagtcggtcaaagcttttgggttggccggctcatattcttccttgtctttttgggccgcgtaaaactaagatatgcctccttattttcattgaggtaatcaaagtttgcatttgggttggccttcccgtattcataaaaaacctccaaggcggctgtctccaaactctcgacccccttctagagcacctcctgctctaccttcttggatttgacactctcttccagatcctgttttgttggggattatttaccaagatctagatttactaccatgtatgttatttaacatcctaaatatgaatttctaaaacaattaaatttaaacacatataaattttaagaaaccttacattggttgcagtagaattaaatgactcattccgctcagatctctaacccttgtatcctttttgtagca

SEQ ID NO: 322040 - DNA, 1175 bp, Cannabis indica
cgattatgccaaacatcaaaaggggaaatacaagtagtattattggaattaagagagctactacaatgaaaaggctgactgacagtggcagtaagagtgtgtggagaatgagcaggttgctgtgaagtgttgccattgagatttgtatgcaaatgagagggcagcaagtgcaattgtgatgatttaaaggaatacaggccattctggtatgtcccagtcatcaatactttgtgagaaacctgatccttaacaagacaaacatcagggtgaaactcaaagaatacactattatctctagcaaacttagaaacactaatcaagtttttggtaatttcaggcacatgaagcatattattgagaataagaggagaagtgttatgagtagagggcaagatagtagaatgaccaatgtgtttaattgacaaacctgtgccatcacctacaaccagctgctcagatccttcatatggcgagtttgaaaccagattgtggatatctggtgtacaatgatttgttgccccggagtccggataccagttggtatcattttgtcctgaagtgtgagccagatttgcctgaggagagggagcagagggattcgatattcgattgcactccagtaaagcttttatcaaatctataaaaacaatccacaacagtatgcccaatcttgagacatagttgacattggggtatgttggaagagttgcttgatttgcctcctctattgaagcttcctcgatgaacctgagtgaagtgaggcacattatattgaggagctccatatccatttgccctgggatgatacagataggcaacccgattggaaggagaaccccttgctgcagaatactggggagagaaagttccaaattccagaggaggtctcaaaggatagttggctctgctgaatcgattttgatacgcaagatttgcttcaggttgattctcagtttcagaagtggcaagattggctacaatttcaggttcttgttctgtcttttcgattcttgattcagaagcaagcaataaggccttaatttctccaactgaatatccttcgattcgagtatctgtcgaaatgacaaaagtgtcatagttgctgggaagtcctttgaaaattgatgctatgtgatcacgatcactgaggacttcaccaactgaggcgaggagat

SEQ ID NO: 322041 - DNA, 1880 bp, Cannabis indica
aaaaagaatattttaaataaaatccaaccgtacaattattttctagtataataacaaaattattaaataatattatcacgttttgcctattatatttcttatattaataaaattttcttttggtttgattaaaaaaaactgtacaaggactgggcaataatttttcaaaataatggaacacattccgtttttatataattttttataagaacagacaacttaaaatattgtaaggatcgatttcaaaaaaaaatatatatattgtaaggatctggcaaaaaaacgacataccaaccaccatataataaagtgtgctaaattttacttgtttaaagaacatagaagaaaacatatgaaaagagaatgagacaaggagctgatcctctagaaattgttgaacaacataattttgaaaacataattattttattaatataaaagtaattatacaaaactggaacacttgtactagaccacagtacagaatacaacaaatacttacactcttattttactaacactttgacttgaattgacactcacacttaattttctttttcctgtaactcacacttaagttattaaagtgtttcacactatgtcgaatacttagtttacacattttaaactcacttgggacacttttggatcacaatagttaaacaatgcaacttgaggatccaaggagaacacatcggtggaaaaccccttgatttacaaatattcctcaaaaagtgaagctttttgtttagaaaaattctcttgattggttcccaatggtttctaacctcgaaagacataagaatatgcatcatgatattattttcccgttatgcaatattgaagaaaagccatctaagtatgctctttcagggtacaatagtctttcatatacttagagagagtgtattagaagtgccctcttcctttaatcttggaggggctttttatttatatttattcttttatttagttttcgattcttttctgagacagaattgaagagattctaattttgttctgacacatttggtgtcgtcgtcacaagtttttgcacgaacgagttcttctgatcagtgatctcatagtgcaatggtcatttgactactagttaagatcacttctctaatgctaagaggaagctttaggtggagttgtctacaatgtcatcacaattttgcctgtttcctaacagggatcatccacttttggatgcatttaacttgacggtttcacttcagagtatcaatgttggatagaaaaaattagtggggtataattttgatgttcaatacaaaccacagattttgacattcaatacaaatcgggagctggaaaccaagtttcagatgctttgtcaagagtcaatcacactatggaaataaaaaatcaacttctatctcaaggaattgatcggggtgttatgcaacaagaaattgacaacgatattttcctttccaatatttatttgctaatttgcaacaagaaaggcatcaagcagcaatattctcattggaacatggaaaatattttatagagggagagttaagttacccaaacagtttctccaattttcctattatcttgtaggattaccacaattaacctcttggtggccattccagcaagagcaaaacattcatgatgatcacataaaatttttcttggttgggaatgcagaaaagtgtagcagagtgtgtgcgagaatttgatgcatgtcaaagaaacaaatccatgaatgtgtctccacctagattgttgcaacctattcccttaccaaccttaatttgtgaatatttaaccatcgatttcatagatcgactttctacggtatagacacaattttagtggttattgatctgaaagtcctaattactaca

SEQ ID NO: 322042 - DNA, 2244 bp, Cannabis indica
aatgtattttccaaaaaaaaaatgctaaactcctccctcctttctttttggataatgagacatttattgaaaaaaccaaactagagttaaaaaaaaataaaagtcaagctcccccagaaaaataaagcaacctcaaactcgaaaagaaaaactcctccctccttgcttcgacttgttttgtacaaacattgaaggaacctttcacacttgaagacccttcgttagtaatcccctatatatatacatattaagttttcagaaaaatctgaaagcaatttctaaatttcaaagaaacaaaaatcaaacatcaaaaatagagaaatttatcttcgtcgctctctgctccccactgctttctctgatttttgtcgctgtcttcaatttctcaacaacacaataagtctcagtagtcttagtagccatggcaggtaagttactccaaccctcactctatgtatcataatagttttaattttttttctgtttttttttatgtcactctttctcttaattaacttttgttttttgtttttaattttgcattgcaataatggtaatagtggtctagaagtatctagctcttaagttttgtctcttgctttgaattgattactgaagcttgaaatttatgtcgatactataacgagagaaaagttttgatttctttcatcactcgctctgaattgattctaaagcttgaaatttcaggaagatgtgcttgaattattgctataaaggtaagtatgtacgcacaacgataatgattatcatctttttcatagatttataaaatttatgtatattattaaccctagtttgtgctaataatttgaacaacgtagtgtcttttaattaaaattgaagaagaaaaagttatattaatagtattaaatgtaatttacccaaaggtttaaaagtgttgtaagactgaagaacaaaacggtgtagtattgtaggcataattattactctagtccaatgttatttgaacatataccacttaggcttcagcttgaggtctcgtacttagttcttctagttgtaaaaaaataattaaatattatttaaaaataattaattatttaaaaaattattatacaaagaagagaattctaatctatataaaaagaagtctaatttttgtaagaaaataaaattttattataaatattatctttaaatgacttaactgttaaaataattatagtaagaatttatataaataaataaattatttataaatattaattgttaaagagacattgttaaatatttaataattattttaagaaaataattaattataattaaataattctaaaaaatcatcaattgataacttattattataagtaaaaaaatataactataattgttataataaaaatgtaacgagtagtgtaaaatatattaaattattaatataatttaaacatatgacaatgattactctttaattattttaataacgcaataacccatattacattgtatcatttgtacgttcctcactttatccctatagtatgtatttataaatttatttgcttcaaattcaatattaatataattttattatacactcatttgcaattatatcatatggaagatttattatgtatgaattttgagaattaaatgagggaataacccatagcaatgatcacttttggtctattgttggattgtcggtggaagacaggctgtacatatattttctttttacatgaattatttgaaaagaagaaaaaaacacttcttcctcactttttttttcctttgttttcgtaattaattataaactcataaatgcatataaaagtccatgtctatgtatattttttaggaataaatgattactttcgtaaataaaatattggggcaacttactatttttttacatgtcaaatttgctacgaattaacttgtgatttgctgaaataattatgctacaagagaataccctaatgaatggaaattaaaaaaagaaaaagagtaatttgtagcataaatacttaagttttatgccgagtagcagataaatattttagtcgtatttttggcggcaaaaataccttttgtcactagtgtgaaacttccgtaggtacctaatcgttaagtgttaggttaagatccacgtgtcactcgttaattggttcatgttattaatttttttatttattatttaaatgtttaataattataaaaattaataaaaaattaaatataattaatttttatttt

SEQ ID NO: 322043 - DNA, 1090 bp, Cannabis indica
aggtgatagtgatggaaaaccccgaaactcgaaggtttgatcccgacaaaagtgatgatcttctccaactgatgggtgcaggtcaaggtcgagtgtaattcatctgcttcccagccattggaacgacaggtgaacttttgtagaccactgggcccttaattacttcatccaaagtggccaatttctttgccccctttttttgaagattttgctccagtagaagtgggggtagacatggcgtggacttggtgaagttctaggatttcttggtcgaattcgaagaaaccgcgagtgtgaaggtcctatagaacttcactcatttgaaaaaggaaatctagtagttagccctcaaaccaaaaccctaagatagaaacggggaatgggggtcccctaatcgcaggaaagaggccccctctgtatgcatgccaaagaaagggaatcaagagattctcctaggcaaacatcgggtgcaaaacatcctaaaaacaaatataaagggaaaagaagcaaaaaaaagaggagtgtggaagttgcttcgaacattggatggaaaacaaacaaaagatcgccactttctagtctcaaagaaaaatagtaataggcatacaaataaaaaaatgaacaacagtggtcatcggacgccccactttggggaagcttcaccatgacatttgccataaccaccgtagcacagaaatcaagctcaaccaaatgagaatatcaccattcttattttccttaacatgcagaaaaagcagaaaaaatatgaatagaaacttacacaaaggttgtaaggaagaggttgacgatgtcctgtggtaaaaatttgtctaacaatgggagaggaacaacaggaggtagtcggaggtgtctagattttttaagtgttggctatgaataggtgtgaagacgagaaaggatggttgaaacgtttgagtgcctctctgacaccggaattaatgcaaaggtctatcaatggacatgaagcgaatctttgcctgcaaaaggaaatagaaatcaatggtgacaatcataaatgcgacccacacgtcaggggcacgtgctgttggatattattttaccaggatct

SEQ ID NO: 322044 - DNA, 954 bp, Cannabis indica
agacttagggttttctaattttttcttgaggggaagatgagaatacaaaaattagctcttgtttcttggggactactaccaatttataacctcatagctaggttattaattttaagtatttctaatttagcccctcaataaattagaaatatcgcttagggtatctacacatttagcccatgacactttaacacccacctacaattactaaaatgatcactttattttgggccaaacttcaaatagcaacacaaccaatttgctactgtcaaaatatatttgtatattatgtataaaagtagataactaattccttacatgaataaagatgaagataatgcgagagtttcaactaaccagagtagaatgaaggcaagagcttcaaactgaaagcattgagatttagggcttggcttcaaaaatgtatatataaaaaaaaggattaataccattttatacttagttttttgtaaaagttatcgattgtaccatctgttttattaaataataagataaatcctgcattttttaaaacattacaaatattatcctaagttcaatttttgacaattattttaatataaccaacttgaagactatttctagcacgaacagaggtagaaacgtaatcaattttgtcataaaacttctatattgagttattattatgttttatattaccaaaaaaaaaaaaattagttcagggtactatttagtactattttaaaaaatataggattcaattgatcatataacaatatagaaagtttaataaataatttttacaaaatatgagatctaaaatcgtatttacctaataaaaaaatgaaataaaatgtaaccgtgagagagaaaagtaaattcttaaagcatctccatcgcgaatgctctaaaaaatatttgatgacatagatatatatatactagcaaaaagttacgtgcgaggcacgtata

SEQ ID NO: 322045 - DNA, 612 bp, Cannabis indica
tattaactaaaacttgcctagctcctcaatctcatagtcattactaactccaccgacaatactacacgtcattactcacacgttaaaacagtaattagcgtggagctatgtaaatatgccacgtcgtggtaacttcttagagaagaaataagcaaaagacttgaaaaaaaaaataaatagaaatctacttacaattagtcaatagtcaatagaccgttagctccaactacctcttacacctataataatatgccacgtagcttaattaatttttactgtaaaatcacaattgtggtagttaagttcgttcagtctatattaataatgaattaatttataatattagtaatacttaattaaatctaagtttaatgaatttgatgatgttttgttttgtcaattataaattaatagtgtgaataatgacacaccacctttatcttattcttttcacaatttttttttataaaattatattcattctttttcgggtaaataccattttggaccctctgttttataaaaattaccaattggaccttgtgttttgttaaatgacaaaatggaccctgtattttctaaaatagtacaaataggaccctgaattgattt

SEQ ID NO: 322046 - DNA, 713 bp, Cannabis indica
atttgtaattgtaataattaattttgccaggatagaagcaatacacatggagttgactcgatacctaaaccaagtgaaagccatagtaattacaagcaaaatttcacatctacacttctccacattcactggagcctggatttccaaaggtgaaaaataaccatcacagtgaatttccattgcttttttaattaaaaaagagagaaagggtcgcataaattgaaataaggcaaacttcttcaagacccgtgatcattcctgatacactccgaatccccaaatgcaaaaccaagaagtaaaaatgaaaattagtatcttaactccccaaataaaccttttaatcagacctaatctccattaccaaaccggcgcataacactactaaaaccaactctcaatttagtcaattcctcccaatagccacaagtaaaaccctaaacctcgccgaaattcaaactcaaacagacagagcaccaaaccaaaaatcacttacacagttcaagcaaagagggagaaaaaaaaaacaaaacaaaacatcagataaaactgccaaaaaaaaaagtgtacttacgcgcatcgatcacaaaggtcagctaactctccgctgcggaggcgccatccctttctggggcgctccggtttcaattccttacactcagaattgtagcagaccttaggagccggcgacgaagacgaagcagtcgacatcgaag

SEQ ID NO: 322047 - DNA, 3301 bp, Cannabis indica
tccactgtgctgacgacacaataaacaacaacataaatgtgataaggatttggatgaatttataaatcaaataaacaaattaatgataacatgaaccaaatgacataataagtgatgaaaaatacttctgtctctttattgatatttaaatgatagagattacattgaaatagagttttatttagggcataaaacccatcatacttaagtcgttttagcacagcttctgcgagagtaaggaatttggatgatagtacccagcttactaccctttaggcagggatcactactgatctctccattgctggaggcgaactgtgggatggcctacagggtcgtttagtgaaaaacatcactgagttcaacgaaaggaagaagctcgaaaaaagattaactttataaaagctggctcgggaagcaaacccagcactgtttcaacaagcactgtctcgagtaaagttgataacccagggcctctatctcaaagaggaaagatgactctaaggggtcatgtaaagacaagaagaaacaaaagaagcacgacaagtatgtgccagtttacaccacttatatcgagcttaatgaaactcgagaaaatatctatctcgcgcatgagcacaaggttacattcattacacctgagcccatgaggcatgcgaggcataaaagagatccaaccagatactgtaagtaccgtaaggacatcgggcacactacagatgagtgtcgtcagttgaaggatgagatagggagtctcatcgcacgaggccacttcaagcaatatgtgaaaagatagagcaatggacataaccaacccaatctgtccaataacccaatcaaccagggattacaacctcctccagttgaaggagaggatatcctggttatctcgagagggccacatattgtaggagaaagcaatagtgcccaaaagaggtacgtaaaggaagtgaagaccgagaagtatgcctttgctctagaaccttccaagaaggtaaagactaaagaacctccgattatattctccaaggaagatgaaaaagatgtgaggtacccatgtcgatccattagtaatcacaatccagctcgctaacaaggggataaaaatggtgttaatagaaaacagaagtttagtgaacatcctatacagggaaacatctttatccatcacaataatgtaagacttttttgttgtcaacctatcatcggcttacaatatactattggtggaccagcattaatcagaataagggcagttagttttattaagcacttattactgaaatttcggacacccgtggatgtgggagtagtgcgaggtgatcaaatactagctcacgagtaatatcgcatagagctacagcacagaaaagctggtaaccagctaatggcactcttgactgaaaaagtcgagaagaaggatgaagatcttgatccccggattgaagaagaaggaaacttattaaaaccaattgaagaattaaaagaaattttcatggacccatgaaatcccacaaagtgtgtttacattgggagaaacctggatgaacaattgaaatagcaactaataagtttcttaagggcgaaccaggatcatttaacctagagccatggagatatgatagggattgaccccaatattatatgccatcatttaaatgtcaatttaaactacccagcaaagagacagaagatgagacccttggattccgagagacaaggggcactcaaataggaagtggaaatgttgttggtcaatgactttatacgcgaggtgttttatccctcgtggatagccaatcttgttcttgtcccaaaacccaaaggaacttggagaacttgtattgatttctctgatctgaataaggcattcccaaaggattgttttccgctacccatgattgaccagttggtggataggcacgagcttatgtcattcatggatgcatatttttgatataaccagataaaaatgcatctcccagatcaagaacatacgagcttcgtaaccaacatgggactttattggtataaggtcatgccatttgggttgaagaatgatggggcaacatatcaacgactggcgaatgaaatgttcatgaatcagattgggcggagcatggaggtttatgttgatgatatgttggtaaaatcagtaaaaagtggaagtcataccacggacctcgtggagtgcttcgaaatattaaggaagtactatatgaagcttaaccaaaaaaagtgttcctttggagtttcctcaggaaattttctgggatttatagtcaacgcgaggggcattgaagaaaatccttagaaaatcaaggctttgatagatatgccatcaccaaccaagcctaaggaagtccaggccttaataagaaggatggctgaactttacagattaatttcaaagtcaactgataagtgtctaccatttttcaatgtattgcggggcaacaagaaatttgaatggacagaggaatgcgaggaggccttccaaagcattcaaaggcatttggtgacacctctggttttggcgaaacaattaattggagagacattacgcctctatttagctgtcttggatgacgcaattagtgcagtaatagtgcgagaagagggaaagcaccagcaacctgtttattatgtcagtaaaaggttattgcgggcaaaatcaaggtatccccctcttgaaaaacttgccttatgcctaatccacgcatctcgcaagttacgaccttacttcttggcacacccaattatagtgttaactgatcaacccttaagacaagttttatcaaaaccaaacgttgttgaaagatttataaaatggtcaattgatctgggacagtttaacataacttatcaccctcaaacatccatcaagtgaaaagctttggtagatttcttaatagaaggaataactccagaagaaaatttgcttgtttggcgagatgcgaacacttggaagatattcgtggatggtgcatccaacaagcagggctcgggtgcaggggtgatattaatttcgccagaaggctttaagtttcattgtgctttgagatttcaatttgatgcgcatcaaacgacaaggctgaatatgaagccttgatcgctggtttgaggattgcagaagcgttgaatgtcaagaatctcatatgtcatagtgattcgcaactgattgtaaattaagtcctcggggaataccaggctatgggcctgaaaattgctaagtatgtagagagggttcggaagaacttggaaagattcaattatttaaaatcgagcaaatcctaagaga

SEQ ID NO: 322048 - DNA, 762 bp, Cannabis indica
cctgaaatttagtaggccatagagaaaaaaatatttttgagccctcatttgaaaaaaatgtagtattttttaaaattgataaaaaaatgtgtaattttaaaagaagacaaattttttttgggcccctgagctaggtgggtcctaggcacaggcctagcctccctatgctcagggccggccctgtatatctatatatctaatataaaagaataaaaggtttgacttactatgtttaaaaatgtgttgcaaaaggagtatgtcaacatgctctcataaaataattagagaaaatatactttcagttcaaattcctaatgattttcttttgaattggaggtattatatggaatagaataattgattatatctcataaaataatgggataattaattacaacagttagtcaaatgatctctttatttattgaaaaataataataaagagatttcaagactcaatttataataaaaagtgataaaattctaaccataatcaatggtgtacagttttaaatgagctcaccaaaattaattcaaatgatgaaatatcattgccaaatcctaaatgaggtcattcaccccatcaaatcccaagtgagatcattcacctcaaataacccaagtgaggtcatctacttcaaaatgtcaaagtgggttaattctctacaaagttctcgaagatacaaaatctttgaacactcttagaattatgtttgacttgattcctataaaaggatacataggcaacttagttgctaagac

SEQ ID NO: 322049 - DNA, 1204 bp, Cannabis indica
tacttaaataggaaagttacgagcaatggaaagacccaaaagtactttgcatttgatcaaaatatagttgtttacattgtgaatgaaaacgcaaggaaacacaaatatattaatttggaatgacgaagtacaaggcatttaagataagagaaacccaagttggtttacaaacttgtctttatgaagacgccactaggggcaaaccattaagaaattttcctaaacaaagaatacaaggttatttatgggggacaggagagctcgagaaagaccaactacacgtagctcgagaaaggccatgtacacatagctcgagaaagaccgtctacatgaaaaaggtcttgacctttgcatagacctcattctctacagcagaagacctccattttttgcatcagaagatcccatttcctgcaacgagacctcgttccctacggccgagatctcattcccagccttaggaaatttgtaaatgtcagtgattggatagtttggagatttctttgtgcaagccttggtcttgagccatttgggtttttttagtagaatcgatgacctcgccaactgggattaccttcttcctggatttcttgtcagcctgaggggtacctctgaacttgctctcaaaatctacgtccatttctgtaatgacaaagataaaagttcagtgaagcaacaatggtaagaaaaaccacgaattcagatcagaccaccattagaagaggatgatgcctactctcaaaaatctcttatggggatcgccagtaacgattaactatgtctcctttgtttggatcaatcggatgatcttcagtcttggaatcttttgtttcaagtttaatctaaggtttgaaatttttgggatcgtacggagaggataagcggtttgtatattttggtgttacaagctttgaggaattaatttctgagcttggatgggacatctgcgaaagagagtgacaatcaagtttttagatgaaattcaccaaaaactagtagtttatggaatatggcaagcctggactgtcattttatacttagaacccagtagcgttaaggccaaaggttgggatatttaacggttgggaatgaggtagaagatgaaaaggcggttcatgaatactaataatgaccctcaaaactgtggagccattaaaattgagggcatgtgtggtcttgaaaaaagggattatgaaaaatatac

SEQ ID NO: 322050 - DNA, 1336 bp, Cannabis indica
ttagctttagtattatttttcaagacattcttctgcttcgtttataatatatgctagaacaacgcgagccgttaaaatattcaactcgcacatatctttatgttattttatgagttcgtctcatttacagctaccattttgattttttctttctaaagaaaaggctttccagttctttgactttatattgtccatagacaattttaattagttatcattgcctttgtagaaaaattttaaaatttcaattttctagatttgcaacataatatgtatctgtagatgaattccagttattatacatatatatgccccaaggaattttaaaaagataaaccttgtaattacttcaacaaactttaattttattaataataagaatttaactattttagagataaatacatcatttataatttgatttctactggtaataaggtcgcaaatattctctattctagtggttctttattagcgagtcattaagccgagctaatttataaaccccagttcccactactgctttaataacataaggaccttcccagtttgggttaaacactccagcagtgggatctcgcgtgtttgtaaatacacgccttaacaccaaatctccaacattaaagatcctcttcttgacactttcattacagtacctcgtgattcgatgttggtaagctacattagttatttgcgactcattacgtctttcttcaagtaagtccaaggacatattcatgagttcttgcttttcttcttgattatagaattcactcttatagattgcaatgttaacttctagcggtagcattgctttcgagccaaatgctaacgagaatggagtgtgtcccatcgctatttttctattgttttgtgagcccaaagtacttgtggtagttcatctacccatatttttttagcaacgtccaacttcttcttaatagtatcttttaaagttttattaacagcttctacttgtccgtttgtctgaggtctcgatactgacatgaagcttttaatagtcttatttatttcacataattctgtaaatagcttaccgtcaaactgggttccattatcaaatactattttaatttgtattccaaaccttcaaatgatgttctttatgaaaaaatcaagaacttttttgtaagttatggaaacaagaggttcaacttctgtttattttgtaaagaagtagactgctactactgcgtactttgctccgactcgccccgtgggtaatgccccaatcaggtcaatcccccatcgtaaatgggtatggcgaggtcatcattctcaactctattggtggtatgcgaggtatatgtgaaaa

SEQ ID NO: 322051 - DNA, 2870 bp, Cannabis indica
cactcaaacaggcatcaagtgacagaccagctctctctttagggacggtggcccgaccacccctttgggcccggctctatgggctgggctagccttgggactacaccatggcccagccaacctggcctccacagaagcttggctggcaaggaggtgctctgtagggtttcttgtgcacttctacacatgcacaacaggtcatgggctacaaattgggccctaaaagcccaacaaaatggctgaataatatctagatttaaggccaatttagtgttttataattgtctaacaaactatgcaaacatatagggatttaaactgtaacatagggttttaggcctcttatttaaaagctttaaccttagcctagaaacttaagttgcatctaaatttgaaatccgcctctaagctctaagtcgaatctgacaaattctctcttcctcacttcctctatcacacgcctacactagcaacatctcaatactcgagttttgctaaaattgattcataccttgtattccttagggtgctatagcagatcctacctatagtgatctcgatagtattaaccctcagtattaatacaattaaaaggggagtaggtcattactcgctatcacaagggggtcaaacctctataacaaaactgttgtttattgcttttcattcttatttgtgccaagacatggaaagcatcaaatccataggaccccgctatcggttgatcactttttgaggtcaacagattggtgctttcactgagattgtggatatcgtaatatgatcaaacgccatggtaaacacaagaaggacccctatcgcaccatcttcatcttcaggtctccctcaagacccacagattgtagatccaagcactcaggttctagtcacaactaaaatccccatgaacactgcagatgtggtgaatcctgtcaccacaatagatactacaagtctggctactaatctagctaaactaatacgagcaccacggtggatccaagtggcaggcacatgcctccaaaagtagacccaccattggcgcctccccttgaaagaaagacccaggggtgacaaccccctagaacaacacctagatctcgactccggttctatgctggagagacagacccaagagttggcgagccccatctagacctaggggaagactttgagttggccagactcagagaagctgtaggtcatgcaggcctaactaaagaaccatgcgctgctgattgtgatgtcttcgctcagtggagattaaaattcttaggagagatggatgaccaagagtacatccgttgatctatccaagcagagttagatcatcgcaatcgagaggccaactatttgataagacagttcaactagagaaccgatagaagaggccaggatgtccttaaagatccacttcaaggaagacttccactaagttcctcaagaactatgatagatattcccctgccagagggaggaatgaactttccttaaaggttaaacgacaaaaatagccagatctaggcaaccaacgacacgggggaagacagctagggatctctggctcagcaacaccccattgtgcagccatggtcggccagccaacagcaagagtacctatggctggccagagtacaacacttcctcccctaggggagcaaggtgctcacaggttaatctttaacggacaaggactgagagtgggtggaaacacccaaaatggcagttcaagaagtgaaactgatcacatcaggtatctagatccactaaactccagcaattggtgtgatttacccctgtcaacacacaaccaacatcaattgatcatggagttacgggaggcaaggccctaccttttgtagatttagccagccatagaggcatcacgggaggtagaccctacccattgtaggtctggtggccatggaggagtagtggttggccaaaaccttcccaacataggtctggctagccaaacacagtagccaggtgtagtcctggccggcgtaggcttgatcctgtacctgggaatggctggccagggtctacggttcaacacgggtctagctgatcttcaccgtacactctcccagggtatgaccagccatcccctatatctttagaatctacaggctccctaaggagggccaattaattaagtctccacaacaacatatccttttgtgtaagcacaggaccaacttggacatgatagctggcccaaagccttcagacattgaacttgatcaatcaaggggaccaccattctcaacatacataaatgccttgcccttgccaaagttcaaaatgttgacatggaagatgtataccggatgagaagacccactggctcacatcaaatactttgagatgcaactcgatctctagaaggttactggtgatgtacactgtcgcatattcctagccacattgtcagagacagctcaacagtggtactttaaactcaccgtgggaagattcaactcttaggccaagttctcatgagaattttacacataattttcatcctcaagacttgtaccatcacagttagaagaccttgtcgaagtcaaacaacgacaagggaaacctttgaaagattacatccagaggtttatggccgaggctaccaaagtcaaaggccttacaaaagaaggtcgttatacggccatactgtggggcatactcccactgagtgatttctagaaagatctacagagaatctccaccaacaacatgaaggagttccttgatagagctggcgtctttatcaaacctaaagaagacatacaacaggcccaggcgggcatgttaacaataggcagtcacaaggcacccagtagcctcatgacccaccaagcgcataggca

SEQ ID NO: 322052 - DNA, 2624 bp, Cannabis indica
tctcgttacaatgtgtataagcagaaagatcgtgtgataattgttgaatacaccgatcgtgggatcatgggataaatgaggaatacactgatcttgagatcatggatatgccatatctctgtaatctgacccctaagttatagggatttcgttgatgactcacagtgcgaaagctgaattcgctaagtgttgatcgttctgtgcggatcgctgattattctgcgtggattgctcacgaggcatcctgttcggattgtgtgtctccgaacagatactcacagttgcttccacgtgtcaccatcgtgtgatgccacgtcataatgcaaaaattgggataacaggtatgatgtgtaaataggcccgatgggtgagttcgatataggtctgatgccctttaattagtgtcccgatggtcaatccgatattacgcctgatgccacttagaattttgatttatatcccatgatcgatgtcatgtctgatggtagtctctgatagtttttgttggaatttattatgtgggctctgatattggtctgatatgggtccgattgttgtgttcgatagttttttgtttgaatatatggggtttgatataggtccaattgtgtccaatgcttgacagatttatggttttttcaagaatttttaacacctttctgttagatttttgttctaaattttaattctatttaaatgtctgtagatgaaaggttcaactgtttttgcattggttatatataatggtccttgggaacttgagggtagagattgggtttataaccgaactgaaaatttgacttttgagattgatacgaatgtaagctactcacgtttagttgatcttttgtacgaagaacttgatgttgacaaagtgcagtattacttaaaattgaaagtgaattacaagtacatgaaaggtctaatgtatcgtcttgaagttattggaaatgataagcatgtaaggttatttttttctatgcttgcgaagaaactagatgaattaactcccttgtttgtgactttggtgaaaaagaatgcctgtccatcatcctagtcccacaccaagtactattaaggatactagtagcgaggttgggagttttattctagaaatgaattcagaggtgttggcggcaactgtggtacctgaattaaacactaggatgccaacaattgacattgtagcacaaatgccctttcatgatagctttggtgatggtttaaacccttaatggtatgttgaaggcaatgatgacgtaagagatgagtaagatacagaggtccctactgatgtagcttggaacttgactccactatcataccaaataccactcaggcaaccgacatagaaaagagtgccacgtagagaaaatcgcccaacacctggtactagtagtagttgttcagatagaactagtaatgctagaggaaccactgatgctagaggaaccaccgatgctagaggtcctagtgatgctagaagaaccagtaaagctagaggggccactgacggtagaggtcctagtgatgctagagggaccaatgatattggatttagcgattcattttctttttcgacaacttacgataaattcaaggagaaaacgtttacatgagaacactttgaggatcatagtcattatatatttatgggtggcacaccaggtggggagttacatctatgaaagtttttttagggacaaagagcatttaaagatggttgtctacttgtatacaatgaagaaagagtttaactactttgttaggaagtaaaaggtgtgaaggtccagaagactacaaaaaaacacaaaaaaatggatgtcagaaattctgtacaaaggcataggaccacaatcgggcttatcgggccctaagaaaacacataaatttaaaaattccatcaatcaagccctatatcggacctatcgggccctcaatcaaacattaaaaatttaagaataattgggccttatatcgggtgctatatcagacctatcgggccccatctaaatatgaaaaattgagatagccattgggcctactatcgggccctatattggtcctattagaccaaacacaaaaacaacattcaacaagacaatattggacctattagggcatatatcagacctatcgggctcacaatctaacataaaattttgaggaaccatcgagcccactatcaggccctatatcggacttatcgagctatcttcttcaaccttcaaacctttcaacattaacataccctcaggccctatatcaggcctgcatcgggccagggaaaaatcacagattctcctccaaaacacaaatccgagcctaataacctgaaaaatcatatattctatactaaaaagcacaaaaaacattggcctaacaataaatctagttgctttcaccctaactcatgaaaaactaagacaattaaagttcaaaattcatgaaaatgattattacctttgacgaagacattgctgatgttgggtggtgtggtcgcggttgttcgtgggtcgtgttgctgtaaggtcgaggtggtctctgagttgtgggtcgtgtgggtggtttgtgtgcgtgtttagagagagagagagagagagagagagagagagagtattgta

SEQ ID NO: 322053 - DNA, 833 bp, Cannabis indica
aaatttttaaaaaatttcaaaataatttataatgcctaaaataaaatttatattactttttttatacgtgttgtaaataactatttaaattttatttttggtattgcaaattatttaaaaaaatttaaaaattttataaaataaatcataaatagttacaacatacacacaatcaaataaaaaattaacttatatatttttgtgtgtcaaaacatgtaaggagctctacagaaagatcctttaaaggtccactaaaaaaattttcttaaatgtatgatttctatctaaaaatgtttgtgattatttaaaattttataaaaataatagtgtgtaattgaaatgtataaataaaaatgttatatatttcattatatacaattgggattaattacatattatagggtatattgaaactgtgtgtagataaaaagatttaagtttgtatccttacacagtacccttccaaactaaataaataaataagtatgcaatatattaccttttttttcttttttttttattttattatttttttatcccggctaactttgatttcaaatcaaagtcaaataacatacacatgatgcactcttaattattttatcattaactactacaatatattcatagttcactaaaaataagtagttcctttttttttcttttcttttaatgtttagttttagtcataattaaaagataatatataagtatgtattttgtcactaatataagtacacccattattttttattgaaactttacagttacatacaattctttccttttttttttttttattttttttttttatttttttttttgtttttaga

SEQ ID NO: 322054 - DNA, 1526 bp, Cannabis indica
ttttacaatacccaaataaaatctaaccattgccgctgtcaatgttataacaaacaataatctccaaactagaagttaatggctactacttacattattcagaccaacgcatgtcagttgatcggcaaagcagatgcccagcataatgaagcacttaattcagagtcaataagcacatcaaaaacctccctcagtttaagaatagcatacacaactatactcttttctcctaaaaattgttctttcatgttcaccaaaagaatccaacaaccctatattggtaattgttggaattaaactcatgtaatctgtcacagtcagtaggtacatttttctcttattagatgaatctggagaaagttgttcttagttataacaattggttttatcatcaacttaaagtgagtcccaccaatagttataaataggtgtgcctctattctcaaagtgatctccaatctcccagtctcataatttagattcagaaacaagtttagagcgagagagaaagtccaagatcatagtgagtgtttgtggagattgtgagacatttcttcgtaataatttactatgttgagttgtcatcttgggcttattcaattgtgtactactgactattcttaatcaataaagatccatcattcattcattctcaagctaagtttattcttgtctaatttcatctaagttctagttttaactttgtgattggttctggtttgaattgtgttttcttgaacattgttactgctgtaacaatcagttttgagggtgatcattcaccacaaatggtatcagagctcagagtttagagttcaagaatcacattcaaccaatcaagattcatcttcaacatttcaagaatcaaactcgaactttcaagaacttggtttgaatggctacagcaaggtttgtggtggacaagttcacttgttccaatgatttcaacctatggagaatcaaaatgaagacttttcttgttcagatctatgaagcactattgatagaagacaggaagagaaaacttagaattgaagccaaggcacatagtgccatcctccttagtcttggtgataaagttttgagggaagtttcagatgaagacaaggccttgagtctctggaacaagttggcttcaatctacatgaagaaatctcttgcaacaagttgtatctcaagaagaagttgtacacacttcaaatggatgagtcaaaggaattgagaaagcatctagttgattataacaaaatcattcttaatttaaataatcttggggtgaaaattgatgatgaagaccaggttgtaatcctgttaagttcacttgcccagatgtatgagtactttgttgatataatcttgtatggcgaagaaactctgaccatgacaaaggataaggctgcattgaatcaaaagaaaggagatgagaaagatgacaccaatggagaaggattactcattgttaagggaaaattccccaagagggaatacaagggaaatcaatactcaaatggctacaaaggtaacca

SEQ ID NO: 322055 - DNA, 1599 bp, Cannabis indica
taaaataatttccaacagtcacacctgatgacagtttttgttgtagtagggtctcggcgccaagtttccttagagcgttgactaggacatggtggaggagtcctgttggctctcttagtattttgaggtccctatacatcaggtggagggcccattggttagagccacgagtttgagtcctttagaactcttgtttgaagtttaattccctttgaggggcgtcaataccttgtatttacttagtacttgcatggtttctagccatggtagttgtgttccatgcattaagggtttctccttgagcactagctcccatgtgactagttggtcgacggggagattctcttaccaactcggaaagacccctgcagggggtagttctacgaccagagtgacaggcttctctaatccgttgagacaagttagctctctcctgctcctactcaactcattggttcttgatgttacgtcaaatttctatgaactcgtattgaaaatgctcgtgttacctgttaatgaatctcacaattattgttaaattagccacagttttgttaagctattcaaccagaggatcggcctcgtcggggtcttccaactccacgtgtggctctctaggtgggatcttctcatcagttccaatactgggagcattcggtggacttggggatgagctatggagctatttctgaggcctcctcgtgggaccttagatgtagtagtctcagtccagctttagtaacttgcgtgcctccagtttgttggccagttgttggggcgcctatgttgagacttgaggagcttgtcgcaaccatattgtaagtgactttgttggttgtggctctcaatgaaagtaccaaaatgttgactcagaaatctggacagagcttcctaagccacacctgctcactaaatagacgagaatgaaatatatgttaagtataaatagagacacataacaacttatagtacttcactccctaaatagcgataataatagagctacgtctactttgagtttttattctcatgagttttctgaatgtctaaaatgaactagaggaaaaatattgaaaaaacacatgtttgctaattttttaccgtagatgatgatctaacggtgaaaataaacttctaatgttgatcgctaatttttggagttcgggtcgcggcagcaagacccgctttgggtaagttgtggcttaaatttgtaactccatcggggtgaaatttgaagttgataacttcagaattgcaattgaagtgggagacttgactggatagagcatttaaatagctttgaaaatcaaattaaatcacgtcaattggatcaatattgagtatgttctggctattttactgaaggatcttgtgggcccaacgcccaggttgacatcccagcacccaagttgacatccagtgcacaggttgtcatgtgacgttatcctagacgctgggtgaattagaatacagactggggatgtattttttgatgcctaagtgatattttgacatcacttagtccattttggaatttttacgaagttggtaaccagttctcagagatgttgctattttgcagaaatgagagactcaaaa

SEQ ID NO: 322056 - DNA, 770 bp, Cannabis indica
aaaacttcgtaactccttccaacatgagactttatcatcacgagcaatcattcccacaccaaacttgcgtacctctttaaaaagagtcgcgtatacattgattttgatactattttttgtgtggtaaaacccaacactcagctccatcacctgtctaaaaagccagatcatgttgactataaaagagagttgagcatttttccattgattaagataacccttcgcaaatctacactctattaatacaagtcaataccaaatattatattatattgtataatattgtacaatacaatatatcccaatataatactatacaatacaatacaacacaacatgttgtaccaaataaatgtatcattaaagatactccttattcgattttcatttgtatttttttaaaagaagattcaaagttagtgtcttatctatatttttattgtttttctttgctaaatataataatgataataattaacgattcgttaggtaggttgtataaaagttgtattgtatttaataataaagaatactatggataaaattttatattgtattaattattaggactataaaatatagtgtaaaatgtattatattatttaatacataagaaatactctgtattagtttatattataacatttggaaaaagtttggatttggaattgtattaattattatgactataaaatataatgtgaatcgtattatttaatacataacaattattttatattatttttgtattataatatttaaaaaaaaaa

SEQ ID NO: 322057 - DNA, 610 bp, Cannabis indica
aaattcgttaaatataaagctattaattgaagaatttttttaaggaataataaagattttaacttttaagttcgttaacttgacttacattacatacaataatatatatttttatacaatatcccatcttaaatattggtccctctagacttatggtttttttttcacttggtataaggatttttttatttttttttaaggaatgaatgctgttatatatgttaaacattattggaagattaaattcgtacgttgcgtgagacttattgtcttaattattagtttttcttcttccaataaaaacgacaatgaagtcacttaaaaatactaattgcggttctctcaaaaaaagggacaataataataataataaaaaaattcttcttggacaaaaatcgcatgcgtaattatcaaacaaatagtgaaaaagaaaaaaaatggtatagagaagattaagtatacgctaattaggatttttactcttaaactttgcaatgtaacaaatcatactccctaacttttaaggtcgttgaaaatacccctgaattatttggatttaaggattttttttatctaattttagtaaaaaattctaacatgaatcaaagtt

SEQ ID NO: 322058 - DNA, 1485 bp, Cannabis indica
gaacttggaattgcactcttagagttatatagagcattctatatgttccacgatatagatatgtcgagtttgagagctgaataacctttcctgccccgggttttgtgctttaggcaatgaaccaactcaaaggctaccaagaggttatcagtaatgagcctattaggtaagaaagagctttgtgtctctgagataacatgaagaaggattgttttgaaccgaatcaccgaggactttgagatgagtttgtagataacattacacaaactaattggccgaaaatctttcattgattttggttttttggtcttgggaatgagagtaatcagtgttttgttgagagcttcaggactacccccttcatttagaacatgaagaaccgcctgtgtgactaagtcgccagcaatatcctaattatgttgatagaataaagcagacattccatcaattccttgactaccatctccattcattgtttttaaagcctcaaaaacattcacagcagtaaaatctctcaagagaaaagcattatgttcagctgttacagtagtaggaatgacattgagaacatgttgtaaggcccaatggtcttcatttggtgcttgaaagagattctcaaaatatgcagcaaccaaaccagccatttcgtgctgtgatctgtagactgagccatcctcatcagttaaaaatttgattttagtattggagtatcttgcagaagctttcgtgtggaaaaactttgtattacgatctcctgattgcaaccaatcaattctggcacgttgctgccagtattgttcttcagtggcaagcaaatcatcaagaacgacttcagtttactgaactggctggttatgtgaatttggttgtgttaaagtgttggaaagggcaatgacagtagcttgtgctgaagagatctgatttttaagatttctaaatttatctctgtgccaagatcgaagagaagaagcacaatttgacaagtttccattcaaaacttcaacgggatttcctgaagaaaggttccagcattgagaaataatgtacgaacactcagctttcataatccacaatttttcaaatctaaacctcgatcgatactgaacaacagagttaatagattgcaaattaatgacactgaggatagctctatggtctaaaccataatagtccaggtgagatacatgtggtgaggccaaactatctttccaaattgtgttgatgatcacccagtcatgacactcttataaagcttgtggattccgtctattttttgcccaagtgaaatctggacccgtatggggaaaagaagagagcataggtcaattgtagttcgaaatgccatcatattgttatcagatcgtaggggaccagaatttttgtgtgagtgtgagaaaatctcattcaagtcacccacaagtaaccaaggatccaatggagaaacatcagcaagtctctctaaaagtgtccatgtgtgctttttat

SEQ ID NO: 322059 - DNA, 527 bp, Cannabis indica
cttacttggaataacgggtgaggggagaaaatgtgctattgcacagtatttattgctaaatcagaaatacattttgaaaaagagaaagcagccattgtcttagactggccaccctccgttatacactttttcactccttttatgtctttactttctttagtgctgacatgaaattcacttcattgcattgcagtgatgatagttttaatgttatctattaattcttaatctagtgaatttgtttgttattgttccttttaaaaagaagaaaaataattaaaacttacgaaagcaaaacttaccccatgtcatcatatcccataactagtgcctcaccctgaaattacaagaaacttaaaaataaattcacctttaatttagcaaagatgagataaataaatagttatccctacctagtccatgtaaataaataattctccagctacttaaatatattcagcacaattgttaaagcatgatgaaattagcaattctataatctttttaaacattaaaaaaaaaaaaaa

SEQ ID NO: 322060 - DNA, 514 bp, Cannabis indica
catgccagcaaggcatcctgcttggcctatcttcccgagcagatgttccaagtggactgcacgtgtcaccattcccgtgatgccacgtcagagtgcaaaatttgagataacagtttaataaatgtggagcctaccaactaaaataataatattgtaataaatgtgggacctaccagattttaaaagttaagttagttgaaaaataaaataaaaggaaactgtgtattgttaatggagtctaataaaataacatcatatttaatataaaattaaactagttgagttggccaaatttaatttgtttaacatactataggatacaattttctaacagaggatcttgattcgaactttctctgaacaaattaaggtgtaagtcgtcctttatagtgcaacgaacttttttataattattttgtttttttattaattttgctaagaggagtgctaccgtcaaccttctgttacaacctattagtcaattttcacgctcgaaaacacatgttggaatatt

SEQ ID NO: 322061 - DNA, 1373 bp, Cannabis indica
ctttcagctgaaattgataaaaaggtttcaatatagatgtataagagaatgtaaatgaccatttaccgaggcaacaacaaggcacgagtaataccttctgaattctcgcttttctttctgttttcaatttgagaatggtcagttccaacccttccaatgtgctattgctgatgttcgtcgactgttctatgctcgtcccatgcaagctcggatgcacctcacttacagtttgcccaaaatccaaattaagcaccgcacagagagaatggacctcattgacatgctccaaaaccttgtgaagacgatcagactgtccaaagaacagttcatacacgttatcagaatatataaaagataatcagaactaactcggctatcacaagcatctaatgtaaaaatatactgactcagagtatgctcaatctcaatgctgcaatgtgctttaaaagaatatagtgcgagtatacagaaaaattaagagtttcggctttttgctcaaatttccaattgacaatctatcaaaattaggttcagaattcgaaatatgtaaatttcctatcgaattggaataatgagatgacaaactaaccccaaaagtaagggaagaagtacattgtcagggtagctatgaatgaatgaggattatcattttgtatcactaagataattaccttttccttttgaagactacgaagatgagtttgaaattcggttagctttcttagagataaatcttgttcatccaaggataatgaaccgattgctgtattgtcgatatgactgtatccagaaatctctccactgatcttctcaatttgtgtctttatatctgaaaattgcttcatcctttcctcctttttcatttttagatcttccaccagtggcgccacagatgaaagtttttcttttaatgatttcgacctcttctctgcctgaatctgtaaatattatatgaggttaaaactatgattctcaggctcaccaatacataaagaaaatgaagcttatgaggttaccacttacattcagccatagttacagtgcaacccataatgacaaaccgaaaaaaaatatactatttacccaaccagaaaatgtaggtaagaaaaagaataacaacccctatggagcttgagcaccaagtatataggtttagggaaaaaaaaacaagtgaaacagattgcgatagttgggaattcaagaaacccgaatctagcaaaactgggacaatgagtgaattatctaacaaggaagatgaggatctaagaagactgaaattatgttagttagaattgagaaataaaatgtcttcaagacggctcatcaatacaatagcgattccagtttttcaggtagatgaataatttcggtta

SEQ ID NO: 322062 - DNA, 1194 bp, Cannabis indica
aataaattttaaaatacataaaaataaatggaacaaaaaaatcattaaattatttctcatgttactttggaatgatctttcctcccattttaaactaaaatagtcattccaccacaatagtataaaggacattccattagaatgatattttaatactttaaaatacaaccaaacaaacaaaaggaatgaaaattatctcctctccatttcattctattttattacctctaatcaaacaccacccagtgtaatgcaattgaaagtttgaaataactaaaacaacaacaaaactaagtaataaaaggaacaaaatatcataaaaataaatatacaaaacaaccaaatgctataaattcaacaaaaaaaatccagcaaaaatataattaatatatgtatttctttattgtacaaatatatataaataatttttaattgttgtgattggtcactaagtgaggaaacaaatgcatttggctcaaccccataactaccaactgtcagttatgacagttatgatcgggctcaaccaacacagattatttatagccatctgccattgctactttgacacagaattgagggagagatttcagaggtttcatgagttagtttagtgtgcaagaaagagagaaactgagattgttgtattggcctatggtgtgattaatcacagtgtcattagtgaggttgattgtaaatgaagctatgcttcttgagtgattgtgtcaagaacacattggtgatcaacatttataattctttcttctagctcaataaaatttgaatccattggggttgttctggctgaggagtaggcaagtgattcatcatcactttgtttgaacttcgtaatttcttgtgtttgattctctccactttcttatctaaattgttcattgttcattagttttgcatcaggtttttcttactagtttgctactagtttaatcaatctgttttgtgcattatcaacttgtattattcttgatcaattgtttgtgttggtttatgcatgaggtacatgatcaggcattgatcatatctaatggtatcagagctcaatcgagaggcatcctcaaagaattaaatcaagaacatcaagaaaggaacaagaactgatctgcaatgacttctacacgatttgaagctgataaattcaatggcaccaatgactttggtctgtggaggatcaaa

SEQ ID NO: 322063 - DNA, 610 bp, Cannabis indica
atctaaatcctggtaaaatattcccaacaactgccctcagagccatggtaatgatttactttcatgaaatacggatttaaaacaatgaatattgtttgtgtgttgatttggatgtgttcatgttggtttatgtgattatttgatgaatgtatgtaattacgaaatttttccatcaaaataattttattttctttctgaaaatattttatttggattccttgtgaaaaattaagcagctttggtttttacggaactcgatttcgataaaggttgacaaagttatgaaaggttaaaaatcgagtgcacagtgctcaatcgcacacaccagaccttggacaaggaagtgatgcgcacgcggacaggggacacactcgtgtctgaagctccagtgtctctcgttcagacaacgcctgcccacgtttctcgcacacgaaggctgcattgcagcctcctgcgtgcgcggacgaggttgacagcagcttcctgcgcgcgcaaatgaggctgcacgtagcctttgtgcccagcaagcgtgttattcacccaattttgcaagttttgtgggatttttcctcaaattttgaattttacaattttcaaaccctaatttcaa

SEQ ID NO: 322064 - DNA, 1597 bp, Cannabis indica
tagcatcaccccagccacgtgccttaccccaaacgtggttttctaaaagtgggtggtctttgagaatccattggttctttcccaggatgatgtaaggtctcatcaggatgacttccatcattttgagtgtcaacagccatagatagattgtttgtatataaggagggatttattctgagttttatcacgtaggctctcaatgaaagtaccaaactattaacccatatttttgtaaaccaataattagcctttttcgtaataaatttaacacatgaattatatgaaattaataaagtataataagtataataagaacactcgatatttttacatggttttacagttaaatctgcatactccccgagtccatcttattcaagatatttctgactatttaatacaatatacaattgatagtatttctgtatttctttcaaagattttttgtccccttctttgtgggattctatccctatttaaaggattataggttggcagttattttacatttaaattcaaatagtaaccatttaatgaaacatgataattcccacgtttcattttgaccacgtgggggataacaataagtaaatgcataaccgtggctattcttatcctttaggatggtcaatgctgatctcagtagcctctcgcttaacctataaatggttaaagttgatttagacaattacatgccttccagcaatggcatgagcaccagtgtactgagcaaccttaagaactgctctttgaccataaggccttgcaaattggacaatcacatcttgcagatttactagttgttatcattagctattgtaatgtggaaaatatgctaagtgttgattcgcttcgtcaagtttctcatgaatagcgaggtggacatctcactatatgtagcccgaggttgctttgcataacttcatttattccttcaacataaatgaatcacctccttggatttgtattcttcgacaccaacttgtgtacttcgaggaaagcttctacctcgtcaatataggttttaatagttttgtatcattgtctcgcttaagactatacagtcagcgagttaagaatattttctattaatcctttatttaatgagttataactttccttacatagtataaatttattataccaggtggttcaaattacactacttgagacgtgtcatcctctaaagtgtagctaaattttgggtatgacactttatagtagaaaaatagagtttacccaaaaatccctattagttaagtttgaatatcttatatattcattcatagtgaagtaggttctgtgaaaaatatactgtggcccaatgcgtgacaaaaattaacatttaaactgttttggtattgtgtctctgatttttgtgtaggttttaaacatttgggaatgatcaatgttacgttgttgaatttttggtagcataagattttcaatttgattattattcactttaaatttatattaaaattaaattttgttataaaaaagtagtttgaatatcactaatattatatgtatcataataagttaaatttaaaaaatgtaaatgttatcccaagtttggcactctgacgtggcatca

SEQ ID NO: 322065 - DNA, 768 bp, Cannabis indica
ctgatttagagatctagggagaaaggcatagttgatagtattgcactatcaaattgagctaattgctatggaccaatcagatacgtatgtctaactattatctattattattattgtgctctagattatatgtaaattttgtatttcgtgttattttgattttgtaacatgtcgatcaataactggatatgtatttatgcttaaaatatggagtagtatcttggtatagtaaaaagaaaccaacaatatccttaacaaccacagaaagagagcatagagcagcaacagtggcgactgaaaagagtacatggttgatgcaactgatgaatgatctacaccaatctattgtgataatcattctgctattcgtctagcacaatatcaagtgttccatgcacgagtaaaacatgtaaggtgtattattattttctaagagaaaaggtactccaagagaagctaaagatgcaccaggtgaagagtgaaagccaaatagcaatttttttttacaaaaagactctacactgcaagatttagaaactcagaaagcaactcaatatgaagtgtgattgttgaggaagagtatttaaagtcaacacaaaccctttttaaatattcaagaacaatcaagatatactgaaatagatgaaagtattttttagtaggggtgttcattggatcacatccaatggatttggacctatccgatccaatccaattatttattggatattggatttttccatctgatccaatccaattgaattgagt

SEQ ID NO: 322066 - DNA, 1829 bp, Cannabis indica
agtaacattttgttgtgactaatttattatatttagtcacaaaaaaataatgttgtgactaaaaaattagtcaccaaaaataacaatttttttatagtgtaaaaatgatatagaatagatatataaaataaaatattatatatttgaatatatgatatagacattgttgacgtgtgttaagatcagtgtcactgtggagtttgttttaaggtgcatggagaaatattaaaaggtatcgggcactattacattgttattagtaaaatctagtatggtgtctcacataatttaattaatgaataattttagggcagtcgtaatacatgggtagagtgttagcatttttacaaaaatattagattttgagcaaaaatttataattttactgccaaatagaatttttacaaacatactgtttttttataaaacaacataaagcaacaataaaaaaatagaataattaaaaataacagtagaacaattaaaaaataatcatagaacatcagtaaaaatttaacacgatacaaacgagagcagaggcagaaaaaaataccaagggggccaactaatataccaagggaaattagtcatgttgatattttcatacaattataaaataaagttttaattcaaaattatgttagataattagacaaaacaaaatacttacaaaaaccatacactcaatgagtgataataatatatcctaataaaaaaatctttttttagtacatcataaaaatattttataatcttaatttttgagtaccaaagacacaaactctaatatacatagaaatatatattatcgtggaattgccgaggtattcgtagaaccccggcgactcaagctctccaagcttgggttaggatacacaagccgaaatgcgtgttcttaatagagacaaaggtgaatgaagaagagggcaaatcaatagagaagcttattggttttccgcactcgatgtcaatccctgctgttggaactgctggcggcttcatgctgttatggaaccaagacattaaacttaaggttagtgactcctcaaatggaatattttcggccataatctttgatcctttaaatggctttaagtggatgttatacactgtatgcggtaggccttacgaggccgaaaaaaaagtttaaaaaagtgttttgggacaacctcacggataaaatcaacctatgtcatctgccgtggctcttggttgctgatctcaacctcatcgctcacccatgggagaagaggggggaagaaatgttcgctatcaagacactctcacccttcaaaatttcatgttgaattcgggcatcgtcgatcttggcttcaagggctgccaattcacttggcaaaacaatcgattcaacggggatatcaccagggagagattcactacaagaaaaattaaaattaccggcggaatcattaccggcggagcttgcccgcctctaataataagagtattaccggcggagtacgtatttcaatggtaatatttactaaaaataataaaattaattcaatattagtattaccggcgggctttttattattaccggcggaaagcccgctgctaattgaatgtgcgggaaaattcccgcttttttaatttgaattagtattaccggcggattattagcagcggaggtccgccggtaatacattattttattatttttatacttattaccggcggaaacaattaataccggcggagccccaccggtaatattaaaattgctttgtctttattctggctcattactggcccaatgggcttccttattactatgtatatatatacacttctttgtacaaaaccct

SEQ ID NO: 322067 - DNA, 1312 bp, Cannabis indica
acttacgtatactaggggtacgcaggtgttttcctattagaagctaccttggtacttatacatgctgcaatagaagaatctaagtaccattactggtctgtatgtagaggaggagtgattcaagtactgttttgtctcacttggtgcatgtagaagggggtttactttctcttgtcctgtgataagtatcgacgatacattcttgaagatgaagtatggtgacataatattagttattgtagcatacgatgcaaacaattatttctgattgcttttggaatagttgacaatgttaataataactcttggatatatttcttgtagaagttgagggaagcaattgggtggttgagaacttagtgtttgtgtcagatatacatcaaatcataaaccatgttatagcacttattttacctgaaacatgccactgggcatgttatcacgatattgttatgaacgtgcacgccaagttcaaaattgatgcatgtcataagcaaatatggtttgtagcttactcgtggtcgaagactgattgtgatagacagtttgagaaacttagatagatagatcctgccattattgtatatgttgagattatcgagtttgaaaaatgggtttgtccttattatttaggcgattgttacaacataacgaccaacagcgttgtcgaaagcttcaatagtgtgatagaagaattcataaaacatccaataactattttggttgaatttatcaagtttgtattgcaaacttggttcgttgatcgccttaaaaaggcagacaaatatgcaattcctttaccgacccttttttgaaaatgatttggcaagataacataatgatgtgaggttcaaaagcctccaacgaaatagaatcattttgtttaacgttggtgggggtcctactaatgaaagaggatgttatgtgaacctagttgaaaggttatgaacatgcaatgtgtttacattgctgaaaattccttacactcatgcatgtgccgcggcattaaaaataaatgtgactgtgtgcgctctatgctctctgtattattcaaaagatacatggaggaagacttacgataatacaattaatcttgttggtgacgaggataattggaagagcaaggttggaagatgacgagagaaacgtttcccttctggtgatataaaagtaatgcaatctcaaaattgtggcaattgtgacgtttcgggccacaatagagctacatgcaaagcctgtatttgaggcttagtctaatattacttgtaataatatgtattgtgaaccgtatttggtcatattgttttttttt

SEQ ID NO: 322068 - DNA, 1512 bp, Cannabis indica
gatctttatgataaatggcatgttaatgaagacaacttttatttatattggtccttgtcatatataatctattatatatagcacattcactttgatgtcatactacatccataattcgaaccaagattacttgcatcgaagaacaagcattagtgaaccatactagcaaccgttgattaaagattccataactttaatattttactaactattttattcataggtaagtggtcttagttctttgtacagctacaagccgcggtctcatatatgaataagaaattttcagatacttaatataaattattcaataataatattaataacttaactattaaacatatatcaaatatttaattcattatttaataatcaaaaaatgtctttacagacttttaagggcataaaccctaacaatctcccactttccctaaaagtaaacatggcatctcccttagttccatattaataatatgacccataaaagattttgttggtagcgtctttatgaatggatccgctaggctatgtttcgatgctatctttaagaccatcacatcacctctctctactatattccttagtcgatggtacttcctctcaatatgctttcctatcttgtggctccttagttccatggagttggtcactgctccactattacttctagaactacttccagaatagagtagaatgtcttcagctaaactgcttccagagcagtgtagaattgcttcacaagctgctacatatttggcttccatggttgaatctgtaatactagtttgcttgatgcttatccaggctacaactccaccaagagtaaatactgacccagatgtcgacttttgactatctttatctgattcaaaattagaatcagtatatctaataggatttaactctccacaagaatatataagcatgagatctctcgttctccgaggattcttgagaatatgctttacagcaatccagtgttacaaatctggtttagattgataacggctaagaatccctacagtgtagcatatgtcaggccttgtacacaacattacatacattaagctcccaaatgctgatgcataacgggactttctcatgttctcttcgacttaaggaaactttggacattgatccttacattgaataactccatatctggatggtaattgtcctttcttagaattatccattgagaatctttctagcaccttattaatataagttgcttgagaaagtgctaatgttctccacttcctatctctacatattttgatcttgagaacatagcttgcttctctcaaattcttgatttggaatttatcggctagccacttctttacatctgataacctttctacattgtttccaataagtagaatgtcatcaatacaaagaactaggaataccactacattaccttgaaagtatttgtatacacaggctttgtcttcatttttcttaaagccatactctttaatagtcatattaaaggtgatattccaagat

SEQ ID NO: 322069 - DNA, 1197 bp, Cannabis indica
aaaaaagacttggcacgaaacatctatctagtataattaaaaaaataaaaccaagtaacaaaaaaataatttttaatattttattaattaataaataaaggtttcattaaaatgagttttatttatgtaataaaatttaaacaaaattttatttatattgaaatgagtcttaacttttatcaactgtgacgtcaaggttagtagcgaccaatgtgtgtggtggctttggctatggatcataaggagtcaattttgtgggttgcttgcaatatcctcagcttttttgattcgcttattggagaagttgtggcttgcctattggccctagaatcagcggttatagggaagctttcttttgtgatcgttgagagtgattctgaaacggtgatcaatactctgaaggaattctcttctaattggggtattactaattttgtaactcagcgtaaaaagctctcgaccgttttagttggttgtaatttttcttttatttctaaaagttgtaattatgctactcataatgtggctaattgtgcttttaactgtaaggtgacgggtatggtggatctatcctccatccctagaaacttattttgtaataaccgcgaagtgtaaattttttttgttgtttaatatatctacgcttttttttaaaaaaaaaaattgagtcttcacttatattgaacacccaaccacacttttatatattttttttttgtatatgcatatatttttgtaaagtatattgtgtaaatctaaattgattttaattacactttacactgtttgtaaaaatttactgtgggctggaccaaacttgcgtaacgggttacaattggattattctccagaagagaagaatattcctattcccaggaatggtaaaactcccaactttgtcaaacctcaaaaaactaagggcccgtttggttggtggtaatgggccagaaaggaatggaatggaatactaatgggcctgattattttgtttggttgaaaaataacaattttggaatagaattccatagtaatgctattcctccaaactaatggaattgctattccattttttatttggtggaattataattccattccagcatatatctctcctccatggcccaagcccaacaaaccctaaccctagaaaaactgaagattaaccattgtgaccatcttcttcctcttcttcgatcg

SEQ ID NO: 322070 - DNA, 500 bp, Cannabis indica
atatataaaatatagctatgtaattcttagtttaacaaattttgttggcttaatattttttttttctatgttaaagttaacaatgttaccttcacgttaacttaacaaaaaagtgaataaataaataggaacaatcaaaccaaaactcctcttttgttgaaaaaaaaaaattgaaacccctcttttgtcgctctttagtcttcacccaatctgcatatatttaattaagtattagatgcatttacaagtaactttaacttataacttattatatacatgttgtaatttcagtgaaattttacaaatttttgggtgagaagaaagtgtatgagtgttgttgtgataaatctaatacgcaagtatacgaatcattttaacaagtaatactcaggtaagtgagaacgttcccacggggactgtagttaagtacctgttatcccaaattttgcactctgacgtggcatcacgggaatggtgacacgtggagtccacttggaaca

SEQ ID NO: 322071 - DNA, 2145 bp, Cannabis indica
attgtaaagagttttattcagggcataaaacccaacatatcacacttactctttgctgatgatcgcttgcttttctgctatgccgatgagagttcatgcctctctattaagcgtgttttggacatttatcaacctgcttctggtcaagctctcaacgctgaaaaatcgatcatgtcattctctccaaatacaactctagcagcccaaattttcttccacagaacgctctcgatgccaatcacggagtgtcatgaaaaataccttgggttatcggcatactctgggcgagacaagcaacaaatgttcagcaatgtaaaggaaaaagtttggaggttaatgaacacttggaatgaaaagattttctcggctgggggcaaagaaatacttctcaaagcggttgtacaatcaatcccaacgtatgccatgagctgctttcgcttacccctaatggtttgtcaaaatttagaatcgatgatgtcgaacttttggtggggttgaactgaaaatggttctggcattcactggtgcaactggaaaatgatctgcaaaaccaaagctgaaggtggaatgggtttccgatcttttgagcaattcaatcaagctctacttgctaaacaagcctggagacttattgataacccctcctctatgctcagcagaattttaaagagccgatactttcctttcaactcctttcaagaggcctctcatggacactcccattctttatcctggcaggggatcttatatggtcggaaattgcttttatctggtctgcgatggaagataggagagggaaggaatatccattgtgggacggatccatggatacctggtaataatttttttctccctttcctttataagggacctgatgatgcggttgtagctaatctaataactgaagaccggcagtggaacactgagcttttaaatcaatacttcattcatgctgatgttgagcgcatccttaccattcctttaagttattttccatgtaatgatcgcttgatttggcaacacaacaacaacggttcctatacagtgcaatcaggctaccatttggctacttctctagctgaacaatctcattcctctagctccacttcagattcggcttggtggaaatcgttttggtcgttacagctgccagagaagatcaagattttcgcttggcgagtcattcatgatgccctccctgtggcaacttcccttgtcaaacgaaaaatcatcacagatgccacttgctcagtttgtagacaggcgtgggaatccattgggcatatatttttcggctgtccctatgctaaagctgtatggcgttcttcataacacacttttgactggcataaggcaatttcaatgtatgaaggtgattatttgaagcatttatcctccatccacactaaacctgaactggagcaaattatatgcaatctgtggtgcatatggactgaaagaaaccaggtagttcacggcaaaaaggcaaaatctgcaacatctcttgctgccttctctctgcaatatctggatcattatcgagctgctcaacataaataccggcctactgcaataatttcacagcagccgtcttcatcagcccctgaccgcactccttggcagccacctcctacaggttcttttaaacaatattgatgctgctcttgataagagtagctccaaatttggggtaggtgcggttatctgagactctttgaaatatgttattgcagctttttcaatgcctcttgttggtcactttgcctcacacgagatggaagccaaagccatgtttcacggcctcaactgggcacttgaacaacagctacaagtctctatagttgaaacaaatgcattattggtttcaaatgctttgtagtcaagaacagtgggcatttcagcttttcatgatttaattaatgatgtttcttgcctcatttcctttttccctaatatatctgtaacacatgttaaacatgatgctaattcagttgcagatagtttggcaaagtttgccttagggttggatgaggcttatttttggtgggagaattttcctcctactatttactttgttattgtaaatgactatctttaatttataataacaaagttttatcttaaaaaaaaaaaacaagaacccaa

SEQ ID NO: 322072 - DNA, 755 bp, Cannabis indica
ataatttaatgtgatagttaaatatactaataaaataatagaaatgacataaatatagatgaaaaaatagtgcatttattgtggtataaattttacattatagcaaatgttgtgccaaatttggcacaaaatttgctatgtgtcaatttatattactttttaacacactattgaagtatactttttgttaaataagctatattttagctttttaccgtttatttacacctctatttgagatgttaaaatcacctataccaatagatatcctaataatgagacaaaatcatcaatttgggtgtaataactttccctgcaatttttttttcagaaaattaagtctgtaatattataaaattacttttaaaaaaaatacactactttatcacccgacttcatttttcagctataaaaaggataaaagttgcatgtaactaaaattttgcatatatccaaaaacaagatcaagataaagtactcttcgatcttttatatactaaccatttctttgtgtaaaagtgaaactaattatggataatcaatatgtttttttctttcttctttaagacatgtatatatacagtagaacctctatttaagaatactctattcaagaataacttctaatttgttataaaaaaatcaagtcccgatttgggccagttataaaataagaataacctctaaattgtaattatatatattttttaagtctcgtattaacaaagtatacctctatataagaataattacat

SEQ ID NO: 322073 - DNA, 790 bp, Cannabis indica
tttttcaaaaaaaatatatataattattgtatttaggataagagctttattttccatttatagtattttttaagggttaagtttagatatttaaaatagattaaaaagataaaataatcatttcctttttgaaaccccatagccgaaccctatagacgccaaatgagttttaaaaatatcattttatgtcttgacttatgttttctcaaaaatactatttttctagttctaaacctttaattttgtctatttaataattatgacaaattatcaaataaaattaccattaacttacttattaataagactttttaaaatctcttaattaacaaataaaccctaaatctctttttattctcaaattttcctttgcttaatggaactcataaacaagacataatcttatttagaatcctaattgattaattaaaaccaattaattgagtcttagtatgatctcaagtagtgtgaggacctgagcctatataatcaaactctcaatatgtagttctagatttttctgagtaaattctctatcttatcaattcatcctaacttcactatagattcataattgcactcttgattatacataacgctctaccaagaatagttacgctataaattatccattgtttcaatctaaacaatcaaatatcttctatagatagtttacactgaataagaactaaattatcgttgtacccttctatgtattttatccttaaaatacttggctgcttataaataatatttcaaaaaactaatataattactgaaatgaggcctc

SEQ ID NO: 322074 - DNA, 1313 bp, Cannabis indica
attgcataccctcactactcccttactcacttatatatactattgcattccctcctaaacactacccccaatacaaagactcaaatacctttttatttaatatatgctagcccaccatattaatcctagggcctaatattatcggtcgcccgaagttcaccttgtcctcaaggcgattgatgaaatcacccatgagagccccatgttgtgcgcgacctctgtcaacgaactaggctagtaatgtggtattttgtgatgtcctggatgcacagtcagaatgttggtgttgtatttggcgccctctatcgaaaatccaactctggaatggcattagtaaactacaaaacttccactttgaaacagtttgtgatgtccccaataccagaaaatagagccaaggaaacttgaatagctctcccacagcaataccagcaagaacaaatctgtcacctatggttttgttagagttgatggaccgtaagtcgcatgtcaaagcttcctttaatccataacaccccgtccagctagttacgtaagcaaactccaaccaagtgaccaccaaaaatttctttgaaatgcagaaaactcgacccagatcccacacatgaaagaaccaaatagttatggaacttacaaattttgattggtcgatagaagggaaaactcgagaaaaatgaagttgtttctttccatggctagaatcacggtagctgtcgctgccatgtgcgacactagaaaaaaagtgttcaagtttgagcttgggtccttccatccatggtagatgatgatggtaagagaaggtacctggaaagactccatgtcgtgatagaaagatgaagagggaataggaaaatgggccatcatattgggttgtacctttcttgcgtccaaaagggaagattcattaattgaaaaaaagtagaaattatactatatatataagaaaattataagagtttacttttttatggcataaataaataatgataaagggttatgtatttttttttttttttttacattttatatggatttttttttgccatatttttgtaaaaaaaaaaaagatggaaatcccatatttgtaaacaataataagttttgttggaaaagtcgccagaaaagttaccggcaccggaaaagtggccaaaaaagttagtgtcctcgaaaaaatcaccagaaaaatcattgtcgctgaaaaagtcatcgtcgccagtaaaagtcaccataagtagatgtctcaaatataaacaaaaatagaattggttctataacatgatgaatgcaaataaataactcaaacaagttataac

SEQ ID NO: 322075 - DNA, 665 bp, Cannabis indica
tatgtcattatggtcttccatataagatcgtgtctgataacagaaaaaacaattcgatagtcatcaattcactgaattctgtaccaaacatgggattatcaaaagctttttggttgtggccaggtcacaagtaaatagacaagtggaggtcgtcaacaagatctttaaaaccacattgaagaagaaattgtaggtctacaaagcacattggttggaagagcttcctagagttctttgggcatactagacaacaaaaagaactccaacatggcacactccatagtctatggtgtacggttttgaggtcagtggaaaccaccataccatctcttaggtgagaaacctacagtcctacccgaaaaccatgcttcatttcaagaattaatggatttgatcgaagaactccaatagtaatcctatacactcctcacacacacacacgacaacccttccccacacacacacggcttgcatgcgagcccccatacactcgcaccaatacacacatatagaataacactcacacacacccatggctcacatgcgagaatcctacttacaccaacacccccacccacacccatgcacacaacgctcatctacacatgtacaacctctccttcttacgctggtgctttctgttgggaattattttaccaggatct

SEQ ID NO: 322076 - DNA, 805 bp, Cannabis indica
taagttagcagttcgtacgtttttatctcgtagaagcctattcagccagccgagttataaatataccctgcgaattatatttccaacgagttgttccatgctaagtatacttttttgtttgcgtgtttgagttcttcgttcttcccagctcgacacgtgtcttcctctgatgtgcttaccgaatttcgggtataacagtttacaataaaaaataatattcaaatattttgttgcacatgtgaatgttttttcttatacgtgcagtaagtaattgtttgattttctcattatatactatttagaattttctgaaaatttataggtggccataaataactacaacatacatgatcataaaagatacttagactaaaaaactttttcagacactgaaacagataatgggatctactagattacctatttagggggtgtattaaaaattttctctaagatattttccttgtttttttaatgattactggttaaaaatttaatagtatatatcgtaggaagtttttacggtacattccctaaaaaatgatgtactcatgctacccctttttaatttttttctttccatgatcatgtatgtagtagttgtttaaaatattttgcaaaactttgacaaatttataataatgtagattataaaaagcagtatttaaattgtctataatgccaactttaaatgtttgttcttgtatttccagtataataataaaatacgtattttgtaacttgcactataattaagatgtaaaaattaaattatataaatttttgttataattatttgtgaaat

SEQ ID NO: 322077 - DNA, 645 bp, Cannabis indica
atttagataaaactatttcagtagatcgaataaaaaaagcatatcacagaataaaaaaaactttgtaacaaacaaaagtcatgttgttcgcttctcattttgtttgggtacacccaaaagaataaaaaaaaattttaaaaaaataaaaatttgtaagtataaagtaaccctagtgccacttttctctctcttggaaacctagcatcataggggatctcttttctaatctctcagtccgaacaagcccgccggcccctcctgggcttaggtgtggctttggttgggtattccgatcgatactttagggtgggcttgacagatcgattatcctctcactatctctcccatttctccaagttttccttggtttgtcggtgagttgggtctgatctctggtcccatgtagatttgatcgacagtaggtgtcttcgctctagtttggttctatgggggtggcgtggtggctatgagttgggctagttttgaattctggcatggggtttggttagtattaggtcatgtgttgtcggtgtcttgggattcttggtgtgatgttgggctttgggcacagtaggggtggttggtagtaggctgagccttgtggatctgtggtaaaaattcctcatcatcttctcagtttaggag

SEQ ID NO: 322078 - DNA, 1473 bp, Cannabis indica
tgttctatgttatatacaaatagatcttgggttaattgttaatttatctaacatataatttatttatgaatatgagttaggtaaatgaaatcaaaagaatgagttgtttttttttccttttcttcttccaaaccaaaaaaaaaaacaaaaaattgtgaaaatgagatggaatttaatttaaagttagttgttacttggaataaattaaaaccattattctttttaatcaaaccaactgaagtgatagtgatttaataaatgcacatgactgtttttaaactctcaaaaccaataaaaatagacaatattaatattaataataaattcatcataagtagacaaatgggttttaaaatttattccttgtatgaattattaaagctgaaaaaaatgcattgaattgataaatatgggcagaaaaagatgaaaggttttaaagaagagaagaacagtatagaggcaaaggcaaggttaaggaagggttgtccttattcacatatcaaaatcctatattgggaaccaggttaatatcctgttcccattttgggacacttttattggaacatatatatattggctttttgtttcaaattaataagattccactgttgtgttaaattacatttttaccctcactctctctttctttccccctcttttgattcccgcctcctcaccggttcacctgctctacctgtcattctcagctttttttcccggttattacagcaataccgcaccttattattattattattataaaaaataaattaaattgatcgtaattccaaacatttcacaaataaccctgaattatcaattattcactaatttgtggagaattttgataaactccgtatctgtctacactcgaaaaaatattttagtctaatttttttataattatttaaaattatttgtaaattttttagaaaattttaataatttataatattgaaattttttttatataatttattatgtgtgcgatttttttatatataaagatagtaagtaattgtttaaacgttatttttcagtattataaattatttaaaatttttaaaagaattacaagtgattctaactaactacaacgtacataatcatcataaaaataagttaaaaaaattttctagctaacaaaataaatagaaaatctaccaaaacaatagaatcttctacagaaatttataatatcatatacaccaacaatttaacttgacaattttttaacaatttatattttattttatataagacctactgtttaaatgttatgtgtaatattttgatatacatcttattattttttttttttaaaaaggttgcatttattaatttttgaatttgggttgcttttatagatttatcatctccttccataaatatatttattttatttggtcaatatttattaatttaattaattaacttcaatactttgtgttgagaaaaaaaaggaaaatcttg

SEQ ID NO: 322079 - DNA, 808 bp, Cannabis indica
tcctcagcttaccgcctgctttcaggcttgtacattttttatgttgccaagagctgggcttcgcccaatctggctgaaattatttacttttacgaactcttatccgtccccaaaaaaggagacaaactcaaggatggccatcgatttttagaagaatattaaggaatatcgccatcgatttttcttctccttcggcttcaaagccattgagcgcctggagctgcttactgagtgggttagggtcccccctatgcatcgcactgcccctactcaactcttccttcaacacaccaaggtcttctccacctatgacaaagacgggttgaatgtaggggacttggtcacgactgcgaattgcaggagggctaagttaatttcagagagccagtctgtggacgactttaatttatccaaggctctctgccccaacattcgtaaccccgaatatgagaaggcactccggaatgacatcactgttttgtcgaggacaagtacaagaaatatcttttcaagagtgaacaatagttagcttacactaaggcccaagctgcctcagggagggtccttccaattgaggctggaaaagaacaggcgacctcccagcccaagtttctgttcccagttcctaacactggagctccagatgcaagcacttccggagctggtaagtccccactgattatccatcatgttccttccgttcaagattattcaaattgtaggccagttgtgacagtcagtagtcccgtgatccgtaaggggaaacaccgggtaagctgtgcaatcccacaccgcctgggaaaggtca

SEQ ID NO: 322080 - DNA, 733 bp, Cannabis indica
caatcacaatctcaaaaaaaaaccaaaatataaaaaaaaaaaaaagaatagtcaacagtagcattaattaaaaaagtgaagaaccccacaataactgggtttgatttttgttagacgagatcgacctctcaatacagcttcttctacccaaaaaatctctctatatttataaatatgtcctggaaaatataatggtatggactaaaaaaatattattcgttctcagtgtcatactgttagtagtataattaaatattaaattttatttaatttaaaaaaatagatttaaaaaatatcgtcaactaattatgaaaaattatttataaaaaaatactaagcattactgatacttaatagcaatattttattatcaaatacacaatgtactaataagtattactaataagcatttgatgatgaatatccataaatgaatggtcaagatcaatgagttggcagatcacatgcacgctttcaaattgtatgggtttgtgggtacgttgcaaatgacgtttgaactgatcacatcattctctaatcaccattttatctattgtggtgcctatcacactgtatcaacttaacactttatagatatagatattaatttagagtaagtttatggtatatcacaattgtttcagtaaaatttctatctatttcggtaaataatcatgatcacatatatatatattatatagttatttagaattatttgaaatttttcaaaatt

SEQ ID NO: 322081 - DNA, 1133 bp, Cannabis indica
caaaaaaaaaaaaaaagaattacggaaacaaatataacatcaaacccaatccccagttgagtttgaggatgaagaaagttagttattttttcatcactatgttaggactgtaaggccctaagataaatatggtgtgctagaatataataaatagaaaagtatatgagtctttaggagggtagttttgactgaggaattactatagaggggaaaattaaaggggcataaggagctttaatcctatattcaatataattttctactattttgctactgtttaattggttttattgagcttgaattacttagttctcatcacactattatccaaaactactggtgtggacaacatttatacattttatgtgctttttattaccaaaatatctatatgtgtgatactatgtttaataaggtggggacaacatttatacatttaatgtgcttttcattaccaaaatatctcttacaatatcacttacacaatcagaaaatggttgtagggtaattgctcggtggttggccgaaggttgtatcaaatgaaagtttcaatcagacgaaggttgtgggtgattggccgaagattgcatcagacaaaggcttcaatcagatgaaagttgcagggtagttggccgaaggttgcatcagacgaagatttcaatcagacgaaataattgttagccaaatgtttatacaactattatcaaacactaaaaatcagaacagtgtttccacgtatgtaactcgatttacatgtctcttcatgatttaatgtgaacaaacactactacaaatattagaattcgagacggtcctaaaaaaattatttttttaggcgaccgtctctaaaaaattaactatttaaaagcgtcgggaaaaatgtagtattccaaacgatttaatatcgtagtaaaccaaataggcgacgtgttttaaaaaaaatgtaaatttttaggagagcttataccaaacagtttaaaaccgtcgggtataatcgccgcctatactatacccgacggtcttgaaccgttgagtataagggctcattaaaaatcatcacctacttctcgccacatttctcacgtgcccacctattttttttatttcccacatgcctacctatttcttctcac

SEQ ID NO: 322082 - DNA, 548 bp, Cannabis indica
taaaatttaattgtaattggatatctaattttttataattggattggattggatcggttcgattcaattagattggatgttgcctacggtatacaaaagtgtttgcttgaactttggacactacattacactactttcagaagactctcactttatttttttcatagggttttttttttctatggcttgatttttatggcggataacagtctcagccacctctttgaggaaatagttcaagtcatgactaatgatttaacttgtagcttggacccaagcgagattgaccctcaggaagcacctgggaaggtactcctaggaaaacttatttgtaaggataagctatgaagaactgtcattgcgggtgcacttaagaaagcttggtcctcttttaaaggttggagttggcaagaggatgatgatggcattttacattcacgtttccaactaaggaggatgtttggaatgttcttcaacaacgaccgtggattatctgtggagcacttttggtggtaatgccatggtcgtctttgttgggttttatgccc

SEQ ID NO: 322083 - DNA, 1031 bp, Cannabis indica
ttatcttgctttttaatttttagttatttaattattcaaccttattattgattctaccaaatagaaacaagaattcaattgattggtacttagctacaatcctcgtgggaacgatctcacttacctgagtattacttgttaaaacgatacgtatacttgcgtgttggatttatcacaacaaaatttaattcaaggatgacttcttctaaacattcggtctctcccccatcaatacaattgcatttctattaatacgtaagtactaccttttctttaaaacttggttttgatttttcaatttataaatcacaggcatttacttattattattttttattgtattgacagcggtgtcgaagaggcttattccaactcccgagatggagaaatgacacaagattttcctaggtcttccgtttggattgcgatcagtcgattttttactgaatgaaatcaatctgaagacccgtaatcttctcggcagcaaacagtctacctacgactttaagaatccaaaatattcgaagtggcagcaagttctagttccagctgacgaggaagacagagattacgtggctcgtatctacttcttgaagaaagtatcctcttaggaagttgaagaagaagcatctcgaggtaataattgtggatggtctcccacagtacttaggggtgaacgtacctcgctagttaaatttaaggatagccagtacaacttttatatctggaattgtgtagatcgcataacccgtaggtttgacagctggtaccctaagtatcatgtccaattaacttgtaatagctcctacttcagattgctgaatactatggtactaatttggatagggcgagccatctagacttagactgggaattgtctccattaaaccccctttgacctatatatgatcattggttctagggagtttagtagttaaaatagtttttcctcatcctcgtctgataattatggtaaattaagtaagagtttaatccccaccttctttttgtttattttggataagtgttga

SEQ ID NO: 322084 - DNA, 776 bp, Cannabis indica
gaggtcagtgccctgactaatataaaacaactgccctcggaaaccctaaagaacttcataaaaagacacaaagaggaggcttcaaagtccaagaaggtggatgacggacaacagctggcccttctacaggctggaatccgtatggggacccctttctagaatgagttgcagcaagagggaacaactaacgtcgagggctttcagaatagggtccaaaaatacattaacttggaagaagcccaaatagtggcttacgaaggatacttcccgactagggtatcgggatatgtgcctgtagctcaacttcttggagctccatctcttgccacttgccaaacgagcgggagacaattctccgctactctaggagacaatcaaagtctcgctttagctcccgaaatatcacactttggggcacccatgagcgatccctcggggttgagtatccaaacttcgtcccaatccacaccagccaccagcatggcaagagcttcgcagagctcccggagtgagatatcctcaaagggtagtacccggatcaaggaaaagcgacaacaaagagggtataccccccattacatcaaataaatggagcttacagatactcaggagcgtgtatacttcaccactcaacaaaatcacattatcggaagcctcaacacttgtacagggatagctcccagagagatcccaataaaagattcgagtaccacaacgacattggccacaccaccaacgagtgcaaaaacctgaaagacgaaattgagaacctaatc

SEQ ID NO: 322085 - DNA, 1194 bp, Cannabis indica
cactgatcgataattaattatacattaatagtattatatggagaaacaattgttcgacctctgtaaaccaactttatatcaactaatttagtatattaataaatctaatcatgttataaaagtttttctaaagagctttgtattgcattgacgatctgaaacacttgtaaatatgataaaatttattgtatcgttatcagtttgtaataattgataatgtcaagtttcagtgcgttagcaaaacagttttgcaactgtgatggaactttttagaaacataaaaaaccaaaacagtatttccacgtacgtgactctatctacatgtgaattcactattctattcgtgatttaatatgaacaaattaaccattagagatttgaaaaataacgaaaatgcaataggataaacttttagttatagtattaatgtatttttttttcttttttggatatacgtgatttggattgattgggagctccaaatctatttgttagagatttatattttatgaatctgaaaattgatattaggaggactagttttctgcgaattaaatcagaattgagggttgaattttagtttcgaaccagtttttctgtactttttttcatcaatatgaaacaacatgtgtttggattgattccagtcttcttctcaggtgaagtcgctggaattaatggtggttctccacctagttggttttcgtttcggttggcttgctgggttgatcaatcgaagcttcccgttgttgaggattttgcttcatgcggctaaaggcttagaagaagaggtattgttgtaatatttagttgttggattatataaatgtttataggaccaactcaatgtattttggtaatattttatcttttttgtatatacctgaaaaaaccccccaaatttatttatacatatttaaactctattaattagtaatctttcctacttttcatcaaaaataatcatactataatttttaaaacaatgtggcatgaaataaaccgtttttaaaagaggatcaaataagagaacctaggagctgcttggtaacatttgaataataacctttatttatttaactgaaaatttggcaagtacgaacaactttgggatttttttatatatactagtaaaaaattacgtgcgaggcacgtatactaaattttatgttagattttttctacattatttaa

SEQ ID NO: 322086 - DNA, 926 bp, Cannabis indica
ttgtaaatagccctttatttaattttattgggctcatcgataaaattggaagtttttttggattttcttacaaaaatattgtattttgggcaaaaatttacaattttactgcaacataaatttttttaaaaaaaattctctttttataaaacaagtataaaacaacaaaatagaataattaaaaataataatagaacaactaaaaaataacagtaaaacaatgttaaaaacttaatataatatacagtataaaaaatactcagtattttttaagaaaattccgccccacagtaaaaaagaaaaaaaagtaagaaatttcagtatatagtataaaaaccccaagtttctttttgttgagattattccataatatataaaaatagtaaaaaatttatatttttaaaaaaaaaacaaattacgaattttttttttataaaaatacaaagtgttgttattctcttgttaaaaaaaaaatattattttgatgttgttgttactagaaaataacgtgatttatttttacaacaatacaaagcgttatttttctgttgttccagaacagtgttattttgatattgctgctacgagaaacaacgtgaaagtaacatttttctttaagaaaaatataagtgaaaacctgtaaaaaaaactgtaaaaatataaataaaaaagttcttaaatttcccttttttattttaataaatttgaaattttgatttcaaataagtagaatttacactatatatatagtttcttttaaagattgttacataattgtgttatgtttgtgtatttttaagacatttttagtttgggtaaatggcggcaaaacccctaatattttggttttggtttcactaaacccccacaacccaaatttctgcgggtaaacccccaaaaccactattctgttagcaaaaacacac

SEQ ID NO: 322087 - DNA, 1325 bp, Cannabis indica
agtcaccttctttggcatcaagttgttgtctagggtccattggggcttttgcaggtttactgccggtataccctgtgtcagcaagtaattgcagtgtgtacttgcattgtgagaggaagagaccagatgtggcacgagcaatttcaaacttgaggaaatatttgagtggtcccaatgttttgagcttgaatttggtttggagactatcctttacaagttgtagtatgtgcatattggggtttgcaaggattatttcgtccacatagacaaggagggccacgaaagtgtcttcgaagcctttggtgaagagcgtataatcagcttgtgattgggtgaatccttcttcaaggagagcttcagtgagtttcttataccactaccgtgaagactgtttaagcccataaatcgacttgtggagtttgctgacaagatttggaccttgaatgttggatggaagcttgagtccttggggtaattgcatgtaaaatttctcatccaaatccccattgaggaaggcgttgttgatgtcgagttgcaatgtgtgtcattgcttgattgccacaatggaaaggaggagtttgaatgttaccatttttgcacctggtgagaaagtgtcgaaaaagtcaaagccttcctgttgtgaataaccttgtgcaaccagtcgagccttgagtcgttcagctagtttagttcatttatactttgttacttgtcagtaggacaattatttcagttaagtctattaattacaggtaaaggatccatcacaagaatgttacctcacacttgggcatagatatccaatagctccatgagaaacgacatgtgttatacccaaaattcgattggcacttcagagaaggaaacgtgtcaaccttagagaatacaaatcaacgaatataatgacaattatattaaaggatattaaaatggaataacgcactaaatgcagagtttatagagtatatctataactcgttgactgtaaagtcttaagcgagacacaatgtacaatcatgtattgacgagacaccatttcgtatgtgaagacacaatcataagggtgacatcaataatgcatagcgaggcatcaacttcgctgcatataaagaggtgtccacgagagtataatatacattataccaactaagtataacaaatggatgaattcggccaacgaatagcgaggcatccatctcgctataggtaccttcactaataagctccagatatctttcaatgagattcactgctttgtcgagtcagctttctcagatagaagctgacattcaaatgatgttcactactgaagttcaccttgtcac

SEQ ID NO: 322088 - DNA, 611 bp, Cannabis indica
agagagagagaaaaagaaaaagacgaacctttcagatagggaaatggcggatagagatagctctagagagagagaaagagaaacccaccaaagagaaagagagattagagaaatggtgacatttgacttcaacacggttgagacagtttgtgggtatgaaacgaaggaaaagaggaaaggaaggaagcggttcttgcttccagaagagagagaaacagaagtaaagttaaacttaagagagagaaagaagaagaagaagaaggaggagttattacaagtggtttttggttaccggttataacaggtgaaagagaagaagtgagttaaaagagtgaccggtaaaagtgtcacgtgatgactggagataagcggtgaacagagatttttggtaaagtatctgtgatacatgagagagaaaaataagagagaggatttaaaaataaaaaagtcaaaggatgggtggcgacacgtacacggagtctcctcttttctttctttctaattttattttatttatggtaaatgttattgggtgattctacaatgcaccccgttaaaagggatgcattgatacacccttgacttgcttcggcatccagaagaatttttta

SEQ ID NO: 322089 - DNA, 575 bp, Cannabis indica
gggcataaaatccaacagtatacatataatcatgaaataaatcatgtgaaccatgccacattaaatgttatttctgatgtatattaataagtaaatctgattatattgaaatgagttttatttaggcataaacccaacaaggagttcatggttattcgtagcatctactagtagatcaattcattgtagtggaaaataatacttagggcatgctttatttaggtcagcgaattcgacgcaagtcctccatttcccattcattttaggcacaaaaattgtgttggatacccaaaccgggtagaaagcttccttaattaagttgttctcccgtagccttttcacttcttcctcgagactttagagcattctttgtcaaggagcctatgtttctgtcgcacaagcctaaagttctctctttctatgatgaggtgttaggttataattaacctatatttcgggtctttaaagttagcattatctcatctattggtgtcttttggagcagttttacgcttgattttcattatttcaggttcccggggtgttaaagttcgaatccagtcaaatggcgaaaa

SEQ ID NO: 322090 - DNA, 823 bp, Cannabis indica
ttgtggaaagaaaacattaacaattgttgaattttgctagagcactcttgtttcaatctcatatacccttggtttattggggtaagtttgtgagtactgccacctacttaattaatagaacacctacccccaatttgaaacatatttcaccttttgaaattctaaattccaaagtgctaaactacaaccatctcaatccctttgggtgtcttgcctatgtgtctactctaggggttgctagatctaagttttgtccaagagctacaacatgtgtttgtctagggtatcttgtaggcatgaaagcttacaaacttcttgatcttaacacaaattgtatattttattctagagatgttgtgtttcatgaacacatcttcccatttgtgtcaactgtgtttttgcacctcacatctcagattttttcccaactactattgagtcactcaatgttgaccaacacactgatcccacaccagaaactcctcaatttgattcacccctgatgttgtgcaccctgatgttgtcccacctctgaatactcagcaccatgttgagtctacttcttttagtagggcaggtagacaatctaagaagccattctatctccaagattacctttgttttttttctgccaataatgttcaacactagacatctaaacctgtcactaatcatgtcatttttgaaatatcaactacaccaagttgtcttcccaattttgagctcttgtgttagcaatttccagccactattaagctgtgtttttttcaccaggctcatggcatacctgtttgggatggtgctattgttgggttttatgccc

SEQ ID NO: 322091 - DNA, 996 bp, Cannabis indica
ccctcaagtaattgtaaagggttatgttttataattacttgttgaaagaaatgattactttattcacaactgaagttcaaaatattacattagtgatgcgatttacaatcattaatctcataagaactttcccagtttaattgcttatttcatcaatcttctagaagcatccgattttaatataacgggttctgatgttcagggtcaatccctaaaatattcccacaattgtttcgatatccaaggttaattcctgccatatccccaggctataggtgagctgatccttatttaagttgtttgtctaaactgccgctagttgatgaccaacttttctttgtagcagctctatacggcagccattgagagccgatatttgattacctcgcaattcttttgtgtaattactttatcagactaactgccccttgtcaaatttttcttgcaacatgttccctcccgagataaccgagttatcctttcctcctacaaaggaaggttatggtccctggtcgcttgggttactgggtggatcgggctgatcatgggcattgtcctgcccctttacaaatttttgaaagtgtcctcgcggtatgaggccttctatctcatcttttaactgacaacattcttccgttgtatgctcaatatctccatggcattcgcatcgtctggtagggtcccttttacgtctcgcgtgtttcataggttttggttcgctaataatgacctcttgtgcatgcgcgaggtagatactttcccgaggtttattaagctcggtatagtcattttaaatgggtacatatttgtttaaattattacaaggtttattttaattctgtctatataaaagtttaaattatgcgctattttaattagtaatcccatttaggggattagtgttttcataagtattttgggtagcgtgcctaattatttagggcgttacaatttggtattagagcgccgaggtttttaaacttcctgtagaccggc

SEQ ID NO: 322092 - DNA, 1117 bp, Cannabis indica
aaaataatttccaacaactttactccatgaataggaaaaaacatgctacacaatgtaaataatcattaatatcaaatatttctctaataagataaattgatactgttactttataaaatcagtactatcatgttatggcattaccatctaggtcatccaaaatttgtatatcttaaacacttgttcccatccctatttgtcaatatatatatatccttaatatcttacgtgtgatatatgttaattctttaagcactctcgtcactctttcattcttagacctcatcaaccttcttacccattttcacccattttcacccattcacggtgatatatggggaccatcatatcagtagggcatgttagtttttattactagtctatgatcacaatcgcttaaggtggacattcctcatgaaagaaaaatctaaaacaagtcatattttctaaaatttctacaaaatgatcctaactcaattccaaaaaaatattcaagtgttaaaaactgacaatgctcgtgacttcttcaattctgtacttggatcatatttgcattccaatgggatttttcatcagagttcttgtgtagacacaccataacaaaattgtgtggccaaatgcaaaaattatcatttactagaggtagctcgatctttaatgtccaaaaagattttagggtgaagcagttctcacagctacctatctcataaatagaatgtcatcacgtgtattaaaattcaaaactcgctacaaatcttcctagaagcatatccccactcacattttgtttctcaaattttccttcatgtctttggtagggttgagcattggtcggtttggtcggtttttttcttataaaaatccaaaattcagttttcggtctggattggtgcaatccgaaaatcgacctaccaatctagaacaaatctcaaaaccgaccgttttgaacctcgtgaactttttttaaaagaaaaattatccaatttattttataaatacataattttatattttacaactacaaacatataaataaattgttcaaaaactaattatcttattcttttaactttaatattaataaaaaaaataatatattattagtaactataataca

SEQ ID NO: 322093 - DNA, 1747 bp, Cannabis indica
ttgtcgtattataggctgctcgcacagagaactttccacttggtttgtttccaaaagacttgatccatgtgtgggaaaggaattctaggaatgttcatgattcgggttcctaaatcctccccaaataactgaaaaaccatctctgaattccaatcatttcccagggaaatgtcactcaaagtttgaattgtatagcccttacctctcaagctctccattagtactccaaactctgaatagtctagccaagggatccatggctggctccagaaattaatagaagatcctgatgcagcaaccgacagcgagcctttgagaattatatttctagtatccagaatacatttccattgataggaatcattattcttttgcttggtacaccagaaactgtcattattgcagtattttcccaataaacaagatacccatggcttgtcctcctttgtagcaagactccaagccaacttagataaaagagcttggttcatatcctcacatttcctcaaacccaatcctcctgaactcttcggttgacaaaatttatcccatgctttaaaggccatatatctggtacttatctacatttcctaaccaccagtaactttctcatcagagagtccaactcacgacatgttgtacaaaggaattctttgaggtagacatggcatagataggcattgctgaagtcacggattttataagagttaagccgccctgcttgagacaacagcttcaccttccaaccttcctatttcttcatcaaattctccttgagcctcatataactccttcccttttcttctttttaaaaataaagggatttcctagatgtcgttcgtcacctcgcacttgggctatattcaaagctttcaacatattatctttcctggcactacagagatttcttgaaaataagacacttgatttgggtttgctacaagtttgacccgaccatctctcataggttgatatacactcaattaggacccttgcttcgttttcatttgctctagcaaaaagaatcgtatcatcggcaaacatgagatgtgcaactggaggggcagcttgagcgatctttattccatgaaccgtgcctctttcttcagctctccgaacaagtttagataaaacctcctgacaaagaaggaataagaaaggagacatggggtctccttgccttaatcctctctgcgggattatctttttaagaggacttccattcaaaagaactgaataagagacactagtgacacacgacatcaacagctttctgctcctctcatcaaagccattagcctcaagaactttgtctaagaatgtccactccattttatcatacgccttgtgcatatcaagtttcattgccataagccctcccttgcctctcttgtgacgaatcttgtgaataatctcctgagtgagtatagaagactctccaatccatctaccagggataaaagcagattggaaaggggaaatcaactcattcatgagtggcctcaatctattggataagatttttgcaataaccttataggaaaaattgcataaacttatcggtctaaattgatccatgctcatggggaactctacttttgggatgaggcaaatgaaggtgttgttgagtttaggattcataactcccatagtgaaaaaattcctgtacagaggcaactaaattagctcccactatatcccaatacttcctgaagaaacaacctgaaaacccatctggaacccgggg

SEQ ID NO: 322094 - DNA, 727 bp, Cannabis indica
tataaatcttagggcaaaatccataactcttcacaaaccctctcttcttagcaacaaacctaaattttaatgtttactttttatgtcatatttatcataaccttaataatttttccatatttttgaaaataaccctaaattttaataacaatattttttattgtagttacataatagaaagtaaaaataaatcctaccacaatgtgcaatttatagtaatttttatccattaaaaaaggaagtgaataattaaattattctctttattagttaataaaaataagctgaaaaaattagaagagaaaaaaatatggagttcttttatagatattttactgctttgccaatttgaacatgaacatggcttgtactggttgctgtttaaattgtgcgaaatagagatacatattcatggattatgcttgcagaaagtcatccgatctaattccaaccgatccaataaaataggatatccaattataattggatcagatcggatacaaattttaaaaatccaattagatcggatcggaagttggatgagacatccgatccaatagataaccgaacggatccaatccaatatcatccaatctaatgtccatccaatcatatttaatatttataattttacatatttaattattttatttttaaaaaatatattaattattaataggttttactctttttttttgtgcacctgcatgttgggattttatgccct

SEQ ID NO: 322095 - DNA, 1233 bp, Cannabis indica
atttacaacttcatattttcactttttcgaaaaagtaacttactcgtaaattgggcagttttgagtctcctaattccgcagaacaacaatatcttcaagaactggtgaacgacttcacgagaacacaagaactaactaagtgatgtcagaatatcacttaggcatcaaaaaaatacatcctagaacgttttcccactcacccagcgtccaggttgacgtcatatgttaacttgggcattggtcccaaaacagccttcagcaaaacaaccataattcactcaatattgatctgattgacacgattcaatttgcatttcgaagctattttaatgatctatcaagtcatgtctcacactccaatcaaaattctgaagttatcagttccaaaatttatcctcaagaaagttacaagtttaagctacaacttacccgtagtgggtctcgaggatgtgactcaagctccgaaaattgacgactgtacttaggagtcaattcaccattggatcatcatcaacagttaaaaatagcctaaatatatttttccatatttttttagaataatttattattattttaatagagcctccttccctatgaaaggatagctcatctaactcatttttcacattcaaaaatatacccataaggtcatagcatctctctctagtttttctctttaaaaattagagtttacagacttagctatttttcttgtaatcaatcttatgagtataaaaactcaaagtagacatagctctattactgttgcaacacaaagagtgaactactatagattcttgtgtgctctctttactttacatagttacttacaactttcatctcgtccatacatatgagcaagttggctaaatttttgcgtcaatattttggtgcttttattgagagccacaactcaaaaaatcacttacaagatgtttgcaactcgatccacaagagcggaaagaaccactattggccatcagactgggggcacgccagccactagaactagtgatgaaaccacacctacatcactgatgccaaatagaggtcttggaaccagctccacagctcgttccccaaggccatcaactgctactgatactgagatcagtgaacaaattccacttggggaaccatgtgtggaactagaagaccctaaagaggtcgatcatcatagaaaatatatgatcatagataatatacggtgatattttaaaagtgataacaata

SEQ ID NO: 322096 - DNA, 774 bp, Cannabis indica
tacatatttattataaaaaaaagatgcatagtagtatacattatttagtaaaaaaaatatgagaaattaataatatagtccaaaaaataaacaagtaaatgagataacacattttaattattaatgaaagtaaaaagggtataattgtaactatacttaaagatattttaaaaagttacacatgtcactcaattaggaagagagtgtaaaagagagtttccctagcactcctcaataaacaaagctctttatgaaattcgatatacatttacgtacttattatatacatatattactagaaagaagcatagattaattttaagaaatttgtgttaaaaaataaaataaaataaacccttcaattctgcttatgttggaatgtttgcatcatcttcacttaaaagacaagaatactgcataaacgagacagtatgtgtggttaacacgaattattaagttaaaagaaatgctaattacttctattataatcttttaatcaacttcaacatctgaaatgacatcccaaaatattttttttttcatagcggtaggtattcattatagttacagtatcattcttgtagatttttaaaaaattctgaataatttacagtaccgaaaataaaattcctgatatttcaatttaccacgcgcgttcaaaaaacttcaaacaaatttttcgacactgtaaactattcgaaaattttcaaaaatgtgcaaaaaagatgtaagcataacgaacacccccgtgaaaaaaaaaaaactttaaaaaaa

SEQ ID NO: 322097 - DNA, 558 bp, Cannabis indica
ttttaatttataattattaaattaaaaaaattatatttaattttttaaaaaataatatttttgttgataataactatagccacattaatagtagtgggtccatccctgcaatatataatacataagtttaggtaactgatttattaaggaaagctataagtttaggtaactgatttatattgatcggcatagttacccaaattttataattctgttaataaagattccataaatatgtcttaaaagttatattgggtagtaattagttactaaacttaatttgtatagtaagtttcctttcaaaaaatttttgtgcatgataagaatttccaaaaaatatattaccatgtattttttattattattttttttctttccatttttatgttttttttttttagatttttttttttcatttttataaaagctgatttgaggttgctctatttttattttataaaaagttgtttttattttgagattttgttttcattttgagattatgttttttttttttttatttttgaagtttttgctatttctaattcaaaaaaaaaa

SEQ ID NO: 322098 - DNA, 1021 bp, Cannabis indica
taaaataatttccaacaagatgctccttcagcttctgaaaagatacttcgcactcttcaatcaattcaaactttttgttgccttgcaacacgttaaagaatggtatacagtttcagtagatttttaaatgaacgtgcttagtgcagcaattcaatcagtaacactctgaacatccttgtgtttcttgggagaaggcatgtaaaggaagggcttgatcttttctgggttcaccttgattccgtgagagctaacaatgaatcctaagaacttctagaagaaaaccctaaaggtacattttttaggattcaacttcatcccataatttcttattaccacgaagggttcctcgagatctaggccacgctctttggaggttttggacttaaccaacatatcttctacatacacctcgatcgatatttctccctagttgattcttgaatattcggttgaccatctgctgataagtggctctgacattcttgagcccaaatggcattactttataacaatagacgcctttgtcggtttggaagctggtgtgttcctcttctgcgacatgcatcttgatttaattatggccagagtagggatccataaagttgagcaacttgtacctatacatagcatctaccatttgatctatccgcagaagcagaaaacaatcttttagacaagccttattcaggtcagtaaagtcaatgcacattctccatgtgtcgttgggttttagaactgaaacagagttcgtgagccagataggatacaatgcttcctggaggaaatcattggtggtcaacttattcacttctgccttcactgcctctgcccttactggatccaagggtcttcttttgtggcgaattggtgttgcgtcttcttgaatgttcagagcatggaaaatggtgttacggtcaattctagtcatgttagaatagctccatgccagcacatcctggttccctttgactatattcataatgttttctcttatggacggagtgttggaaatattttacca

SEQ ID NO: 322099 - DNA, 895 bp, Cannabis indica
gtttttttattaagttttatactgcagtatactgtgttaagttttcactggtgttctactggtgttttttagttgttctattgttgttttgagttgtactgttttgtgttctactggtggtttttaaaaacacagtatttttgaaaacttttctgtatgacagtatttttgtaaaagttaccccaaatttccgtatttttgtaagtttcccttagattattgatgcatttaaaagtacaatacaagactgtggttgagttgatttggatttaattgggcatcgatttacttaggacaagagtttagggacaaattcttggttggaagttcatcctgatagagttcttgtttaataataataataataataaaaaaaaaaaaaataataataataataataataattggttactttataagtgtcctaaactataaccggttactctaaactatatttctcatatattagttttatttagtttattctaaagaataattatttaaaaaaaaacaaaactatattctgtaaattttacaaaaatcacacttttttatatatttttacagattttttttcatttataaattttacaaatttgtgatttttagaaggaaactaactttgttttcatgtttccttatagtatattaataacggtttgtaagaaaaaatacacgtaaaatgtataaaaaaagaaatattccataaaaacgtaaaatttttatagtttttgggtatttctgaaataatccaaaaaagaagcccactttctacatatattacagtggcctgtgtttctaacgatgggccttttttttttgaattctttgttaagttcgtgtgaaattgtgaagttgaagaatattttttttatatatacattaattaaattta

SEQ ID NO: 322100 - DNA, 930 bp, Cannabis indica
actagtaaactattctaaggaattttacaaaaatttacaggaatgatactgtaactataacaaatataaaatttcgacatatgatttcggacgtagaaattgactaagaaattgtaatagaaggttgtaattagcactcttcttttattcattacaaatgatttttaaactattcacagtaatataatttagtggttttatcaaaatttatcacacataacaaataaaataataacatatttatttaattatttgtcacattagtatcacgtgtataatttaacattaaaaaaatatgcatatttaaaaaatcattaaactaaaatgatcaatttacaacactgtaaataattcttgaactatttttaatgggctaaaaagtttatggacaataattcatatgtagaaaaaaatactaaataaccaataaaaaatagaaaaatactaaaagatattattgtgcttaacactttcttagtgtcatacaattattgatataattaagtattgatctatataatttaagaaattagcttttaaaaaaatattattattggtgcccaaccaataataatattctacaaaaaatatgaaaaatatatctgttttttttaatgaaaggaaataaaaaatggggagagagaacgtcggtgggatttgatgagatgggaaggcaattaattaattaaaaataaataaataaataaattgaaaaagttaatatttgtgagatatttaaaataaaagacagagaaacgtgagcgtgtcagattggtggtccactgagagggcttggtggggaaacagtagaggaatattgccatgtgaattgtggggtcatgggatgcacgattatgttactaatgaagcttttgttttttttcttttcaagaaaattgggtataagtcttaaaaatatttatattttat

SEQ ID NO: 322101 - DNA, 1025 bp, Cannabis indica
ctaagtcacaattttagaaaaaccaataagtgttgccctagtacttttggagacttaaacttaaaactaaaatttttcctatagatagatatcatggaaatactctatgtattaataaaacactcaatattggtcccgagaaaagtcttaaaacagatggtttagaaacggaccccgaaattctgcctaaatcgaacgatccgaactccattgcctaattttaaaattggcataactcattcaattctaagccaaacctgaccaaatttttcagggtacataaaaatatcataatgaacattaatgatgaaggaacctcaatcaaattctaaacataaatcaaattaagtagccatcctaaaactgcctaaatcaaactgtcttaaagctccctgtccgagtttcaaaatcacataactcatccaatcctgagccaaaaattaccaaatttttaagagaacctataaacattataatgaactttttcctgaagaaacttaaaccatattcatgacagaattcatgttatcacaaccaagtcaagtttgagttcattgaattcaaacttgcataacttttgctactaccatcaaaaacacttaaaaaccacttataagcagtcctaaataaccttaagaatcttttaataaccttcctcaacttcttaaacatgttctattacaaacagccactaaaaactaacaaaaatcttacaaaactaataaatttcaggttaggttttaccttagaagttttgaggaggtaagggttgaactcgttgataagattcggcaagaaatatgcattaaaatggtagaaacttttggtttttggacctggttcagaagccgcgaaggagagggagaaggagaaggtgatttgatgttttttgactttcctttttgcttatggttcctttttactttatttttcctttttttgttttcttcctaagcagttattcatcctcaaaaggatgagccacatccacctatcccttctaaaaagagtgactaatctcttag

SEQ ID NO: 322102 - DNA, 733 bp, Cannabis indica
ttttcatgggatatatccagctatattttataaaatcatcaacaaacagaatgtagtacttgtatccttcagcagtggcaattggggaaggtccccaaacatccgagtgtacaagttgtaaaggttgagtagtttttaatgaggagctactgaaatgcattaaatgatttttaccaaattaacaagcattgcaagattgtaaatcagatttaaaaactttggtgtttatttcttgaaaaacttttgtaaggattacaaatgaaggatggccaagcctatcgtgccaaagagtagcaatacatccagagtttatacatgaaccagaaacagtacaagcaattttattggaaatatttaaagacatagtagtagtagaatacaaacaagaattgtcatgagaagatgcagtgacaggagataatttattaattatttttatttaatttataaattaattatcataaccgtttaataatgattaaatgaataaagttaaatgtaaccaattaatagttacatatttaattaattattgaaacaccttccgcctacatctgcaaagattatatatatacctagagtacttatatattatctctatttctttaaaaaaaattatcactttataaaataagaaaaaaaaaattattcaataataagaaacataaatattaattactaagaaaataaaaaatatttttaaaataatagtaataataattaaaaaataatt

SEQ ID NO: 322103 - DNA, 1756 bp, Cannabis indica
gacagtttaaaatagtcatttaaatttattagcgatagtcttaaaaaaagtatttttaagactgtcgcaaatactcctttttgtagtagtaactttcggataaacttcatttttctattacaacatataataaaagcatattaaccttccgatataacaaggagtgattttttccagataatgagcaaaaagatacccaaaatatctatttaccaaaaaaatattaaaaaattaaaataataactatagtactacaataatatacacatatatattatatatatgtatgtatatattatatatgtatatattatatatgttatatatgtatataatatatatgtatatggatcatttcttaatgtgtattacccatgaatgattactaaacaaatttaactacaaacattaatacactacacacacatatttatataaatacacatacacatatatacacacatatatttatcaaatacacataaatatatatatttacacatatatatacatatataaattcacaaaaataaacacattcatacacacatatatacatagatattctaactacacataaaattaaactaaaattactatacacaaaattaaatctaaatttatatatacaaaatttaacccaaatttatacacaaataaaacttaaaataaataaaatataggttaccttgactgaaatcatgaaatgcgtgagtacaatcggaggcttgggcagcggttgccggaggtgcggtggcacatcgtcttcggagtctggtgaaggttttttttaattatttttttttaaaaaaaaaaggaaaaaatagatgagaaagagaaatagatgatagtggagattacggtggtgaaaatgatggttcgggatggtgaaaatggtggttggggtcaagattagtgactgccggtagtggtttggaggggtcgcagagaaaaagaaagaagaagaaagagaaagagaagaagaaaatgggggtggggggttcaggctaaagttttattcaacctgaacttttgccgacgcacttagggtcgccgacaaaagtcgaaccccaaaaaatttaatgaaacgctgcatttcattaggtttaatacttttatcgacacatattagtgcgccggcaaaagtttccaccttaatttttgcacatgtttttcactgcgagggaatttgactgccaattttttcaccacttttgtcgacgcatttacgcgcaagcaaaagtgaaaagaaatttattacactttgtcggcgcatttacattcgccggcaaaagtggattcgaaccgccaaaagtttccaccttttggcctttggtttgctatcatttgacgacgactctatgttattttgctgacaaaagtacctattactggcgaattatgtcactggcaaaactgtgatctctaggccaaaatttgggcccacttttgctagcgaatgtactcagtttcaccgacaattgtgtacttttgccggggcaattattaaattgcgccaacaaaaatacatattcttgcagtgtaagcctccaatatccctaaatatctctcctcttcttccatattctttttctatctactccatgtccatgattcaatctatttgagtgtctatctcacatattgatctttttttatcttacatattcatttattactctcataccattttttttttttttcagaaaagtagaaaggcacaacttatttttttttaaaaaattttgattttttt

SEQ ID NO: 322104 - DNA, 639 bp, Cannabis indica
agatgaaaatacacaaataaagagaattcaataatgtgatattgaacctctttctttcttttttaattgatggtgagatatatgaataatccatgatataacaatattgttaagaattcttgatatatcatatacaaaggtgaatttaaaataagaaataagattttcaacaaatataaataatccttgattacaatattataagaattttttaattacaaaaaaaaaaatagaaaaataaataagattttcaacaaattagtgatatatatatatgataaataaattataataaaaacaggtagatgatacataaacctaacagtattggtgatagaaaattatattttggcctattcctttattatcctactataaatagatgattattgagttgggtagatgaagttttgcttgtcattaagtaagaagcctgttaaagttgttaacacggctaataagaaaaaggctactaattcaaaaaccaaaaaaaaaaagtatttctattgcagtaaaaatgaccatgtgttctaagtttttggctaagaaacaaggtatttttatttttgttataaactcatgtgttttagagagttattactcctttgggttattaattctggatctactaaccatatt

SEQ ID NO: 322105 - DNA, 1631 bp, Cannabis indica
gagaaattcataaatcttgccgacataagtccattgttgacacagaaagtgtagatgacttttccaaatgggaaacattctaaaaagtgggaactcccttggaaagtgaataaggggcagggcgacttgaggagtgttcttttctaaagactcttctcaaagcaatgttatataatattacctcacatacaaggaagccatactgataagtgataacagaccagtcaccagactaccatgcaagagattttcttggggaaattgttggttcaagaacatcctataacgcatagaactttttttaacaataaccccatcaagcaagcaactgatgactaatgactaactgaaaaaatcaaatgggcaacacctaccccatcatttcttcaaataaagctaattcagtaaactaatttacaataacccattaagcaatgtatgactactaaacaaacccatttacaaacaccttaccactctgtatcatttcttcaaagaaagaactaattcaataaaattacgttaaaatttgttaaatagtggcaaaataagagcacctctcccatctttcactcaaacatgtcctactactttgtaggcataatgacatagagcaaaacaagtatagattttggcatattcttctatatgcgttaataataacataacacgaaatcattatgttgctgcatatgcaccatttattaacttggtcatatgtgtgtgtataacatacatggttcagaaagtgatgaaggaaaagtaccatcgtcttggttatcttgagaatcgttggaggagcagagaaacttcttggtcccgtaagaggaggaagaagaagatttgagggttgaggaggtgaaagcgtgagaagaaattattccgattcgagcttgaatctccatgaatatggatggatttgatactctcaatactgttaacgtctgtgtttaaacttttttttttttttgcaaaactgtgtaaactcttatctcatagctttaggatcaaactaaaatcaaccccaaagtcatccacgtgtacatactcctcactcacttcactctttttttattttttcataatcacctttctttttttttgggggtttgaattattaaataaaaaatataaattaatactttatttacaaaaatatttttataaagtgtagataatatttatattttttttatgtgattttaatgacataaatacttcttacactatcacttacacattcagacgatggttgtagggtggttgttgcgtggtggttgcattagacgaagatgtcaatcagactatagttgcacggtggttgttaggtggttcgcctaaagttatatcagacaaatgtttcagtcagacatagttgcaaggtagttgttaagtggttggccaaaagttgcatcagacgaaagttttaatcagacgaaagtttctaggtgattgcttggtggttggccgaaggttgtatcagacgaaggtttcaatcagacgaaataactattagcaaaatatttacacaactgtaatgcaactattatgaaacattataaataagaacagtttccacgtacgaaactctatctacatgtgtctttataatttagtatgaacaaattcac

SEQ ID NO: 322106 - DNA, 823 bp, Cannabis indica
ggagaattgtagttagttggaaaccaactagctataatgttaatactctaaaatgttcaagtcagtttattcatttggaggtttcaattgtggatatgaaggtgtgtttttatgtcacatttatatatgcgtttaatgatggagaaggaaggcagaagctatggcaagaccttcaagaactagctacttcaatgatattttaacaaaggaagagagaatcagcaagcaagtgaggtactctacttctactaaatttattgattgcattgctcattgtagattggatgatattaatttcagtgggagtttttacacatggtgtaacaagcaatttggagaagacagaatttactccaagattgaccgtgggttagccaatcaagcttggttgtttgcacatcctactgctgaagttgtgtttatgaatgagagtattttttatcatactccagcagttctcaattttcataacaatgttgttagtggaaggaagccattcaagtatttttctacgtgggaatcgcatcctagatatgctgaaatcattcagcaaaactgacagcaacaatataatgggacacacatatgtttcgggtggtttctaagcttaagagtatgaaaattgctcttaaggctttgaacaccgaacactttgctgatatttatgctcaggaagctcgagctaaagcaaaacttgatgaatgtcaaaaattacttcagtagcagcctttgaatgctaacttacaccagcaggaaaaggatctcaggtctcattatgctttgtttttaagagttacttgtcttttttgcagcaaaaagcaaa

SEQ ID NO: 322107 - DNA, 860 bp, Cannabis indica
aagtggagtccacgtgtcaccattctcgtgatgcacgtcagagtgccaaatttgggataacacccataaatgagtattaatctattttgtaacaaccatatcatcatagttttgaattccttaaatcaaattgtgtaacaattcttttattacactaataatgtgtgatcaacacaagagttacaagtgacaacaaattgtaactcctctccaagttacaacatgtaggttacaaaagtgtaggctaaaaccataggttacacatttatttaccatacacttaatatatattatttagataataattgttatcctattttttgcattaggttacacatttaggggcaagggcaaggttattgtcgaggactctgatagttcctcttttgatggcgatggtatttgatagttgataacaccattcttttgtcttatattgaatgtttatgattgttttctaactttgctactttcttattgtagatatgtcttccaagttgaaaggtcttattgggggacctaaagatgagcccacgcgactagtgagggccaagtggcaaggacttcccgtagtggagatactatcgggttgtcactaccttcccctccactaggccctgcaccagctgggcatcctatgatacgacctacttgccagggtactcagaggcttagtagaggagcagggtcatttgtttggcagagagttgcttaggcagccaacaggcgcattaagagagctatcccctattggaagttattttaccaggcgcatttatgttgatttaacaacgtaaatatgaacttctaaaacgatggaaaattaaacacataaacgtatcagaaatcttacattgggt

SEQ ID NO: 322108 - DNA, 1202 bp, Cannabis indica
atccccaaatgttaaatgagacgggaacgagaatcacactccccgtcccgacgaggacccgtttagtattttattttatatttttgggaatattttatattttatttttgtatttttttagtatattagtaatctttttatgaattttaagttgtgttttggataataattagtttattgaataataattaatgtataataatttaatttttatgtagtttaataattttatacatttaaatttttattatatattatatttatttattaggggattccccgccccatccctgcccccattaggggattctccgtcccatccccaatgaagaataagcggagatgtggattaaaatctttaacggggatggcaacgaggagagcactctccgccaattacccgcctgtgtgcatccctacatttgactgaataaattagtctcttttttaatatctaatagtttatatttgtccaatcaaaatcaggggtaaataaaaggcggatcatcactagggctggcaaaacgggttagacacgatgacacgtgtcgaaacttgcacgagagttagtgggtttgggtttgccttaaatggtttcaggtcgtgttcgggttgactcgtataacccatttaataaacgggtcgtgtttgggttgacacggctaacacgatattaacccgttaacgacctattttaagttattttagtactctaacgtgtcataaatgggttataaatgtgttaaatacttcataaacatgttattggttgacatgtttaaacaaaatatacttattaataggttacacgggtcgtgtcgtgtcaacccgtctataaacaggtcgtgtttgggtttcattttttgacacaattattaaacgggtcgtgttcgggtcaagcatgtacctattatacatgggtctcgacacgacacgattcgcgaacatgaattgccacccctaatcatcataaccttggggttttgatgctggagaggttcgtattggggctgcttgtccggtgcagcagacaacaaagacgagagaacgagataagcttctatggaggcctcggggttttagaaattttgaggtggaaatacctcctgagtcctgtgcccaatcagaagttgggaggccagacaactaggcagagtagctccgcacacatagtttcaaagagagggagatggaggcggaat

SEQ ID NO: 322109 - DNA, 724 bp, Cannabis indica
tatagctcatattacattcactaatgctatatcgtaatttatagattacgcttatttgcttacttatagcgaatttaaaaatttatattgaattagattaataagattataatcccacttattatttgattaactcataatataaatacaaactctaattatttaccattaggcttatcgaaatattacattttctatcttattgatttataaactaaccttgataatctcaagtaagctttgttctatcttataattttaactgtttatgtgtgtaaactttgttcttggttttcacaatgaattttgtggtgaagcaaaactaagtcgtaagatttatatcttcactaatgtaattactttgttacatttcttctactttgctattatttaatttttttggtttgatttgaattgttttgttatgttttttttattaaaatatataatacagaccaaatataatcaaatgggacaaaattagatttggtcaaatttgtaatattattttagggtgtacaaaatctggttactattttgcaactccaaaatcaccctaatgttagggtaaaagatgttacacaatcataattttgaattttatgacttacattgggttgtaggtgttatgaggttatttggatagggaaatttacaaaaatactagaattcgggttaacttttacaaaaatactgtcacacggaaattttttcaaaaatactg

SEQ ID NO: 322110 - DNA, 1584 bp, Cannabis indica
tttgtcaatctgagtgcctttcatgtatcagatcgacgatttaagtttttttatcttctttgtcttcacaaaaaacggggaaataagtactttcatggtaaaaacatcaattcgtgggttccaaaagcaaggcccagtgcccaggttgatattttgtcaacctgggccgattccgatgatgttttctgagaactcttttgagcatcttttgcgtttttcaaaaaatattaagattcaattatttctggagaccaaacagaacttctaaagggtcataactgggacccagcacttaggttaacacctgacactgggcccaacgcccaggttggcatatgtcagcctaggctatttccaatcaagttcttaaaaaagtattttgggtatttttttcatcatataaaataataaagatttaagtaaatttagggagaaaactacaaacccgaactcctagaaataaggcacatcgcccaggttgtcaatcaatctggtgcgctgctttcgattgttcaaatgtcaaatttgatcaactaatgaatttgaaatggtcaaaaacagaataagaaatctcatccttaagttcaaaaaccttaaaagtatcaaaacgagatctcaggaactcaacaatgttgacaaataactttgtgcctattttttagatattaattttggccacaatttaagtatgaataattaaattttccttttctaattctaaataatagtaatttgttacaatgcatacaatatattaattatattgtatatctacatatacatatacggatccaatggagatgagatagggatggcccatgcatattaaatgatctcattacaaaatttattgttgatattcaataattgacagttcacttaaacttgtatttcacaaaacctaccagacccatacttttgtactaagagaaagataggatattggtttaacttacaatatctctataatacttggtagacttcaaatcaagaaatcttcaaatttaaaaatgtatatttttatagatatacaattattatatcaaaatatcacattttatattacagtcttaagaacatttctaatagggcactaaaaatatagtgtattcttatattttagcacacttaagaaatattattattggtgttctaaaaaagtatgctaaaatagttgtgctaaatttagcatatcatatagcattgtagtaaatttggtcaataataaataatactttttaatttattacagcactactaattattacgtttcattaacttttattaaacttaatattctccatttacgatactattattatttaaatattaaaaaaattaaaattaataatttgtatgtattctcaataaaatattaaatgactattaatattattaattattttttaacttattctacatcttatatattaaagtataattataaatagtaaattaaatatagcaatttttttttttgggttattaaatttggtcacaaattcaaaatagtttaattaaatgtactcgttttgtactaaaataaaattaattacaacttgtacctaaatggtatgttttagt

SEQ ID NO: 322111 - DNA, 1544 bp, Cannabis indica
gggcataaaacccaacacgtggctcatctccacatgtccacactaaaagtttaggggtaaatgttatctgcatttttcacagtagacacatccagattagcatccaaagccaatcagtaacaagataaagaggccaagcccatttggacagatccttccaagaatgtactccagctgcgcgatcgtagaaccttccgccattgacaactcatgcccaaaaggaagtccagtactgtgaggccggaagggtaagacagcatattcctagaaaactggtccaattttcttttttattcctatggacaaataaaaaaataatagtttgccaaatcttgatagaggattgtatcaagctgaatggggaaatttcttaaaataaatatcaagcaattaatttacagtcaatttcccacaatcatagtacacaccgttgactaaattcaacaaaattcgatctacctagtcagcatatcctctcatttgtgggctagacatcacgaggcaatgcaagtgtgttatcattgtaaactctccaatagagggaaaagaaaaactaaataaaattcttaaactggtataaatacctagtaaatcatatagattaaggattaaattctcttgtaatatttgttgtgacaagcatgaaaagttacattcattgtattttaaaaggcttttgaagctaaagaattacctaataatattgactcgtggactaaggctagttaacgctccgaccacgtaaaaaatattatttgtgtctttcttactttttttcttttaattatttatttcttcagtattgattttttataatcagtttttctaaaaaacttagtaaagatcgatataccaattagtataataatgtcaaacataaacttaagaatatcttttacctgttagtattgcacaattttaattaatatataccaattagcatatataattttaaatatataccatatgtataattttacatgtatgtctaatactgtctatataatttaataaataaaaataatacaaaatagtatctattattttttaatggatgtacaatttctaatgtataccaataagtatgtaaaattacaaatgcatatctaatagtattcattacttgttaatatctatacaattttaaatatatatcaactaatatataaaatttaaaacttatacttaatagtattgtttattattaattagtattaaactaattaatatatccaattacgaatatatatacactacagcagatttgtatattaccggctgaagcatccgccggtaataaatgcccagaccgccggcaataattaataccggcggaatccgccggtaattattcgccggcattaattggtcgctataaatggttattagcgacgaaatgggattccgccggtaataatattaataaatatttttaaatattaaaaaaagagaaattataatgattaataccggcggacccaattattagatccgtcggcaataatattttaaatattaaaaaaaaatattattctgattatttt

SEQ ID NO: 322112 - DNA, 788 bp, Cannabis indica
gaccttaaaagttcagagggcatgatttggtgcatgtcaaagttcagggggtaaaaatcctaattagcctaaaaataatataaaagtcaataataaagttgtgcatttatggtgacaaaattttgcatcataacaactgtttgctatgttcaaaatttgcatcatcttttagcacactattaaagcacattttttcttaaataagctatattttagcttttgtgtcacttatttacatttctattagagatgttcttagttatcaaaacaaaaaaagttatcatctctttgtctcccaacaaatgttcttgtgcctagtttgaaaactctaataaacatgtattttaattaattataacatatatttgtaattaattaataaaatattaattttttagtggttaaaccgctttacaataacaattatgctatgggttcaaattcatagaaaaaaatatatattttaaggatattaatttaaatttatcttttgaaaatagatggttaattaaacctcaataagacatatatttaataccttaatcattaaagataaacttttttttttgtttttatacttaaaaaatactataaaaataaatgtttgtattgatttttaacatatctttttagcatattatattatacagaaaacaaagtaggcatccctttcttatatataaaaaaattatgctcccccttaatttaaattttagttctgtcactactagtagaaaatgatattgaaattccgtattttaatattcccagtttgattatttaattaa

SEQ ID NO: 322113 - DNA, 606 bp, Cannabis indica
aggatctaatcacgagggaggagtgcttcggggagtgcttaacaatgggctatatcaactgaaaatcacagcatcatcaatgtcaaaagtccctgccaatactggttcaagctttactgtttcctccaagagcaaaaatattgccaaaattcctcaaatagaaaataaattgagtcagtccagtagctgtgaatccttgtttgctgagtctaatttcaattccgatgccaatgtgtggcacatgcgtctaggtcatcctaatgtcaatgtattaaaacacatgttggttaatgaaaaggtttctttcaaaaactccacaccattctgcaatgcatgtcacataggaaaatccaaatacaaacactatggcacctctcacactaaatctcactcaccactcgagataatacacaccgatgtttggggaccctctcccattctatccaaggaaggatatcgatactatgtgcatttcatagatgattatagcaacttcacttggatctttcctctcaaattgaaatcggatgtcaaaaatacattcctcaattttcaaaagtttgtagaaagaaaattcgacaccaaaattaagactctccaatcgga

SEQ ID NO: 322114 - DNA, 1501 bp, Cannabis indica
atccttacatgtcacttgagaacacattatacaatacaagaatatcaaacaaaaaagagtagggtagaagaccttatgcaaacttctctttaattattttcattctttcattgaatgttattacatacaaaaatcttacttttctactgaattttacaccgtaaagctatagtgtcattctttcaattttatagttgtaactcactcatctatagatacttattccacggcacttagaaataaacatggaacctctttaaaataagttcaaccctaccatggcttatcgtagcccaactatttactttctgttgacttttaacaataagtcaaccatactaatctcataatgtattgatcagccaagttattagcgtaaggactctatatatataattggcaaatcatgccgaacacacctaactccgtccatcactattataactcctatagccccacttgtattagatttactactagagactcactatttataagcccttagtgagggattcttgactcttacttcccatactacctttaagcacaagtcaatacttcatttaagcttctcattatacatccaagcacaaccaaattatcaatacctatcttgttcttttcttctaattttttcactttcaattgcacaaaacttagttatgtgcaataagttagttattttgagcttgagagagtccttccaaagatctctgttactcgctttttagattgagaaaaacatataatatttttccaaattctttactattaataattttagcttttgacaaatccattgtcattctcttcttgggcattatagggcttagaaacaccatctctttttatcagggctggactctatgagtttttctcttagtttcacactagatgacactccaacatacttatactattgtccataatattagtcgtaattggacatcagaaatacaaagttttggccctaaaatattccaaatcagagaataatctcttcataaaagttttagaaaattgaattctctttcgaatgacactaaaatctctaaaattggacttataacgtaagagatatagatattttaccgaaacaattttttaaaaatcctaaagcaaataaattttagactacaacaataaaatgataatttcgacttataaaaataaataattggtgaatggtttcatcataaaacatttagaaaattaaattatctttttaacggtaccaaaatcgctagaattggataagtattcagagattattcaggttttactgagacaacttttttagaatatgaaaaaacgatttacaacaagcagtgtagaaatactaatttttgacatagataaactaataagctttctataggcaccaagattgtgagaatcagataagtatttaaagagatccgatagctttactgagacatgtttcattctgaaaaataagaaaaggagacctacgaatattctcctattgtgatcaataaat

SEQ ID NO: 322115 - DNA, 641 bp, Cannabis indica
tacatataactaattattaatttaagttatttttatttataattagtttaaattgagaattatttaatataataaattaaaagttatttcaatagagtattgttaaaataaaataaaaattctactttatattcaatatttgtgggaaaacaatgaacattctaaaaaacatgtactgagtcaaactcgacaagtattgactcaaaattgttccctttttggaatatatttcatcacgaatagtcaaaagtctaagcgcatgcaccttggaaataattacaattataagtttaataacactaaactatatatgactactgtataagtatgagattgtttttgacctaaactttttaaagtcttcagtgttctacagttacagtactagtaccttttaaagggatatcatttgtgagtttttagatatttatgagactgatgagaatgggtcgcatttgggactttcatattcagtgggacagaataaaaatactacccttagctttcttaaagacaaaataaaaaagaaaattcaaggatgggaaggaaggatattgtctcgtgcggaaaaggaggtgttgctgaaattcgttgcgcaatcaattcctagcatgcaatgagtgtttttctgttacctttgg

SEQ ID NO: 322116 - DNA, 741 bp, Cannabis indica
taagatcctggtaaaataagttccaacacaaacaacatatgagagacgacaggagcgccttcacaaacacggcagccttggagcaaacgttccctttcaaactgagaaataagagcagagagcccttcagcacaaataatgaataagtaggtggagagcgggttgccttgtcgaatgcctcaggttggtgtaattggccccatgacatggccgttatgaacaattgagtagcgcacactagaaacgcaagccataatcaaattgacccacctttgatcgaatcccatttgaagcatgaccgccattaaatatcctcattcgacccaatcataggctttactcatatcgagttttagcaccatatagcctttctttccatgaacttttcttttaagataatgcataacttcaaaagcgatcataatattatctgaaataagacgcccaggaatgaaagtactttgagtgggtgagataatttggtcaatcagaagcttcatacggtttgcaagaactttcgcaatcaccttgtaagaaacattacacaaagcaatagggcgaagatcactcattgtggtaggagttttctttttaggaataagcaccaagtttgtgtcatttagattacaaggaaatattcctgaatcaaagaaatcacaaacagtagcaacaatatcagggccgactatatgccaatgtttttgaaaaaaaactaggtcccattctgtaacaccctaacta

SEQ ID NO: 322117 - DNA, 1434 bp, Cannabis indica
tctgggggagacaatcggtatgctgctttagctgggggctttgcacccgacaccaactctatttgatgatcaactctcctcctgggaggaagtctcttcgggagttcatctggcatcacatctttgaattcatctaacacctgctcaatttcaggtggagtatactcttccacttttgtatcgtacacggcgggagcgatgacaaacgttggcctcttctttttcagacccctcttcaattgcaaggccgatagaagcttgacttctgggggctatctcactttagcgggaacccttaaaggattctcacccatgataagtagattccttgttgctggaattgattccttgttgctggaattggaatgtcccccttctctgctagaaactccattatagataccacatcaaagtcatccatggttggagacttggatggttcttcttcctcttcttattcttcctcggcctctacaacctcttccttcttggtttgctcaaaataggccagcatctccgcaactccttctcccaaaaagcttaaatccatgttgggattggctaaccatagatagaacgtttagccattgaattaactctggctatagcattctcttcagctcgtcaagtttcttcttggctttatcaagcttcttgtttgctttgcctcattaagcttttggttggcctcgctaagttcttcaatggtcttctgataagctttgcggagatcctttgcctttttttagcaccatcgagctcagtcttatggctcttcttttgatcctcaacttccttcaataaatgagtgattttggctcgagagtcatttcattgcctcgcaacaacctcacgttgctcaacggttgtacaaagctcggactccagttgcttgattctctgaaggcctctttggtgagctagctgagaaaagagagatgcctacaaacaagaataattcgggaagaaaatagacaaggggaaaagagaaattttgaaaaaataaaaatgaagattaatacttaccgaaagagagatttaaactcttttgacataagctcttaaaatccccatttttgatgaaatctcagtcatcttgctggtaagattggaagtgatgccaacaagatgtggaaagttgcgaacaagcctgcgagccaataatgccggcgtgattcgacaaagggcaagtaggctccaagaaaaccatcttgggttgagaaccctagaatttaacttggtaaacagattcaaggacatgttcttccttattttgcgactgtcgagattggagaaggaaccttgggattggtaagctcgataacaattgattgctttccgttttagttatggtaaatcgattcacacatcatatttttcataaaattttggaataaaaaacttttatattaaatttacgaatccagcctatat

SEQ ID NO: 322118 - DNA, 2389 bp, Cannabis indica
gcaaaattgtagaaaaaagttgagattataaattttaaaatgttgtaagttgttaaaattgtgttataataatgataatattttaatctaattcattataaccacatatatatatataataaaatgttatataaaaattttatttttatatacttttaaatatttttttattgtataaattatattttatcacttgtaaaataaaaaattgtagtttataagaaacttaggttgatattatttgttaataataaaaatatatatatatatataattatgaaatattttttaaaataaaataaaaagttagaaatttaaatattatttattttaaatattttttcttcaaaaaaaatatttttatttttttttgtaatctataacttaattaaaagttacaatactttgaacttttgttgttggattacatatatacccttatagaagatatctattctataatctatatggtttatgagaaattttttatttttttttggctaaggttaacggggttaagtccccaatttatttttaaatgttatatcgcaaaacttcctttcactttcccttgcgtctcactttcccaaatggaacccaacgaaccaaagcttcctttcacttttcctctctcccttgcgtctcacttttccaaatggagccctattactcacgagacccatttagatcggctttcgatctagttcgagcgagaaggcgagaaggcgagcattgatgatatatggttcaataccttcctttgggggacaaaaataaagtcatctcaatgctctccccataccttcagtgttgtactaataatggagaccacgtgtttcataacaaatgaaaatcctctccccctcactattttaagatgtgtttgtcataattaaaattattttaaaaatattttaatttctaaatattaaccacttgtaatatattaattaaattactatgttatagtcttgaaaataatttaattaatatcatattacataaataatttttgaaaactatttaagaaaataaagcgatttccaattaaataaattaatttcaaacaaagtaagtttatacccttttattgtcttcaattaattgtagtaaaataactaaacaaattgagtttaactaattatttaaccatgtaaatattttaaaatatttcattagacaattaattataaagtattaatttttcaaattaaaatatagttaggattttcattaaaacaacttcttaaatatcctaactatttaccgaaatttttagaaattaaatatttaagagcttaagaagtgataaaatgcagaaataaataagatggagatttttatgtgattcatgtgttattaaccttagtccatgagtcagattataagcctcaaagtgcgtatttaatgttgttacagtgtttcagcaagaaccctaactatgtgttatttgtttctcttgaacaagaggaaagcttagaagaatgcgagcagagctttggctatacgggttgtgatccccctatcgtatggaaatagaagggtgtttaggctaagggcgggtatggacatgctcatgacccacctaggatttttgcaaaaagcccactaatggggtaaaaaacatgcaaaaaagagttgactattgggacccttagaaggatttgtgcttgtgctggacaataggagaccactgtactgagtggacgtatgtcgccaaaaggtttaacttttaaaaataaatgtatggtgttggccgagattttcaacaactattaattagagttgtgtgaaacaattaatgaatgttagaagaagggattttttttacatggttggggcattgatgagccttagtccatgagttattgttattaaatgagggtgtttattatagaaaatttttcaatccccttttctatacatcattaggggtatttataggctcgtaatggtagtaaaaggtcaccattgtcgtgtttgtatgaactatactttacaaaatttcttaaatttgatcataggacacaattgcctacttttcatgatgtatttagggctatctatagatatttggtgagatttgacttatctctcgctcaggatttgatagctcattatatataattatatggaccaatataaacacgatacttgtatagtatttgtttacatgtgggataatctatgatgatacataaccactcttatagatggtacttttaatttaccaatataagtagaggttagtggatttttctaccaaaatttgaagtttgagagttaattgagagttgaagagtttagctgcaaatttcaaattaaaaaatgtatacattcatagtcaattaaatttttcattaaacataaattaataaaaaaaaaaaaa

SEQ ID NO: 322119 - DNA, 1067 bp, Cannabis indica
ctctctctctctctattttcggcttcaaggaaaatcagaggtagagatatcaatttcagtgatttctttaaagattcagctaggtcttgaagtagtttgagtaaaggtaaatcctagaaaccctattcttgatgttgttaaagttttgataggtttagggttataatttgggatttagggtttgtactgttaaggtttcgattagggttattttctacaggttataattgatgttttatgcttgattagactgttgttgttggatgattttgaggttgagcaagtttgagttattagaactcaatcttgactcaacaatggcatactgtgtttttcttgttacttttgcttggaaattacactgggatgatattacaggtgttttggaaggtttggctgaatttgaggtagagttggttgagttttagggatttttgtattttctacaagagaatcagttaaccgtttctgtataaccagttaaccattttcctaggtagggcctaaggaaccggttcaccggttggggaatctggtttgttggtttgggcaggaccagaaccctaatttttgtatttttctcaaaatttagagcataaccatgttatttatcgatagggttacctttagttttaactttaggtttctgagaaggtttatccaagttgtttacccatttatgtgaatatgacatagggcctctgttcaacacgagattttccattcaagtcaaccggcacacttgaatcttaaaatgaggtaagattagcataaagtatgtatatgtatgtgtgtatgtatgtgagtgcatgctggttatattgttatacactaccaacattagtatagttgtgatacaaagtttattggtacagtgtataatggttaagggtatgtcacggtattaccaacactagcacgaggtgagtactcagcgtatgtggtacaacacccagtggtacctgagagtacagttcagcctaccaacactagcatgggaggagtacttagtgcatgtggtatagaggtcgtacttgttgggttttatgccctaaataaaacttatt

SEQ ID NO: 322120 - DNA, 1604 bp, Cannabis indica
atgatgaaagaacaaatcatcatcatgatcatgatccttttgaacttgaagggtgatgaacttcgtttgattttttcttctgatcatccattgttattatatatattattattattattgttttatatatatatatatataagaagaagaaactaattaaactaattataaccccgaattatgtataattaatctcactctaatatgattaatgtactataccagtgatcatataataataataaggtaagtaagtgttgttatttatagaatttacaatcccagtcctaatgtaaatatatatagagtgtaaaaggagtattttatctttattctaaaatatctgtatttgtaatttttatttattaacatatatccgatataagctttattttattatttttattttttgaaaaaggaagctttataatttattttaaatatatattttttttttctgaaatacaaaatatagtattgatattaaagaaattcaaagttacaggtttttaaatgttcttcgatattttattcattcaaatttaaagtagtcactaaaccaatgagccgatattaacaagatatttaacaaaaaaaaaatatcttattaataatatcgtgtggtgtgtgaaaaaaaaaaaaaaaaaacctttatatgaagacttttattgaattaggcctcgtcacccttttaatttaatttgatttttcaatgtaaatattaaaaatatataatataataatttatatttactaactgtatataatttcattgttttatttatattttatatcaacaaaaacattaattatattattaattggtgaaaaatattagtttttttttctttcttttaactaaattggtaattattcgtaattttgatctcgagacaggatgcatgagagtcatctcaactaggttgtttacatctttattttggaatatttttgtttgcttattattattattattattattattttagaaagtacccaaaactttgttgatgattagaattcaaattataaaaagtacattggtgatattgtcaaaaaaaaaaagtacattggtgataatacaataatgaattttattttacaactaactaacttcatttttttttttagataaaaatgttataataaaacaaaagtgataataccataggcataaagggatgaggcatttcctccaattaagagcaaatagagtttacggaaagaggatactttgctaaaacatgagcagcaatattcgcacatttatacacatgaaaaatctgtactccagagaaattagacgaaatattcgttaacaaacaatgaaaatcagaaacagaggcttgtgaagacaacaatcctttaaccactaaaaaagaattggtctcaatatagtgaacatgtaagtgtagatccttaagccattgcagattgtacattaaggccattgcttccatgacttccgatcgaaaattccctttgaaaggcattgacattgccacaatggtatcaccattgttgtttcgtataatatgacaccaaagccgaaagtgtgattaaatttgtcaactgcagcatccgtattcagcttcagcctactt

SEQ ID NO: 322121 - DNA, 742 bp, Cannabis indica
attatgcccactttttattatatatatatagtttcccaatttgactatatatgtattgtatgtatgtagagtttttattttttggtttgtgttgtccttttgagttttgagtttgacccttttgtatcctacttctttatttttgcttttttgtctcttggtttaatcggtatgcctctccaaataaagtcatttatcaactatgcaataccactcatcttgtatgtcataataattaaacaaaatataaaatcttttttttggttatttaataaaataaaaaatctaataactcttattatagagcactactataaggtggcaccctaggttcagggtcggccttgagcataggcaagctaggcctgtccctagggcccgacctagctcaaagggtaaaaaaaaaattatccctttttaaaattacatatttttttatttttttaacaatattgaaaaaaataacatatttttttttctaaatgagggtccaaaaatattcttttttcctatggcctattaaatttcagggccgacccttcctaggtcctataattatttagcggtatctatgatcttcattaaaataaaataaattagatattaaattacactaataataatattacaattgttaagtacctatggtgccatttaatatttctcatctttttaaggagagaaatgtataaaaataccaataatattaagttgcataaaatttaatttaataactattata

SEQ ID NO: 322122 - DNA, 2057 bp, Cannabis indica
agtagatcaattgttggtggcgataaattcaattatgcagttattaaagatgaacattacagttgatttgcggtcaaaaatgaacattatgtttgctgaaatgttacaatggataattatacatttttttatttatttgttgtttaaatgtttgtatatatgaatgttgaatgataaatatttttatatagatagtgtatattagccaaattatataaatgaaaaatatttttgattttaattaatattaatatataataagattttttaaaaaaaaatatataaaagcattagaggcggaatggcccgccgctaataatgacatcagtttatcagtctgacactagtattagcggcgtgggtgtcagtccaccactaataccagtttttatcgaccaagtattaccagtagattattaccagtggaccccaccgctattaacttttaccagcagattgagagattattagcagcggaaccctccacctctaataaccataaatgttgtagtgtcagcgtcagttttggcaaaatttgctaccgacgttgataagggcgacactctatggttgaaaacaaccgacgctatagggtaccctatggcatcgattattagctaggaaccgacgtgtaacaccctaactaatttaggcatgttagcgtgatttttaacgtactgtacagctcgttgctaatcaacgaggttatcgaaaatcgtgattaattaaaattttacttatttaaataaaaacataaagtaacatacttataaaattttgggttcccgtttacaaaacatttacaaaagtttagatgtacatatataaaagtttgtcgcctggagatgacacaacaaaagtcctgatgtcccaaagatcgtacgctccaggcctaaccgccccaacatgtacaacctccatctgctcgctcccacggttgtttagccttagccttgtccttaccttcacatggaaatagcaactgtgagtcaacagactcagtaagaaaagcataacataaaatataatattatcccgggttataatcaggcgcccatacacccaaccataaccctatccccgtatcccacacggtactgagtctagaacgttcatacgacaatactatccaccataatgtcagcctatactcaatattctagtcatactttagccatattgatgtgacagcatcgatcagtatttcagccaacatatatttatcagtaatcaatataactctacgtatactattactgctatcagtgtactctaataggcataaacaatatgtatgctaaacttgtaattacgtatgcatgacattatactaatcttaccttgtttatgaattcaagtgtcctggccaacctgggtggaacaattgctcggcgaattacaggccgctaaatcacatcgatcataacatggttacgtgacacgctatatcacaaccggtgacttaagtttcaaaccaaaaaccgacctactgcaagttaatatagtaataccctaaactaacagggagctaaccaaccgaggctctgaaactaacacgaatttttcggggaacccagcagcaaatccgattaaccggtttacaccaaaaaactcccaaaaaatccaaaacctaaccaaatcgattccaatccttaccaaaccttccagacctgcatattataccccaatagacatatttcaagcaacaaaacaactaaccaagttcagaatcaaaatcaccattaaagagccaagcttgagttctcaaactcaaagcttgctctaacctactaacagccaccaaaactagctcaattcaacataatacatcataactaaactccaaaaaacaaaatcaaacaacaacagccactatagaactcataaacccaattcatgcaaaatttcacaatctaaagcttaagaaactaaagagggagttgctagaaactttaccataacttggatactctataagatgctggaaaatcataagaatttgtagagaaaatctagaatcctagctggttccaagaagtgagagagagagagagaga

SEQ ID NO: 322123 - DNA, 737 bp, Cannabis indica
tacatatcgcggtagtgcaaacctggagggtttcgatctcttaatattttggagtctgtattttggggttgcattttagcgagtcaagttttaaaaaaaatatatatacatattagtaaagtacgtttaacttgtattttgatactcgggatcccgatccacatggttattaagatataaattattaaagttaatttttgagtttattattataaaatacgggcgttacacttatagtttctacgtgggttgctatgtgtggattttagttgcgattttggttgcttcattgattgttatgtcagttgttatataaatttccataaaaatatatataaaaaatactttttaaatgtaaaaataaaaaaatcctattaaaaacgaaacttcatttcgaaactgcataaataaaaataaaaaatattacataaatatttaataaataattacaaattaattgaaacttattaaactacataaataatatgggggaaattttacaataaaagaaaattaattaaaactttataaaaagtactcctcgtgatatgtatataaatagtttaataaaatataatttggacactacataaataatatagagaatttttatgtgatataatgcttatccattttttacactactacaaaaaaggcatataacttagcttattttagatgtctttcggtaacacttttgtttctaatttttaattacaaaatgaatgtaaaatttt

SEQ ID NO: 322124 - DNA, 1198 bp, Cannabis indica
cagtgttgacttttgtattctgttttgccgcttaggtcggctagtaagaaagaacttgtaataagtttgtaaatatttttgggatcccaactatgtttgaaaagtttaaatatattacaagtttattttcagtctgtttaatataaaagtttaaattctgcgctattttaattagtaatcccgattaggggattagggtttcataagcattttgggtagcgtgcctaattatttagggtgttacaaccgtaacctccaaaaaatccctagaatctgtcataaagaacattgtatgttgttatggtcttccactcaaaatcgtgtctgataatggaaacaatttgatagtagtcaattcactgatttttgtgtctagcatggaattgttaaaagtttttcaactgtggctaaaccacaaacaaataggcaagtgaaagttgtaaacaaaatttaaaaacaacgttgaagaagaagctttacgcatgcaaaactcactggccggaagaacttccaagagttttttgggcatatcgaatgacggaaagaacttcaacaggacacattccatattaaatggcctatggatgtgaagtagtaatcccagtagaaaccacagtaccttctcataggagagagacttatgaccttacctgaaatcatgcattgctttaagaatctttagatctgattgaagagcttcgagaacagtcacaagtccagctccaaatataccaaggaaaaaattgccaggcatcttaattctaaagctaaaagtcaaaagtttgaagttggtgatttgattttgagaagagcatttcgagtctctcaggagctaggagtgggggtccttggtcctaactaggaagggccatatgagatacaacataagctatgtgatggaacatatcgacttaaaagactgaatgggtacaaaaattctaagagcatggaatgttgaccatctgcgctgatattatcagtaaactagaggtggccgaatccttttattttcctgcattttatttttttgcctttccatgtatgcccgagggcatgaattaattaaattaaaacaaatgaagttttcaattatatttttagtattttgtatttctttaattatattataacaagtgatcaagagtccaaactcttaatcacttgggggtaactgttggaagttattttaccaggaact

SEQ ID NO: 322125 - DNA, 805 bp, Cannabis indica
cttgtgatatgcgagatgcacctcgttaattctacattcgtctcattgatcatcttgatacatttgatgtttgttgagaagactcctttcatgttttttctttgcgaggagatcatttaatttttggtacacgtgtcacgtgaataaactaattcatttactgctcgaaaaatgagtataacagatattgcagatggaatttttctagtgaaaactatttttttcgctatgaaaaagatatgtttctcccgtcaaatcaatcgcattatatagatgaatggattgataccaattaatattcagttttaattaaacatgtttctcaaataaataaaataataaaataaaaataattgttttattaaataaattttctgtaaaaaataaagtgtcacactacaccatctaactcagtcggcgcacgtgtgtgatgggtaaaatgtgtgcctcacctattcacacaaaccgaatacccttgaggccctatcccaagtgccataattttactttatatatatctttgtaaataaggactcatattcagactctatatattttaagcattgctattaggcactagtggtgcctagcaccttctagacatgtcgctttgcgattgactagcaatactccctaaaagttattacattaaattatatgttagtccaataacaatattaacatgtaaaaatgtgctagtcaccaatagtgcccactagcatttctcatatagattacacacactaaagacattctcttagggaaattttattttttgcccctaataaaacccccaatatcaaaa

SEQ ID NO: 322126 - DNA, 1487 bp, Cannabis indica
aatttaaaaagaaaaaaaaattgggcccctgagctgggtgggccctaggcacaagcctagcccgcctatgcccagggccgggcctgcacccacatgtatgttagacccttacagtcggtagttccatgattcataaggataaatatcaggtaagttgtgcaatcacatatgatttaataaaagttaggggtaataattctgaaactgtgtaactataggactacacagttgaagagagctcaaatgcattgattgatactacctatgcaaataaggtgtatcttattttctcgtggccaatcacttaagaactacaaagttaaacgtgcttgacttggggagtaatcttcggatgggtgacctcttgataaatttttccaaaaatcttgcgagtgaggacaaagaacgtcaaaaatacccgtgttcatgatttgtagaatcaatcatcagtctaagaagcagtcaaaagtgacgtgcccgtgtataagaataataagtctgtaggagaaagtccaataaaagcttgaagcgggaacgttatatagaccatttataatgtaagatataaatattatgttaaatttgacaaaataaataagcaaatactatatttgttgtaatatttgttattttgctccaatgcacaatgacactttatgttacaaattatgacaaaaattaaaatatgattcatgatcattaataagttaaattttaaaaaataattaattataatatttataattaataaaatgtatattaaagcttattattattgatcaatggtaaaattgtaattaaaaaaactatatttattatgtgcaaaattccacacaatgctatacttgcaaaatttgtgagccgtttggggatccaattaaccggttgagataattttttggtgccctaatttttaggttttcttgatatttagggtattttcacgctatttatcgataggaaaacttttgattttcagtttaagtcctcaaaagtgttttagagagacacttacttgttttatgtgaatgtggcataggacctcagaatcatttagctatgtttcaactcggttgattggcacacctaattacggaagtgaaataagaatagtgttatatatttgttatttaacaaatatataataaagattaaaatgtggaatattatatattaatatgagattaatatatattatgtgttggaggttatattatatcatatatagtataataatacacataaattgtaacatatgaggagttacaaatctgaaagtaaattgtaagctaaggatcacaattgataaatatgtaattatgtgagttgttacatatgggagttatggaattaatgggataagtttctagctgttagaaactgttacaatactcaattatatcatttaaatgggtattgggacgttgggaaaagatttaactcggagaggagttacattttgagttctttggaaacagttgtttaat

SEQ ID NO: 322127 - DNA, 1562 bp, Cannabis indica
tttgacaaaaaatcagttcagggttcgatttttaccattttgaaaaatacaagatttattttgttatttaacaaaacagagagttcaatcggtaacttttgtaaaatacaaggtccaaaatacataagaacgaacatattgaagagttgttggaatcaagtgttatattatgtttgtaataatataagataaattaaaatatttaaatgtgatatattatatattaatatgagattaatatatatataatgtgattgagagttacatgtaagtaatattcacataaaatgtaacataagaggtcaaattacttacattttgtaacctccacaattattactaatatcaaatgtgtaaaaaagtgttacacgtcttaattgaaattcttaatgctataagagttatggtgtgtgcatgagttatatttgagtccataacatctatgagggttatgagtttgaattttgaagtgtgtgatcttaaacactataaatagagatgtttggttcacttgtgaagacacctttttcgtaagtttctatcaaagaaaacaccttgttagaaactataagcttaataaatttaaaaaaatatttccatttctttcttccctaagtgcttgtggtaggaggaaataaacttttgagcaaaagtgttaaaccttgtgcaagtttgtgattcccctacttacacttagtgctagtagtgttgagagtgttatcacatctatatatatactactatttatattgtgtttttatttattgtaattttgtaatcttctcttcatcttgttttctatatttatgtgtatattttgtcaagaattgtaatattattttatcaatattattgttcatgtatttcttgtctttgagtaggtgtgtatttattttgtatttttgagaagttatcatataatttcaaaagattaatgataaactgtgaataaattattatcttgaaaagataatacgtggaaataaaataaaacaaggaagtgttttatttaaatatgatttagtgactatttcttgaggaaaatattgcacacaccttgtaatctactaagagttgatagtttgctttttaggcaaataaagagcaaaaataaactaacaaagtggtttagttcatttttttaatctcttgagagattaccatgaaatctcaaaagattcatgaaaattgtgtgtacatgtaaaaataaaatggaagaagttttatttgtaaagtgatatggtgatttgacctattgtagaaatatggggttgagatccataaaataaatcaaaatttgtttgattaattaggagagcaaagatgataaactttggcaagcttagtgtcaaagttggtataaaaaattttcgaggaggaaataataagtgttagagataaagtggtatttattttcgggtaaataccattttggaccctctgttttacaaaagataccaattagaccctgtgttttgttaaatgacaatagaccctgtattttctaaaatagtacaaataaaaccctgaattgattttttatcaaaataaagtttaattat

SEQ ID NO: 322128 - DNA, 1534 bp, Cannabis indica
agaggttctcattaaaatagtggctcaatcattaccaaactttgccatgagtgtttttcttctgcctcttgagattagtcgagacattgaaagccagatggcgcacttctggtggaagacttcacctggtgataaaaaaggcattcactggatgtcatgggagcgtatgtgtcagcataaatcagtgggtggaatgggttttcgcaaccttcgggatttcaactagctcttttgggtaaacaaggatggcgtcttctcacaaaaccattatctttggctggtcgtgtatacaaagctaggtattctccaaatgaaagttttctcaatgcttaattgggaaataatccgagctttgtgtggagaagtatctgggaggctcaatctgttgtcagaaagggggttcgatggagggtgggagacgggctttctatctcagttttgggtgaaccatggttgccggacgaagaaaatcctatggtggtgtcgtctcacccaggattacaaggggctgttgtcaacaatctgtttagacaagagggtggtggatgggatatggagatcttagaggatatgtttggtcagcgagataggaatttaatcagcaaggtgccttcacaattgactcatgaaactgaccaaatcatttggcacttggagacttcggggctttacactgtcaaaagtgcctacatgataattcaacaagaaaaaggttggattaacgaagagtctatcacaagtttttggaagcgggtctggactttgaagattccaccgaaggttaaaaacatgatatggcgggcaggtactttttgtcttcctaccatgactcagcttataactaaaaaggtggctgtaaatgtcgtgtgtcctatatgcaatgtggaggaggagattatcttccattgtttagtcacttgtcaggatgtcaaatgttgttgggacagggtgggtataggcacacatctgctacatggtgacaactttctagtttggttgaaggacatatttgagcgattggagcctgataaaagaggtttaatagccactctctgctgggctatttggaacgccagaaatgagccagtttggaagaagaaaaaggtaagtgctttggatattgttgcttcagcgaagaactatcttaaccaatggagaaatgctcaaaattttcaaattgaaacaccttgccccgatcttcaaaagggtgatggtgcagagcattggacttgtccacctgttaatagtgttaagatcaacattgatgctgcaatatttgaaattgaggctcggtcaggcatgggagttgttgcccgagatgataagggaacgtttctggaaggcttcacgaagatttacagtgaaaagttggacccaccacttgctgagacattaagcatgagggaggctttgagttggctcatgaataaaaactggcaacaagtctttcttgaaaccgactgtcttactgtagtcaaagcaattcgcagtcatgtagaaatgttatcttgttttggtattgtaattcgtgact

SEQ ID NO: 322129 - DNA, 1021 bp, Cannabis indica
tgcgattagtcatagccttagtaataatttagtaaaagacattacaaagactaataggtcgaaagtctaaagccttgatggggttgtcaattttaggaatcaagaaaataagggtttgtccattgctatcagtaacgacataaatataatttacttgcaaaaattatgtcaaaataacgttgtattctctttattctcaagatcacttagtcttcttatgatcttgatagtaaatttataaataatataaacccaagagtataagactataaccagggctaaaccttttataaatcctagggttatttattgtttatttcctttgctctatcattttttaatttttaatttgattatttattgttgttcttatgattctgtgtagttggctaaaaattgagtcaacatattttttttacctgtcttgtaacatgagttaaatatatcaaatagagttgtaaatatcggctggaattctaacacgacacaaaactgatacaaattcggtatgcacgagcacgacccgacacaaaaaattatgggctcgagcatgacatggcatgatactgctaattggcacgacacgttacgaaaaaaataagtttaatcacgacacgatacgacaagctcaaaagcatgtcacgtaagtacaaatatactaatactaaaagtaaaatacattaataataatataatatcagtaataataaaaagatacatatatatttactaataaatatttaaatgttaatcattctaattaatttttatatgataatatgtaacgtatttataaaaaattatataaaaataattaaaattataaatatatataatttagtgattaactcattaattataaaaaaaaatagtaaaaaaataaaatactgagttcgacccctatataaaattatttacacatactaaaattttactaatttttttacttttttactgtggggcgagaatttttctcaaaaataactatgtaagtttatactgtgtactatgttaagtttta

SEQ ID NO: 322130 - DNA, 610 bp, Cannabis indica
tatttttcatttttaaatgccaagtaattcaaccttaaccctgtgtggtattctataaatagaaggtaaaggcttcaggtttcaaacacaattgtatctcattcttttcagagtgaattcctgagccaccactttcctctctcttttcttctctaaatttcgaaatcccttgagtgaatgagtagtggtaagactatggaaaatcaaccatcaaagaaggagaaaaagagatcctaaactcttatgtgtttattttcattgttttagaattcatattaggatgttaatcaaacatacttgttagtaattctagatcgtggtaaaatatttccaacatatactttgaatggagacacctaaatcttgttggtatcacttgaatttagctgaaaactcctccatcttgctgattctaggtggttcgaaagagagagaggatggtagagagagatgtgtgtaggtggttctagattaatttttatgttatcctcaaaacataactcatttcatttcctaatttaaacctatttcttacagctgcataaaatcccacaaaatgataagggtcactcaataaatattgaccatttttgttggaaaattattttac

SEQ ID NO: 322131 - DNA, 999 bp, Cannabis indica
cgaaaaagcaagccgcagtcaattgtcctttaagattttaagcctttaatcctctttttttctgtcacaaattaaatgaagtatatattgtataacatgtttgtattttcctagctttaatgtccttatcctatgtattgcttagctagtacctctttgaagttttttgcatgaaataatctcttactttctcttcccttcaaaatattaccatattgtcttaagaaaggtctcaagttattaaattaaatgaagtatagcttgtatcacatgtttaattagttctacttgttattagacacataaagattgagcactaaatgtcataattgagattcttatgctgcaatcctcctttttcttcttttcttcttttcaattttttgttgtggggttaaataatgtttagataattttttttttttgatagaatgtttagataatttttttacatccgataaaattttgtaaaaattgaattatttattactcttttttatatatttgatatgttagaaaaaaaaaaaaaaaaacccttcagaattgtatttccgaaataaataatctaacaagtaactaaaaaaattgttaaattgcaaaattagctatcatcgctttatttttgtaaaatataaaaatattaataataaacttaaaatgtgttattttaggaaaaattcctaattagataatgaaataatgagaattgaattagtttaatggttcctttcaaaaattacataggatgttaaaagcttttcactaattaaatatagcaaatttaattttatttatttttataaggaattttttttcactttttataggcttaggtttgtgatattattatacatattttttttaaatctcatatttaatattttaaacattttttctctttgtttagaacatataccatagaagtcaaaggtatcctatttaatatacgagttttttaaattttatggtatttcttccttcttttttttttttttattt

SEQ ID NO: 322132 - DNA, 559 bp, Cannabis indica
agtgaagtggttaggtgttgagctagctaaaatacatcctttaccataccctagcccaagccttatattacaagtttagtaaagccctattgatcaaggggataagtttacactacattagtggagaagaatgcactaatccaacttatggagctttaatgaatgtcaaaatcctagggtagttgtagagaagtttaaggttttggtgggatacacttgtataaactattgattatgtgactttggggaggtattaatgatatccagtgagaaaagtttgaaggggtagcatatatggtaaaggcagaaatatttttctattccatttgattctatttttctgagagcatcaatgtactattagactataatatagtatgaacgataaagcatatataaatgatatgtaatgcggaataaactgtaaatatatcgaaaatatacatgcaatgaaaggatcaaaatacctctagccatttatgtttgagcttcaatagctttggtattggagttcgggcttcctcgctctctcaactctctttagatggaattttactgt

SEQ ID NO: 322133 - DNA, 740 bp, Cannabis indica
taatataatacttaatataaaacatagcatacgtgcatcgcacgtaacaatatactagtatatatatatataaaagaagtgtacatttaatttattaagtcttaaaatatatatatatatatattttgaataaaaggaactttttattcaaaagaacaaaccaaatacacagcacaggccagaggaatacccaaccgccaacaaaagaaaaggaaaagctaccaactattgactactctcaatacatactgatctttcttgttttgaaagatcactatttttgtaagtcttaaaatacatttgtattatattcattagatttttaaatcactatttttatattaaattaaatgagttatttttacacgttaatcaacatctattaacatcgaatttgcacaagttcatttgattttcaagattttattgcttaccatttgatttttctcaagattttgttgctcttaccaactcttcaatttgaagatctgagtagtggttgccaatgtgagaaaaagcttttacccatgttttagacaagattatgcatcaactgaaaaacgagttgatcatgaacttgtacatagcattgaatatacaaaaaaaaaacataaaattaaactgaatgcaacttattacatgattgtacagctatacaataaatggaaattgaaagaattgcttgaagtaataattgcctgccgatatgaagctttcggtatagttcaaataaagatagg

SEQ ID NO: 322134 - DNA, 1189 bp, Cannabis indica
ggtgctctactgtgcaggaaagggtaagactgtcgttgatcagccatgagtgtaggagctggacgaagaatgtacatgttcgggccacactagaccaagcgggttggggtctaccagtgatgtattttgagactctattttgccgcttaggtcgaccaaaggaaagaacttgtaatagtgttttgtaaatacttttgggatcctaacttctgtaacttttaaattataaggtttaaattattacaagttatttccattccgtttattaataaagtttaatttcggcgcttatttttctagtaatcccaattaggggattagggtttcataagtttattgggaagcgtgcctaattatttagggcgttacaacatgtcgtgagctattgtgttggtactgagaatatcagagaatatggcattggacaaaaaagtagttgccttttggtgattcacacacctgtgtttgacacatcctaacatagtggggtcccgtgtctagaggacgccacgtaggatgatatatggaggcctctggatatctcttcaattacccgtatccagattacccatgaaagcatccagatagatcctgatggacccttctccttctgggccaaatagcatttctcggatcaaagtggtctgaccttgtcgcgtctgtaagttgaatttacatctgtatccgaagctgcaacttgattccgtaattgagttgacttaatctgattgggctctagaaggggcctactttggttgatattggactttagaaaatgcacatgccactaatctgaaaacgggaataacccttatattttaaattttagtatgttttaagaattaaatttctcaaatgtttttctacacgtcttaaacgagtagataaaaaaaatcaccttgagtaaaacattaaaccttttgtaagaaataaattttagtaggggtgtttatcgaaccgctcaaaccgcccgcactgtaccgcaccgcaaaaaaaaaatacagtttgaaattctttgtggtgtggtgcgcggtttgaatttaacctaaaccgcgcggtgtggtgcggtttgcagttttgcattgttaatatgcggttcaaaccgcaccaccgcaccgcaccgcacattataaaaatactaatttttatatttattaaggttcaatatgtgaatgtccaacctaaaacc

SEQ ID NO: 322135 - DNA, 792 bp, Cannabis indica
aggctttttctgagctttttcacagaggctctcaatggaagtaccaaactgttagcgcagatttttcgctaaataaaattgagcctcacaatattaatcccacacatattgaataaaagctatagaaaaataatgtatgaacacatggttttttacatggttttacagttaaaattctgcatagtccacgagtcaatctttttcagatctctgattgttgtttttttaggaaatctcttgtatgagttcttttgtaccccccttttacttgatcttgtctaccactatttataattatatagtggtttgtaaattgcaaaagttaactgtaattgttacaacaattattccctcaaataacgggattcgattacaaatcaagctatgtaaatgaggtaatttacacagctatgagtatcccacttttattgggccgaaatgaacgcacatttaagggtatatggaagccttatctcttaggggtgctcgctgggaatggacccaacttatcttggatggcgagcagttgctcgtcatctgtcttccaaagacaaatattgttttaactctgatatcttgactcgccaaactgtctacacttaatttgtatatcgtctaatatacgctaagtgtttttatcgttattgactctctttcacgcagcgaggttgaagcctcgtcatgcgcacttacactcgtatggtttctcatcgatacataagttagcagttcgtacgtttttgtctttcagaaggctattcagccagccgagttataaacatactctgcgaa

SEQ ID NO: 322136 - DNA, 953 bp, Cannabis indica
ttttagtgctatatatatggtactcatgtatgtaaatcatctttatattgattggtaattaataacgaacactaatatgataaaatgaaccgaaccaaatagattttcactgcatgaattttgagaatgaatacattaaacatatgcatgactccacagtgtttttatatatctgaagttattgattatacatagggatacaatttcattatctaaacaatacataaaataataacttaaaaaattacaccaaataataaaataaaaaatccaataatttcaaaactagtccaactagagaccagaattgaaaaccactttagtggaaggcagccatgaatttccaccaatcaaattggcaacagtgaacttagaagcatcattaactccgatcaagtgaaacccaggccagttgaccctttgaccagtcgcagctccaggtcccacattggcatactcagcaaaatacagagtactcagaacagagcttccagaaccaggccactcttcccacccttcaggggagatagcctcatcaatgttagactgcataaccacagctctcgaatacgacttccacggccgacccaggtaagatttgaacgagtgttttacggattcgaattctgcgctggctgtgatacgacagttttggacagagaacccggtgttttgacccgggtcggatctgccgtgggctaggatgacgttggcgccacgtggacggcggagggcgagttcgcagttttgaaatacggcggcagcgttgccgaagatgaaatcgacggtgccggagatgtcacactcgcggtagaattggcggagagcgagagcgtagagtgtgtcttggtagccggcgatgctgcacctgtatagggctgatctgtccgaggcgatgtacagagccaaggcttgttttccatgtggtcctgccgtgtgtggaacccgatgtc

SEQ ID NO: 322137 - DNA, 572 bp, Cannabis indica
tgacatataaagaatttgcatcgatttctgtaactgacgctataattgtggacgcaaatagtcttatatttttgcttcacttagtaatagacgctaaaatatttttgctttagtttataaccgaagaaaatagtaaagcactgacgcaaattagtttttcgctttggttatgaaccgaagcaaaagaataaaaaaatgaaaaaaaaaacacaaactttcatatcaccacaacccttcggaccaccacaacaaccaaacaacaacaacaacaataataaataccaccaccactgcaacccatcgtaccaccaaagcacatcgaccaccaccatcccttcgaatcaccaccaacccactgaaccaccaccatcccaccggatcaccaccactacctgcaaaaaaatcagagagaaagagagagagaactcgagcaagaaagagacaaaccatagctggagctaggcgcgagagatagggaatgagaaaaaaaataatgaatctaacctttgaaaactccattttcttgagagagagagagagagagagagagagaggagggcggagggaggacg

SEQ ID NO: 322138 - DNA, 1721 bp, Cannabis indica
cctctacagatggtggctcttccctagatgagaatgtcaatgtcttctttgttttaggatcagcaaatcgaatcacaacgttcttgtcaaaaatatgctgaggttgtagagtttgtttcgaggtgtattttactctagctttggcacacagtgccgtaatcatatttggatgagcaaacccctttctaacattcagaatatgatccataatagagtgttggatgacattgcccacatcaattaacttctcatggagaatggcatataggagtgtggccattatggtgtcaacagtagaaaagtgtttcgtggagcaacttagctccaataaatcagagccaaacatgatattcatattccatatcattctgatagaagtgtctaatttctccatcttcagtacaaacccatgaggtaatggagtgtctcttaaacttctttaaccaagtcttaggtgccctagtaagtgttacagggaataaaacacattttgtcaccaaccacctggtaggcgcgcataagtgtattgaagtcacttatgtcaaccccggagtccatacttccatcgtacttggttgtggttggcatcttgaatccttgtgggtatggaggaccaatatcctaggagagtaaggttctgactcctcacccgaatcatatccagttacattttagttattggctaccatcaattgttgtatcatttgttcgaaggcattgagcttagggtcattgacttgtcctttcccaccatggccagctagggggatgttattttgacgtccccattaatgttatggttgtcatttactactagtggaattggattttgccttctattcaaatattccctcaaatcaggttgtctttgattgaagtgttctcgcaaatcaggtcttcttccatcccttgggggatggttgttgttgcgacgttaataattgtgaggcgcattattatgaacactaatagagcaacttatagagtcaaatcaactactaccctcagcaaaactcactgttttttgttgttgtggatgatgaggagagagtgggggctgctcagagtatggctcaacgtatggagtcaaagttgtctgattttgagacaaagctatttgcttgagcaggttggcgccttggtggcgtcttttgttatggtcctcgatgtgttggcctctgacgagcataatctttgtgaggagcagtgcgtcacctatgtcccttatgtggttgggcatgtggcgcatcaccacgggaggtggaccacattggttcttgtggagtggtataaactgacaggttggggtaccttgtaggtggcgatgaggctcgaattggagaaggtgactctctccttttttctccacccacgttattatcctcacagtaaagccttggaggaacaattgggtctcataagctttatatgaccacctccatgtaatggtacatgagtttcttgtgaatgtcttgcatgaactccaatatttggtaaagtttggtcccccctccttgttggattagtcacaggagcatgttctctccttgggtgcacccttcatctcctagggggagaaggatctctcggtacatgaggttggtccccacgcctttgggcttgcacttggagctcttgttgggttttgtgccctaaataaaacccatttcaatataatcatatttacttattaagaaagatcagaaataacattttatgtt

SEQ ID NO: 322139 - DNA, 1541 bp, Cannabis indica
attaaaaaggtataaagaaaggaaatggttacatgggtgtagagtggaaaatggtgatcctatggtgtcgcatatgctttttgcggatgatagttttttgtattataaatctacaaatgagaaagtttcttacattagtaaactttggagagttttgctaatgcatcagggcagcgggtaaactttgagaagtccactattttttacagcagtaacacttctcaaacaatgaggcatacactttttcaaaggttgggcattcacgaagcggatgagcgtagcaagtacttataaaaaggtgatctttagctatttgagagataaagttcaaaagagaattcaaagctgggataacaagtttctttcaagagcgggaaaaaaagtcctcatcaagtctgtggttcaagctctccttgcatacactatgaatgtattccttattccagttggtatttgccaagatattaaacgagcaataagtaaattttggtggcgatcaaatagcaacaaaggcatacattggttgagttgggataagctttcgatgcacaagagtaggggagggatggggtttcgtgatttttgtgactttaaccttacttgtgaggatagtttggttgggaaaatatttaaaacaagatattatgcaaacggtaacttcctttctgcaactttaggaagtaatccaagctatatatggagaagtgttttggaatcccaaatactggttcaggctggagctagaagattagttggcaatagttcacaaattagtatccttaaggatccttggcttgttgatgatgtacagccatttgttgaatctcaacagcttacaaccaagcatgtacctattaactcttcatgcccattgtgtatggctgcaccagaaactgctctacatgtccctgttcattgtgagtttactcaaaattgttggaaacaggtacgggttcctgatgttggagctgctgctatgaatttttgcagttggtgggaagagggcttgaggacttgggacatgacagaatccttggaagctagtatgattttatggtcgatttggagggttaaaaatgatgcgatttgaaatgctaaacaacctacattcgaggaagtgttaccattagcaaaactaaactttgttgattggtgtaatgctcaaacacaagacttaagaattcctaatgaacccaaccgggttcgagttgagaattggacctgttgcgatattttgcacacgcaagtgtacgtaccgtttcaagtagtagactcactaggagtgaggtcgatcccacagggagtgtagttaagtacgttaaaattaaagttttacttctatttggttaaataaaagaatagaaaagaatgaaaaataagaaaactagtaagaagcaatgattaaagaaaattgaaagttaataaaaactagggcttcgatttcaattgtttctattgaatatggcctaatatgattatttcctaatattaatttctatgcaatagcaggtttactaaggtaatttatagtcttctcagat

SEQ ID NO: 322140 - DNA, 703 bp, Cannabis indica
aaatgtttttgtgtcattttacaactgaagcaaaaagttatttttgtagtagtgttagttagtattaccaaagcaagttgtcttatttgtcaacaaattcatcatatgtaagtttggagtgccatactggatcatcactaacaatggaacccagttcgagggggattttctaagttcgcattgtgaagagaaagaaattaagagaagattcttagctatggtgcacccctaggccaatggcaaagttgaagctacaaataagataataaaaaagaatattaaaatatagttggagaaactcaaaggtaggtggctggatgaactaccaaatgtgctctgggcctatagaactacatcccgctctatcctaggtgaaattcctttctccttgttgtatggttgtgaagcggtgctttctattgagatgcaacttaactcattcaggatgaagaatttcaatgaaatgacaaacgaaagggctatggcaaaaaaattggacctcttaaaggaaaagagagatgtatcccaaataagattgttagtataccaacagaggaaggcacgatactataactcaagagttcaagaacacacttttaggatcagagactaggttttgaggtaagtcctcccaaatactagggacccaggggaaggtgtgttgggagccaattgggaaggtccatactgttgggttttatgc

SEQ ID NO: 322141 - DNA, 655 bp, Cannabis indica
gaacttaacaatggtgaatcctgcattcactctcaccacctgaactatccccaatttgccccacattctcctaatgaacccttcaaagactgcaaatggagggtttgcaccaagaaccatacaaataacaacagtactccaattcccagcttgcattttcacttcctccacatcaactttagcaatcttttgtccttcatgaattagaggttccataaacgatagtttagcatcatgataagcaatcttaccaaaagtaaattactttcattgctggtgtgaattagcttgaaagtcttcttatttaacctcctccgcccatgatcaattacagcttccacgtccaggattgctatcaagaactaatttcgcacttccttcattttggaccagctcaccaatcaggtcaagtccctctttttcaatctcaccattaccctctatattctcacaatcttggattgaagggggatccaattcagcttgtcgagaaataggctttcgcccaactcatttcttcttcgccatggaagagagagagagtagcacgcctaaatatgcaacgtcgattgcctgcgttattttaaaagttatttttaaatttatgtaacattttttattttgtcaagaaatttaaatttcatgtttatttata

SEQ ID NO: 322142 - DNA, 1288 bp, Cannabis indica
tatttacagaattcttacttatagtccattgatataatcaatataagtagtttgcccaccaattattagttcataattagagttggtcaaaattatcattttacccttctaattatttcttgatgtcattaagtaccattaattcaatgtgaacttttgatctataatccaattatatatttggatacaacacttagcactccttgaattaacactataagggagttgatattcgatcttcttgaaaagtttagattccattattgtataatatgttcccagccgctcatgttattaagctcctaaagataaagttataagaatcatcttgtctgagaaactttaacgagtgaatcaaagaaatcattgaatacaaatatgagtgcatgtatagtcaggattcagactgatttactaatgatcattgttgtgatatgaataactctttcattataaatggcatgttgatgaaatatgttattttatatcaatccaatcatgtataatcaaattatatatattacctttactacatgtctatccacatatatgatccaaatcaatatcacatgcaatatagtatggtacattaaaaaccttacttggtaattctatattaaaaattctatactttaatacattaccgacttattttattcttattgtatgatcttcattctcttgtacgaccttacatgatcatacctccttttgtatatgaatatggaattttcatatatttattaattatactaatataattaacatattcatttatcttataattttatttcatatattcaataatatattatccattaaatacttacttttagggcataaacccttacaagggttagggtcgggctccgagtcagggttcaggttagggtctagatctaggcttcgagttgaagtgtgagttcagatcagggacaagtctgggttttgagtagggttcgaggtctagggccatgtccaagtccaagtttaggtcagggtcgtggtaggggttgaggttcgggcccaggtttagattcaggtttggggtccatgtttgggtccgaggtctccgtctaagtcagggtccggtggccaagtatatacatgtgtacacaaccactacactaactcctaccctgacctagacctggacctgcacatggccctagaccccgatcccgatccaggtttgtattgctggtgtgtaaaaatgtatatacatggtgtaacgtccccgcttcaagcctccattgggcccttacacccacggaatgaatggctctta

SEQ ID NO: 322143 - DNA, 880 bp, Cannabis indica
aaaaattataaataaataaatacaaaaatctcacttatttctaggccaaaattacacaaatattagaaaaatagtgattctcagctaaagatgcaccaaagtagagtggagtgataagggatgtcacctttcggcttggaattcatgacattggtgaaaagtgttggaaataagtattttagggtaccatttctcgcatatgatgccacatgggctagttgtggcatagttctccaacatcccatacttaattacatcactcagttctcgaataaagtatactagcctgtactgtaagctaattttgagcccaataacttcacaattgagttatgattatgagaaacacttagatctatcgtgaagcgatcttttttaatgtaagttgaaccaagtcatttcaatattgagagagttatgccggttttattgaagggcagtttgtgctgttttgctccagatgcgagcactgacacgaccgaatgatagctctcgaatgtgcatgttctcgccctccttgggatgtgtttttacttatttttgatggccaatcatattttgggggtcctaggaccctaaaacctcatttcggcatctgaaaccctagcaggagaccactgccaccggtcggtgtcaaaaggtgccagtggttggtcgtgacttatgggaagcagtggttggtatttcttgcttatttcagtcatatggaggctaaaaagccattttagccacattggttcttggctaactagttacgagacactactacaaatatcagaattcgcgacggtcttaaaaacgatttttttcggggaccgtcgctaaaaaaattatataacttttaaaaaccgtcgggaaaaatttagtattcccgacggtt

SEQ ID NO: 322144 - DNA, 725 bp, Cannabis indica
ctatttttttaattaaaaaatttaatgaagaaattgttatagaagattttaattagcactctaagaatatttttacggtgtataagtttttatttacataaatacgaactatttatgttttcatactatttttgtgttgtcattttattttattttaaaaaatcgaaaagtttaccgtatcgagagtaaagttcttaatattttaatttatcgtgtgtgttaaaaaaactttaaacttattttcgatatataattttttttggaattttttaaaaaatttacaaaaataatattataattataataaatacaatcataaacaaaaattaagaaaaaaagattctcacatattttttcggatacaaaaattaataaaaaaaatataataaaatattgtttatataattaaagttttgcaataaaaaattataattaaaagttttgttgagcattttttatatcatgagaattggagtaattcttggcatctttggtcaattttctttgggaaagtatcttctcttaaaatttccttgggtttttagccttggattgtttaagaagaatggtcccttagaggatgaggtgagaagtggctcatttaagatgtggtttgttggacatggttacactgatatcagtgcgtttggaagtaactgtgtaattactaagtagggtaattagtagggtggtaattacacagtgtagtaattacactatatttt

SEQ ID NO: 322145 - DNA, 1196 bp, Cannabis indica
aatgtaaatctcgtcgcttctgctctgaagtcatgacaatcgcagtttttggtgaaaaggtgatcttcaactgtcaatactgtttgaatttcggcttctatctgagagtactggctcgatggagctgtgaacgtcattgaaggatgtctagggctgattagtgaagataccgcgagcaagccttcttatagcgagatggacgcctcactatcacttgctttggtttacccgtctattatacttagtttgcatactatatattatacgcttagtgtcttcacagtcattatatcccattcacgtaacgaggttagtgcctcgtcttgcacacctgaagttacatggtttctcgtggatgcacaaggcaacagtttgtatatctttatctcgcagaaaactattcagtcatccaagttgtaaatatactctgtcaattatgcttttaacgagttattcctcgtcaaatgtaattataattacatgtctgggttcatattttcctcaacttgacacgtgtcttcctttgatgtgctagccgaatttcgggtataacagttacataaaatgtgcactatgattttttttagtataggagacttaaaaacttgtacacacttgtcagacattagtgtgtgcagttaaaataggatcattgtccttggcaagattttcatttttcacctttttcaatttgatcccacaactggatgctgtcacaccatattgaaggtaacccttttctatggtagttcatcctcttcataactcctaattataaagtttcatctcactcaaatgatggctttcacgccttagtatgggtagatctattccagttaggatcctgacaagaaactgaaataaaaattgcgcaactctatattaatattttaatttatcacaatcacacatatataagtaactcaaatcttctaacccaacctcaaaagtataaagagtacaagaaactaagctaattatcatccaaaagtataagcatgtttttccaactaaggatgaaagaaaaatagatggaagataagaactactcaaaatatttgtacaaaatagagaaccaaatgaaaagaattagacaatgcaaacccctaaagattttttgagggagtcaaactgacttggatctagggtcttagtgaaaatatccaccaattttttttcaatatcaacatattcca

SEQ ID NO: 322146 - DNA, 691 bp, Cannabis indica
ccctaacaacaaccttaatgaaagatccaataagctaccaataatcaagtatcaaaaaaaatataaagtaaattaggtttccaacttaaatgaatatctaacggactctacctattaatatctatcaaccaatgatcttctaataaaaattagggtataataacctcattattcacatacaaaataaggaaaataatcaaattactaattatgacaaagcatctaaaaataagagaattggataccacggaatacagggccaattgatagatctggccgaaaatataacgtcctactaacttagacacattattgtgtttttcttaaatactgcactaacatttgctaatcaaagaacttagtgtaaaatcgtgtttaaaaataaacgtttataataaaagtaaaactttactaaatacacataatcaatacttaaagtttacaaattttaagaccctgaatctatttttcaaacttaaacaaaatatagcataacaatagtgttgtccattgagtacaaaattgagccaatgatgtcccgaagatccgaacactccaagtctaaccatctagataagtacaatcttcattggcctccatgttagataaattaacaattaacccaagatctatttgtatataacatagaacacaataataagatataataattaggtatgtgtacctgatt

SEQ ID NO: 322147 - DNA, 2024 bp, Cannabis indica
acttgcaattcaccaagtttcattaaccttacttgggattttttttggggtgctacttggtgtacgcatgtggaactggcaaagaataactttaagaagttatctttgttagcaagtggcttagacacagttggtcttaagtgtaacaaaagcttacggcttagtgtctgtttttgaaatcacgtagtggctactcctacgcagcttactgcgcaacgacaatcactgaaaagtgatgggaggccatgctgaaaagcaatgggtactagctcttttatgggtccctacatggtgaaacgttagaggaactaattgacaagttggctggtgagagtacttaccgagatgttccctattttagtgtttaggtagaagtaccaactccaagttcctgttgtactcaccagacttctatgcgcctttattgttatcttgtaacatggtgcggaccttttcagtttgtccaaacatgcttgttgcaggatctttattgtcaaggaatattcttcagggagtaaatctcttacaaagaatttctttcctcaatctgtttgttgaagggcctggtaactttttgtgggtagccatgctactttgagttggcttggtctcttcttctttctcatcaagggatcctgctagcaagatggtgtttacctcttggtcattgtagattagaagtatgagagtagagtattggtggatcgggctagccagagtaagactaggtggccagccacattgaagcattatgtggccatttggaggaggctatggatggacaagttgttgactctatggccgaccaacttgtggaggtggtggccggccaaattaatgattctatggccggctaacctgttgaggtcatggtcggctagccttctagaagctaggttgatactacagtttgctcccttaagcactcagttggctctgccctcagcatgactgtcgtagagcctttgtgcaattctatcaatagctattcaacttgtttcttggtaaagcttcttagaggtggaattgggataccacgtctgtgcattatgttgtgcaagattagacatcttgcagccatcccctgaatccttgcttttttactagggttttgattgggggtatgctgctgtaggtgtatccatgttagttgtccaacaagtttatttcttttgaaaaatggaggcttagttctttgaataatagagaaggtatcaagttttccttggttgtcaaggcacaactggttagtcgaacgagtgcgtcggctgttgtgtcatctttggggactttccttttagtatagcctttgagctgacttaacaagtcttgaaattagctcaagtaggtcatcatcttcttgtatcgagctgtattttcacttaggacataacctacgattagttgagagtcgtggtgcatgtcaaggtggtcagctcgcgtttcgtgtgctagcctgaggccaatattcagagcttcatgttaagcctcattgttagaaactttaaaactgacccttattcctcatgcatccattgccccaaagtgccctaggggccatgcttgcatcgggcaggtggtcagtgcacctcttgggttgagttgtcttgctcttcctctcacttcttctttggctcttgcttttctcccgaaccttaagagatttggggagatatacttttatgattagcaatgaagctggtgagagcttggccttagctattcatgtttggttgacagacgaccttatattggcggagtcttagtggttcacttgagtagttggcccgatgtttcaagtttctgtaaagcttgccgtagtggttgattggtgtacacctttagagggtgtgcctagaagtatggccttagctttctagtaaccaagagtaagatataggtcagcttctccatgagtgggtactgacttttagtgtcgattagtctcctcctgatgtagtttccagggtgttgtacaccgccttcttctcttgtgaggacaacactcatagcatgttctgtga

SEQ ID NO: 322148 - DNA, 997 bp, Cannabis indica
ttttttggattatacctgactttgattgggagctccatatctatttattagagatccatattttttgattctaaaaatagatattaagaggatcagttctttacgaattaaatcagaattcatggttaaattttagtttcaagccaatttttctgttctttctttcatcaatatgaaattatatttgtttggattgattcaagtcttcttttcaggtgaaatcatcgaaattaatggcagtatttcacctaatttcgtttcatataggttgtcttgttaggttgatcgatcgaagcttaccttggtgagatttttagttcatgcaaatgaaggtttagaagaagaggtataattgtaatattttgtttatgggctgtataaaaatttaaagggccgatccaatgtatttttgtaagttaattgcctttttgtatatatctaaaaaaaagccctttaaattatatacatgtaaatttaaaaaacgaaatccaattatatatgtatgaaacaaatctaaaatatatttaatattaatctaaattattacataaacatgtaattgatataatagttaatgtcaaattgtcaattaactattatgtcattttcaaaattcaaagagcaccataaattcctttaagtgattatatcaaacatgaatatacaaatgagaattctcaaaaaaaaaaaaaatatatacaaatgagtatttttgattggaaaactttagaaactaacagattgtacccctaaaatatacaattggttaaaaattctttctaaaatataacaattacacaattatacactttatatgttaagttccatttcttttaccattaaaaaattaatatactcactcctaaacattgatcataatcaaatttcccactttcattaaaaaactcaatttaaaattataatgtttattaattcttaaaaaatattaaaaaatttagataaaaataattaaattaattaaaaaaataaattttac

SEQ ID NO: 322149 - DNA, 806 bp, Cannabis indica
aaggttgagtcagtggaccaaccatattacaattggattaatccctctttgcccttcacctatacaacatatttataatgttaaagaaattatatttttcaatattagaaatcaaatcaaatatataagaatataaaaatatctacatttacctgtgtctggtgtgcaccatcaatcttgacaaatagaattggctaggctacataggaattcaccacttggcctaccgtggtgaagctttcttgtgtgacagggcatgggagccttgcattttgtaaaaaacttcttcaatgaaaacttgacaaaagcgctttgggtcaaatttttcattatgtacttcaagggtggtcacattttctatcaccacatacccctttgcagcacacttagtactgttttgggttgtgtggtaactaagtacatcgaacacttcactttctatattttgaaaccaaacaacaaacaattacaattattataatttattaaaatgaataagaacaatataataaaataaatatgcaaatggatttaccttctcatacattattgtatctgatggtagtgtcggtggcgtagagacatttgctactggtggtgatgatgctggtggtttagtagagacatttgtcactactgctggtggcactgatggtagatcagatacactaagttgtggtcctgctggtcgagtagagacaatcgatggtggcacttgtaacgccctaatctatagggacgccacgtgtgtgattttataaactagtttaatactaatagaataattaattattaaaaaccgtgat

SEQ ID NO: 322150 - DNA, 954 bp, Cannabis indica
attttgttaattttttaaaaaaaggacatttattaacttaattgttagatttagggccattttgcatcttgaccctaaaaatagcccctttgttcaaaattatcacttagaggcaatttttttgataaaaaccatagttgtattatttattaataccatttagagaaagttttagaattagattttgagtgtatgaagagccctctctcatgttgcttatttgaaaataaccgacgccatatcatatcgagacacgtgtttgtttttaccttatggcattggttatttgaaaataactgacatctatggtatagccctgttcagccttcttcttcactttgtcttcttcttcctcaacataaaaacatagcagccagccgtcatcaaaatccacaaataaaaccttcaccaaccaccttctaaaaaccatatatctctacaattttttcaccatttgagcccatttttatttttttttaaaaaaaaaaatcttctatttttgttacctaaacctatacacccaaaaagttacaattttcccctttttctctataaatcgaagtcatagaaataaagtggtccatataactctggccaccaattttagtggagaaaacgttgaatctaaacgtccattaaggtataaatatgatttctaattttagtaatgtacattgttttactttttgtttttgtaaattttttaagattataccatattattatcattatgttgttatgtatgtttatggtggctggacttttgtcaaaattagtcgtcggattgcgcttataaggtaaaaatttaaatcttaatatatagtatatgtgtatgtattttgtattttattgatatgtgtgtatatatattatgtattttatttatgaaaatattataattgtattgtatatatatgtattgtgaatgagaatgaggtaggagagatttaatta

SEQ ID NO: 322151 - DNA, 1255 bp, Cannabis indica
cctcaaactgatggacagtcctagaggataattcagatacttgatgatatgttgcgagcctgtgtgatagattttgagggctcctggagcaagtacctaccactgatagaattttcatacaacaacagctatcagagtactatagggatggctccctatgagatgttgtatggaaggaagtgtagacctccaattcactgggatgaaattggagaaaagaaatatttaggtcctaactctgtacaacggaccaatgaggctatggaaaagatcaaggccataatgtttgcctctcagagtaggcaaaagacttatgctgatccaaaatgcagaaatgtagaattttaggtaagagatcatgtattcctacgagtgtctccgatgaaagggattaaatgttttgggaaaaggggcaagttatgccctaggattacaaagcctttcgaaatcctcaaaaaggttggattgggagcttaccatcttgccttgccaccaacactttcagcagtcaataacgtatttcatgtttccatgttacgaaaatacactttggatcccactcatgtgctaagttacgaaaacctagagctccaggtgaatttatcatacgaagagcaactagttcaagttctggagagaaaagatagccattcgaaacaagaccatgggagttggagtccgacatgagggctcaatatctagagttattcaggttagattttgaggacgaaatccttttaatgaagggataattgtaaagatagcttaattttatgtatgagagttagcagataattaaagtttaattatgaattagacttttatttttgatttatgaatttatggatatttatttgaattctaggtgtgttatttatgttatataagaaatttcatatttttcttattttatgcctggaatagtggaatgcgacgtttggtcgatagagtaacattttcgtatggtttagtattttaaaaatagcggggaaatttagatagatattgggaatgtttagaatattggtacttttaaatttgaccaaaatgccttaggtggcaagattgattcttagtgaaacaaggagcaaaatagtcttttgccttgggttaacctttgtcttttagtgacatagaagtttattattaagttttataattttattttattaggtttgatattagataataccttagcaatattcctttattcaaaaaatagaaaattagacgcaaaacacacacacacacacac

SEQ ID NO: 322152 - DNA, 1526 bp, Cannabis indica
catagcagcttccaagcaaactgttgaagaattattctcaagcagattaaaaaaccagctgctaaaagactggtctacaccagtagtcgaatttaaaatagacaagttccaaaactatcgagcaaaacagcaatccacaagcacatgaaaaatggtctcaacgaccaaatgacaaagaggacacatgaggtcgacataaacatgtttagtatgcaactgcaccttcgtaggaagacatctggagatagatcgccacaagaaatgatgaaccttggggggaatagccatctgccaaagcttgttccagccaacaccttcatcaacaattggaaactcacctttaatcagctgtaagtgcttgtaatcacttcacacagtaaaaaaacctgaagtttctttcgcccaaaaccaactatccacctcagtcgtttcactcaattggatcgacaaaatcaaagctctatcacaatcattaaagaggtccgtcacaacctcaatatcccaagatttagagcctactatcatcaaagaagaaataggttgattcacaaggctcgagtgaatggaagaaacatagggattacttgaatctggtaactaaggatcccttaaaatactgacattcgcaccagacccaatcgagcgtctaacccctgcccgcaccagatcctgagcttcaaaaatactgcaccaaataaagcttgaattttgtcctaatgtagcagattaaaagctaccattaggataatatctagctttataaatcttgcttgccatagaggtatcatttgacagcaaccgccatccttgcttagcaaggaaagacaagttataatcgcgtagatcttgaaaaccaaggcccccaacagatttatgctgacgaagccttttccaactgaaccaactaagggcccatttggcacagcttttgaaaaagctaaaagctgcttttcgaaaaaactgtgataaaaatgtgtttggtaaacagtcaaaaaataactttttgaagaaggtacagctaaaagctaaagctgctctaacctaacttttggaaaaagctgttttgattaaaagactataataatttatttgtactaagccatatttacttatttattatatattagaaaataaaaatatttaaaataaataataattaaatttcttatttttttaaaaaaaataatttatatttattttaatattaacaacaacatcaacctaaaaactttcttatataattgagtatctattttttttacatttgataaaacataatataataatactataaattatttttatcaaatgcgtataaatttatatttgaaaaaaattaaaaatatataaaaataaataaaatattgtataaaataagttttatatatttgtgattataataaattagattataacattatcattattattattataataaattttaacaactcacagtattttgaaatttataatttaccaaacactcaacttagcttttttctacagttctgctgcagttgttt

SEQ ID NO: 322153 - DNA, 1536 bp, Cannabis indica
gaatttatacattaaatataatcatgaaataaatcatgtgaaccatacaacaaaaaggtgatttctgatccttattaattagtaaatctgattatattataatgagttttatttagggcacaaaacccaacacaaaacacctggaggacactaatacttcttatttgttatagatgattatagcataaaggtatgggttttcttattgaaacataaaatgattatcttaacaagtttagaaattggaaaatttttgttgaaaaccaaactgataaaatggtcaaatctttaagaactgacaatggtcttgagtttattaataatgagtttgatgagctatgtgtagaaacaggcattagaagacatagaattgttgtcaaaaacccacaacagaatggggttgttgaaaggatgaatagaacacttctgaacaaggtaagatgtgttctacttgactctggtttgcccaagaaatattggggagaagctttgtacacttcatgttacttaatatataaaagtcctagtagagcaattgatctcaaaacccttgaagaattgtggaatggtaagcctccttctctattgcacttaagatcatttggttgtgatgcatatgcacacacagtagaggataaactaggaaaaagacctattaaatgtattttccttggctaccagattggtgtcaaaggctatagattgttatcaattaaaaataataaaattttgagcagtagagatgttattttcaatgagaatgatttttcttttaaaataaatcagtaatgtattttacccaatgtttcaagtgacaattctcaatcgaaggtgcaaattgaggtggagccactgcagcatacaagtgcagacctacaaattcaagatggcactgatcaagacattgaggaagaaaaccaatctgaagatcttgaaaattaccagcgggctagagatagaacaaggagataaatgtacctagaaactaccaagaagcaatcaacaacaaacactccaagaaatgaatggagagatcacttctctaaagaagaatagaacctggatagttgtattgaaaccagatggacagaaagtaattggatacaaatggatttttagagtcaaagatggtctaactaaagatgaaccaaagatttacaaggctagattcacacaagttgaaggggtagattacctagaaatcttctcactagttgttaaaatgaagacaataagaatgatgtatgccattgttgttcaacttgactaggatatacaacaaatggatgtaaaaatatcatttttaaatagaaaacttgaaaaaaaaactatatacatggagcaacttgaaggtttcaaggtggaatccaaagaaggggagctagtttgtctactgaagaggtcattgtatggtctgaagcaatctctaaggcaatggtacaagaaaattgactatgtggtcacagaagttggttacatcagatccaagtttgacacatgcttgtatttcataaatctgaattcacaagctgcaac

SEQ ID NO: 322154 - DNA, 830 bp, Cannabis indica
aatacaatacgacctaatacgatgttccaaacaagtcctataaatattaattatcatccacgaccactagtacaacactacaactaggtatacctatagaacaaaatataaaaatctaactagaaatgcaaaactatcaattataaactactagctatatacatgtataaatctatgaatgaaaatatttatggtgaaatttagtaattatttttttaattagttttttgtttttaaaattagaataataaaaatattttctaaaatcatattttataaaattatttttattttttaattttttaattgagaattaaaattttaaaaactaaaaaaaattattttttaaaaaattttaaagagttttttgtcaatattttatcaatgagcattaatgttatataggaaaagcaatgcatactaacaagtttatattattgtttgttggggcatgtaccacctttaaagaaaaaaaaaagacgatttatattaacaaatgccaaattggaacctattctttgttaaaaatccaaattcaaccaatttataaacaagttgactttacacaatctatataacttgtttatataaaaaatcaaatttaatttggatcaacttattaacttattaaaggaacttacaaaaatattataaaatgtgaaaaaaattacaaatatattgtgacacggagtttttttatatttttattgtattaaatttataaaaatactatgtttaaagtttcaaaattataaaaataccatgtttcaataaaattaaaaaaacaactaaaaaataattaaaaagtaaccctagaacaacttaacaaa

SEQ ID NO: 322155 - DNA, 873 bp, Cannabis indica
ttttttcatttttttttttcaagtgataatttttgtcaaaagagatatatatctaaattggtaacaatagtactagtggtagcacacatattattggttgtgattgaggggcctttgcatatttttggcgacatttatggagcactcaaaggcacattataagcaaagcacacactatatagtactactatattatccattttcattatgttatgcttatatgccccatatataaaaatttgatgaggaaataaaaaacctctagtgctcttctttaaacataaagacaaatactctctagttcttcctgggtacttacataacaattgttataattatttgggtctcaaatatagttagattaggccgtcgagatcctaattgtaaaaaagacaaatgtaagtcctatatagctagctagacacctgcctcgaccctgggcgtagggcccacctacttcagggattcaaaaaaattattcttttaaaattataaatgatttttaactaattttgaaaaatatcatactaatttctaaataagagtccaattttttttctatgacccactaaattttttaaggtcggccttagctacacataacttattatgttgttatcaaaatcttgaatttattgactttgatcttcttgtgaaagactttcatgaggctttaaacatgttgatgtaacaattaaggtttggttaggcacgtcaaacactattaaaattgcctaattagaaaaatattacttttttctataagcatggctatggggcactagtggtgcttaacacgtctagatatgtcaccttgcgacctaatagttattacattaaattatataggacctgatacttagttagactaat

SEQ ID NO: 322156 - DNA, 2606 bp, Cannabis indica
aattacttgattcatagtttttagatcttgtataaaatatttataaaaataaaatactataatattttcttcaattgacacgcactttcaaaaaacggttttagtcactaaaatttacttgttgtatgtacttgccgatattggcccccccctacgatgtaatcctggttccgcccctggttacatcaaatatgtaactatcattgttacatttatttttaatcattggattactattgaatggttgtgattaattgaaaaattaaaataaataaataaattaataacttgtaacctgatactttattactttataaaatcttaattaaaattaattatatttaaaattaaattactaataaatattaattatttttttacaatttattactaaataagaatcttttagaaattaattttttttacttaaattattgaaatatttgtaataatactccttataatttaaaattgctacactcataaccttaattaataaaaaaagagtataagaatgacctctaattaaatataattctacactcaatcttattatcaatactattactttaagtgctaaagagtgttagttcaaggttggttaaaaaaaaaaagagaagaaataataaaaaattaaaatataataacaattatagaattaaagataattttttttaccgcactccacacatctgtatttcattttaccatctgtcatgtaattctattttctcaaagagacgaaattactttattcttccttgatctttgcagttctaaatttactgtatatgtatcaattgatcgaagtggaatcataaaaaaattgcgaaagtctaaaattattgatcattattggttgttgatcttgaatatatattattgaaaggtttaaaagttactaattgttatcgattattgatctagaatacttgttattgaaaaaatttgaaagttaataattgttattggttattgatcttgaatatgtattattgaaaatttaaaagttattaattattattggttatgatcttgaacatgtgttcttgataaacttaacaagaagaggtggaagtttaatttttataaaataatagaattttattgtaaatattataataattaaatgacttaactgttaaaaaaattataatagaaatttaaatataaaaataaaattattaatattaattttttaaaagagtttattaaatattaaaattaaaaattaattattttaggaaaatagttagttatagttaatttaattttaaatttttctttttacatattagtaactctgttattacaagtcaacaaaagtcaacaaaaatgtaactattatcattacaataaaaatatataatcattaaatagtcacttaattatgaattcacattgtgaaccttgtggtatacttccaaagcttcaaagatattaataactggctgaagtacttattaaagtttttaattccaacttgcatttatattaataagtagaaaacatcattaaaataataaaaatattaattaattattatatatatccagcattgcatgggacaatagaatattcttaaaattatgtataagctaggctcacttatacatgaagtatacatagtataataaaaatggccatcatgtaataataagaacaataataataataataataaataataaataataaataataataataataatataaaataaaaaactaaataatttctcattccaaatacggggtgcaataagtcatcatataataatatattatttagttaataataaaccatatatatatgtataggtaattaattattaattattggtaacaacgttagaattacaaaaatgatgagttagctaaacctggaccaatggaaataagttagttatctttattgtctagctactactcatcacataactctacaattattaattattaattattaattattaattttacatagaagaacagactcttttttcttgggtctcattctctgtttatttagcaaatacgtaattatacgatcgatccatctttaagaaaataaaaatctcatcggtataattttgttggctcaacaaaatatataagttacgtaataaaaatcaataataataataataataataataataataataataataagaagatacacatgttatgtctaatggacaagttatgggtattgatccaatttaattcacactattttgtttggagtaatgatagggaaatttgaatttttatgcataattaagaactaaaattggtccactaatttaaaagtttaagaaatttgtaaaatgtgataatttttagtaaaattgaattttaccctccaactacatcacatcggcctgaccttcagaagcccagaaatgagctaaaattgtgtaccattgggcacacatcagactgacatcggaccccatcgaaccccacctttaaaagcccaaaaacttgagctaaatgtgtgtactgtcggacacacatcggacgggcatcgacccccactcgaactgacttccaaaaaaccccaaaaactaagaatttttgtgtactattggactggcatc

SEQ ID NO: 322157 - DNA, 1025 bp, Cannabis indica
tgagttatagggattgagctggtgactcacgaagtgcttggctgaattcgctaagtgctgctcattctgcacggctcgttgagtattctatcatggacatgccagcgaggcatcctgctcggcatgttgatccgaccaggcgctttaagttgatgccacgtgtcaccattcttgtgatgccaagtcagagtgccaattttgggataacaaacttaatctttttgtaaattttaatttttaatattgttggtgaattttagttcgtcaatgttagtttttttaaaaaataactagaaaaagaattaaaacaaatgtgaattcttttttaaacgtggaaatgaatgaaaaagtgaaaaagctaggattgaaatttcggaaagctttttgaagttgaaaccagaattttaccaaaacaaagtatgccagtatttcaacaaacaactagtactgagttttttttttttttttaaagtgtagcgtaatagtacaaattaattaataatttaaaagtttttgagtttaaacttatgttttttttttctttttctcacttctcctacaccactagtgacttttgaaatgttggtcttagtgctgttataggaaccacaaaacaaaaaaagaataatatttttaagaataattttataagggcatcaaattcatcttctttagatttatattgcaatttcccaatataattagttcttgagaataaaaattcaataattcaactggtcatgatattgatatgatatcgaatttttactgtatatattattaaatctactagtcaaataattataatagggaaatttgattttctatacttagaaaatcaaaaaatttgatttctaaaccaataatttaaaccctaaaaaactataccttttttttcaaaaccccaaaaatacccccaaactaaaactatctctctttctctctctatctagccggtcccaataatcccacacccaaggtccgatggtcggaccatggggtccgatggggtccgaccaatcgga

SEQ ID NO: 322158 - DNA, 1057 bp, Cannabis indica
ttttttaagatattatcgatggtatgtcgacatgttgtcgatgttatgtcgataattatctaattaatttgttatattactgtatgcttactgtatgcttttggtatacattttatctggccactacttcaaacccttagcccactgcatcatctttaggccttggtggtgccgattattgagaattagtggggaggttggacaagattgagcctaaccaaaagggtctttacgcttgtcatgctgagctgaagggtggttaggacctcattattgagcagctcaaaattatattgagcatgcttcatcatacgccaacaacagatccaacactagagccatcagcagttgcatcaccctcaccatctgcgatgagtgaagatgaattcatctttcctgacgggtatgatccctatgaggctaccactaccgatgcaactattatgtccataggtgatagcgagtcacagggtgatattttggctttaaaggcaccacctgcaggggttgagtttggcaacaggaagagacatccctttacttggtttgaagactacacgaagatgaagaagaaatagaggccttcttccacattttatcccttggctccatcagatgagcgattgttggatactttctagaagtggtgttctggactcattcccaaccatcgacttcaggatttgaaaatgggtgattatgatccatcgttctttcggaagctgttaacactacaagaatgtcttacagatcgtgtaagtaaactaatctacaattgtactacattctataaagtcaattaatatatttagttgtctaactacttcctctaacctttatgctagggaggcaacgctacttctttctattgacattttgtcagaagggtatcattctctcaacatatgtcacgactattattgtaataccctaagattaagaaaatggattagcaaaccttaactagttaattgtaaattattatggaattatattattatataatttattatatgtgaaattgatatgatatatgacatgttaagaccctgttggt

SEQ ID NO: 322159 - DNA, 1234 bp, Cannabis indica
cgaaaaaaaaaaaaaaaacaagtaaaaaagtaattttagagtgtaacagtataaaagaaagaaaatgggaaaacacagtaaactgtgtaaatttccctactataatcccataaagtaacttttgtttaattataactttataagaaatattgaaatcctcaaaatttttattatatttgacttggttatcttcaaacaataccaaattattattattattattattattattattattattattattattattatttaaggatagtctaaaaactaatctctagtatcaatactttgctagagactaagaggtttcaaaatttcttcatatactttttttcttttttccgtttgtatggttctttcatcatatacttttaaacacatgtcacattttttttttgttgtgacttatttcatttaaaccttaatatacatatgattatgtacgagtcttatgaccatgcaagagaatacatgaattaggtcaaattaaacagtttcttcactattttctagggaaacaaacaggtggacaagttaacattggttttttcagattttccaaagtatatatatataacccaatttcatgtttctaagttggctggctgtgataataacatgggaaggaatgatgatgagattcaaactaaagatcaatcagtttacttcttctttctttttcaactcatacgtacgttgaattattattaaagaatatatataagttttttgctctacatcaatattcaataaagttgctcgttttggtccaaagtaaaagaatataagtatatatattctattagtcacactgatgaatgaacgagactaaataatatataattaggtaaaagatgcaccaaatatatatcaaattattcattttattgaatttttcacatatatagggacctgcattgtccccaaaagttaaacactaacacatcgattaactccaataaaattctagattaatttgtatttgaactatccttgaaagagttcgatagtactcatcggtgaatattactactattaaaaaggcttacttccattagttctgaaatcgatttttttgggaaagattgtcgctaataaaaattactaaaaattttacttttagtcacaacttgtgactaattataaattattattcttgtgttgtaactaaaatgtccgtggctaaatgtattagtcacaaaaattacaatttgttgtgactaaatgt

SEQ ID NO: 322160 - DNA, 891 bp, Cannabis indica
aacataaaatgttatttctgatctttattaacaagtaaatctgattatatgaaatgagttttatttagggcataaaacccaaccgtaacaccttattagtttagcgtgttatcgtgattattgtacaactcgttgctactcaacgagtttattgaaaaacatgatgaattaaaactttgtttaaatacttataaataccaaaataacgtatatatataaccgagatcctgtgtacaaaatatttacaatcgttttcagtactagacacaaaagttgtcatctgacaactatacaaaatatgttcagctgtcccaaagatcgtacgatccaggcctaactgtcccgacatatacaatcttcatctgctcgctctcacgactactcaaccttatccttgcccttacctacacatgcaaaaaatatatgtgagtcgacagactctgtaagaaaaacataatcaataacatacctataacccggattataatcaggcgtccatacactcaaccatagtcgtatccccgtgtcccacacagtactgagtctagaacatttgcatgacaaaactatcgaccataatataggcctatactcagtacgctagtcatactctagtcgtacaggtgtgaaagcgtcgatcagtatcttagccaaacatacatctatcagtatttaatataactctacgtatatagataccgttatcgatgtaatttaacaggcttaataaatatgtatactaaacatgtaaacacatatgcatatcattatactaatcttacatcacttccaaattcaggtgtgtcggccaacctaagtggaactgctgctcgacgatttataggcccctaaatcacattattcgtaaaactgattagtgacatgctaaat

SEQ ID NO: 322161 - DNA, 602 bp, Cannabis indica
gcaacgagctgcacagtacatttaaaaatcacgtaatacgcctaaggtagttagggtgttacatacaaattccttgcaagcggctatacaccacatgatgaagaaggttcctatcagccaatggtcagattgtcctctcgcagcacagaccttagtatcatatggagtacgaaacctaggtaggtaaagagtatgccctttaccccacatgtgcctataaatagtctcatttttcttcaggcaggggggaacaatttttacttatagtcactctgtaaaaaattcctagaaatgtctctctcaagagaagcagagtagtcttcactacaatatcttgtagtgtctgaaacattttcccaaagaggccaataatatagactcgtggactaagtatcattaacgcttgaagcacataaactttatctatttattatttattatttattttcttttgtcttctttaagctctaaatatatttggtgtaaagactccttagctttaatttgaaaattagcagataattagggctttattatgaaaattatttattaatattgaactaattatttatgatagtttatttggattcagaatgcatttt

SEQ ID NO: 322162 - DNA, 536 bp, Cannabis indica
taagtgacactcaaactagcctcagaaattaccaactagctagagatagagtaagaagagccacaaaagctcctgataaatatggctatgctgaattcagtgcttatgctcttagtgtagctgaagatatagacagtgttgagccatctagttacatagatgcaataactagtaaaaatagtgcggcttatctgaaagctattaaggaagagaaagtatctctgaaaaagaataagacctggatagtggttaataaaccggaaaactagaaaatcatcaaatgcaagtggttattcaaacagaaagaaggaatactagggggtgaaggtccaaggtacaaggcaagacttgttgccaagggatttaccgaacaagaaggcattgaagtaggttgagtttgaatatcttaaatattcaatcagagtgaagtaggttttgtgaatacatgtactatggtaaatgggtggataaattttgtatttttatgttattttgtttgttttgtattattttttttgtttgttattttaggcatg

SEQ ID NO: 322163 - DNA, 733 bp, Cannabis indica
ttttagccttttttttggcctttggcctataaccttaagacatccatccaagtgaaatttaatattggttttatttttatttttttaagataaatgattgattggatagcctttaagcccagacttttatctagctttttgctttattttcatgcatatatgtacactttgcttttctttttttctttcaagaattttttactcaagtgtttaccatggttcttaccaattttgtgcgggtgtaggtgctctcaagtgaccgatcagactttggactcttgatcaattaccattaacttaagtatccttatttgtttgttcaatccttgtacctggacggatcattttgcaaacatgttaggtagttatgtgacttaagaataaaccaataaaattttgcaagtaataatttataaattgacccaacttcaaagataattaatcgctttattagtttattggtcgacatgtgttgttaccaaatcaatatacatttaaattgtgaataataaaaatttattacatgatatgttcagataagataggaaaaaacttctaaaatgatatattccatccaaaagacttattgaagagcaatgaatgtttagatattgtgttttagaggtggtcattcgggcctaacatagtattttctaagccctttgaacggtaaccatccacacgaccatttcgaaagagtgatgttttagaattatgcaattacgtggtcttc

SEQ ID NO: 322164 - DNA, 1410 bp, Cannabis indica
aaatagagttttatttaggtcacaaagcccaacatgggcctagtgtaatttttggccactacatacatgtaagaggaatctaggaaaatcccaagaagataaaagctttgctcgaaattccatcacctaaaaagccaaaagaattttggccgcacttagtagattcatctcaaaatctattgaaaaatgttgttcgctattactgtgaagtaataagaggtttgaatggataaaagaatgtgagtaggctttttagaaaatcaaacaacgtttattgatcccactggtgttatcaaaaccactgacaggagaaattcttttcctataatgaacacttttagaaatgttgttagtgaggccttagtgcgagaagagaaaaaaagttcagcgaccactttattacataagtaaacgattactaggggcagaaatgagatatccacctcttgaaaaactcgcgctaagtctactccatgcctcaagaaaattacgaccatattttcaggcacacccgattcaagtcctaattaatcaaccactaaggcaagtcctctcaaaaccatatgctttagaaagactaataaaatagtaaattgaattaggataatttaaaatctcatatcatccataggtagcaataaaagggcaagctttaacagatttaattggtagaaggaattaaaaccgatgaaaatgttaaggaagcttagatttcactatgcaattgagatttcaatttctagcttctatcaataaggtcaagaatgaagcgttactagcaggactaagaattgttgaagtcttaaaagctaaagcaatccattgcttaaacaactcttgactaacaataaataaggtactgatcaaaatggctaaatatttggagcaattatgaaagaacttagaaaaaaattgattattacaaaattgaaaaagttttaagagaacaaaactccaatagtcgtatgcattagtaaagctaaagcgtcactgtttgagaatgataacctcagcttggttcccattgaaaacttgaatagcccagtatttgcaagatttatgaccagaatataaaattgactgatataaatccaacttagatgacaataatagtcaactatgtattaattggacaactcccttctaataaaaatgatgccagaaatatcatgtgcggtcttcaggtagacaattatagatggtaatctctatcgaagaggctattccatgctactactacaatgtatactacaaaaagaaacccaaagcaatcattaaggaaatacatgaaggtttctatgaggatcatgctggaaagcaaagtttatccaataatattttgacaatgatatattagccatttcaattataaaatgcacgtatgagtttcatgaagaagtgtggcaaatg

SEQ ID NO: 322165 - DNA, 631 bp, Cannabis indica
agaagaagaagaagaagatccccctgatatagaagtagatgtacacaaaaatttagccccagaatgcctctgaatcacaccagaaaatgactttctatggtaactaccagtagcagcagcagctgcagcctcagccataatttcattttcaatgctcttcattagagtagatatcttctggtatctcccatttttaatggatccattacttgtgccactactagagctagtaggaggagtagtagtagttgtagaatcttctgatgacttagtattatcattattaaacaaggacttgagataagctcttgaggccttgagctttctcccaagtgaagactgcttgagcttccaagaccatgacttgatccttggcaatctaccattaccacccccaccagcaccaccaccaccaccaccattgatgaaaactctgacttcatttgcccattgagagagatactcatctgggtttagctcacaactaactctacatgagtcagatggtgaggactccattggagtgtttgtgtttgtacatggagcagtggaagaagagaagggcattatggtaaaagtgtcttcaaaggcttcttgttcatcatcatcttgttcttcttcttgttgttgt

SEQ ID NO: 322166 - DNA, 1138 bp, Cannabis indica
tagctcacttaacaccaaggtgccatgggatggtggagagctgacaccagacactcgccatttaaagagcatcctcagcttttagccttctactaataacatatatgatttttgccctgtacacatatggtcatcaccatataccaaatcacagagtttctcaaatctgattgcatcattatattcgtacacccaaataaatggcgaatgccaagtcccatcccaatccagataatattgaagatatttataaaaatgtcactaccgtacaaactaagcatcagcatgccaccagcatgcacaacaacatgcgccacaacttgaccaccacttggccaacttgtgggcatcacctagcttgtaacgtgccatcttggcatgcacgttaaattctcttccacttcaacatcttgataccctcatcgacggactacaggaaaatcttcctgatctcgactcctaagcttactccaagcttcattcgaatcctaaatctgcacttgttcctctatctctgtagaaccaccctcttagtgacgatctccgttgcccactcttggacttgatcaaagaacctgtgccactattgctattcagaatcagccatggagtagtggctccacccttgaatacttccaccaacatgaactcctctgagtccctcacaatgtccctctagtcaaccaagtagctcttgcaacattgactccgaagctaacacatccttttatagtagctcactcaccaattttccaatacatattccttttgacaaggactaagtatggtgcacccctcggggtgagatttgcaaaccaactgtacccaacgacacctatagaacacgcttccactaaagtcaagtccctccagaaacttcacatgccaactccattgcacactatcttctgatggaaatctagcaagacactcctatcgcaaggttaaatttgatgctctcacctagacgaggctcgccagcaaattgcacccaatgcagcactaagtgcactcttatagataatctctttgcgaagtactcaacatattggccctcccgccctaccgcacacccacggcttcatgcaaaaggcccctctgacccactacatacgtgctcctctgagtttctttcatg

SEQ ID NO: 322167 - DNA, 754 bp, Cannabis indica
tttatttggagcaattttacacttttgatcttttattttcgtagacttaaaatagaagaagattagaaaatatcaacggaaaaagatgagaaaaaaagataaaagatcacataagtgtgcagatggagaccatgccgcagcatggaaaagagcatgccacggcccgtgtcaatggtgtgaagatgtgtggaaaagccaacacgggttgtggcatagaaagggcatgtcgtggcccggccccttaattcgaagggaaataggaaacttcagcatgggctcatctgtcctctctaattcgaagctgaataggttttgtgcatgtgctatctttatattcgtcaatgcctatataagaagtgaacttcagtggatttcatcaagcaattcaaaaggaaatcagaagcaattacggagtacgaattttagagagcaaaatcaattgcaaaggctttttcaacggattttaaacagtcttttcttctctattttcttcttttttcttaaattaatatgtgtgaatttggtacaatgaacatgagtagctaaacagttcttagggtctagatggagattatttgatattgatttttggttttaatatgattcaactttccttcaatttctatgtattctatttcattcgtacttaattacttttaattgcgtgatcaccaattaaatatctataattttgatgcgagatctgagcaatgagtatcaattatgctgtagtgaaatagaactgaatttcgat

SEQ ID NO: 322168 - DNA, 768 bp, Cannabis indica
aataaccataaaattcgtaacacgctgcccttgcctaccaagttcaagctgcctacttgaagtatgtacagagggattgaagagcccttggcacacatcaaatattatgcaatccatatggatttgcaaaatgttgaggttgatacccatcgccagatcatcccgtcaaccttgttgaaaactgcacaataatgttttctcaaatttgctgctagaaggtttcactcatggaactctttcacaagagatttctacatacatctcttatcttcctgagaaactccttataggttggaggacatagtggaggtcaaaaagaggtcaggggaacctctgaaagactatgtctaatgattcatgaccgaggcaaccaaggtcaagaatttgacagaggaaacaagatactgctgggctttgtgcccgaaataaaactttatttcaatgcaatcttttctattcaattattaataaagaaacaaatttaatttcattacatatttaatgtgttatttggttcacgtgatcatttatttatttatttgatttataaatttatccaaatccttatcacactgatagaataatctatagtgtagtttacttgcaccttggataagtgctatgtcctttccagggcattggttaaagtaagcttaggttggatgtatagagtatacatcgaaaggaactgatattgaacttggactagatataataaacttactgtaaaacctattcaatttattatcacttagttgatcttagatc

SEQ ID NO: 322169 - DNA, 1200 bp, Cannabis indica
ttttttaaaaaaaaaaatcactacaaactgtaaaaaccagttgtatatatatagagagagatcaaataccacgagagttgtatccacgtaaccctacacataatcctagaaaaaatttgcttgattctcgagaaaattttaaacttaattttttttttattattattagcttcgtcaaaatgatcatgagcacacattaataataaattataataatttttgttaaaattttcacacattggattcctcaaaactctagggttgactgagctgtttttcttggtcaaacaaaatctatacatattcgtaccaaaaaataagcatgagatatagataataagaataattaagtttattatattaaatatatatagagagaatctaatatatatataaagaataaaataaaatttgacagccaataaaacattggttatatatataaatttatagatatatgatcacatggtatttctcagttagtgtgcccaaaatgtttttgatatgtgtaaaaataaaataaataaataaataaaactaataataataataataattaataagaaaacattcgtctatttattattggtcggtttataagccaacttgctttatatatttttgtttttgaggctttttattaaccacgtactcgacatgcactactttaaattcttcatcaatttccaagttttttttctattattattattaattaaatatctctatttttcttaaaaataaataaataaataaatcaaggtgatgttattattatatattattattatatgtgtgattacgtactacaagaatagttaaaagggtaagtaatttttttttattattacttaggttaatttgtgaaaaccaactaattctatttatgctcaaattaatgtaccaacaagatattaaaacatcaagatattctgttggttcttagaatattaattgaaaataccaattattttgtaatttttcttttgatgtgaaaaaaaaatcacccagatcctttctccactccttcagttattctgataatttttgtgacaatataatgtccccgcttcaagcttccattgggtccttacacccacggaatgaatgactcttatacacgagtacgttactctggctgttttctgaactgatgactgaccctacagaccaacacaagtgttttcagcgtgctttgtc

SEQ ID NO: 322170 - DNA, 641 bp, Cannabis indica
aaaaaaaaattaattttaaaatcaagaaaaaaattagtcaagaaaaattaaactaaatattaaaatataaattttgtgaatattctggccaaattttcattttcagatagattaataaatatctgtcttgtctaaattaagtgaatagcgtcaaacatataaataaattttgttagtttatatgatataatgatatcattaatgagatgggttgactctttataatgttaatcaataaattgtctttaaattaatttcttttttttttcttttcaataaaatcataaatagctatatgggtgtttgattcatttatatttatttaataattttatttttggagaggactagtactacaacaggtgtaaattaattaaagccggcttatatatatccagaaagagaaatgttaaaaggcactagtggtgcctaccacactactattatgtgttaatatccctattggtctaactacgtatcgggtcctatataatttaatataatcgcgacatgtagagaaagtgctactggtacctaataacaatggtcatcagaaaataataataataggtgatttacattaatattaatacttttaatttgagttttgtgttagccatttggctcacatgggcagcagt

SEQ ID NO: 322171 - DNA, 664 bp, Cannabis indica
tgtgtcagatcggtgaaaaagttttccatgacgaggctcgccattagcctttgaaccaactcaattagatgatccacctgaatcctctcatccttattcactgtaggtcacttggcctttttacgactaagaatataatagggttgtttcttggtcttattctttctcctttttactctcagaccatcatccaccacatcaactctacaacaagtgggaatatcagttgctgcaaaaacattaaatgtttcctctttgttttgcactcatagcttctattctctcttttgtacataaatcatcgctctccatgtggctaagaatggcctccctagtataattgtgatatttacatcttcttccaacaggaaagatgaaggctcaatttagaaatttgatggttttggaaaataaaaggagaaggcctattttagaaatttgagataatgggtcgatggatactgctgatgtcactatgggcttgagtgaaatggaaattataaaaaatttgtctagggcagattctgtttcacagatccaccatacaatatgaatgtgttaaactagaattgtcgtgggcttggggatcgatggattgttcccttaaaaaaattgtatctcaaaagaaaccatattttattttttatgtgaaaccaaatgtaat

SEQ ID NO: 322172 - DNA, 1660 bp, Cannabis indica
caatgaatgcaaaagtagcattcgaactctcagaaagaattccccacttgagctaagaatgaaagaacactgcaaaagggccttagaatttgctaaaagaatgaagaaaatgggcctaaaagtgatctacccgggcctagaagaacaccctcaacatgggcttctgaaatccatggcccataaagaatatgggtttggtgggctcttgtgtttggatatggagacagaagaaagagccaataggttaatggacatgttacaaaaccattctcaatttggttacatggctgtgagtttgggttactatgaaaccctaatgtcttgctctggaagtagtacaagtagtgaactcaatagtgaggagaaagccctagctggaatctcacctggcttgattagaatgtcaattgggtatattgggactttggaccaaaaatggagtcaatttgagaaggccatttctagatttcaagattctggtttgttcaaataaatatgtgattcttattatgtgtaataatcttttatgttgttttttttttttaaaaaaaaaaattaataatggtggtttttgtactaattaatgtatgtgttgttgtgttaattagtgtgtacaatatcttttaaggtgtgtacatttgtttttgttttcctttttgttcaataatgtgttgtttgggaattatgtcatatttttggcattaatataagggataattttataagtacacaaaaataatagaaaaattgcaaaaatatgacggtacgtacttaagattttatttattagattttatttattaaaaatacggtattttaatgtattttgatgatatattcttgttattctattgttaatattttgttatttgtatattatttttttaattttattttgatgttgttttctatgtgaatttcatgttactgtaaaaatgtaaaaaaaaaaatgaacctaaaagtgtcaaatttttactaaaaataacaatttatgtaattttttcttaacataattataagaaatctttaattatgtgacttttacatctatagtttgtaaaaatatggggattataattttttttttcaagttttattggaagaattaaattaaggtttttaaaaaattatgaacaaaaacatgtagttagttaataaaattataatttaaactagattttgtacgaagttaaaaactcacaatttaataattttaatgggaaaaagatatataattctattaagaatacgattttctttagaatagaaaatccacatctaatgtagtagaaaatattctttcataatggaatattttagtgggagaagagtgattttcattaattggattagatttatttgtgtagattttttcttcatcaaattcttaaataagttatcaaactcttaaaattatgacaatttcaatattgatagaagtgactactaatatatatgaataatgatatatatatatgtacataatttatatacaaatatataaaaaaaattaaatctttgcaaaaaaaaaatgttaattgtagtgactagtgatgatagacatactttaaatttaaagttgtcaaataattagctatactttgattaattaattagctatttttttaaagacaaaaataaaagggaaatttgatattat

SEQ ID NO: 322173 - DNA, 529 bp, Cannabis indica
aatttgacaatcttgaataacaagtccaaatgtagagttcatcttttgattactacgaataccttggacaatgaccatgctatctgtctctatctgcacattctgccattttttatctttcacccagctgagagcttccttgataccaatggcttccatagtttcagcactgaaatcgcctccttggtaacaagtttttgcttcaattagctcgccttggctgtcgcgggccacaatatataccaaatccgtatgaattgtcttgagcaaaaagggcggcatcaactgaccttgatgttgtttgtatcaggtttagtccaaagctcagcaccatcacccttatcctcaaagaacaaggaagatagacatgtattgtcttgagcttttcgccagtgatcaagggttgtacaagatgacgctaggatctcggtatgggaagactgttttttgttccatacggtagcatttcttgctttccacaaggcccaacatagcattgcagcacgacatacttgatcctcatcaagtt

SEQ ID NO: 322174 - DNA, 559 bp, Cannabis indica
ccggcgtactattaaatatgtgccggtgaaagatccaaaataaaacgtcaaaaggcgcgaggacatttccacgtatgtaaggttttgccagcgcactatgcgcagtaaaagtaattaaagttttggtgggaatccaaatgaaccaccaaatggggtgaggatgttcccccgtatgtaaggtgtttatcggcgcacttttgcgccggtaaaagtgagtaaatttttgatgggaatcatgaccgcctacaataaattgggggaaaaaattcccgcgtgaaaactggtggtaggtgagaatacttttatcggcgtaatattgcgccggcaaaagtattaatggaaacggtgcgttcagttttagggtttttttaccacttagtaaaagtatatttatgtaatccctacgatcagcccccttcttcctcattttttttgtgcaatttttttttctttgtttttctctccctcgttctccatctcattctctcaatctctatctcattctctcaatccctctcttgtttttcttcaaaaaaaccaccaccaccaccgtcggcca

SEQ ID NO: 322175 - DNA, 1752 bp, Cannabis indica
caaagcacaacttacatatatgcattgcggctaactaattaatcttgttcagttgtgggcaagagctaattatttttgaatcattacatgaaaaagcaaaaagaaaactaaaatacttatttcattatatctaatagtttatttatagcctagctttaatgataattatccaattaacattcttttgaacgctcctttggctagctagccaggtagctagacaagtagtcccataaaagaattgaaagaaatgcaataatggagcccaaaaaggagttcttattgccttttctcccactacctaatctccacgcaaattaaactcctttaccaaaaaacaaaaataaattaaaaaaaacataccattttttctttttctttctttctttctttctttctttgtaaagggatggatggatcgagtgatgaataatgaactttcagggggttcaacataagaatatgcatggatctctctaattatatatatagttttaaatatgtacaaaaacttttagcacccccatcaagcactactcaattaatgcccaccttttcaatcctgcaaagtttcccattacttaaatctttctttctctctttttccactgtcaactttgctttccattgaagaaaaaagaaaagggaaaataaaaattacatgacacatataaaaagatatgattaatcaatataggacatacatattcaaatccaaccattgattgatgctgctgctgttgctacagccgggtggcaaatggtttgaactcctccgccaccaccgcctccacttccaacgcctaggaaatccctagttttccctcctacctgatcttgatctgtattactactcatctgaacgtacttgcgtttggccgccggaggataaatttggaatatttcaccttccgagttgtccacattattattgttattgttgttgttattactaactaccctcgatattggggtagttgatccatacaaaccacacgatttattaatattgttcccgtcttggagttgagttgttatagtactgctattgctattattattgcacttcaacccaaaacttccgaggaaagatgaatcaacactcgaagtcgctcctatttgagctgctttttgcagtaaagcagtggcggacatgtttgccgctgcggaaggtgtactgagttggttgctgtacaaggaaggaactgtaactagctgagcagatgatccacctcctccttccttgtttatggccatggccagctcatgatgatgatgatgatggttaatagtagtagcagtattagtattactgttggaggacattttattgttagtattagtatttgttgtattaccacttccgaaaacccaattaaactgttgttgttgctgttgatgatgataatcagacggtggaggaagatttgatgatgaagtagtacacgatacaagaggattattatcagtagtggtactagtaccaaatatttcactagctgaactcactgtcgacgaattaccaagttgatgttgatgttggtgatgatgatgacgaatttgatgatgatcgtggaataaggcatcactgttgttgtttggtgatgagataagtagtgtttgatcatgctggtcactcatccatagagatagttgttggcttcttgcggcctcgtgatgatgattatcattgggtgatgctgatgatgatgatgatattattggtttgaaaacagagggaaaatgttgtgt

SEQ ID NO: 322176 - DNA, 3361 bp, Cannabis indica
tctgaaaaatctttaaaatcatcaataaccacattagctgattctaaaatagtttgagttctcatgttgtaaacacgataagctctactgtttaaggaatgtccaatgaaaacacccacatcacctttagcatcaaatttaccaaatcaacagtgcatcatatttgcttactttgtcagacctcttaagcgcgccatgcatattaaaccagaaacgagatgcgttttcaaccaaatttcctaaggaaaagatacgcttgaattccttcttcaaattaaaaattagtgtaaacatcgatatgagatgtgttttcagccaaatttgttgaaactcggaagctcgccctttcgtaaaaaagtttgcctgaattctttctcaataattttggtggatttcctaaagttttattcattggctcaagaaggctttgtctacacctctatgcatttttagccctgtcttggttgcgagacactgcctaaaatccataatgggtgaagcttgccccaggttcgtatgtggccttagaatccaaagtctcttatcgaaaaggtccagggtaagaaaatctgcttgaaatgttttcacggttttagcccaattcctaaacaatggattacacttgaaatctatagcatttttaatcatatctctcaaagcccaactcacaaaaagcaagagtcagggaacgcttgaaactcaaaagctcgcccttccgcaaaaaaaattatccttgactaagcatctcatgagcaacaccctaaaagggtaattaactatcaaagacgttcaaaaagcgctgagactccacgactatttggtagtctaagaatgatttagcaaggaaacactggaagctcttggatcgcagatcgtctcgaaagctttggggcaaatgttgtccagatttttgtaagcatgacaagtggaacctaacagaagaggccaagttaaactttagctaattagtgcctttggccccggctcccgcgaggggcctccacaaagggtacgtctattgcaaggcaaggacacgtggagcgttagtgtgcatgacatctcttattcccgagagtggaaggaagggtgagtctttcaaaaaggtaagccccctatagaagcaaaagacttcctcgagttgcctatgtcggtggcaaaaagacctaggatggcttttatccccgtatgatgtcgcggaagatctccgtctgtacttattagattaccaaagtgacgacaatgctttttctagtacaacgtcagtcttataccctatgtcaggctatagtacaaggcatgcgcaccactgcatctgcctattgtccaacgaccattcacgagggcgattcaaaaaggaaaggcttttaggtgacacatatggaatgtttggatggtacaggtcatcatctctatgcaccatatgatggggaagccacctaccaaataaacggtcggatctcttatagtaaggttgaccccgaaagtaggttgagcaagaaacctgttgttggagaaatttagacaacaccaaataaaataatatacttaaaatataagcagaattgtgcgagtaatcaacctagagcagtgagtattcaaattatggatacacagacgtactggaaatataaataacacaaagagagtatagtggttcagtcagatcatggtctgcttagtccactgttgcaagggttttctgtcttgttcattacacattggatcactcctttatatacaaagcaagtgtcctttgattacacagagattgatttaattatcaatccgtttgtacattgaatataacatttaaatcaacaaaaacgtaaatacaataaatgaagaacaattttggcccaattcactaaatatagcaatgtatgcgacttccatagtacgagttgtctattcatattcttgcataagctcgcaggattaagatgcatacaagagtaatcgagtctaagatgtctgcatcctgttctagtcgcatatacagacatcccataacaggtcgataacttaagacatgtgagtctttatcgagttatcgaggacgtcaggtcatccagaccagctcgctgaatagagaatcgatctctatttcttcccaggaagacctttaagtccttggatatatctcggtatatgcgagtcttaaactcaatcttcggttttgcttcgtgttaactataagaatgcgactagactctatcaaggtcacatcatcccgttgagtctggttcaggtgaggtttgcactcaagaggtctcatgttgacatcttagccctcttcgaggagagtgagtccacgtgtcatttttatgggagcgtggtctcaagtttttaggtgaaaaattctcactatgcaacatgcccctagttttgcgattgacagctatgtcacgagggaaactataagcgagaggcaggcgaaaggttgtcacgagatggtgactttaggttgtcgaatcgagggtttcaaaaagacggctgtaattattatccttaacgcatttgggatgccatgtcatcgaaactcttcggagtccgtgcaggcgtggttatggataactgttggattgtgagaccttaggcattccctttccacatgtctccatctcaattaatgagggataatggtatttaaactccctgatacgaaattatctttaattttttttgcctctcattttcagttttcccctttttctcctctgatttttgaattttccaacctttgtactccttataacttttctttgctagataagaaattataagtggttcatacttacagaatcattcaaaatcgcattttcaaggttagtggaaaaaaaattacaactgcttccttttatttcgaaaattaatctgtattctgtgtttcgagaggtagaaaatgcatgagacgataagatatatgtatgaaattttattttcttttttgacaaaatatacatttctctgggaaatatatacctgaaacttgaataatcacggatttcaggaagaacagtgttcgtaaatttctcgttgagtatttcgaatactcgcgagttttgtgatgaacatctcaaatacttgcatacacttctgaatatcaaaaatgacttagtaaatctgtaccttagctcactactacaatttggcattttagtgacactatttagtgacccacataaatatgtgtgtcactaaagatttaggggtcatttttagtgacatgtacaattagactctaaatattcagtgttagtctcttataatgtgtgtcactaaaaatatggagagtcactaaagagtaaaatctaaaattttctaatttttattaatttaaaaaatactgatctatagtgac

SEQ ID NO: 322177 - DNA, 1322 bp, Cannabis indica
catatatctaaatacatgaaatgtattaatatgataaaaatataataaaagtttaaaatactctcattttaccttcttatgaaaccactggcgaaaattttttctatgtaaaatatgtggctaccatttggacattcttgtctgatcttctccaaatgttcactgttaattgtgataatatcaaggaacgagagagatagagagtaaaaaaaataatatttaagatagtttattattgggaggtaacaaacttactttaaataagcttatttttcagagaattctgaagtatgtaccactcgatgttttcacaaaggttatgatcaagaggctttataattggtcaagggatgacattgagaattgaaatctgtaagattgagaaagataaaaggtgcatcttcatttcgatcaaggcgattaaatcttgttttgcatcttttaaagtacattgaacaaaaagttatcgcctcatctgcgacataacctttggcaatagacccttcaagatgtgtcttgtttcccacataattcattaacttttttcttgtacctcttaaaagattacatccacctcataaatattaggccacccagtatagcttctttaggcaatgtaaaactaaatgtatcattatgtcaaagaagacaggaggaaaaattaattccatcttgcacaatatgtgaattagatcattttgagcattctccatgtcttttacatttaaagttctcgaacataattttttgaagaaattatataactgagtaatagtagttgcgatataactttgtagaaatttgcaaacactaataaaaagcactccctgcatgatgacatgacaatcatggaattttaatctaagaatatttgactcgtttggagaaactttgcttttaaaatttgaacagaagtcatctagaaacttgattccttaacaaattgacaaaatagttttattttttcaaacataagaagcatgaggtttcatcaaccttctgtttccatcttcataaatctacaactcttccctcacgcccatctttttcaaattatgtcttgcattggtggtatccttaaatttatcattatctaaaatggtgtcaaggagactgccacacacattcctctcaacatgcatgatacttatattgtgctttaaaatattttttgctccaatatctgtttccataatactcgagctcgtagaaaatactctctcttaacaaaaaaaaaaaaaaaaaaaaaactaaaagaaacactcctcctattgatttatgaataatttgcatattttaataaggttgatgtcttgttattt

SEQ ID NO: 322178 - DNA, 1624 bp, Cannabis indica
tccaaaaaatatggaaaaatataatttggctactttgaccgatgatgatctaatagtgaaaattaacgtacgaggttgatcgtcaaattttagagtttgagtcacgacggtaggacctgctatgggcaagttgcaacttaaattcgtaactcccttgaaggctaaatttgaagtcaatagcttcagaatttttattgaagtgtgatacatgacttgatagagaattgaaatggctttaaaattcaagttgaatcgtgtcaatcagatcaatattgagtgagttttggacgttttactaaagtctgttcttggcccaacaccaaagttgacatctcagagcccaggttgacatttgatatcaaccttgacgttgggtgagtgggaaaacgtgtcggtgatgtattttttgatgcctgagtgatattttgtgatcacttagttcatttctgtgttctggcaaagctagtcaccaattctcggagatgttgttttgcaaaaatgggagactcaaaactactcagtttctgagtaaatcaccttgttggaaaagtgaaaacatgaagtttttaatttgactcttatcacctcattgccctcaattattgtgaaaaactagatgaactaccaagaaagtattaaaatcgaattagcagaacccaacgtaccaagccatttgtcaacttgggcattgtgtgcttattttggagctttttggatgtcgttttgatacttcgaaggttctagaaattgaggacgaggtctcctacctcattttttacaattttagagagaattctcatagcaaaattggcatttgagtgattgaaactagcgcactagaaacgactgagttggaaacgacttattagaatttgaacttccattccagagtttcaggagtcaacctgcgcgcagggctagggaatcctcccaggtcgattgctatgacttgggactattcaaattcgagatatcatctttcttttcacgcgcaaaacattgatgtccacgtcactagggaaagtttcccggtgagcaccgtttatgcttaagcctgatatattactgttagctggataatggctaatagtccacaataacactgccttcagattaaaaaattctttcttaatacaatgataggcctgatcaaaattctcatacaattctataaaattttcaattaattattccaaatatatatttatattatgttgatgttgttgtgggcctaatatcattaaagaaagcctacaaaattcccttttcatcactaactatggaagaggattatacataataaggaagacaggtcatgaattatgatgactacatattttgattactccatctgcagatagaccgagatgaagatttgttggttcagatttgaattatgaatttatgaagtttacttttttctaagcttgtgaatctgcaagatgtttgagttttctatctttcattatcttagtcacatgccaaattaaattttagaatattctacactacaatataattgtttaagtcgcaggatcaaaggaatgtaccacaattcattttagaggataactttcctattctccttagtcctctttattttatagcaggataaaccacaagt

SEQ ID NO: 322179 - DNA, 1019 bp, Cannabis indica
aaaaataataaaataataatttttctgggcattgccagtggccgcagtgagcacaaccatggtcgcggccataagtcgactatagagagcctattttttgaaggctatctcgccgcggcgagcacaaccatggccgcggccataagtcgactacagagagcctaatttttgaaggctatattgccgtggcgagcaaaaccatggtcgcaaccataagttgactacagagagcaggtttctttttaacctcgtctcgccgtggcgagaccacttgtggccgcggcgagaatgcccaaacaagtttaaaaggggcaaaacattttttttaaaaaaatcacaaccttctctcaaccctaaaacccctcctccgaaatctcttccccataaccgaaatctctcatctcatctcatcaaaatcctttttcctccaatcttttcaaaatcattcattcccaagcactctaaaacactttttctctcatcaaacactcttttcctctcaaaaaccatatccaaatccctaaactttacccaaattcaaaaatctcactattcatcatcatctacctcaagaacttcaaggttttcttcaatcgaggtagagtgaaggagacactcattgaggtaaacaatttcttatagttaataatgcaattgataatagataagttttgattttttgagaatcttgtaaaattagtgtgatttttgagttattgttgaatacatcactgtggagagctgtgtctaaattaaattgtgatatttgtgattgggttttcacccggaaagtggaattttaaggggaggtgctgtcaaaattttcttgaattcttgagtgttagaaatttggagtaagaatgggtcctaaaagagcaagagtgaatgaaagagggggagcttcttcatctaacccacctaggtcatcgagccgttcaaatgttgatagtgttgggttttgtgcccaaaataaaacccatttcaatataatcagatttacttactaataaagatcagaa

SEQ ID NO: 322180 - DNA, 1078 bp, Cannabis indica
tttgacaaaaaaatcaattcaggtcctatttgtactattttagaaaatacagggtccattttgtcatttaacaaaatacagggtccaattgataacttttgtaaaacagagggtctaaaatagtatttacccatattattttaaagaaaaagactaaaaggcaccacaacatctcaatattattttgaaaagaaaaactaaaagtacaattagtgtctagtacttttctttttgtcatattgtggtgtaattaagtatcgagattcatataacttaaaataataattttatgggatatacctaactaattataagacgtaacctataaaaaaaatattagacatcactaatattcaatattaactacattttaaaattaagtgtcaaaattatcattttattattcattaatagatagcattaaaagtaatattattcaaatattaaagaattatgaaataacattgggaatagaagtatgtcccacaacccctcattcaacacattttagtccaatatcttcatgtaataaagtaatttaaacaaaacaaatgttataatatgacattatttatattatattcatttacaccacatattataataatattaaaacttaaaaagctctctaattaatattacaccagagattcctaaatctgatagtacataggaatctgtaattttatatattaaataaactagttaattaatacatatgtattaaatgaaatctcttgaatttgagaagaatttccagatgcttatcaaatcaagtcataaatgtgttcatagacaataagtatgtgatgtctcatttgttgcagacatattaacctaactcatacacatcataacttttttacttcttgtccataaatcaacaaacaaccccaaatgtctcacttaagcttatcactttctaaggtgttatatcacctaatttaatttagtaactacaatgaaatatttgtaatcattcctaaaacttcatcaatttatatgaataggtgtgttcattggatcacatccgatggatttggacccatccgatccaatccaattatttattggatat

SEQ ID NO: 322181 - DNA, 1100 bp, Cannabis indica
tgtttagaatatggatagtcaaatatgcgactcgaaaagtcacacacgttcaagcaattaagacaaagaacaaacaaaacttatatttattctgttaacatttatcctaattactgtgtataattaatgtaataaataatcctgtctgattcattaatatgtaaaatcaaaggatacttactttttatcgtcatctaaatcaaataaactaagctgaaagaattaccaaaagtggactaagctgaccaaattctgactgaaccattatacttctttgtcttatttactttttactatctttattttgtctattttgtagtctaatctttaagtattcaccactctaggtaaatactcacatatttacaaatgtgtacttttactttgctcgaatactccctactttcctctgacaacacttaatattctatattatttgtggttcatctatgatatacaatgtgaataataataataataataaataattaaaaaaaatcttatatcataaaagtggaatccttattttgtagggatttgaattcatttgccaaataacgataagccatcgtcctaccatgcacacatgtttttcgttcaaaattagtggaaaagctatgctaattattgatgattaatttgagatgaacatgttccgggcttgtccattccactttttttaaatttattcaagttaacattgatcttcaaaattcacttgtattattgtgacttttagaagttgataatttctctccaaattttaaagggaataattacaaaaacagttacttgcaaagaaaaagtaaaaggaaaaaagaaaagaaaagaaaagaagacaaataatttcagatcaatgttttttaaaaaaataaaaaaaataaaaaattatctattccaataattttttaataatcaatctaaaaaaaaagttgacactgatgtcaaattaatttcaaaagaagttgaagtctccctatttgataagtgcccatgttactgcacttcaaaatgatgttgtaatcagggtcggccctgaaatttagtgggccataggaaaaaaaaaatatatttttgagtcctcatttagaaaaaaatat

SEQ ID NO: 322182 - DNA, 1284 bp, Cannabis indica
gtaattaggactttcagagaacataactcttctcaagcatatcaagatcaataaaactcgaagtagactagtatattaccgctgaaagggaataaaccaccacaaaattttgttgtttgtcatcgttaaatttcattctataaaccgatcgatttattttaatcgacattcacttgtgtttatcttgctcgtttacaatcatatgtagtcatattatgtgtatagttaactgtagatttcctcaataaaattaattaattcttcaacgtaatttctcaaagttttcaaaagctatattatatatatatatatattttatatatatatgacgtagatgtatcatataactcaattataatatatatagaatatatattgattgagctcttcactaccgaattccttagacttaatattataaatctaaaggttaatttctttattattattattattattattatttgcatataattataagttaattaattatactctttattctatatgtcgcgtacgctatcttattacaatactttaaataaataaaatagataatggaaaaagaatactatatatgaaagtagatttagatatctagtgatatagacatattatgtataaaaataatttatatatatagtatccatttacaaacaaattaacttatataaacgagctcgagctagggtttcataatattattcatttcccactccaataatatttattataatgtaaaattaatatatggtacacattataaatataaatatttgtgtttgattccaccactacctataaatatatatatatatatatataaatgaaaataaaattaaaaatgcaaaataataaaacaggagcagtagtagtacttattattcgataccaattatatccatataatatactttctttctcagcttggaattatccattacatatattccaattataactaaaatattatattttttttagtgataatattgatataaaaattatttgacaaaatttcactagaaaatagtaaatatttgagttatgactaattaattaggtcaaacacaaaattaatgaacaccgaattaatacgttaatcagtactttagaaagataatattgatataataataatatcttaatattttaatattgtttgcatatatattttttctgaattaatggaccttatctaaattcatgtaaattggaaaagaagggtcagcatgcaaaaaaaaaaggaataattttggatgaaaagtgtttaatagatgaccc

SEQ ID NO: 322183 - DNA, 2589 bp, Cannabis indica
atcggatcggatgactcaattcaattggattggatcggatggaaaaatccaatatccaataaataattggattggattggatgggtcaaaatccattggatgtgatccaatgaacacccctaggtaaggaagagttatcaatgtgagaaatattgagttacttcccgtttcctaaagcaagagactcatgttcatggtaaggggcctcatagtcaaggtgctccatgcctttagccacatgttaattcgcccctatataggcataccaatcttgatcatgagcaaaatcaaggattgtattgggcgagtagttgaactaatcatcgttttacacccagtcaagaattcttgagactcgccaatcttgggagggacaaatgacttgtcaaacctgtagtgatacactactgttgtgtgaccaatcttataacagacttgacaaagaggtcgagagtttccactgccttgaccaccatacccacttccacaatttgatgaacaattgggatagccaaaaccatatccacatccaccatggccagagggacaaccagtagaagaaccagacccaaatcttgatgacccaatagagagatttacagtcatggtcgacgaaggagccctaatagtgtaatgacattctaggtgactctcatgagtgagaagcaaagattggattgagtcaaatgaaagattatcaacaagactcatgacatgaactacaattggatcatattcaggacccaattcgttcaagagatgcattatgaggtcactcttctccataggatgatcagcaatcgacaagaatcatcaagaattttaaccttgtcaacaagactcatgacatgaactacagttggatcatataatgttgtgtatgtgtatcataatattactcataggagtgtaaatggatcgggttggatctgatctggctatgatccgacttgattcaaatcatgtaaagatccgcccgctccgtcctgctagatcagatacttgaatcggattagatctgaccctatttattcggatcgtatctgatccgatttgactttttttttatatctaagcttataattttatatccattttaattttgtaattatttaatacaatattatgtttgaaattgacttatattaataaattgtgtaaagttataatatatttttaagtccaggtctaggttcaggtttgggttcgggtccgggtcctatcccgggtacgagtacgggtctcaggtcctgggtctgagtcctagtcccggctctgggtcctagtcccgggtctcgagtcctaggttccaagtttcgagtcccaattggtaggactgggcatgaaatctaaaaaaatcgaaaaaaactgttcaaaccaacctaccgaacaccgctagaatcaaaaccagtagaaccgaaaactaaaaaaactactaacggttaaaaccgccattgaatggtcagtttttttgggtaataaaccgaccaaaaaaaccgaaactaattgttatacatatacatatatatatatatattaatttattaagtttttttttattttatgtattgtagtgactaatgatatataataataatatatttttattttattaatattaaagttaaaagaataaggcaattagtttttgaacaattaatttgtatggttgtagttgtagaatgtagaataatgtgcttatagaataaaatggatcgtattttaaagaaaaaaaagaagttcgatttggacagtttaaactgaccaaactgaggttcaaaacaatcagtttgaagacaagttctggattggtcagtcagttttagaattgcaccaatccaaaccaaaaattgaattctggatttttatatagaaaaaaactgaccaaaccgaccgatgctcaaccctatcggtcgaggtctcgagttcgagtttgggtccggtttcgggactcgggttccgggttcggatctgggtcctaggtccgcatttgggtttgggtcccgggtcccgagtctggtcctaagtctgggcctgggtctaggtctaggtctatgttcgggtccgggtctatgtttgggtatgggttcgagtttgggtctaggtttgggtccaggtccaagtttgggtccaggcgcgggtttgaggttcaggaccatgtccgagtctgaatccgagtccgggttcgagtttggatctcgagcgagttcggtctgggtctgggtccgaggtcccagggggtctgggttcgagttcggggactaagtcttgaattaagttttttttttaatatattgaaatcaaatcgaatcagattcaatgtagaaaatattaggcggggtggtgcagatttgatccgagattcaataaatatctgaatgttttagatcataaatgatctgtcgaataggaactctgacctgctctaactaagtatttctttttgatatctctaattactcactgttacgtatatttataatatactaggttgaagttacgtgcaattgcacgtatacttagttatattttagttctcttttttaaatattataatttataatttttataatatataatattattgat

SEQ ID NO: 322184 - DNA, 916 bp, Cannabis indica
tctctctctataccttcactgtttcgaaatgtatgagtgctagagtagtgcccgatctaagatcctggtaaaacaacttccaacaaagatgtcctcaccttctataggtggttactggacgttctagttttcattctagttatggggttgagtttgctcattcccctattcttcatatactgtcaaaaataacctctggaaattaaacattcaatctcgtcttttagttgtcgacactcctcagtggtgtgaccaatgtctttttgaaagcgacaataattattctgatctcacttattccttgcattcctcataggtttaggtttgcgaaacacgatcttactctcatttgcaaggaatgtattctcccgtgtttctttcagtttggtgtacatggtatatatcgagacataattttcatacgtttttttgtttatttttgtctttggacgagtcattggactcatctttcctttttccatgtggttcgtggctttttctcatgtttacaatgtttgtttctacatttcttgagttgagtttgtttctcgagccatcttttaatactttaaatatatattgagcttcctcctttctgacatagataagagacctttcattaaattcattttatgacttgattgggcgtccttgcaaatcatcccatagtttgcctccagtagtggacaaattagtgattatcccaacctggagtgccatcaactaaattctatcattcaaattgttaaccttcgttgctgtcatgctaaagtgacttagaaaggccttcaaagattcttcaagttgttgtttgatttttgttcaaggataaagcttttggtccttcaaagaatccttcaaagatttatgagtttagaatatcagggtgaaaaggttgtcagtcttcgtctgactc

SEQ ID NO: 322185 - DNA, 1804 bp, Cannabis indica
ttagaaagttcatatttaggatgctaataaacatacttgtgagtagatctaagatcctggtaaaataaatttccaacactactaactttaggtttgttgtgctcgtttttcttcaattttgtcaagcgattctgctaggagagcatgattagcttcttaatcgtaggtcaatcttttgtgggacggatgttctagttttatgggcaacatagcttcataaccataggccataatgaatggtgtttttccagtttctattttttcagttgtgcagtacaaccacaatacttctggtagttcctccggccagttccctttaccttcttcaagtcattttttcataatgtctttaagtgtcttattggttgcttcgacctgaccatttgattgagggtgtgccactccggagaaagtttttatgattccataagtcatactaaaatctgtaaacaattggctgtcaatagggctggccctgaaatttagtgggctatagagaaaaaaattatttttgggcccttatttagaaaaaaaatggtatttttcaaaatcagcaaaaaaattgtgtaattttaaaaggggaattttttttttgggaccctggaataggtgggccctaggcacaggcctagcccgcctatgcccagggccagccctagctgtcaaactatttgccattgtttgagacgattttgtgcgggagtccgaacggacatattatattgttcatcgcaaagtccaatacttttttagatgtaattgttgccaaatgcttgacttctgtccactttgtaaaataatcaactgcgaccactgcatattgtaccccgcccttatgtttcggcaattgtctgatcaggtctattccccaaatagcaaaaggctaaggactctgcatctagttagctcgttggctggtgcatgggttatttttcaaaaatctctgacatttgtaacatttctttacataggcctttgaatcttccatcatggttggccagaattatcattgccttagtattttctttgataggctttgccatgctgcgtggttaccgtagaatccatcatgtacttcggacaggagccatgcggcttcttcttttgttacacatctaagtaatggaatggagaatcctcttctatacattacaccttccattatgatgtaccgtacagctttcctcatcatctttcgagcttcatttctgtcatttggaagttctccagtattgagataggctgctatgggtgtcatctagtttagtgatgtgtctatcatttcgttttcttccacacaattgatgctaggttcttctaagaatttaatagggactagattggccatatctattattgtgctgctcccaagccgggctagtgcatcaatagttgtgttttcttctcttggaattttcttgagggtgtaacgcttgaattgtgcgagcagatcctgtatcttgcttagataagctatcgttttcctccctaggccttgtactctcctgagacataatttaccaccaattgtgaatcactacgacctcagtgtattcaacatgcagttcccgagaaagttttaagccaggaatgagggcttcatactctgcttcgttattggaagctttgaatccaaatttaactaccccgtgcagatgtttcccctaggagtgacatgggccattcccgacccatctacgtgcaacttgcaggttggtctgtcttcgttgttgttcgacaggggctcttgtaatggctctaagttgtcccttatgctgctttcttctttgcccgtgcactcaac

SEQ ID NO: 322186 - DNA, 1265 bp, Cannabis indica
atatatatcttatcatttttttttaattttttctgctaagaaattatttaacagaaattgttggttcaattattttttatttatttttttaagttaacggttaatataataccttaaaccaatcaattaattgtctttttttaaaaaaaaaataattttaaatatttaaatttaatttaaaactatcaacaaaattaaataattatttttatatatcttaatttgaatttgaattaaaaattaattcaattaattaatcatattctatataaaaaaaaaattgttaattatattgtttaaaatatttaaatttatttatttattatattgttcaataaaataattaaatatattttttttataaataaatactacactatattaaattttatatattttaaaaatataattaaattggtataagatcttaattattattatttaaattaataataacaaaaaatttattgttatgtataatcaatcattcaatgcattaaaataatttaaagtctcaaaagaaaatgctcattaaaaatttaaaacacagattttatgatataattatatctttctagtatgaatggaattgttttcaaagaaagatctcaaaatatagctttctaagccaatcaatcatagaatggtattcttttaattattttttcttaattgaaagttagaaacgttataataaagttgagaaaggttaattagatgaaatcactaccaacaaaaacagaatagtcgttggtttataattatatactcaaagctgttggaaaactcaactaaccgttgatttaacacaaaaataatatgatgctaaaatataatatttttgtgctaatattatattattttggatttttatattacatttattttttaattttttttaatatgagatagaacttttttcaaaatactgtatttttttaaaaaaaataatgtgttaagtttttactgttgttccacggttgttttctagttgttttactatagttttaattgttctgttttgttacggttgttttatatgaagatagtatttttgtaaaaaaaaaattgtacaatgttagcggcataagtgtaatgttagtaaaagtttaatttttgtccaattttgttagtacaaattccgttaatatcttaaatataggacatgtgtaagagctaaattataaattattaaattttgacataaacatgtaatatgagttattttcaaaattttttttgaataaattcaaaacggaatctgt

SEQ ID NO: 322187 - DNA, 573 bp, Cannabis indica
ggtctgggttcgggtttgagtccaggtctgggttggggttcggtttgtgacaccctgattgagtttggatttgggttcaggtttcggtccgagtttaagttagggtttaagtttggatcgtggggtatgggttcaggtcggggtctgattctgggtctgggtccaagtttaggtcccaaaccaagacactaactacgggtctagtacaaaccccgagtttagatttggatcttgggctcaagtcttggtctggttccacttcaagtttttggtctcgattctagggcctgggtctcgggtccgagtcccccatccaggtctaggtcctagggccttatttgagtccaggttcgggctcgagttcgggtccgagtcagggtttggctctctatttgggaattgggtcttgggtccgggttttgggtctcaagtcatagtctgtgtctgggtgttggtcttgatgagaacactaaggataaagatacaagtaaagttccagttggcctggtgataagggcgcaggccaacagattcaaagaactcaacaacttagtcaatagaattttaaaacaa

SEQ ID NO: 322188 - DNA, 536 bp, Cannabis indica
gtccaaaatagtatttatccaaattttttttatgtgtaaaggtatatgcacacataaattacacacaaatttaacgcacacttaaataaaaattagttggaattactttgtcacattaaatgtgtgtcaaatttatatatagtatactataattacttaaatattctgtaaaattttaaaaaatttagcaaaatttgtaatataaaaagtaagttttaaatagtctatttcatgcgtgcaataaactattattaaattttattttcggtgcatcaaatttttataaattttttaaaaatttacaaaatatcttaaataactacgttatgtactattaaaatatcgaaaacacaataacaatccaccatagattttacttgccacttggtttacatgtagctaatataattgtataaggattttacttaatcaattttatgttttatgacttaggtaataattttatcaatttatttatttcaaactcacttatttcatggtttaattttttcaactattttaaaaaaaaaaaaaaa

SEQ ID NO: 322189 - DNA, 1833 bp, Cannabis indica
ttacctgcaccacatagcacccgtgagtcacaaggactcaacaagaaaactaataataataatcatatagtttattattcaaatattatcatttatacaaatagcataggcaacagggtagatggcattctcaggatctatccaaacagcaaccagcaacaaccctttgcaatatcctttcaagaatgtaccatctaaacaaatcagaggccacacccatttcttaacccatccttgcaagcttttaagcaaatatacaccctttgatcaccttccagcttagtttagatcttagtagtactatcaggattggttagtagtatttgcttgcaataatcatccagaatagcatactggtcaaccacaaatccttccaacatctctagggaaatgttcttagccctgtaaaaagtccatttgctgatcttaaaaaatttagtatttgacaccatctccttgaaggctgagaagtggaaatttgggtttaatttgaagctgtccaggaaatgtttggccaagaactctgaatttgtaagcctgttgtccaggactattccacaagaatgtgtgttttctggttttctcacttgaaaagttgactcatctgaattaaccctagatgcaaaaatcaaccacttacacccattccctttacatgtggccctcacccttcttttatcattactaatgtacttgaagtccttgtcatttgcaataaagtattccctaagggcctttcttaaagcttcaacagtagcaaaaatcatccctttcttaaactcaaaagtggccttgtcagactatgaattatactcagatcttgcatttttcctaacctcaacttcctcatcatcacttgctaaactttgtaagtcatcctcactttcaaccccatctccttccctctcattaccctgaccaccttgatagcaaaaataagtgacacttgaccaccatttgctagcatctattggtttggctatattcctctcagcttgcacatcttgctcatattcctcctcatgaaattcaaaatattcttcattattggcatgctgtgtcccatttctggtttggtgttgtgatgttgttgggtcaattatagagggctgaggtggtattgggtcaacagcattgggctggtttagtgttggtcttttgtagtgggttggtttagtgttaggttaaatgttggatcaactataatgggatggtctgatgttgggtcaagtgtagtgggctgaggtggtatttggtcaactgcattgggctagtttggtgattggtcatttgtagtgggctggtttagtgttatgtcaaatgttgggtcaattgtactgggatggtctggtgttgggccaaatgtagtgggttgaggtggtattggttcaactgcactgggttggtttggtgttggatcaactgtattggactcttaaagcattgggtcatttatgatggggtgctaaaattttggctcatctgtaatggtttggtatattattgggtattcatcttctctacatggttgagtatcaactagaggagcatcttcccctgcatcttgaatctcagggtcttcctattctagtcctggaccttcaaagatgacatagtcatcagtacaataaccatcaaaatctgaatcaaatagtttctctcctaattcttctaggtcatcctcatcatctctatcatcatcctcatcatctgattctttagaggacctacttatttcaaccacatcaatttgtttacccttactgtctcttgtatcttttcctttacctatgggtactggtatgcccactacatcagccaccacttcagcat

SEQ ID NO: 322190 - DNA, 901 bp, Cannabis indica
ttatatgaaaatgagttttatttagggcataaaacccaacactctatcctaaggacgaatttgccgcatctcgtcagttaagtggcgatcgactcatttacacgaggtaaggtgaatcccacagtgaagcgagctattttggagacagctacttttgttggtagtgccatcgtagatgcacctcattccaataccttggtaccagtactggattcaagttgtagtcataacgtgccaacttgtaagttctgggttctagcacttcagccaagatatatggtccttcccaattaggcttgagtactcctgctgctgcgtcttttgtatttaggaatacccattataataccatgtctccaggcttaaatttcctatctttaaccttgaagttgtagtattttgtgatcctttgctgatacgctgcctttctaagctcagacctttctctgatctcttcaattccatcaagagatttagccagcaactggtgattggtttgctggtcgtatgtatgtcttctatgggatagagatgtgagctctacgagtatcatggcttcatacctgtaggtcagagcaaagggagtgtgacatgttgctattttttctgtagtgcaataggcccatagtacttctggcagttgttcagaccaattcccttttgcttgctctaggcatttccttagcgtatccttaagattttggttgactgattccacttgtttgttggcttgtggataggcgatggctaaagaactcttaatgatttcatgtctgatgtagaaatcagtaaagaggttactgtcaaattgtgttttattgtccgacactatcttctatgggagttcaaatcggcaaatgatgttcttgaccacaaaatcaagaaccttctttgatgtgat

SEQ ID NO: 322191 - DNA, 1843 bp, Cannabis indica
gctggcttttctccccagcattgttctcaatagctttgtcctaagggtcgtcttcatgcatatccttcggtggatcattggcgttaactttgacatcctcagaactactttctcctgattttgcatccttaatgatgggattgtccagattccggtcctcgtcttgacgattttttcgggggctagtcacctgttggggttcactcgcatctcttgctttggcgtcaggcacggtgaaatggagaccatatttggttctggtgaggggcatgattacttggacataatttggtggtcgtctcactgcttccttcatctctcaatgaaaccaccaaaattttcccgagattttcaaaaatagaataaatataataagaactgaaaaataaacaatcgaaagagaaagtataaaaagagacaaataattttttatgtggttggggcgttaactagccttagtctacgagtcagttttattcagtaatttgtatacttgtaaaagctttaggagatacaccggatgtatgttcgtatgtttgcgtgagcaaagtatgtaagagagttcaacccctaatttatgacattaatggggtatttataatagttgtagaattacataagggttttctttttttcctttactagggagtttacaattaaacgatatctttgggcgttctcatgaagtccaacccatgaagaatacgatctactgactaggaaaattggagttaggttgatcgggtcaacaccgtgtccgctaatggtgggcgattattctgaattacctgtacaacctttgttatgggaagtttcccctttaataatatgatattctggcgtaataagatagctgaaatttccttatttatatgcgggaataaatagggaaattggaacgttctttcgagaaggaactatcttacccctccggcctcgcgatatcggaggtgtcttctgggcttggtgcactgaaggcagaagactctgcaagtacagagctaagatagctcctagaaggacatatccggatgggcttggcccactttatcattactgagggtcccactgatgagtcttgaatgttgtcctagagtccacgtgtccaatgctggaaacgcggataacaagtgggttaaggtataagactagaacgatttgaacactaaaatcatggctggaagagagaaaaacaacaatgacctgaaaaggaaaaaaaaaggtagaagaaagagagaaaggaagagaggtaacgtgtagcagaaatgtgggtgaaaacatgacatcaacaaaaagataaaaatgtaattagtgagctttttaaaatttaaaaatgaaaaacaaagattataaaaaaattatatgaaatttaaataaaaatgtaaaaaaatatcaatttcaacatctagtgtaaaaaattctacaattttactctttaaggttttgattataacattataactaaattttccaaatatctgccacattaaaaattttattgtccttatttatttatttatttttatatcatgacttaattttggttttttaattttttttcctataaatctaaaattatttaagtaaattagtttgaatggcataattgtaataagaatataatattatgtctagtttttaaatgaagttaagtattatttaaaagatgtcattttccatcaaatttgatagtgagaacaaaagagaatgtaatatagaattttttttttttataatgaacataaaaataaccaatcaaaattataattagtgataaaaaccaaatatatatatatatatatataaaagaaaagtataaggcagtgacatgacattctaaaat

SEQ ID NO: 322192 - DNA, 2343 bp, Cannabis indica
gctttggaccaagctgttggcgaaggtcaagtttcttccgattcaagtgctctcgcagatccggttgggagtaattgctggcagaacttatcttactcacagatcatgtcctactcatagactttgtctttgagtggctcgtagatttacttgttcccatactttcttgatcattagctcattgagtactttctcctcttcgagttgatctactttgggttcttgattgcctcaaagtcacacttgcttcttcaggctctttgcgttcctcccgagagtggttttgtcgtatttcccccatcaaggtctttacaagtcctcgctttatgggtttgggaagaacattggtgatttctagcaggtgatctccgttctctcggttgagtctcaagatcctcctctttttcatgagggatttctcgttcattagttttcagttgtctcccatctggctgttcgttctaattttcatggggtatctcattttccctcgattgttcttcccgggccttttcctgtcccttagttcgtgatccacgaggtctgcctcctggtcttctcactccaggttcaggttgattttgagcattcgtcccctgtgcagctggccgagcctacatcacgctctaactcagagtttcgacattgcgcctattctagacggcgtcttaggcggcacttttccgtttcataagttccttctcccacagattgggcacctccacaattgagctcttcatccctgggcctgaggttgtgaccattcccacgctgagttctcctttagcatgttttccatgtactaggaccaacgtcgggtcgagttctctaggaacgtgtggttcgtgcactgggaccaccctcaggttgagccctcctagaacgggttgtccttctggactgcgggttggtagatcttctagagcccatgggctctttcccagaacgatgattggttaccttatgtggggtgttaacattttttggatttttcagccatgaaggaggtggtttttcttcaaaagaagggagggttttttcttagctttttcccagaggctctcaatgaaagcaccaaactgttaacacagattttcattaactaaatttgagcctcacaatattgatttcacacaaaaacataaaagctatataaatgaaaatatgaacacagtgttttttacgtggttctgcagttaaaattctgcatagtccacgagtcaatcttattcatatttctgattattattcagggcctgtcttgtatgattttttttcgtcccttttttcttcttgtcggccactatttataattacatagtggatggtaaattacaatgttgactggagtatgtttgcaacaatcatccttaaaatcgttggatttgattacatatcaggtagtgtaaatgtggtttatgatttgaaagtcatatagctgtgattttcccacttttactgggtcaaaacaatcatgtattaaacacatctttaattgttctatttggagatgtcttgacagaaacttggttacagtgatgccaatagcgagatggggccattcttcattctgaggtcgacaatgtatatttggtgtcgattgcggttcttatttacaaagaattcttttgactcgccagggttgtaagccttgttactgttagctagatgaagctatatgaagtcttcctatagcgagagggtcacctcgcttacttgttcttgagccaatccgacttttacacttagtttgttcattgtacgctaaggacttttacgattggtacgtgtcgctttctttggtcccttgctatttccatttagcaacatatggtttctctctaatacactaagtgccagtttgtacattgattcctcacttaagaccttacagtcaacgggttacaaatatactctgatacttacgtaattaatgagttattccataagaagaaattgcattaattcacattcccttttatcctgacacgtgttcttcattgagatggtgatgagaacactaaggcaaagataccagtaaagttccagttggccaggtgacgagggcgcgaaccaagaaattcaaagaagaactcaacaacttagtcaacagaattttaaaacaagaggagaccatggtcaacactgaaggagagcaacaatttgtgtttcttatcaaagtagactcaatttagtcccaaattaagctggtcacattttccaaggcaattggtagctttcctttttaattttgtttcctttattttgtctttgttttattttgaaagttgtctttcttttagtttcttttttcttggttggctatataaagccttgtaaaca

SEQ ID NO: 322193 - DNA, 730 bp, Cannabis indica
aagattttcacccttcccaatctgattactgcgacctcgacgaaccctccccgcaacaagcgacaacatcctttttgcacccactgtgagaagtcaagccatttgaaggaaaaatgctacatactctatggatttcccctggttatgatgaaaaacgaaagactaactctacacaatgcactacgacagatcatggtcagtcctccaagagtcctacagttcgaggccaacctgccaagggacctacggtcaactctactttcgttcctgcttctcctttggtgtccgacaagctggcctctctccaagatatgatagcataactcactcaacagattcaccaaactgaagctgttgtgatgccaacactccagtggcatcaaacttcactagcaaatctgtatcatggatagtttatagtgggactactcactgtgtttattttgatataacatgtttttcctcccttcatatagtccctgttgcttcttatatctcactacctaatggacttaaaatacatatacataactctgaaactgtgtaattaaatcatcatttacgccttactaacgtactttatgttccaaattttcaatttaacttttgtcggtttttcgctgttatagaatacccaaaatacttagtttcacttactcacaaagcttgtttttttaggacacaactcagaatatttggattgggactgttaattgttgggttttatgcc

SEQ ID NO: 322194 - DNA, 3294 bp, Cannabis indica
tacgggtcatgaacttcttttctcggagatgtgcaaacatccaatctaatctaattgaattgaatcgatccaattcaattgaattacaaaaaattagatatcttattacattgaattggattattagatgataaaagttagattctaattaaactagatcgattattagatgtcaatctcaaaatttaattatatttatgtacattaaaaaattatttatagtgatttatataataataataataaaaaagatatattatttatattttagtggcttttttggttgatttgcagcgcttggttgttttatgtatttattttcgtaacatttagttctatttcattacttggtattattattattactttagatatttcgaacttttagttacattacacttataacgatgatatttttatagagtattaaacctaaacaaatgtaatatttagtttttgcgtatttttcattatatttttaagtaaatattaaaacttaggtatgtaattggatatctaaataaaaaactgatctaatccaattagtaattaaatctgattggattgggttttgaggtctaattggattggatcagatgataatttttcaaattcaattactaattggattagatcggatgagtagaaaaatgttggattggatcgactctacatatatgtatatatggattattttttaatgggtattaagaactttttaaaaaaatagctataattaaatgttaattttaaaaataagattttaatccaatgagagataataaaagaaaaattagagtttctgtgcttaattttactatcattaaaaaaaatctctatcttttatattatatcaaaaatatgttttagcattatttttatccctctttctctaattcaaactcatttttttttatctctcttggccccatagaacaacatcaaccatataatataaaaaatgaatgatttcttttaattagacaactaaattaaacatataaatttaaaatttctacctattcataggtaatacctattaaaaatgtacctatatatacacatatatatatatctaaaatatggcttatatatttttaaaaaatattttatcataattaataattttaattaatttttactttaggagactgtaaaatatgatatctatatgtatattgttggcattataggtcaataaataaaatctatttcaatataatcatatatattaattaataaaaaatctgaaatcattttatgttgcatggttcacatgattactttcataattatatgtttaatatataaattctattaaatcacgaacatatttattcatgattgtagtgttgtctacacagtggaaaataatcatgattatgtgcttcaaaatctttggtctcataatttatcactgtactagatttacactaatgttataattagcgataaagtttacttacacagtgttatataagatgtcctttctagaatattaacaaagtatactagtatcggatgtattgggtacacattagactggaccgatattgacagtaaaaaagatatcataaacttacgttatatatttctaagtaaatatcacttatttgatcttagatatatagatcttaatcctgagaaggttaaattctagtttaaatataatttgtgttctttgacttgtttgttaaagctaaccaaatagatcggctcaatacttacatcttgggaacatggtagtgcaattaagtaggagtgctaatcatagatatggaatgtacaacttctataactattagaaatgaaatgataatttctttcgagcttggcttaacagggtgaatgattgaatggtagtacaatggataattcatagcgtgtctatatttggtatatataaagcgttctatgtaatcaagagtacaattccaaatctatggtgaagtcaggaggaattaataagttaggaaatttacttggtaaatttcagatctacttattaggagctttgttacataggcccatggtccccacattgtctaggatattatattattgtagactcaactaattgattttaattaatcaattagaattatgaataagactatgtgttgtttatgaattttcactaagcaagtgcttatttgagaagaagagaggatttagggtttgtttattaattaagagacattgtaaggtttaattaataaataagtcaaatagtaattttgtttgataattaaatataattattaaatagatagatttgacatttattgagttagaattaaaagatgatatttgtgaaaagaaaagataagttttaaataaaatggcgaaatggaaaccctgtagggcccactaggggttcagccatagggttcaattaaagctaatattttatctttttaattctattttaattctaaacctaaccctagaagctactcttaatagaataagatgactttattttcagaggatgattagactcctttatcagacaaaatagaaaataaagaaagccaccataatatttgaatccttcttcttcttcctctgttatttttcgtgccctatggtggttgaggattttcccacataattcaagtcaatacccagacctttgagaaagattgtgttgaacacaatcaaagaaggatatgatctaggttcaaatcttggtaatactctgctacagacaagaatcaagcactagagatctgaatagaaggagtcatttaattttgctgccatcaatgtaagattttctataactttatgtgtgtttaattcattttttttagagaattcatattaaggatgttagattatagtttattgtcaaatatacatgttaataagtctagatcatagtaaaacaagttccaacaactggcctcagagccaggttaataatttattttcatgaaatatagattaaaaattatgtttggatgatttagatgtattcatgttggtttatgtgattattttataattgattgtgaattacgaaattttctataaaactaataggattttcgatctggaattattttatttagataattgttggaaaatttagcaaattacgtttttatagaacttaatttcgataatgagaaagttatgatttttttttaattttgaaaaaatgagggctagggtttctaccctgcgcgaggaaatgaggtcgttcactcggtcttgacacgcttatggacaaagcgtgttcgaggtttctttgacagaggcttgtctgaactgttggaaatattttac

SEQ ID NO: 322195 - DNA, 1915 bp, Cannabis indica
ggcataaaacccaacacttctaatgctaggattgatggtgattactgatacaagttgttgaggttatagttaatatgacaagtaagttgattgtggaactagaagaagaatgggaggtgaacgaagataatgttgtcgaattcgatgaacaatcattggttggccgagttatttcgaggaaaccaattaatgttaaggttatagtccgaatttttcacctagaaatacgagctcaatcttgtaaaaagttgccacatggagccaaattttgtaggaaaaaatgattagagaatgatcatctcacctcgcttgataagaacttgcgagaatatgcgaacgagacaaggtctagttgcatacaatgcattgcatagtataagaataaataggattaagagaagttaatattggttgtgcgtatactgattatatgcaatgatcaagtatatctctcctgcaacgagtaaaggtcgtttctttacataagtttggtccgaatgactaatacgcttgatgactcgtcagggacttacatgttccaagttgtcgacgcatgagatgttctgttatgcgattaaaagtgaatgcaaacattcaaacagaataggcccaaaggcccatcttgcgagcataacaccataaagctcgcgagctcatgtgtatagaatatgaatagacaagatgcgaattttcaagtctcatacgttgctgcaattaagtcaagaacggacggaagtgttcttcatttattctttaaacgtttattttaatttaataatgtcatttgttgtaaaaaaaaataattttaaaccaatcagttatgtaattctaaagggcacttactttctatataaatggcacttactttctatataaatgggtgatccaaatcaaataaactaagctaaaatcattaccaaaagtagaataagcaaaccaagctctaactgaaccactataattctcttgttttctcgttattttttctttcttttttgtctatttagtagcttatactttgaactcactattctaagggagcactagcacaattgctattgaatattctattttttttatattcataatatttgatgttgtttaaatttctctgaccaaatttagcgtcatttgtgggaaatattatatttctaagattgtggaggagaatcgaaaatggctacagatcaaacgcacacgaacaacagcaatgaatatttcaacgttggcactctcaatgttcccatttttggaggaaggaacaacccccattgatactgtcataggaggagtaagaggtaccattgtgattcccctcatcctattttctaacttctcagggcatggtggagaaacgtcaacaccaatagctaccgtgggacagtttccaccaatcacgcccgtcgtcgcctctgaaagaatcatccaactaaaaagcatgcaatacacaactatataggaacatatgcgagcattacaagcaaagattgcaggaagagaccaaatgtaagttcgacatccattaagagtcctaaaccgatgtggcattgataatcaggtaattaatgatagtaggcggcataatgaacacttcctaacacaactcgtaattgcatggaacgttcaagtgagaataaccacgctagactcgacctgaatcaacctatttgtgacccagtacggggtagaggtcctgttgttcctaacacaaaccagtcgtggacgggtggaatgacctcaggaagaaaaagatctcgacggcgtaacctgcatagtcgtggacaaccacaaactgaggtaaacaatgtcgaatctcattcattttcctcgaggactaacagtcgctcccccaatgtttacaccaagttagtgttggaagttattttaccaggaacttagatctactcacaagtat

SEQ ID NO: 322196 - DNA, 711 bp, Cannabis indica
taactccgcgccatttctgtaaggactttttccttcatcaactattgtataaaaatgtcttgcatacgcgagtcttcctcctatgatcgacagaagtgtagaatgaagcttctcaatcaagatgcttgtagaaccttcatccaaaattaatatctgcatcgtatttttcacgaatttaatcttctcactcatgtcttgaaattcaaataagaaggtatattcaacgagaagctcagataatttcattccaatttcaagaatacgagccttgatctcatttattgaatctctttctttaggataacgttcttgaagcccatttagcaactctatcgcactcaccttcctatctttcttaccatttttcgttttattcttccatattcccacataatttgtcaataaattgtaccctttttcattattttttatcctcctataatcttcctctaagttatccagcaatacatcgcttagatcttcacatagtggctgcggcagctgtggtgccaatggtggcggttttacctgtttgggtagtccgtgcacccacggtggcggcactaattgagtttttggtcgtgagcgcagggaataaggcattggtagcgccccaggaggccttggtggccgtggtggcaaacgagggattcgggaccttggtcggcatggtggtcttggcggcagctgagactgtattggtaacttagg

SEQ ID NO: 322197 - DNA, 890 bp, Cannabis indica
aaatggtatttacccatatatatatatgtccttaaaaaaaatataatatatataaaaacaagataaaaataactattgaaaccaacaaataaaaaatgcaaaagaaaattatcaaaaaaaaattgagagaatagaaattttgattaatatgcaaattggagaaatagattacatgaagatataacatatagagcataattaacaataataaatttacaatactcaggaaaaaaaaactctaacaacaaccttaactgaggatctaataacctattagtgatcaaccatcaaaaaagtatgaaatatactaagaatctaaactaaatgaataatttcccttatttatgatttaaataatcgggttgttatgtccaaatttttatcaaaaaaaaaattaaacttttaaattagtttttgtttaaaaaaatgtaattatgaatggaaattcggcaggtaataagcggggaatgcttctcccgttcttatccccattaactattttaatacttattcccacttccattcccacttattcttcgttgcaggtgtggactcgtttatttttaaaaaaataaaattataataaaaaaggtaaattgtataaaatttaaaatattatatatgtattaataatttaaaatagacaatgttatttaaaataaaataaaaatatttaaaaatttactaataataaactacaagacacataaagataatgtataataatagaaaataatattataaaataaataaacaaaataaatggatccccgtcagagctgatggtgctatcttcatccccacctgtttaatatttagagatagaaagttgtctccattcctgtctcattttccatttagaggaagagagagaaatagagagagagaga

SEQ ID NO: 322198 - DNA, 1879 bp, Cannabis indica
ttaggagcttaccacaaattccaagctccaatcaccaaaaccaactctaaattcccttccaacttgaagtacaactcatacaatcaagaacttcttttatttttaaaagagaaagaaaggaagaaaagggggtccgttataggctgaaggaatcagaaaattggttttctaacttgtgaaaattcattttgttggaaataatgccaaatggtcaaatgacaaaaatgctcctagggccaatatatcacatatgcataaatcaagaggaaagttgtcatttcatcacaaactatacttaaataaatttcaaattattctattaattataaaattctaaaataaaatcccaaaaatgtatttcgggccccaaactcggtttggcccaaaatacccaattgtgactatcacacgccaacttgtcagaaacacctacagaagaataaaacaaatatactatataataatatagtccataagcatactataacattaaaattacagtcatacccttctcaggtaagaattataaaaatgtcccttgctcaccaactaggtcttaacaagtcctttatcagtataattcatatatatattaaattctataattatacaattccacattaatatacatgtcactattttgctaacccaattccttaatcttagggtattacaggtcgcttcgaatgtgtatcgactatcgggaattgaataagctcactattaagaagagataattgctaccccaaattgacgacctatttgatcaactgaaggataagacagtcttttcaaagtttgaccttcgctcaggttaccatcaactgagaattcatgaagtggatatcccaaagactgcgttcgatactctatatggacattatgagtttttggtgatgtcttttggactcaccaatgccccagctacatttatggatcttatgaaccaggtattttaggattacctggaaaagtttgtgatagttttcattgatgatattttggtttattcaaaatcagaggaggagcatgaactgcatctcagattggtacttcagcgattatgggatcacaagctttacgataagttcaagaagtgtgagttttggttgtcatgtgtttctttcttagggtacatagtggatgaagacaggatcaaggttgatcccaccaaattcgaagctgttcgggaatggccaattccaaaatcagctaggaagttagaagctttctaggtttagctggctactatcattggttcgctgagggtttcccaagaattgcaagacccttaacagaatttactcaaaagaatatgaagtttgtttggattaatcagtgtgagaaaagcttttaggagttaaagcagcgcttgattaccgctccattaccaactcttccatctagtaaggaaaagtttgttgtttattatgatgcctcgagacaaggtctgggttgtgttcttatgaaaactggaaaggtaatagcttatgcttcttgacaattcaaagagtacgagcagaggtaccctactcacaatctaaagatgtgagatattcactgatcgtaaaagtctcagatacttctttacccagaaagtcctgatcatgagacaaaggcgttggcttgagctggtaaaggattatgattgtgaaattctttatcatcctggaaagctcaatgttttagctaatgccctaagtagaaaaggtaagaactagatgaatacaatgaagcaaatctccaagtaactgacagatgaaatgacctaagctaccattgagtttgttgtgggacagttagctaacattaccctacaatctactcttttggaaagaattgaagaagatcaattgcaattgttaggttttatgcccta

SEQ ID NO: 322199 - DNA, 1137 bp, Cannabis indica
cttgtgtgtttttacttttatgcactgtttgtttttctgggtttctctggagttacagagttgtattctgtaactacggaaaaactgttttcagtaccagtttcattattccgcatttaattaatcacttaattaaataatcaaactgggaatattaaaatacggaatttcaatgaatcacttgaatttatgtgtaatattgatattacaatatggtctttttcctctcttttcttttaagaaaaatttcccaatctcattctttttgcattcttctctatctataggctaaggtgtgggatatcctaggttatttggcacatccttcctttacctctatgctctatatagccttttttctatgtacaagaaatgatattttacaatgagtgtattaggtgggatttgaagtagaaatttggagagacaatactgggcgtgttcgcgactgatgggacaaagtaaggagtagtcgtcactgaacgtttatgggggcacacaatgtcagaaaaagtatgggtcaaatccctataaagcatcccattttttaaggcgagttcattttgtcatctgtgttgaaagagtcatttacaatgttctgtcttgggagatgtgttaggggtatggatgactcgctgatgctaaatggttcaggaggttatcattctcttggaggccaaagttgtgactcaactttgggaacccttccaggatctttgttcacttttggatgctgacacatctcttgaatgcctaccagaatcaaggcgttaatatccatttattatgtcttatgtgcgggcctatcgctaactctcgatttgccacatgtttttggtaaaaaatacaaatgacagaatatatcttaataaaaaaatattaattttatgaggtgaaaataaaatactcaaaattaacatattgaaaatttagtttataaaaaattgactggaggaaattgactcaacttaatgatatacataaatgttgaaaatcaatatattgtataaaaataaaagaagaattttcaaaaatactatttttatattttatttataattttacaacttaaaattttttattatagaaatacgcttacaaagttttaaattacaaaaatacattttgctcaaaaaa

SEQ ID NO: 322200 - DNA, 1376 bp, Cannabis indica
aaaagaaaaagaaaaagaaagactaataggaaagtttgttttgttttctttttcactcattcttgctatctttctccatgtgcttgctctttttggacttgatgaaactgaaacacgagcaacatgggagttgacacaagaacttcatttttttcattgatgcaatgatttcgaatttcgaaacttatctatttagagtgctacggtactttatttgatttggtacctttcattcttgagatgctattcttacattttacagataaaaagatattcctgcagtatcttattacatttatgctgttatggtttattagctattttagggctgtacataaattttgtaaaccgttccactcgaataaattaaatcaaaataatccgacgaaaaatacaaaattgaaaaactcaacaacaatataacccgcccaatatttctagatcacgtcttggagcattcttctgggcttgagattctagatgcgagatcatagggaaataggtggatctcccctatatctactatctttactgacaattttgataggctacaggctaccgggctaataggtggcgcccattgtaggacgcctcctgggatcaactagcccatagattggccctcaactggatagcatggtcagagtgccacatcgagcaggggtagtattacctcttcatccatacttctgagacattgttgcttacttcaggatgtgtccaacacaactcaccccgaaaagtatcaagtacctttcggtgatgtttgttttatatagggagctaggctggtcttagcctactccttataagattggatattattttgatttggagtctgtttagaagtagaaccgatcttgataattttactttagccaagttggtcaccggtggttagatgatagtgacgtcacacctaagtcaaagttggtgagtacaccgagcaatacttcattgcttgggatgttaaggaggttcgtcatcgacgctttcagcaagtgtcgttcttcaaacgctctaaccccacattgcaaatgagggatagagcgaatcacattgtatttctctcagtagagaagagaaacatactcaggttgactagtgtggccaacttccacaagtatgatttgtatgctcctgcttctaaggttgcgcgagccccggctgcagtgggagcttgtcctggagatggacaagttcctgacttggatgacaacgagcctttgtctcgcattgcacagaatctggagaggaaggagagggccctccgctgacgcttgaccagcggaggtccaaatggtgatgcttctctccagatcgggcctagatgccagacttctgaggggcctgcttgccccttgcctacatctaga

SEQ ID NO: 322201 - DNA, 909 bp, Cannabis indica
aggacagctgtcatatttttagctcccttagctgacctgtcaaagacaagataagatcaaaaaactagatgacactatcaaccagacagatgacaaaggcagcataatttgccacacgaaccataggaacttacaaatacaatacgatccttatacggcgtaccaaacgacctcatagtatttttatttcttgttctaattatcgcaattgtaatgtactatcaagcaatttaaaatgactaggtgtgataaaaattagtaattccacgtgtttgctttttataaaaacagttcttgctcaaaaaaataaaaaaagacttgttgaatacaatagaaggtatgcattatattactcaatagtataatgtttggttaattaaataatttaatttagcgagagaatgatatattatttatataataaaatattaagattaaattattaagtgacaaatatttaaatttgataaaataatatgtttgtcaaatagtgtaaatgatgttcattagttaaagtggttaagatagttacgctataaattgttcattaactaattgtttgttggttagttttttctgttttagttccttttttgatctgtgtacttgtataaatatcactaagatcagtaacaaagtcaagctattgatgaatcaagatcgtatctcagattctcttcttcttcccttttttttttgttctttgtttaattacatcgtatcagtctctcttgactaacgtcttcaatggagtccatgtcaaccggtcctgtaccagactccacagttccaattaatcctctggtccttactcaggccaccgacgctcacacgaaatagctgaactccaactggaatccattttctcattctctttcttctactctaactatcaagcttgatcgtact

SEQ ID NO: 322202 - DNA, 729 bp, Cannabis indica
cctcttgatggcttcaaggaagtggagatcctacttccaggctcatcccatttaaggtacttacaaaccatccacttcgacaagtcttacagaagccgaaagcgtcagcaagactccttaaatgggatatgaaattgagcaagtttgacatacactacgtttaatgcatttccataaaaggacatgccctagcagacttcgtacataatgcaatgaggcagaagctagttcaagtgtgccagtactgcagaccccagcatggaaggtattcgttgatggagtgtcaaacgaaaatagatccggtgctgggatagcaatgatatcgccagatggacttcggctccaggcaaccctgcgtactgatacccataatcaacagatacctcaatcctatccttgagaggtccctacctaaggaaccagagggagagggtggtctatggacctgaagagcgctcaaggaaccaagagaggactaggagtcacccctccgatagggttccccgcaataataatcgaccaccccttatcgatgagcaagtcctacccggtcatcatatgggacgcaatgactcccacaatgtccgtctaaggcggagtggtggaggaaactctagaaacaacaatggtgaccgtggcagaaacagtggaaggaccccccaacgtagggagtggcaaccccgcgatcaacgtggccaaccacgagatggcgatgatcgcccaagaaat

SEQ ID NO: 322203 - DNA, 650 bp, Cannabis indica
taataaatagattttaatttaaataattaattaaataaaacctttattgagtttctttaaatgtaccgtataacaaagttcggaatggtagtttttggaatataatttttcacgtaacttttctgaaagcctagaaagagtttttactagaaaacttttttctctctatcacataagaaattattcttgctcatgtgttgagatttacataaaaactttatgtacactttaactttatcctagtagacagaattatgaattatgtaccgtgggatcttatgattttgtccgagtgataacgattagaaatactgagttaatacgttgtctatcagtgtagacgatttatacagtaaatgaggatatggagttcttacgaaggaatagtctaatcttgtgaaatccaaagttgatatattttgctatgatgttaagagttaaagaaggttattgagaatcatgaaaattaaagcaaaattgtatgatattttattcttgaaatatgggtaacctgggaggatcaatggaatattagaaacatgcagtgggcatatttgataaatgttagattatcttagaatgatctcttccactgacgaagcgtttgctaaaagtgataattaaatgtaccattggttaggtactttaat

SEQ ID NO: 322204 - DNA, 1016 bp, Cannabis indica
tctcagacaaattccaagggaagaaaaacaactgcagatgtgctagctcaattggcaagtagtattgtaagtgacaaggggaacctgattcctatccagttcctcgaagagcctagcatcactggcacaaaagaaatcgaaatgatagatacttccccaaacaggatgacaccaatagcagcctacctcgacacttggaaactccgagataattagaatgaagctcaaaaaatgagaaggaaggctgcatggtatatcatagtagagggaattatgtacaaaagaggattctcaatgccattgctaagatgtgttatttaagaagaagctgcacgacttctatctgaggtgcacgacggattctgtggaaatcatgccgccaaatatatatatgtatatatatttatttttgtaaataattagaaaaaattgaattttttaattttaagtaaatttttattgtataaatttaatttgtaaaaatctaatgtattttagtctatatgtaatgtgttataaaattagtcgttgtttttgtaaaaaaattaatgtgtaaaaaatatttagagaaatgttaattaatttaagtttaaatagttttatttaattatataattaattgtaaattgataattttgtgtgtttattggtagtggtgatcttgtttgagtacgttgattggaagctttattagacttggtaggttactaaaattatgttgttaatatacttaatgatgtttaggtattatcggtaatatatatttgtatatttttagttcacacaaatttttagataagttgataattgttataaaaattaaacttttatctacttttactttaatttgatgtgtttatgaatcaaagctgtaattaaatattttaaatattttatagcttttgagttctttgtgttgattgaagatcgcacaatcttagctatctttattggagaaaggtataatctctgttataggcataaatctaccctccccgcgagaaagacttgtctat

SEQ ID NO: 322205 - DNA, 1323 bp, Cannabis indica
tttacaagttgtatttgtcataatatattgcttgccatattacttgcttttatttgattaagtggctaattgcttaattttgtgttaaaacttttaatttaacgaaattagtttaaatttccaattaaccccctattggaaacatatcttgggctaacaaaatttccctttctatccctatctaaagcatttaatattataaaattgtccataaaatagtttactgccaagacaatcggtaaggaaaactggctatagtaggtacattttattttctttgactaatgtgaattttttgtcagtaaaatgtacagttatgtactatgtgtcagtaaattattattactttttaattaatattgtccacattattaatataaatattattgtattaatgcgtgaccaattacgcaaataagtaaaaatgtgacttcatcagcccatatgtatatttatatatatatacatacacaaatacatatgtatacatacatatttacaaaaatatatatatacatacacagatatatatatacacgtaaatatacatatacataaataaaatacccacacatacatatacatacatattcatatatacacatatattaatacataaatttatacccaaataaaaattaatacttatcttcactgagagaggggacggcggaggtagcgattagggcacgacaacaacgacgatggtgctgtaattttttttaacagagagaaagaaagagaaaagggtggagatgatgatagtggtggggatgatcggaggttgtggagatgatgatggtggtggggataattgaagtttggtggagaagaagaaaagagagaaagaaatgggaaaaggagtttcgactcgagttttatttaggttcaactttaaccgacgaagttaggctcaccggcaaaggtttttacctaaaataaaattgaaacgcagcgtttcatttaatgcaaaatattttatcggcgagcttaacctcgccgataaaacttttttacctaatttcccgtgcatttttttactgcatgggaattaaactgctaaaaattttataatttttgtcggcgcacttacttgctagtaaaagtgaaattaaatcgccaaatatttattaacttttgtcggcgcacttactttcgccgacaaaagtgaaattgaatcgccaaaaattagctccttttggtggttggtttaccacctttttgccggcaaaactactgtacctaatgttgggttttatgccctaaataaaactccatttcaatgtattccattttattcaacatcaataaagaaacagaagt

SEQ ID NO: 322206 - DNA, 770 bp, Cannabis indica
attttttaaagtaaaagacttttatacagtgagaattaattagtttgtttaatttgtgtatgtacatttattataaaaatgttatacatgtagaataatacggaagaaaaaacctttctttaattttatacagtgttaataaccaattttttttaaaaaaatatataaacaaaaaatttttaagcactaaataaagaaattaataatacaatcagtaggaccaattagatgattatatttgttttcttttatgaaatagaaaatagacatctaaattaagaaattaaatattgtgacatacaaaagtgaaccaataaagacttgtcaattgaacaccatatcattcattaccatcataatctcaataaatcttggtctaaatcttaatcattttctgtcacaattcacaacaactgaaaatagaccattaattctcattttacaacaccattaaaatacaggctgtaccatatgtctccacacacacacacacaaacaaaattaacttaaaaccatataattaacaacataaatatatatatacatagtgcaaaaagttagcaagcatttataaattcatttaaccgtgttattaaatctatctacacaaaaaaaaaatataatcaatctctacataacttcatatcataagaacaaaaactacacctaattctctcttttcacccaacccaacccaacaattcaaagttgtaaaatttcacaaaaaatcataacaaccctctaagcatcttcctcctgctcttcttctt

SEQ ID NO: 322207 - DNA, 674 bp, Cannabis indica
aaattttatttacacctcacaaatttctaaagaaactctattttaataatttatattttatttaaaattaatatctttaattaatactaaatttttttaactttttcttccaattcatattcttaaaaaatatacctatcaaacaaaattaaattatattttaatatattcttaaaaaatatacctatcaaacaaaattaaattatattttaaatattatggcaaaaaaattaaaataaaaaattatatgaaattttcttagaaaaaaataaaagaaaaatatacatgagttagaaaaaattataaaaataaaatcaaaataagtattgaaattaacataaaataatgtgaaaaaaattttaaaaaatattaagaatactttctaaaaattatttaagtttatattttttttaataatagagtgtatttataagtttatgtagtgcaaataaaacttccttattaaaatttcttaattacaattacaccattcactctttctccttcttactcctatactcgcacaaacccatctgaggcggcagccacctccactccacacttccaacatcgctagacctcatctctagtcccatgttgtcacacaaaacctcttctcaaaccttctacaccgctatttagtgggaaaagtaaaaaaattacaataatttaaa

SEQ ID NO: 322208 - DNA, 1160 bp, Cannabis indica
taagttttaagttaaaaattaaaatatccaaactttaaatacaaaattgtttaactaataaatgtaatttatataatataagatatacacttttattaaaaaatatataaatcggtttaattcggtttattcggttaattaggcggttaaaaataatttgtaaaccacccaatatattcattgggcggtttggattttcattgtattatttcgggttgtattttttgtcggtttattcggtttggtttgggcggtttattcgggttgggcggtttgtaaattttattgaacacccctaatcactgctacaacatagtatcaatgtaaatttctagaatgacatcattttctctcctatggtatagcatatcaatattttgccacataaaatatccacctcaccaaatatcttctaaaattctaccattggagatgctcttaggcagtttgttaatgctaagttggatatcatagcaaaaagtagagttagagtcagattgttagatagcagtccaaactattaaaaattcactacctatgctttcttctttttgggttattatatgtgggaaaattttcgactagtggtgaagagccaaatcaacttaacttttaacaatcaaagaactagcaatgataaaatttacaaacactaagtagagatcgcggaaaaaaagggcaaacagagtaaacaaaaccagaaaatagtaattgcagaaaataaaaaaatcaacaccaagaaatatattggttcaagtccaatagattgatgtgatctatagctctactctagttttggaacaccagaaaatcttttttaattattaagcaagaataggtacaatacagtcgagacgagattctctgttaagttctcacaaagtgtttcaactctcacacttacacccaagaatcttcttcatctgtagaagattcttcttacaaatgaatagaaactttagaataaaactaagaaagtaaatctaatcattcatatgaatataattaacttatcaacattttgaggataagataggagaatttcgcaaagtctattcgaatgacacaggcaaaacccctagtccttatgaaaagttttatggtatctttaatgattacttattcttaagcaagtattttacattaatgttaatactaaa

SEQ ID NO: 322209 - DNA, 935 bp, Cannabis indica
caactaacacaacccccaaaaacagtaaatacaaaacgagataaagatcttttggtgtccaaattcccagcataatctgaatcaacaaaaccagtgacattgtcatcatagttgctgtcatttccaaacaccagaccagtcttaagtgaacctttgatgtatcttaggatccattttaatcccttccagtgttcatcaccaggatcactaatgaatctgcttacaacactcatgttgtgtgccagattaggttcggtacaccccatagcatacatgaggctgccaactccatttgcatagggtaggctctccatatgtttcctctcaacatctatctttggtgattgattctgagacagtttgaaatgttgagcaagggggtggttacaagtttgacatctttcatgccaagcttgtcaagtaccttcttgaggtaattttcttgtgataaattgatagtgtggggtctgttactctttatttaaatgcctaaaattttcttggctagctccaagtctttcatttcaaattcaatactgagttgagacttaatattgttaatttggtttctttccttcccaactatcaggatgtcatcaacatacaaaagtagataaatgccattttaaaagtagacacatgtgtcataattgctcttggtgaaaccaattttcatcataaactcatcaaatctaaggttacattgtctaggagcctgttttaatccgtaaaatgatttgtttagaaggcacacctgacctggtttctcatcgtagccttcaggtatctctatgaagattttctcctccaaattggcatgaaggaatgcagttctgacatccgtttgatccacctcaagatcaaatcttgtagccatggatatgataactctgatggttgtttgtttgacaactggggagaatatatcattgtaa

SEQ ID NO: 322210 - DNA, 592 bp, Cannabis indica
acatgtataacatgagtggtttcatttctactctctctccacccctcccatccccggtagtgagactccatgtggattttataaaatcaaaacttcttttctttctcctaaattttattactatgccactaatactaattaaatatttattccctccacttagacttttctttcatcatcttcttcataaaaagatagtttgattcatttcatggtacgtgataagaagcagaaatattccatcaatctattcatcattaactgtaaaaagttaacttacagtatatgttattcagatccccaaagaagaaatttatctctttcttttcttcttttttcggttaaggttgtttgattaatggtggtgtataataagaaaaataacttattttcctcttgttcaccagcattagaatttataaccaataatattattgataattaataattaaataaaactaatctgtattagcttatgatcttccagtttgtatgttgtaacaggcatgatattgcatagaggtttcccaaatcatgagtaatcggaatgggtctacagtcaattgagcacatgacaagttcacaagagatc

SEQ ID NO: 322211 - DNA, 611 bp, Cannabis indica
cagcttatacctcaaaatagcagagtgaagcgagagagagagagcaagagctgtagaaaaaatcatttaaaaaaacaaaagattaaaaatcaaataatatatatgtgtgtgtgagagagagaacaaacaaaatcaatgagtgaggctaaaatgtcaactattgttgtgttattaccctctagatttggagagtaatttgtttgatacacagttgaaataagcataataagaaagttaaaataaatttatgcacaattgtattgtaccctccaaatggtaaatttggtggagaaggaccattaacgtaaatttatcaagtcaaagaataaaattgtatttatctattttttcttttttttgtgtttaatcatttgatgaaaaaatatatgacagtctgttacagtccatgccatcccaaatacacaaagatttttaatgaaaaacatgaaaccaaaagctaaaaaaaaatatatacatagcattcaatatcacaaaaacatgtgatatttacaaaacaaaacaagaaatcatacacccatttcaatatataaaatatagagaagaacatatattaaaaatgaaaatatatatatatatatatatcatattca

SEQ ID NO: 322212 - DNA, 1067 bp, Cannabis indica
ttttatgctgaaataaattagtaggatcataattccacttattacctgattaactcataatataaatgtaaaccctaattatttaccattagacttattgggatattacatgcgaggattataaagatcttcctgccagatagtgaagatcgattctttactcagcgagctagttcggatgacccaacaacctcgataacccaataaaaactcgcatgtcttaagtgatcgacctattacaggatgtctgtatatgcgactcgaataggacgtagacatcttagaatcaaatattcttgtacgcatcttaagcctgggagcttatgcaagaatatgaacaaacaactcgtactatggaagacgcatacgtttctgtatttaatgaatggggccgaaactgttctccatttattgtatttacgttttgttgatttaaatgttatattcaatgtacaaacggattgataataaaataaatctctgtgtaatcaaaaggcacttgctttgtatataaatgagtgatccaacgtgaaatggataggacagaaaacccttgcaacagtggactaagcagaccgtgatctgactgaaccactatactcactttgtattctttatatttccagtacgtttgtgtattcgtagtttgaatactcgccattctaggttgagtactcacataattctgtttatattttaatatattattttatttggtgttgtctaaattcctcaaacaacaagtagtgcaaaaaaacctgccagatctctaggaaggatgaaattgattgtgttgaagaactttgcgtgatgatttcaactcatagaaccttgttaggggtttaaaagaaaaaaaatttaagggagaaaaaagataaaagatagattgtacaaaacctgtggtaagtacaacgtcccataaataggaggagtttaacaactaaatgaagacaacaactagggtagtgtcccactctaggaggatttcctacaatcaataggaaaatctgttggattatttattttaccaggatcttagatctgctcacaagtatgttgtttaaaca

SEQ ID NO: 322213 - DNA, 569 bp, Cannabis indica
tgtgaaccatgtaacatgaaatgcgatttttgatcttatattaattagtaagtccgattatattgaaatgagttttatttagggcacaaaacccaacatgtaactcatttgttttttgagtgcatatgtttagaagtcattaaacagtggctaaattggaagactcatagctgtcaatttcgacaactgatgcgaggggtctctaaatcaaggtattctccattcaatagaagcagatattttctatggtgattgtttctttgatgtaccacttatggaggaataagaatgaagtgttttgattacaaaaagtaatgaccttgcctgtaattttaaggtgtattaaatatgatattagatgtagacttcctattattttactaagcaaaattaaacaataaggaattggatttggatacacaagttacaagatcatgtatagtcaaatatatatgtatagaatcttggagctctctggcttatttttgatgtgttgttaggatgtaaaagaagtttttgtggtttaaacaactttctgattcataaaaaaaaaaaaaataagaacataa

SEQ ID NO: 322214 - DNA, 559 bp, Cannabis indica
ttgttgagttcttgtatgaggcacctaatactagtcaaatttggacctgtgatcaggatgtcgtcgatataaaccagaaggataatgagatgaggtcctgatccataaacaaacatggaggagtcagctcttgaggctttgaaccctttactgagtaatgtattcttcagtttttcattctaggccctaggtgcctgttttaatccgtaaattgctttatttaatttgcaaacatgagttggttttagcttgtcttcgaaccctggaggttgaaccatgaaaactatctctgtcaaggtgtcattgagaaaggcatttgacacatctaattgggtgactttccactggtatgatacaacaattgtgagaattatttgaattgttgctggttttacgacggggtaaaagtttctgagtagtctatgccaggagtttggtgacatccttttgacaccaatcttgatttgaatttggcaagagtgccatctgcattcaacttcaccctgtgaacccacttgtttcctacaacatgctgttggaatttattttaccaggatct

SEQ ID NO: 322215 - DNA, 1019 bp, Cannabis indica
taaacttataaatacaccccattaattaaaaaaaaatataaacttaaataatttttaaaaattactcttaatattttttttaaaattttttcttcacattattttatgttaatttcaatacttattttgatttcattttcataattttttctaactcatgtgtatttttttttatttttttctaaaaaaatttcacataattttttattttaatttttttgtcataatatttaaaatacactttatttttgcttgataggtatattttttaagaatatgaattgaaagaaaaaagttaaaaaaaattagtacaattaaaaatataaattttatataaaataaaaattatcaaaatggggtgcctttaaaactttttggggtgtaaataaaatttccctatatttattttaagggggtgtattgtagaattttcctaaaatgtttactattaataatattttatattattttatttttttaaaaaaagttataatattctaaatgtaatatatattttcaattatttctaattaaaaaaaaaaggcgatcaagccagcgtggcatgagagaagatgagtctagaaccgcgaaaaacagaaatactgggaaaatacaaattgatctgaacgtaactacttaattctagaattcccctagaaatgagacgaacactctagaacttctttctcttataaacccacctctctcattccactatataaatcctcatctttacccttctctcacattcagaagaattttcaaaactgaaaagcaatcatctctctaaactttgattctcgttttctccatttccaatattttctgtgttttacttaagatttcaagaaggttaatcagaatcaatcaatggcggacgttcagatgggagacgtagagacctttgcattccaggctgagattaaccaacttctcagccttatcatcaacactttctacagcaataaggagattttcctgagagagctcattagcaactcctctgatgtacgtcttct

SEQ ID NO: 322216 - DNA, 523 bp, Cannabis indica
aatcacgtaatacgcctatgctagttagggtgttacaatacacatacttgattcgtaaaaaaaatatatattgattatgcatgtcaaaaatatattagagataattctaatacaaaaatgctaaaatatttagcagtttattagaaatactcttagtaattaaatattatttcgtcgagttagtttatttagtaaaaaataattatttgttatatgaagataaaaaagttaaaatcaatattaaaaatttaaataatatttgtttttatttattcaaacagagaaaaggtcttgttttaaatttaggcctgtccatggctctatatatatttttcttgatgttggggcaaaataggctcatttaaccttgaaaaaccgtgtttttgcaaatgtcaattgtctgcagaagcagaaagtaattctgttacggtagaaaccagttttgcagagacaaaatagaacaggcagaacactcctagtccacggggccacgcgcagagaatgaaatcaattaataaagtat

SEQ ID NO: 322217 - DNA, 636 bp, Cannabis indica
cattttttgttagtgtatgtatgtactatagaatcgtgggaatgaagtcttccttacttttacagatatataaattgcttaattaatataatctgactttataatttataagcaacataaaaacgtgtcccttccgaatacgtcatgtaaaaatgggagaagttgtaaaaatatctctttttttttatacattaactaaatttatttctaatggattgtgtagttttgttgagaaaattgaggcaaaattttaattagtagtaagaatgaagtactatcgtaaagtgataggggtaaaattagtagaatggtaaaaattaggtaatgattatttgtaaatcacaaaagctacatggctcttctaccgtttcggttatttgcaaaataaccaaaacgatagggtcccttatccccgtatacaacccctaataactaaaagtcacaggcccctcactacaattaataaggcttttttataaaatatttacatttttacgttcaaagaatttttttttacatttttacggtattccaaaaaataacacgaaaacaacataaaattaacaagaaaactacataaaagtaacatcaaaataacatcaaaataataacaaaaataacatactgataacaaaa

SEQ ID NO: 322218 - DNA, 690 bp, Cannabis indica
atttatacatttcaagtgtcgaaccttaaaattaaaaaaacaagcataattctattcaaaaaagtgatttaaaagaataaaattaactctaaaaataacataaataataggctaaaaatatcctaacaggagtcctctttatcaacctcgtcaatctggtcaatcccaatggtccagacccaattgaaagaataggatttaagcaataccttgtcctcacccaaataaaaaattgagaaaactttgaattcaagtttgggggcagcgagcgtgctgggaagcgagagaagggtccaatttcggtttgattttctttaatttatattaatagattcatttttttttctaatttgggtttttatttgattttgttgggtttgcgatctgagaacatgtttcgataatggtgttggtggtagtggttggtggtgttgatagattgaagaagaagaagatttttgggttgggggttcatgggtgggagttcatggctcaggggatcacatgattggggtaggggatcacatgattggcgtttttaggttcgtgggccaggggaaaacggggttggggattttgggtgggggttcgtggctcaggggatcatgagtttgggatttcgtgggtggggattttcaattgctgtcgggttaagggaggaagaagaagaagaagaaagaaaaaagaaaa

SEQ ID NO: 322219 - DNA, 1005 bp, Cannabis indica
acataattattaatatttataacaatttatatataatgggatttttaaaatgtttgggggcatgcccgctctttttaggttgtggctccgcccataatcattatatgtaatgttttaaagctaattgcttatgagatgagtagtcataaatttaatatatggtatttaattttcacacattaataatgtgagactctctaacattcctcaaaatgatgattattttttcatcaatcttggacaatttgattacaagcggctctgtttggctcactatctccgaatcaaaagattttggtggcttttttaggctctactatttttccatcgattttgttattattatttttggattggatactcattaaaatttgatttttgactataatactatgttaaaattgtaagacacgatattatattttttgtggttcaagctcttgtggtgcgattacggtttgagaaattacaaaagttgtacgttgattttaaaaatagccaaaattcacgcatcccacagtgtgaaattcattaaatcatgtactatcttattgattttttttggattttcttcaatttaagactaagagaaattatgtgggtcgccattaggggtgttcataaaataactgatctaattcaatttgtacgatctaatcaaatccaatctgtaaagtgcagatattcgtacttatgcggatttgattggattggaaaatttaaaatccccacttgtgcggattgaatgttgattgtcatgtaaaagtaaccgatctaatccaatccacgcatatttataaaaaaattaaaaaattatatatacaaataatattttaatgtaaagaaaatagtaagttaaagtctagtatatatagtacaattatatttcaaaactcaatagataaaatgtatagtctattcttatatataatttttttttctacatacaatttaaaataaaactaaacattccttatacatgcaatttttttgtcttcctttgaa

SEQ ID NO: 322220 - DNA, 1297 bp, Cannabis indica
atttctctacaagttttgaaatgaggatatttacttacatagtattatgatttggggaccacttactataattttccaaattggaatgcgtgtgagtgattaaggacacgtttgacacaatttttgaaaaagtagttgtgataaaaaaaaatatttattaaatagttccaaaacaacttattaaagaatttagggagaagtagttaaaagctaaagttgctacaacctaacttttaaaaactgttattttgattaaaagactctacaataaatttatttatactgagaatatatttacttgtttattatatattaaaaatatttttaaataaataaattataataaaataaatattatttaaatttcttattttttttattttgtcttaaaaaatatcttatatttttaatattaacactctatatagttttttatatgtttgagttttttatttaatttaaaaatactataatttatttttatcaaacgcatataactttatacttttaagaaaaaataattagaaatatattaaaaaatcgaatttttagataacataagctcttatatatttgtgattataatgagttagattctaacattatcattataatagaatcttaacaactcacattactttaaaaaatgttatttaccaaatactctacttatctttttcctaccgttatgttgtagttgctttttttcatcgcacgattacaactatttttttatagcacaattgtgccaaactggccctgaattgacatccattcacgcttgattcattttttttttttgtcttttagactcacgtctagcaaagccaaacatggtgcacgtgttgcattcaacaatgctgggcgtgaatcatgcattgagataaaaaaaatattatttaattgaacttctaaacatataacgtctcctttattgtattttgtcaaacattgttgaacgtgattacattttttttttatgtccaacaatattagacatgaaaactctctaaaactctttaatctccaacattgattatgctggacatgaaaaagggtcaccaaaggggtaaattgtaatagtggttgtagccccaatttaagccttctagagagactaagagactaatccaaatgaatcaaaagcaatcagataatgatgacggacaccgacgacgacgccgatactaacgaacaatgggtgactgtggacacagagggagatcatagagtcgaagattaagacagagagaggataagcatttcaaattgggaattttacagagagcacaaaaaa

SEQ ID NO: 322221 - DNA, 954 bp, Cannabis indica
ataaagtggtcatatagtttttaatgaagatatgtattagtttagaaataaaatattaggtgtatgtaagtatagaaaatcaaatttttctttgataatgaccggtggagagaaaattcagtcaatttccataataatgagtaaagttgacattttttttctttttgagggaaatgagtaaagttgatatgaaaaagcttgaaaagctgtaagcaagcaccaatcattatatttaatgagtttataatctataaacatcattaaaaacaagaaaagttctcctttggctattcatagttaatttataaaaataatcctcatttattatttatttatttgaataaatagcttgtaaaaaaaacctagttaaattacaaaaaatattcctcatttattatttatttatttgaaaaaaaaaaaaaaaaactttttatttattcatataatttatgtacataatactttttcttttttaaaaaatggtgcacataatattaacaccgattttcttttttatccacacgtcaattacctaatttcaagtgtccaacttttactcttattttacttatttcaactaaagtactaaaggtgtggagtgacggaaatttttattttgtggggcttatttatcattaaaaaatatttatacatacattataatcactcttactagatttatttaattttatagaggcttttctattattttggtctataattatcaaattaaaaaaaattacatttaattttttaaaagacaatatttttgttagtgggggctatagccccacaatgttacttgtgggtccgtcccccggtggtggatttgtatatttttctttttgtatcaagtaatttttcaaaaattaggagcatgtttggtattgttttttgttttttgttttcaaaaaattatttttagaaatgagaacaaaaaatagtttttgaagt

SEQ ID NO: 322222 - DNA, 983 bp, Cannabis indica
gcataaaacccaacacattccacataaggtgactctcgttgttggcaatgtcttatggatgcttgtcaaatctgtcttgcaggtgcgggggtcttaattggtagtggtgacattgacttgtgggataggtcatgggttcttgggaaaactatagaggaagtgaaaaggagttttaattataacagaactcatgcctttttgaaagtttctgatttatttgtaaagggtactaaaacttggaatgacgatctcagtcaggcctgctttgatgagaatatggcccattctattatgagaatcacccccctagctggcgagagggacatccttttctggaaggctgcaacgtcaggagaattctctattaagagcgtttattgggtaagtcaaagacacagatttaaggagcaaaatagaatgtggattgagctttggaaatttaatttgcatcctcgtttgaagcttctgttatggaaaatatggtcaaatgctctaccagtcaaagcaagattgggattccttagctagacagacaacagttgtgtattttgtggaaatgaagcaaaaaacactgaacacatttttttatcagtgcaactttactagaggcctatggttcaggagccgttggggcattagggtggacagtatgcaatggaaatcgataatggactttggtttgtggtaggtccaacttaaggacagggaactcaaacttcacgtggtttgcttatgcaaagttcgctggcaatggagaaacaagattatgtttgaaggcaagagctgtaaatatggattgcatatccaaggaaatcaaggatcgatagatggaaatggtgtcaaggtgggaggtgcaggttttgttggaaattatttttaccaggatcttagatctactcacaagtatgttgattaacacctgattaaggttcaaatttgtatatttttagttcttaattatgcacataaaattaatataaatt

SEQ ID NO: 322223 - DNA, 1590 bp, Cannabis indica
gttgggctgttaatggcccaatttacaggtagcttgttgtccacattttaggttgtacatagagtcttgccaggttaatcctggccgcccatagacctacaaggaaggtcttgccagctaaggcctataggttgaggtctggccagccaaggcctgtaggttgaggtttggccgaccatgctcttgccagaacctggcaggtcatgtgtctgccaggatcttgcaggttcctatatagctttaccaagaggaggccaatctttgtatgtggaggccaaccttttgcaagttgaagacatttttgtacaccgtctccttgtagaggtcaggttttcttggtcgaacaaaagctcccttggttcgaaagtcactttttggccggctagcttgtgcctagatcttggccgacctatatgctcaccttgggcggcctataggcttctcttggttgactagggatgttagtacagctccttgagggctcgcttcactctattcggttgttactgttgatatatcttgtgtggagaccctattctgctactggtagggttgtactatacatgtactctgtctttagcttacgtggacatgccacgtcaagtggacaaaatttgggataacagtttatttgtaacactatatataggatatatagtattacaaattaaaaaatattaaaataacctgagatatgccgtaacaaaagttgagaaaattgaattatttttcactcctattttctctctcacgcctacccttctctctctctctctctctagtctcacatcgcccacactagttaaggtgtgtgcaagattgaaccaaccctatctcaattacagtgtcttatgagttgagtactaataactacattgattcatcaattaagatctaatagcccactctactcctcagtattgagcctggtttggaagattaagatgttaattcttgaacaaaagttcttggattgaattatcgttaaatgtaattaaagataccaaggataccctgataggcttcaagacatattttctttcttttagtagtctagatttgatatatatatatatatatattatgttgagattcttgggcttatggttcataataaaaactagtatatttttcaaatctgcttgagcttttatacttgatatggactataaaaaccaacacctagaccctaagaaccctgagaggaaaggatccttttgtgccttctctcctctcatgattctctctttgttcgcctcaccaccatcagactagtgttgttttcgatcactaccacccttttcttcaaatctaatttctctactatctcgatttactctctctacctctccttcttagatatgctatctctctatccccctcttagatctactcagtcttgtactcttcttgtcagcttcacctcgatcttctcttgagggttgatcttctattttttttttcttggacatgaatgttgtggttaatgtggcaatatagttagtgttggaaatattttaccaggatctagatttactaccatgtatgtgttgggttttatgccctaaataaaactcattacaatctgat

SEQ ID NO: 322224 - DNA, 875 bp, Cannabis indica
taataataataataataataataataatatacttatatatattgtggctatatatagcacattagttatttttttgttttctatatatttactaaaatttactacatgttgtaagtactcaacttttttatattgaccttaagaattttacagcaaattctaagtggtttactacctctaaaagttaattattttgagtatatattttgagaatgaccattcgttaggtttactaatattttactaatggtaaatgtttgaaagtgtacattaataatatatgaaaattaaatgttatatataaattgtacgggctacttcttttataatcatttggttgtgagatagaatctcatatttctaacatggtatcaaattaaaactctaacgagttataaccttgtgatttcgggatagtaacccaaaaagagccaatgtaatccaaaaaagtcacagcttgatcgggttgtgcaagattggtgagcaaaaaatagccaccatcttgagaggatgttagagagtcccacattaattgataatatgtgaaaactaaatgtcatacataaaatgcatgaactactcttctcgtaaccaattaattttgagataaattaaaatctcatgtttctaacaataaacaaataactttaataaaaatgaaatagtgtttgtcaaccaactaacatctacagttaattagtttgttcaatttttactgtttgtacctaactgtaactaattctgttacattcttgttttgctttctttagttggtctctcaaaaccttctatatctctctccctataaataatgaaatggttcttctctttggcttaacctttacaagccttagagactttgtcttcattgtttt

SEQ ID NO: 322225 - DNA, 1117 bp, Cannabis indica
aaatcagtaatatgcagtcacaaggcatcctatggcccaattacttgccaggcgcacaggcatgtaccagcgactatgcccaaatgttcggtggcaagaaaactaagagcaagcgcaacaacaatagctctagaagaaatagtggcattaagggaaagtataacatttccccatgccacaaaactggaaggtcaaggaggacgtatacctgtttcaccctcctaacgaggaaacctgagggcatcttcattgccactcagggaacattcccatacagaaatccccctaaaataaaaagggagttaggcaagagggacaggtcaaaattctgtcagttttataacgacttcggccacgacaccaacaagtgtcaaaatttaaagaggaagattaaattcctcattagacagaattgtccccatctatgttgttatgtgaaaaatgaccagactcaggctcaaggtgcccaaaatgaagacccaatgccaccatcaagtggcaagcatcagcatggaatacgactctgctgtcgactagccaaatttgaggtgaactaattctctcgagaattctacacataattctcgtcctcgacgcagataccatcacaactagaagaatttattgacgaaaagcaatgacaaggtgaacctttgaaggattacattcaatgttttatggtctaggccactaaggtcaaaggcctaactgaagaaggtcgatataccaccgtactgggggacatccttccattgagtgacttttagaaagatatcaggaggatcttgacaaataatatgaaagagttcctaaagcaagctcacggtttaataaagttgaaagaagcaatccgacaagcccaaacaggagggtaggttagtagcaggcaacctgagggtgccatgctaccccatggcctgcccaacatgcaagttagtacaagaaatgtcaattaggcctccaacagtaaaaataatggaggcaaacgcgataacaatagttctggcctcaacattggcaaaaaagggaagtagaatactgttgggttttatgccctaaataaaactcaattttaatgtaatctttatcttctaagtatcaataaagaaacagaagt

SEQ ID NO: 322226 - DNA, 3014 bp, Cannabis indica
cgtgttgcaaccatcttgactagcaactttcttgatttgtggctctcaataaaagtaccaaaatattgtctcaaaaatctagagtagacatctaaaccacacccgctcgctagattaggagaatgagaagttgtaaagtaattaatgagagacacaataatttatagtagttcaccccccatattgcgatactaatggggctacgtctgcttcgagcttttagttctcaagagatggtaattattgcaagtttttaagtatcaaaagctttgaatttgagagagaaaattctagagagagaagctgtaaccttatatgtagttttctgaatgtgtaaaatgaactcagggagctctctttttataggtgaaggaggcccataaaaataggagataaaatataaataaagtgttttccaccattgatgatgatctaatggtggaaattagcttctggtaatgatgtcaaattctttatgtctggcgggtctcgctgcgagctacccgaagcttatttttgtaacttaggagtgaattttgatgacaatagcttcagaatttctactgatgtgtgagatacgacttgatagagggcttaaatagcctcaaaatgaaagttgaattgtgtcaatcagatgaaaattgtgtgaggtaaggccgttttattgaatgtagtttaggtctcaacacaagttaacatccagcgcctaagttaacattctagcaccaaggttgacatctaacgtcaacctggatgctgtaaatgtgtggaaacatccaagggaattcctttgagatgcctaagtaatggtttgacatgccttagtccttttatatgttttggtgtagctggacacacaatctcagagacgttgctgttttgcagaaactaaagacttgaaacttccagcttccgaatgaaccaaaagtgaagttcagaatttgattgatctgaattcatggatcattgcacttttgaaatatttgatgcatggtcaaaatgacatcagatttggattagcagaacctagcaaaccatccatttgttgacctaggcgcctgggcctttaaactgagctcctgggattctatttttgatacttccaaggcttctgaacttaaggattgagtctctccgcccaataccatttcaaattcaatggttacattggatttgaaattttagcaattgaaggtagggtcccaggttgattgtcaacctaggcacttggcctaacactaggtcaacttgagcgctgggccctatttccagggactcaggtttgtggttttctcgccgagttttcttgaatctttgttattttttatgatggtgaagatgttagaagcactttttgctgaactgaattggaaacagtctaggttgacaaaatgtcaacctggcgcagggcctagtcccaagtgtcaacctgggcgctaggtccctcttctgccccttccatcattccgtttggtcattaaaaatagaagatctcaatattttctgaacacggagatgatgcttgaaagaattctaggaaaagtccattttttatggcccaagttgaaaaattgtcaacctgcgcgttgggccctatttcttctacccaagaatctttgtttttcctctataaggacctaattccccttttttgatgaagaaaaattcaatgtagaatttggatctttgatcgaatgcttagaaggtgcccaaatcgactgattgtcaacctgggcactgggtgctgggggccccgaggccccaggtgcttaaaaatcaacttgttttgaatctgattttaatgcctcaaacatgtccatggtatgtcaagttaatgtctcaaagcaagttttggccactttgcactaagatggtcccaaaagctgaaaccctagttgaggatgtgaacttgggctttgagtggaaaccctaggtgcccaggttggcttctagactgtaggctcgtgtaattttagctcctacaccttgtattaggttgttccttgtctttatggtacataatactgaaagataatggttggattcaagttattgaagttgaaatttccatctcagagaccttggagtcaacctaggcatagggctagcgtccacttgattgctatcacttgggtctacttaactccgtgacgtcatcattcatttgatgtccacatcaccagggaaatttgatgggttaaaaaatatgaatatgataatgaagtagttttcattaggttaagagtgatttcaaagcccttgacatgattttaacttttaataatacaaattaattttcttttcctatatattaaattgattgtattcttttgtgggtaattttatgaataatgttctgatcatatttatatgtgttatactaaatttgttcacctgacgtggcatgtccacgtaagccaagactgaggacacatggagtacaaccttgtcaatagcaagacaaagtctccttacaaggcatgccaaaaccatcaagtaacaagcgagaggagttaagtaagccatcaaaaagctgcataactgtgtctggccagccaaagggagtatatagggcagctaggatgagcttgtatggctgactagggtttgagcataggctggatggccaatggtgagtttcacaccaaggaggggcccgttcagccaaggaaacttgacctctataaggaaaagctgtataaaggttggccaacacctaccaaagtttgtaggaacatgacctgccagaccctggcaggaacatggctggctagaccccaacctacaaacattatgtggccggccagcctgcacttggcaggcgcatggtcggccagcttttccctagtaggcctttggggcacaaccttcatccgtggatagtaagtcaagcagtgaattgggccttgacagcccacaaaaatagagataaaatatcagcaacttccctgtttttaagggataatttcatcatttaaactttattaatttattatgtaaatatagctttattt

SEQ ID NO: 322227 - DNA, 653 bp, Cannabis indica
aaatcttaaaaagaccaaaatcttaaatgaaactagcaatacgtggcacggcacgtacattcacttagtatatatatatatatatttgatcatgaaggaaattaaagatcttattaactatttaacttgcttcttttttgaaaagttatagattttccaacccaagtgccttgtattaatattatatgtctgtgtgtgaagatataaattattattttaatatatatatatatatttatataattattagagaaaaatgaaaaggaataagaagttgtaaatctataatgatagattattagtcagagatgtgtccaacagaagagaccgtttagtgaagaaatcaggttgctaacgataactgcaatgagtagtgaattttacgtacttgttggatgaccaaccataatctatctttcatgcatatatttagaaaattcttatttggaaccaaaaattaagttatgccccacttaacaacttcttatatatatttttaaagtacttacaataatttctcttcactattttttaaaaaagatttacaattttaagttaaaagaatttatttttttatatatatttttacaattttttttatgaaaataacacgaaaataataaaaaaaaatacataaaagtaataagaaaata

SEQ ID NO: 322228 - DNA, 816 bp, Cannabis indica
actaaaggcccttagtcacattttacataaaattggtaagtgatctgctaaatcacttttggggatttaaacttgaaactaaaagtttccctatggataattagcatgacaaaaccctaactatcgagaaaatgctaaaaaatgagattttgagaaaagtaccctaaaaacgacaagttgtttctgttaaaatagtaagccattttttgggttttctgcctggaaaaacggtagaccgttttcccagaaacgatctgccatttttacagcagaacttacccaaaatttcataactcctcaaaattgaaaccaaattatcccaaactgtctagaactacaaataaggctaaaactaacctacttcatcaaacaattgcaactataaaaccttgagtcaaaaactaccattgttgagctaagtttgagctcaaaagtcaaacctagctcaaatcttgccaacaacaaacaacctacccaacaccagctctaacaaacctaatttaatccccaaaactcaatttaaataacaacaaaactcaacagaacctaaaaccaaaaaaaacaccataaaaatcgtaattaaaccttacaaattcaaagagaacaagagaagaattagcttaccttaggttatccctacaacaacacttgaatccttgctgcaaacaccctcaaatttgttctgaataaggagagaaaagtgttgggttttatgccctaaataaaactatatttcaatgtaatccagattattcaatatcaataaaataacagaagtatatttcattcatttgtgtatgttttggttcaccttat

SEQ ID NO: 322229 - DNA, 1185 bp, Cannabis indica
aaaaacaatcaaaaactcatttttaggccccgaaaagataccaaattatctgaattgacagtaaaaccaagttttggggcaaaacttttaacacataaataaaagactaattaagatttttgacatccgaacattgacataagccgaaccaagtcttattgagaatgttagatttcgggacttttatccaattttaccaatggaaatctgacgtggattaaagtttacggagtaagatatggcagatatcaagtttgaaatgaaacaattcacattactagaaatggacagaactctttaaatccaacgatctcaaaaattgataggaaattcgaactgcctacaaaatttaaggttgatggacaaaattcctaatcagcctaaataaaacaaagatattacataaacacaaaaacccataacaccaaaaaagtttcaaagctaaaattccataaatttcaaacgattgaaaattttgccgatcaaccaaagcttacccagttgagaatttccaggaatcaaggcaagatcacccaaatcttgatgatccaaaaacccagtacggtgaacgtgctttccggcgccggtttcactgaaagatgtgggctttttccgctgggttttggcgcttcgcggtggaagaagaaaaaaatcgaacgagcaaagaagaaagaaaagaaaactgctggtctgctaatccccaaattccatcttccagaagggttgaagcttctttcagagtttgcgaccttagagcaaagaagattgttcaataaggaggtgaggaatggggttcataatggaatttgctgagaatttggcactgaagttgatggaggatccaaaagaaagggatcggaaattcagggaacatgtatatgcggtgaaggaccggtgcggtaagaccaaggagatgtggagctaccctcttcgtccgtacgggttttggaccttcgaacgtcacaacgctcagctccgttgggatgctcagattagccaggttccgggtcgtagggacccctatgatgacgtccttcaacagagctacaaaatcgacaccaggtccaaatgagataaatgagtaagagaatattctgttaaatttaacgattatttgatctcccgttaaaaaataaacccaataattaaaccaaaaaattaaacaatcttttaaataaacaatct

SEQ ID NO: 322230 - DNA, 877 bp, Cannabis indica
cgggtcaaacccgacccagttgggtcgggtcgggtcagacccaattaaattttcaaggtaatcggggcggggcggggcggggcgggtcagaagcggggcggggcagacccgctccatttgccattcctagttacgtacaaccctaagtactgtgggtgaccacccacattaattacctcgggatgctccttcaccggcttctcgagggatagtgttttggaggtattgtgttcgagccacacgatcccaggtcttatcctcctttggaacaggaacctgctgccaaaaagaatacttgggaaacttataatcacaagtatattccttgtcagtaagaaggcccaccgatctcagattggcctcattcaagaggaattcgcatgacctaaggccatggggaagagtcaacaggcgcctgtgctgactaaccatctcaggagtagggacaggtcttttcgagagggctgtaaagaaaacacacacaaaacaatggtaagacaactaaaaatgaaaagacaaagattggttcaactgagcatgaggaaagtaatcacttacaaattctgcggaaggtggttgtaccgattggggaaagaccggttgtccaaaagaagtcgtccttgaaagacaccttgtttggcaggtccacaatgattttaggctcagtagagtgagcaccaagataataaaagccccctgcgacattcttcctcgctggaacagccttaaccgagtagagatactcgatttctaccgatgcaaggcaatcccactttagaatttcatacaagaccttcggactagcgagaattttttaagaaataggagtcaacttgaagggggcaaccccaaggtggtttatgtaatccttgaagta

SEQ ID NO: 322231 - DNA, 856 bp, Cannabis indica
atataaattaaaatttaatataaagttaaaattactctaaaatacatctatctatcttacataaaaagtgacaaaaatcatgctatgctttcaaaaagtgataaaaaaaaatgtatttttagaatatattttattaatagatgttgagaaaaaaataaacaagtttcaagacataatgtgtgtattaggatattttttttattttaagaagatgaaacttacatacttgtacacgtaaatcattgtccttggcatgatttttgttttttactttcttcaatttgatccaaaactgaatgttgtcaccctatactaatacgttcgaaatttaatagaatttaaatatcaaacatagaatcacatcaaacaaaatgtgtgaaccaagcaattgacacagtcataaaagattttatttttattgaataaataatgagattacatagaaatattttcttttaggcataaaaatcaataaactctcactggtactaatataaaacaaataatggatttctattaatatcatgttcttgatatgtcactcaaaataagttcaaaagaagaaacacacaactattcaaactgttcttggaattcaaagtgaaatcctacatgcatgtgagagcattcaaagtgttgtctacacagtacaaagtaatcaagattttgtgattaaattaagtcccacgatctatcagtacacaggatttctactgatatgataatcaacaatgtagtttacttacaccttggataagtgttatgttatttttagggcattggtaaagtcatcttggattggatgtattgttatacatcagactggaccgatattaaacttggataagatatcata

SEQ ID NO: 322232 - DNA, 635 bp, Cannabis indica
atatatataggtactatagagctcgtgatgtcatgatgtaatatttgataaccattttgatgattggatatccacgatgcttttccaaaaataaaaataaataaagaaataaaattaaatatatgcaaaaaaaggggaaaaaaacagggagaaaaaagtgtgtgagagtggtttggtggggtcatataccactcggcactaactcggtggttagtgttaacaaattttcattattgaatttaccagccatttaattacaaggacaaaactgtaaaagtcaataaggatgacacgtggaagttattaattggttgaggaaagggttggtggggactgctggtttcattaagttagctgatctagttgactttgtacaaaaatcgtagtaccgtatttagagtctctgttgcaaaattctacaaattggttacttactgttacttgtaagtatggtggtatttttgtatatttatacgaatacttcatatttgggctgtcagctattgagatttatggtcttgaaatcaaatcaaatcagtacaacttgcaaatgagtcacttgagaagtcaaatcatcaacccttcaaaatcccaaatgattatgttattttgttttttttttgaagaaaaaatga

SEQ ID NO: 322233 - DNA, 1840 bp, Cannabis indica
aaaaactttaacttttattagacatttgagttttatgagatattttatagtatatttggtatataagacattatttaatcttgatattttttgatattttgaagtgttctaaaaatgttttattaaatatttgagatttacgcctcaagtatacaccttaatgaggcttgaggcttaagcctcgcctcacaaaaagaaaacgccttgaggcttaaatccacaataaacgttgcttcaggttatcagctatgttagtctctcttttcctcactcccttctatttttccccagaaaatgtagattaaggagaaaacatttaaaccatattaaattcattgagtttcttctttaaagttaagtagtgatggtctaacctgaagacacattagcatctatctttttattgtttgcaataataatatcagtaagagtacattgtggaactgcatcttttgacatgaataacttgagtagtttttcattctcttcatcaattacctgcaatatatacaaataattataatataaatctttacatataaatataaattttggaaacaaaaaaaatatcctactcaaacatgggtctgaaagagggaaaaaaaactctgctacgtatcttaattgcttggtgaaatatcctcgataaaggcatcaagatttttgtaggatgaacctcctttggagactgctaattgacatgaattttgaagttttttgactctatttttcatcaattttgtgccacggctatttggatccatgaatctctaaatgttatatatatgtatataacatattcaatattcaaagaaacacgtaagtaaagcaaaagagtcttgcttcacaatgataataatgatgaaaaaatcaaaactttctcagtaacgaaaacagttaaacctcaccaaagtaagccagtaaggtcatgaaacccatcaactattgaaatgaccactcgaactggaaggatcgattcatcattaccaattactgaggcggcatccatcatagtagactcgagcaacttagtgatgaaattgatatcaaaatctttggctcttccgtactcctaatcatctccagacgagtgaaaatagttcgagactataacaaaccagagcccccaataatgactacagactacttgacaagaggatgcgatgatgggaagaaaacgggagagggctagaggcattgcaagagttagggtctggaaggattggtgagaatggggtattcaggtaaaggttggcaagggcaaaacccttgttgataggcgcatgaagaaggatgtaagggcggccaaagtgagaaatagtaagatggctaaagccaaggcaactcaaaaaaaagggcaaaagggtttagtttttaataatttatttatataattttcattatgtattggacacggaggtagttaattactatgcattataatatctgttttataaattttgattgtgcttgctatacaagagtattatatagtgcaaaactcacaagtgacaaggtcttgatatgtaattagttttcacttttcagtaaataaaagaaaaataaaggaaaaagtgtgcgaaacaagaaagaagaaactgctcctttgtgaaacagaccctttgagatttgacacaaattaattgatactttgtttcataggtcagtgcacacactggagattgctctattaatctatatattacaacacactgaaattgttcttctatgcattctttggagaaaaatcaacagtacttatatatccacatgctcaatagtcttttgcacttggctgcaacctatagactatagaggtagtaactgttgggttttatgc

SEQ ID NO: 322234 - DNA, 1308 bp, Cannabis indica
gttaagtgtataaaaatcaaaacaaagggggtttcgccgcaaattgctctatttttttttgaacaataaccttttttattttattattgataatatgtaatttttttttcaaataataaatatataatttttatttagggccacggactcattgtgagctttattagaatacgcgacgcgccgtttagtttgctgaattggtgggtcactcacgttatcactcttttactaatttgggggtactttcgtaaatttatacccaaactaacccaagtttatttacactttaaaattttataaatatatcatatgttaataatttttattttatatgaatatatacttttaattatacaatttttttttgatgttttccttcctattcataaaatatacttattaaacaaaaaataatttatttttttaatattgtgataaaaaaaatatattaaaagtaatttttctaattatttaaatttattttttaataataaaatatatttattattttataatgtgtgaataaaagttattatgactttatatttacgaaatgacgatcatttaaatgttgtttttttaaatttttttttttacaaaatataaatagattttgtagtggttaaaaaaatgaagtattcaatgtagcaaaattattttaaaagatgcgataacaatatgtagtatatattatagagtattgttatcggaactaggagtgtctagtactattcagagatagcgtattatgattagttagtgatatttcttaaaaaaaatattacaataaattatatggacttgatacttaattataccaataacaatataacactaaagagagtattagacatcattgatatattttagcatttctctaaattataaggtcctactatgtagatatattttcgcttattttttttttttctaaaataaagtcatttatacatcatttcagttatataagattacgcaaatcccattgcaaaacaagatttgtacaagaaatattaaccataatctacataatagtagctttgttaattaaaactcaattgactaatacataaactacccccattagcttcataaaatacccccattatcatataataacaagtttcgaatttggtctaaacactcttacagcctttctccttactttagactaaatggattgttagagagtcccacattgctaatctgtagaaagataataaaatatataagataaatgcgctactccttccattatcaattgattttgagataaaacctcacgctttatcccaaattctaacatgg

SEQ ID NO: 322235 - DNA, 1647 bp, Cannabis indica
tgaaacgctgagttggaaagacaagttacagtagcaaggacgacttaaggaaataatacacagaacctacctgaacttggagtaagaaggccactaggaagacctcgaggtttaagaaccaggaggcatgaaacaaatcaaggaaatccccagaacacctaggaggagcaacctgggggaactagggatgttctagtagatgaatagaacaaccaagaaccacagcaagaagtacctcaaaggccccaaggatttacgaatcaggggaatgaacgtaatgatatgccagagacttctcgtagaaattagaacataaggcaacccagatctagggaacgggaaatcccttgtaataacgagagaaatccaaggactcaacctagaccaagtaggttatcaccaagacaccccaacgtccttctcaatctgagagagaagaggcatacacgtacctaaacagaggacgcgtgtcaaatattttccaaagaagaaggtctgtgcaagacgaggcaagttctagctcagaacattcaagatctcgagggcacagtcgattagaaaggcatacaggaggaggagatagacctcagagttatgctgatctagacctcagagttatcctgatcaagagagcatgagcaacacgagaagctataaatctgagaggtactcaaatacgagatgcgtaagcaattatgaaagaagacaactagatctttgtgagcaattgaatcaaaggcaacccaatctatgcgagcgactaaatcagaatgcacctgacttacgccaacaacttaatgctaatcgacagtaagaggaccccatccaattgcgaatcattgagttggaggataagtttagaagataccatgatggtgaatatgggaaattacctggctatgactctaatgaagggcccgagcctttccatcttgatattctgaactctgaattccctcagggattcaaaaatcctcacatctcgtagtatgatgggactgctgatccagtcgctcatctgaataattttaataccatcatgcgagccagcaacatctcgaataatctacgttgtactctattccccacctcgcttactggggcagcaagtagctggttcgataagttcactcaccattcgataacttcttgggaacagttgtccaaggactttaagaaacaatttcaagcaattagggatagacaacctgaaccatcttccctaactaacataaagcagcaactaggcgagtcacttaaggcttacttgagtcactttagtatttccgctgctaaagttagcaacttgaatgacagtgttcaacttactgctcttcaagaagggatcacctataatgccctgatacttaggcccgctacaatgatttttcaatgacagtgccacctttgctaatcaaaggtttttccttgaaaattgtgtcaaattaaaagtttaaattaaattgctaaacttttataaacttttaaacatttaattacataagtcgggatcccgttcttaaacttttacaaaatatccaaaatatatatatagtcaggtcgcagagcgactacaaaataaaactccacttgtcctgagactgaacactccaggtcgtgccgccatgacatgtacaacatcaccct

SEQ ID NO: 322236 - DNA, 681 bp, Cannabis indica
atactaattaattaattataaatatcattatacataacaactaatatttctatgttattgcagtgcgaaaaaattttcttgaattttatgttgtatcaaaaaagaattttggtttaaataaaaagaataatactaatgaaaataatatatattccaatctttaacattttgtcctaatacagagctcaaattttaattttaaaaaataatgtgtcaaaataaggtaattgtataaaacaaaaattttatgtgcaaacataatctacatataaaatatgacacatacctatgttattttttataggtagactcatcttaataaaaagaaataaaaattattacttgccacataactgtgtcaaatgaaccgtacattcttgctaaccaggcgaagcaagttttctatcttgacgatccactcagaggtcgcgattggaaggttgttgaagatattagccatcgacaaatttgggacattactgacaacgaagatgagactgatgtagatgttgttagtgattctaactctgccaattttgtgttgacggttgatcttggagagttgattatgcaatcgaatgaacctccagtaattgttgaatcgtccgatcagttagtggattctgagatagagaataatgaacttgatgaaaattatgttgctgaagaagtagatgattt

SEQ ID NO: 322237 - DNA, 1141 bp, Cannabis indica
aaaaaagaaaaagaacaaatggaaatggaaatggaaatggccaatacctttagtatcaataaaatattcattgaataaatacttcctttaaaggaatgatattcgtaatatatttagcttttctatattgaatgaaaccctattgtgaagataccaaaaacttttgttttgactttgtactcatgattttgaatgtaaaaatgtggacccttttttgtttgaacaacactagaattagaaatagtaggaaaatgacctaatgacttaacaattattgaatttgtttgagtaggaaccaaattatatttaattgtacattatagtgtgtaatttgaatgtgtaaaataaaaatgagtgaatcattacttataccttatataatttctacctcaaatcataatttaaataattcaatttttttttacttagttaaaagttacaatctttcaacttgctataattgagagtgatccctatttaattaaatagtaaaagaatagaataattgatattgaatcatcttttcttaattattattgctacttataaattattcaaaaattgaataagtttcttggtgggacaatatgtgggtgttattttttttagttacacaacaatcttttctcaaattggaaactcctattcaaatatatctccccattgtatttgtgcattgaaaaatcattttctagaaagagatgtgtgagtgaaagaaaaatcatgcttatcaacccacctaaattatttcatttcatatgcaaactattttattaggttactcaattctatgatgtgtcatttctaaggtcaacaaaaataaatgagtgggtcaattcaatagaaattttagtagggccttttatcaagaaagtggtattattaacacaaattatttaattgcatggttaaggttattatgggctcttttagtgttgtcttgtttgaaagcccactttctatttctttagtgaaaactacattattattttggctaattagcaatttcccctcctaactttcacatgtaccaaaattatgccccttgaacttttttggccgttaaaaattctccctgaactattagattgtaatttaaaggcttttaatctaattttagtaaaaaaattctaaacatgga

SEQ ID NO: 322238 - DNA, 1189 bp, Cannabis indica
gtttaagacactatggacgttggacatccgttgcatgcatcccgtgcatgcttttgcatggaccgtaggatccacaggtgtcatgacgcacgaccacgagcagctacgggagcccgcagagctccatgcaggtcgaccgtcgaccataggcgagctttgggtcacgggcttgaatttggagaaggacctgagatcaccaatggtgattgtggttttcatagtgcatgcccagagtctatgtgactcgagctcacatgcaatgatgttttttacgtacatggctgggtttcaagatcagaaatcgagctcacatgctatggacattatataggtataatttttgcataaaataaattatataaaatgtctatgcactaaattggcttacattattttctaaaaataataactacaaaacttacaactaattataccatataattaacgattcattgcctctcatacattcacaataaaattaccatccattcacatacatatcacatatatataaatgtataaaacccacaaaatatgtaatgtatacacattcatggatctactcttgatactaattattagtttttatggtactaaatcaggtacgcagcgaaagggttttgtattgtctgattatcatcgaaccatattccaatggatctccagtgtgtacattaaatcaaatcaataaaaacaacaaatttagagtgtacctcttgaagtttatcagtgtatctttgaaacttctcgtaagttgtatcccttaattcagatgatgaggatgatgcaattggactcacactagtatcttctaaatcgttccaccacacacaaagaatagtgtgtgctataaggataaagtgtacaactttgttctagttgagttctcaacacatgagcacgaacaagagaaaatatgttttctttttctctctaggtatttcaaaaacagctatgtaaagtgatgttctgatttctcaaatcaggcttctatttatagtaatctttttaattaaatcattattcaattatttaaataaataaatatatataaccaaatttggttactaatatttataagagaatctcgcaactacttgagagaatatctcaacaaccttgaaatatctataactactttttaaattagatatttacctaattgaattaattaaatgattaattaacc

SEQ ID NO: 322239 - DNA, 856 bp, Cannabis indica
tagagtggattatttaccacaccagccaacttccatcctcttttttttgtcttccagatttcaccctttcaatgggaggtaagactattacatctttcacattttgtgctatatcccactcattttggtgtcttattggatacattgctccttaattagttgctagccaatttttcttagtgtcgtaatctgaacagagcttgtgtagtaacctgttgcatgtgtgtgttctctctttgaggtctactctccaaaattcttttattctggttacctcaaataaatattcggtggttggtttaacatgtgtaatttaaaaccaacatttattaaacatacgagacaatagtgaaacaacctaagaacaacattagaaaaactatgccaatcttagtattaatggttttaataaatctgcttcatctcgccggaattaatagttatttttcgggtgttgtagtgttgctatggtggttctatccgtgagtgtggaagatgatgacctcgttttttatttttggtgtttacaatattaaagaaaaaaaaatatggccaaggcagtaaaaatgtaaattttgctgtgtggtagtataaatgtaaacatttattcaaaatccaatatttttgggaaacctcctttaaaaaatttaatttgtgtttaggtattattttattatgattttgtaaattctgaatacggttagtattatggtccatagtattatttatagttaggatacatggctggccctaagttaatttgagccctagaaaaaaaatatctttttggacctttttttttataaaaaataaatagtatttttaaaaattattaaaaatatatgtatatttatta

SEQ ID NO: 322240 - DNA, 1331 bp, Cannabis indica
tatatatatatatatgacactagctattatcttaaccattcattgtaatcatatgttttgatagattaagatcatatattatcaataatcatactaaaccttacataaatatgtatatattttacaaaagtaacttttgaccaatcatgtgaaacatatttcatattcaccattcaccgatttaactttattttttcttttccataatatatgattgaaaaaaaggtcattttatacaatttaataggcttttgatggttaaaatcttgacactaatcatacaatgatatagattaatttttactaaataactttcttgacatacttggtaccatcatgtgaaacatatttcatatatctaaccatttcactagtcactaactttattttttatatgactaataaaaataaagaagtaacttctgacttaccaaaaggtgaaacatccatggccaaccttctaggcctcttttcaacagcttggttagtagttgagccttgattaacatgaacatcgacggcggtgtcctggccatcgccggaggcctgagctctcaccgccgggactctggacatcctagaaggaaatgtggccaagcaaggtgcaacaatggtagagtgagagtgtaatttggctttgttgagtggcaaagtgtaagaagaaaaagttggtaaagacatcaatgttgttgaagccatattgagtatgtaattgggaatgaaagtaaaagttgtgagtttgtgaatgtttgtgtgagttttgagatttgattacttgtacttgggagtgttataattgtgattataaggaatttataggcatagagtttggttgatttgagttaagactagaaggtttgagatgggccttgagttgttttttcaaattatttgttacaacaaaaatagtgtgaaacttctggaccatacacttgtgtcattttcttttggttccggagaaatctacacttttcatccattttcatgaattttgatacctattattattattattattattattattattattattatccattggcaaattgggttttgtccttagttatgacattgatttagtgaagttaaatcaatgcaataataatagtgatcatttacttgtaataaaaaatgaaacattcttatgggcaccaatgtatctaatattattatagggtaactcttataggatcagtttagcacaattgtattgtggagaaaaatagctgtagttattagttagatattttttataattttaattaaagtaaaataaataaaacttaatattaaattatactaataacaatattatattttacaagaat

SEQ ID NO: 322241 - DNA, 1329 bp, Cannabis indica
agagagagagagaattagggtttcagattagagcttgagagcttagggtgcttgagacttagagaaattagagttggggtaatgctttttatataggagggctgacaagagaataataacctaacatccctaataaatggaaaatataaagtatttgttacataataaaattatagataattaataggttaattatgccccaagaataagtatgtagcaatatttatcccctatttttgtgggttgttgaagtcgaattcgcaacttcgattgttgtcccgaatgcaagctgcgcatcaagtgtctgctagggtcgagactgcaaaccaagtgcctgccagggtgcaagctggctagccaagtgcctactacgatatagcctggccgacatatgttggccatagggccgaccaggagggttcggccagaccccttaaggtggccatttcgttgtcttttcatcttgcataagtgttcagacttcccgttaactactatgttgtgtacgatgactgggctttcttgttgacaagttgtactctacgtggcattgatcttgcccacgtagacatggcacgtcatgtggaaaaaaattgggataacatatatatatatgaataattacccaacacagtatttaatctatataattatatatgaagatagttcttgataccaattgttagtttttatggtttatataagagttataaaagctaaagcagaattcgataaaaaatggtttttatctaatatgaatcatataatctactaaaagaaacaacatacctcttgaagcctatcaaggtatccttatttcttttagtacaattaacaatcatccaatcctagaacttctgttgaagaatccacacttggatcgttcaagctagactcaacactgaagaatagagtgtgttattggatcttatttagatgaattaatttaagtattacagtgtgtactcaactcatgagacactgtaattgagataagaaagtttgatctctcacaaacttgttatggtgtaggtgtgtgagacctaaagagagagaggagggggggggaggggaatagggactaaaagctcaattctattttctttatttttcagtttgctttctgtcttttttcaggtttactgattgtcaatttatgatactatatctcctatgtatagtgttataaattaattattttaatcctttatttaaaataaaagaaaatatctactttgatttgaattagaattttaaattcaaatataaatatctaataactgaaatgacaaatatcaattagattttttattttattattatattttt

SEQ ID NO: 322242 - DNA, 1479 bp, Cannabis indica
tcactggttggccatgaaatgggcgtttagacacctacttgggacaactaaagtggaattagtctacaagagacagaatgctagcactataatagaaggatgcagtgattcagactatatatgcaggggacagagataataggagatcttcatctgcctattttttcttgtttgggggaaattgtgttagctggaaattccaactacaacctgttgtggcactctcaacaacagaggctgaatatgttgccacaacagaagctataaaggaagctatatggctaaaaggactattgaatgagcttaaactacttaaaggagttcctacaatgtactcagacagccaaagctgcatatttctatgcaaaaaccctatgttccatgacagaacaaagcacatagaaatcaagtatcactttatacgagataaagtgacttaaggtgaagtaaaaattgagaaggtgcttactgaggacaacccagcagacatgggtactaaaattgtgctcttaataagttcacacattgtatgaacttattaagaatcgacccaggagactaaaagtaggacctatcaagctaggactctcagagataaaacaaacattacatcagaactgattataagaggaattcaggtggaaattgttgagtaaattccacttataaccagtcctttacttacaacatccacatcagcatatatcaacaacaattaacagatgaataaaagacacaatccaatgtgactttgcctctacaagaccaaaaaccaggagttagttacaactgattttgtaactaactccaaccgactccaacacaatatacaaaaacacaaacaatacaacagcaacagtgaaattaacacaaagcaaaatacaaaacaaagtgagaagagcaatagaaccaaaataattgctaaattgttacactaaaacacacaacaaagcaccaaatcgaataatcaataacacacataatcaaagaatttggcaggaataaaagcacaagaaagagtggagttaagaaatactcatgtgatatgatatccaatcaaagaatggtggtattgactttcttggtgtgagacgactcattcttattatgtaaaaactttgatcaagttatacactgtgtgttccaacactaagagggtcaaataagatgccaaaaagatatgtaaaagcttcattcaaattcaaacagagccacatatcataaaattaagatatgttccaaaacataacacaaaatatatatataagtgaagcctccaaaactgtgtaactcaaacattaaaatataatgaaagggcccttcaatctcataactaaggacctagtcctttcaagccattggagattgcattgtacgagtgtgtaaatggttaaaaactctagagagtttgcattttccatggcatactagtaagagagcctccacaggtggggtagggcatggctccgatgccacaca

SEQ ID NO: 322243 - DNA, 807 bp, Cannabis indica
tcaaaaaaccccctcaccaccgcctacaacgccgaccagtcaccaccgcctacaacgcggaccctcccaaatcaaaatcgaccacttctcaccgcctactgcctacaccaccggccccatcaaaaccgaaatggcaaggtagcttcgaccccttttttgttattgtttttttgggtgatgtaagatttggagtattgataggtattgattttagggttataatgtataatgtatgtgtttatgtgtactccgtgagttttgttagatttagggctcgatttagggtcagatctgcgattttggggaaatcaatttttggggaagacaatggcctgatgggaccccgatggggttccgatgcattggttcgatgctttctcgggtctgttgtttttcaaaaaatgggttggggtccaatgggcctgatttcttgtgttttgattttaatatttttgagaaggtccgataggcccgattatgggtccgatttctttgtttaattttaaatttttttatgttgggtccgattagcccgattgtgtgtttgatggggcccgattctttgtatagttttaaatttttttattttgggttcgatggaccccgattgtaggcccgatgggcttgattctttgtataggttttatttttttatgtggtgtccgatggacccaattttaggcccgatgggccagattctttgtataagttttaatttttttatgttgcgtccgatggacccgattgtaggcctgatggagcactttgtataggttttaatttttttttatgttgggtccgatggac

SEQ ID NO: 322244 - DNA, 1379 bp, Cannabis indica
ctcgcctagtacataaacaacttttttattcataagtcttccagcaatggcatgagcaccagtgtactgggaaaatttaagaattgctctttgaccataaggccttacagactggacaatcatgtccttcaagctattacacttagaataatgtatattacacgctaagtgttctaatagccaattcacctcgtcgacacctctctacatattgcgaggtagatgcctcgctatgtgttatcgatgtcttcttgagattatgtcctctgacgtgaaatagttttttgtcaatacatgaatcaatagtttgtacatccttgtcttgctaaagaatgtgcagtctccgagttataaatatactctattaattctgcctttaatgagttattccattttacatttaacaatataattgccattatatttgctggttcatatcctctgagattgacacgtgtcaccttctgaagtaccagctgaattttgggtataacaattgccccgtaataactccctttttaataaaaggtgctgtttaaatgattactgaaggtatttttatcataatctattttgaaaatatgcatgccattgattttggcaattttgtggtttcgagagacatcattagcattaatgatctatcttttccacttctcctccatttctatccattagatcttctatattttgatcttacagttactaggttcaaagtataaaacagtaaagaatccatttttcaccattttcttcttttcaaaaactcaagctttttgagaattttcatcccaccttgcctaaaaccttccatgccctctttatctttgatattccttctgggaatttactcgaatttgattttcgacctcaggtgttcaaataattcatcacgtcgttcatcctgtcttcgtttgcaggattttccaccactcgacttttcgacttcaaacagtaagtatctaatccttctcccgggcccctttttttttatctgggttatgattatcttgcatattgttactctaattggtttaccaatgggtttacgtaatctgagtaatttttaaggtttatacttgatttaggtttatcatattctttaagcctttggtttaataaatttcatccacgaattgggattgttcatttttgtagaaatgtcccaatctggctcagaagtttattctccagaatttttagaaacacattatcctaaacaattagccttcctatataaacccagaaattttcaacctcgctccatattagaagtgactgataccaaaattaaagaccatctaattaagtcgaaccaaaaagaaattacaagtcattataggcgattcttacaagagatttctgttgggttttatgcc

SEQ ID NO: 322245 - DNA, 1329 bp, Cannabis indica
catggatgaaagttcaggggccatgatttagtacatgtgaaaatacgaggggcattatatggtagatatcaaagtttgaggagcatgatttggtacataaataatcattgaaatagtaaaattgaatgaaattagacaaaagtcctgaaatctaacaatctcaatagttgaaggagaatttttaacggacaaaaaaaatttagacatgatttggtacatatcaaaatttaaaggataaaaatcctaattagccatactaaaatatctttctttacaaaaaataaaaactaaaaattacaatatattaatgaattcgtgcattacaaaaaatagaaaaacaaataaagaaaagaatcaaatctttgtgcatatacaaacatgcccacaatcaatttggttttttttaggttgtcaagcacacccctatataaatatatcttatagttatgtagaaagtcaaattggatataatgggattcttgttgagatttaagattaatgagttttcaagaattcaagttggcatcactttattaagatatttttctacagcctaagcctttttttagaatatatatatttatataaacgaaaagtaaacgcctcatacattaagataattgcaccaattattattaaattaattcgttattaaaattcttgtagaggttgctaattctttatttatctgtgtattgcatttactttttagatacatatccaatatataatttataaatttgcaagtgggtttctcgaatgcaaattaaataatgtttgcattttatataaacttaaatttcattatatattatatatatatatgtatatattatttagtatttgtagctgtcatttatcattttaaaaaacaagaaaaaaaaatagatttaacatattttataatagttttgttttgtagaactacgttttctcactaaatagtattagcatgattttttttttttagaaaaaaaagttattgtagagattttaagtagttaatttttttttagaaaaagatttcaaccactaaattgttagagatattattacaatggaagaaaatcaaaatattacaactctattgtaatacaatacaaggaccaacaaagaaattaaataaatgttacaacaacataatatacaatatatatacactatatatattatatataagaaatatagaagaagataagaacacatgcaatataaaatatgtatatataataagagaataatatatatatacactcactcacaaccttgagtgtagattagtggggatcaccatgacttgaacaaggtattacacctttgtccaaaagc

SEQ ID NO: 322246 - DNA, 1188 bp, Cannabis indica
aaataagcatctcgtttgatgataagagtctatcgttggtgatttgaccactagcactcgtagtgagtactacgccgctaacattacaaataggtccgaaagacgtcagacatcattctagaacattttcgaggctgaaaaaacaaccagcttattgcttcatgcaatcacaaataagcatctcgtttgatgatcagagtctatcgttagtgattttgaccactagcacacgtagtgatttaattaaatacgatttttaataaatctgttgattaccaacgaaatgcacagttaattttagatcacgataacatgcctaaactaatagggtgttacagagcatctttaatagagtgttataaatgtgatatacatgcaatttttagcctatgtttataaaattgaactccaataatgtgtataatgtagtctaaatttgacatgtgttaaaagttgtgccaaatttaatacaaaattatagtatgagccaaattttacactacaacaaatatattttttatttacttttttgctactcattaatgtaattaaaaactttttatattttatttatatatttaatatagtttttatatatttttaattaaaatttaatatttttgttgtttttttacatatttctattaaaataaattttattttacttttagtgcattaaaagtaaaattataaaatttgagctaaatataatattgacttattgtttgagtttagtaaaaaaatttacaccatcaattaaagatggtcttattgtaatattgtattgtatatttttttagtcttatttaaattttaaaatatattatgtaaaataatttttaactttttcagaaaaaaaaaataaaatctaactattatgtttggaacctagtaaaaaaaattgaaaaaggtttgataattattgatattaatctgtcatcaaagggctgatgtggagcgtgactgatcacgaaaatactccatgcgtgactaaacaaatttaattataaatattaattttaaaaatattaaactaacatattttgatctaataacgaatgctaaaagagaaatttaaatttttatgcttagtttaactatttagttaaaaaaaatatcaaaaaatatatttttttactatgtcttaaatattctcatgttaaaatatttaagttaaacttaactttt

SEQ ID NO: 322247 - DNA, 877 bp, Cannabis indica
ctttttttttatccaaaaagaaaaaagtttggagacctaaacatacaaggtatttttttttttttgtttttgtaataactaaacatacaaggtattgaatatatatttgcttctaaatgggagatatttctttttgtaatctcataattaattaaaggttattttggtaattcaatagtaaaagcccataaacattctcatttttattatggttatagatatatgcatatccaaccaaaaataaataaataaataaaccaagttattaatttatattggtacgaataaatgagtaataattaaggactttgtaattgagtaattaaagactttgtaagttatgatggcttattaaggggcttttgggcaaggcatgggtactgttgatgtataaaaattgcggttttgtcttaagcctgactaaagttagggggatttatacttaaatgatcagacagagaattagtgaggatgaaaataaagttatgagttaggttgatcatctggattgataatgtcagttgatgaaacctattttttgttcatgcggatcaatgacgtcagtcttctagtagttatgtactgtgttgggttattttgttaatgtgcctttatagtggctttgtcttcttatttttgttgattttgttttatgagcaattactatgttattttttttttgaaataaagcgtatatatattagaaggaaacaaatagtcagacctcacggtcattacagaaaatattactcggaatagtagagacttctaccataccagaaatattgttggcaaacacccacttggccacattatgggccgcaaaattacagtttctagaaatataagaaaaattacagcaagtgaaagaattaga

SEQ ID NO: 322248 - DNA, 648 bp, Cannabis indica
aagttctttgtgctagttcaatggcttgtacagtatgggtgcccccaagtgaccatgcagacaagtctcttggtgatggggctacccctacttgcctcgcataataggggccaccgttgaagaatggtgggagaccacgtcaaaatggtcgtgggtactagctcttttttactctaatgttgagtaggtagaactgtggcaatggagtaatgtttgtaagttggtactgatagtagttgcgaaggctctctgcattcgattatcttggtaggagaatgagctccattttctcgttgtaccttcccagcttgtagactcccttactagttatctctgtaacttgataggggccttcctagttgggtctgaacactcttgtgctaagtctttagtttttagtaacactcttcggagcaccaagtctcctatggagaatttcctagtcattacttgtttgttgaagtgccctactacctttttctagtaggtttgtagctttaggtttgcttgttttcttcttttttctacttcattaagggacaccaccagtagggtattgtttatttattggtcataggttgttctcttgagatacagtggcattagctctacaagaaacatcgcctcatagccataagctagagcgaa

SEQ ID NO: 322249 - DNA, 1948 bp, Cannabis indica
ttaacttctactggtaacattgttccgagtcgaatgccaatgagaacggagtgtgtcccgtcgttgttttctctgtagttatatgggcacaaagcacttgtagtagttcgtcgacccatcttcctttagcagcatcaaatttcttcttaataatatcttttaaggttttattaacaacttctacttgtccattttcctgaggcctcgatactgatgagaagcttctaataatttcattcctttcacagaactcagtgaataattctccatcaaactgagtcccattgtcaaatactattttgattggaatgccaaacctgtaaatgatgttcttgataacaaaatcgagaacttttttacaagttatagaaactagaggtttagcctctgtccactttgtgaagaagttgactgctacaactgcatattttgctcctccttgccttgtgggtaaagccccaatcatatttataccccatattgcaaatgggtatggcgaggtcatcattcttaactcggttggtggtaagcgagttatatgtaaaaacctttggcatttatcgcatctcttaacaaactcttgtgtgtctttattgattgttggccagtaatatccttgacagataatcttcttggattggctctgtcaacctgcatgatctccacagaagctttcatggatctctttgattatttaatttgcttctactagtaacacacatcataagagtggcatggaataacccctcctgtataatttcccctcgaccatcgtatagcgatgtattgagtataagagtttgtctgcctcagttttatctgtaggaagttctccacttacaagatacttgacaattggagtcatccatgttggtgaagtatctatcatctcaatttcttccttctcacatatgcttggatcatctaagacctctaccagtaccaaatttaacttatcgaggtcaaattaagatgctagttttgctagtgcatctgcattagagttttgttctattgggatgtattcaattttgaaataatcaaacttttccaagtacttccgaactttctctaaatatttagctatttttaggcctttcgcttggtattctcccaagacttagtttacaattagctgcgagtcactatagcatgtaagattttttatctttagtgcctcaactattcttaaacctgccaacaaagcctcgtattcagcctcgctgttagaagtatcaaattgaaatctcagtgcatagtggaatttgaagttatctagcgacatcattataactcctgccccgagccattctcatttgaagccccatccacaatagtttccatgtttctgtctcacgctcaaaatcagggtcttcttctgagtatattccttctattagaaaatcagccaaagcttgtcttttgattgacactctcaggttgtaagttatgtcaaattgttccaactcaatcgactattttatcaatcttcctaaagcattaggttttgataaaacttatcttaatggctgctttgttaagactttaattggatgtgtctagaaatatggtcgtaacttgcgagatgcatgaattaagcatagtacaagtttttccagaggtgggtatctcgactctacccttagtaaccttttactgacatagtaaataggttgttagtgcttacgctcttctcgcactaaaattgtactaatggcatgctctgagacaattagataaaggtataaagtttctccagttgttggtttggccaaaacaggggtgttgacaaatgcttctttgtgcccttaaatgcttcctcgcattcttttgtccattcgaatttcttattgcctcgcaaaacattaaaaaatggaaggcatttatctgttgacttcaaaatgaatctgttaagtgctgccattcttcctgtcaaagcctgaacttc

SEQ ID NO: 322250 - DNA, 1185 bp, Cannabis indica
tcttcccctgatcgagagaatttttaaaacattgatgtccacgtcatcagaatcaatttatgggtaaataaacaatctatttcataagcatataaaataataataagaaaagtgtgtaagaaattgttagaaccttgtgttcaacacattagaatattttaaatttttcgataatttgtaggatgtcttaaataactatgatgtacactgtcatataaaaaataatattaagattatctaaatatcgagaacactaaagtaggggtggaaattcaggtcatgacacaacaacacgaaacgaactcgcgatacaaattattgcaggttaaggtcatgaaaaatagacgtgagtcgaaattaggtcgaacctggatgtcacgattattatttgggttgtgttagggttaacgcatgtgacatgaagtcggcttgaatatacctatttatatccaatatattattaaaatttttaatttatagtaaaattattatttattttcataaaaaaaaaatatatatggattaaaaagaaaattgcttacaagaatataaaatagataatttgtgataaattattttagttaattaatattatttatttgcaacatgatatatttttatttagtatatataaaaaataaatatgtgatcctaatcatattggtcaagatgtattgtagcataagtatagttgacacgcgaacacgacaagttgggttagggtttagatttcttgacacgaaatatatatatgagtcgatttaaggttagatcaaataaacatgtcaacctgcataatataaacacgaatatgatacggcaatatgaactgccacccataactaaagtggtgtatacgcacactcatttttaggagtgtaccataaaaaattttataatttaatttcctaacaagtttttcattaaaaaaatcattggaaaagttttaaaaaaggataaaatataagtcatttagaaacaacattgttatacttataagagtaatttgtggcatacatacctaagtttaactcccacttacaaataaatatctaagtttaacttttggcgacaataatacctaagttatatttttagaactctgtaggtacctaattgttaaatattaagtaaattgtccagtggaaatccctaattggtccaagtcatgaatttttaattttt

SEQ ID NO: 322251 - DNA, 712 bp, Cannabis indica
tattacaattatgccatcttaatgaaattaatacactatgtagctgaattattcttgttaaacataattaatgagcacaatatatgtttgtatactgaataaaataagagtcaaaacttaaaaaaaataggagttagtagtattgacaaccgattgttgtaggtttcttcatcggttgtcaattttattttttaattaaaaaataaaaaagtacaaaaatatataatcaagatactatttgtgatttttttttttaaaaaaataactatttgtgatagttagtagtacaaaagtactgtagacggtgggtccatgttatcagactgaggttatttttgtcttttcattttttccatatctcttatgtatttgtgcgatggtagtggagtacattatatcacgtaccaagtacatttatagtttttggcatggtgtttagtaaaactagtgtacaaaatatcacgtacctagtacgtgcctttatgtttcgtagtacattaataagaaaaatttcttaaaacttatgaaattatgtgttgttttatattggtatatttattttattttaattaggttttagattaaaaaattatcatagaaatattttttttcaccttctaagattgcttttttttttttctaaaataatttagttgttcatcaataataattttaagatttttgaagcagtgattagtgtcataaaagttaa

SEQ ID NO: 322252 - DNA, 1481 bp, Cannabis indica
acatctcggcagccatcttccttgttttggattagtttaatggcttccaaacagtccgattcaatgctaaacctcggtatacgcctctgcattctagcttgtatccccctcaaaatggccaagagttcaaggtgtaatggagactgctccctgggcaaaaccgtggccgaggcatagagaacttggccactctcatcgcgcattacacatcccaaaccagaacagccagcaccactcttcacaccagcttcttcgttcactgtcaccacaccagagctcggcactttccagcagctgtgttctcgtcgtgcagcatcatttctgctgcatttttcaccttgaaaatcagcaagaaacttgttgctccactccaccatttcaaccggttgtggtacaaaaccaccatgaacaaccgcattccgactattccacatattccaagtaataacaagaaacaattcaaacttttccttactcagaacagtacccagccgcattaaaaaagcaagcacatcctcatttccttggcgtttgatttctggatggaaatcacaaagtttccaacaaattctactcatcttgcagtcccatagagcatggaataaagtttcaggcagctgttgagagcatctcatacaccgatcactattggaaacatgacgttgagataaaacggcattagtgggcagccaagcatgagccaatttccacacaaacaccttaatttttggtggaattttcaaccaccacagtttccgccaccattggacagcaaggtgatcatctgattgttgccgttcttgtttcaaatcacttggcattcgataaccactcttgactgagtactcaccatttttagtgtaatgccataggattttgtcttccgtatcccaccctatatttggaagtgtaagaatcatttctgcatcctcttgattaaacacagcgttaatgaaatcttcatcccaagtaccatcccccaatttcaaatctaccaccctaagttgctctggtaagggcggcttatcatatatcttgaaggtgaccggcctaggcagccatggatcctccaaaatgcgaatgttactcccatcgccaaccctccatctataaccctttaaaattaatttcttgccccatactaaacttcgccaaacaaatgaagcatgtgtgccacacttagcctccaaaaccgaactatgaggaaaatatgaagctttaaggacacggctagaaagagcatcaggataccgtatgcaacaccatatttgctttgccaacaacgcttgattgaacattcccaaatcccgaaagcccattcctcctttgtccttaggcttgcataattgttcccatttacaccaatgaatcttcttatctttttcagaggacccccaccaaaaccgtgcagccatcctatgaaggttagatattgtccctttagttagcctgaaacaactcattgtgtaagtcggtatcgc

SEQ ID NO: 322253 - DNA, 951 bp, Cannabis indica
catgacttgaacagagcaaagtcaaagtaaatttcgtttctattgcgtatagagtactaattttgtttagtttttatatgttagttggctcgcaacatatataatagttgcattacagttttattacaggtttctacaagatgacttaaaataatttaacttttatattcttaggaaaaagacgcaattccattcctcgtattttgcaacggaaagtttgatgatggaataaattatataaattacgaagctagtgggcaattcatatcaattgattgtaaatatgaaaattttaatacacaaactaaaagacgtgttggaatgcagctgaaaaaatactaacatgcaactgaaataccaagtgaaagaaggatacctaccgttgaggataaatgacgattaaagcctattcttctacatacaactaaaattaaaggaaaccaactttacaacgtatccattggaaatgagcagctcattagttacacaaacaaatgtaatagcaacaatggtaggcaatgcaccaccaatagaataagcaataactcaacaaaaatcaatgcaagacataatgtaggaagatggtgaaacaatgttcgacttcattgactttatatgcaaaactagtggcttaagaaatagtggtgcaactagaacttggacagagaggtaaaaattaatgattatgatgaactactaattacagatcctcaacatcttgaaataaaagaagcacaaatatatacaaggataaagaaacactacaagtgtgcttagattctatgcaattagaaacaacttccaatacaaggtcaaaaagtcttgcacaaaaacatacaaaatttgttgattggatccaaaatgcaagtgaatactaataacaccaagaaacggaccaaccaagtctttcataatccgtaaatatgacagaaaggtaaatacacttgtgat

SEQ ID NO: 322254 - DNA, 1828 bp, Cannabis indica
aacataagacttctaatctttcttgataacaaatcagatcagattaaaatgggtttctttcaaattttgttttggctcggggtggtacttagtatctgttttaggatatttaggtgttgaatggcctattttggagctaatggaagttaggttttgtccggttataggaattagggttagttcccagaatatcaagttaaagtattcattgggttgttgttgttgtgacataggacccgggatcgtcaagctttgtttttcaacttaggccggcatgcacgcttaatcttagggtaagaaaagtattaagcactgtttatgaataatgatttgatcgttatagtcttgattatgatcaagatcccgatatgtattgttgcaactcgagtataatcgaaataatgttgagaaacgattattatcgttgtgactcgattatgatcgaggaaaaaatgatatgaaacgattatcattgttgtgactcgattatgattgagggaaattatatggaacaattattatcgttatgactcgattatgatcgagtaaaagatacggttattaccgttaggagtaattaatcctcaaattgcagatagattttttacttatcgttcgctgtatcgggcaacgatagtgacatatggagctcgtgattaacgagtggtaagggtactttatgaagtaccaggattgtgtgattacaaagttgtgaaattgattaagtatgttattatgtgatgagttgtaatcaaatacatttgttatagtgtgactaaacgagttgtgtactgcttgtgaaattagacacttttccagcagtctcagtgactttttgcaagatgtaagaatacgtgtttataatgatgtgtgattagagtgctttatgaagtattgagattatgaggttatggtaatgtgtgaattagagtgctttataaagcactgaaagtaagtgtttataatgacgtatgattagggtgctttatgaaacactgagattgttgattatgaatagctataaatcttcttaattttgtaataagtgtgcttacataaacatgaatttgtatatgtacactgaatatgtatgacctattggtaggtatattatattgtaatgaaatgctagcactttccataatttttatttagtagcttttcttgctgagtaattgtgactcacgggtgcttcgtggtgcaggtaaggaagttagaagctgtgttcggccatgagtcagaggtctcccagcaatgtacatactagtcgtggtgtcttggcttccaggaagcaggattgacttctattcttttatgtttggaaatgtaactttactttttgtaatattagttttgcaatttgttataaggaaattttataaataggcatcctcatactttagtagtattttaaaaagaaatttttatatgtatgttttaaattatcgaattttaattaaaccacacttttcctaaactaatagattggtaatagtaagattgtaaaagcacacacgtggcgtccttgtgagtctgggcgttacagttaaagttattcttatgttctaaatctcttcattgtttcatattgtaaacactaatctaagttgccatctttggatgtccaactagatgttgcatttacaaatacttatctgttgagatctaacactattatgtttgtctaatggataacaatcatttgggatttgtcccattaaaaataacaagttaagttagaccaacaatgaagattcgaaattacactacaattaataacagaaaataacatgattcaatataaattcatacacaattcagaaattat

SEQ ID NO: 322255 - DNA, 1355 bp, Cannabis indica
ccacacgatggtcagatcttcctttagcatatcgaccttgggagcgtgtggagtgcaaaaaccctaggtgggtactatacccctttaccccactgtgtgtactataaatactcctattttctttgagtagggagtgaacaatttttcatttaccaatactctgctaaaaattcctagagagctttctcgtaaagaagagaaacaagaggagacaaagatcattatgtaaacaattgaatacctaacacttccccaaagaggctaattctattggctcgtagactaaggattattaatacctaaaccacgtaaaaaaatctgcttgtctattatttaatatcttttattttcttaagctccacatatttggttttgaaaaatctcaataaacattttggtgctttcattgaaagttgaggaaagttcagtaaccctcatcgtgcttcaaccatggtgtacacccaaaaaaaggctcgggtaagaaaattctcctagatacggttatggaggaagtcgactcccatgttgctgaccctcaggaaggaaatgatggagagggcgtaaaccctgctgagaaccaagaaggcgataccgagaatgtcgatgatgatcttggtgatagccgaaaccctctgagtgaagaggaagaagaaggttacgacggggagtacgtaaaagatggtaactacatggatagttatcactaccaccatgaccctaacgtagtgcaagtaacaaaagagttaaaagctactaaagaggaattagctaagcaaagataactcactacaaagatgaagaagatgatggaacaacttcagagcaagtttgacgacttggctgaatcagatgaggaaccctcagtggaagttgtggatgaggggcgaacccagaaataaactgaagctcaaacctcaaacccttgtaaggataaatataaaggcaaaatcaatgaactcccaccaaagtccactcctaaacctcctctataagatgtgaccatggttggtcagccctcaagacgtagaaggccactggtgctttggagcctagacgcccttctgaccctagaggagaaattgtgctgaaaggaccaaccacaagaatatccaagcccagaaggcaagggaatccccctaaaaattctattgattaatatgggaggactcccatgggtcacttcgatgatagttggtccaccgcagatttgcgacagcaattggatgctaagtacaagaggtacaaaggcgagaaggcaaggccatgtggggctgacctcaaaaataatcttagtgataagatgagggggcgatgatctccctgaaagcgataccaagaggttggaagaacaaatt

SEQ ID NO: 322256 - DNA, 1751 bp, Cannabis indica
aaataactttaaggttaccaaatgtatttgaaataataagatagcataatataacttaaaaattgctaattgcttattaaaatgtttacaaataagttttagaggtaaccaaattgtatcttaaattatataatttaaaaatgaagttttttttacgtaaaagtaactaattagtttcttatcagcatcataagtaaataagggctcgtttggtacgccgtataagggtcgtattgtattaaataataaataacactatgttttggataaagcaatgtattgtattaattattatgaccaaaatttttaatacaatgtatgttgtattatttaatacataataaatggtctgtattagcttgtattataatatttacaaagaatttggagtcaacatcaatctccgacccagacctgagacccggacccgtagttggtgttgggatcgagtgtattgaaaatatattataactttacgcaatcaattaatgcaagtcaatacggaatattgtattgtattaaataataataacataatacaacacaatccaacacaatacaatacgacgtaccaaacgagccctaaaatgttacttttaaaaacctaggaaaaataataaaaaatgaaatttgggattaatctcattttcaaatatattattttggagttaaaggtattttttaatgatgtgacaaggtattattgtaattgaaatttattaaaatatttttgtaaatagtttatattttaagtacattattgaaaaaattcttaaattatatgtatatatatttttaaatggttgtgtataaatactaaaagatatatatatacttaaatacattatgtgattgtatatatactaaaagaggtatatattttttcaatccaacaaagaatgcaatattaatatacattacaaaatatggattattattatttatttgtattaaaaaatttgcatttatgtactataattatacgtttttattattattaagtttaatgtgaatataaaattaaaaataggttaatgaaactatgataatatatataataaaaaaaaaaaagtacgttaaaaatgtaataatatatttattataatatcaatgtaattaattcatgacattattgagcctaattaattaataacaattaataaaattaatttttaaagaaataattttacaaatacacaaaaacaataaaaaaaattacaaaaatatagtttcacgaaattctaaacacttttatgattttttgattttatttacagaaaatacgatttttttatcttttactctttttaatttgttgttgatttttgttgtttgtatgttatttttgttattgttgttttgatgttattttcatgttactttatgtagttttcttgttgctttcatgttgtttctctggaaaactgtaaaaatgtaaaaaaaataaaaattctttaaacataaaaatataatttttttttacaaaaaatagtgtcttatgtaattatcccatttttaaattaatctctttcgagtcttgtagaagttagggggtcatcttgtgttgagaattttgcccactctagtttaagtatttaaattaggggtgtttcttcaatttaatccgcactattttactcatagtgtattcgatctgcactaagtgcggattttattttttagatccaatttaatcctgtaatacccggaattaagaaaagaattagcaaaaccctaattagataattatg

SEQ ID NO: 322257 - DNA, 1730 bp, Cannabis indica
aataaatatttttttttcaaattaattaaataggaaaaaagataaaaattattaagaccaaatttgtcatagaaaaatttatcaagataaaagataccatccttgtcctaaatagacaaggctaggcgcttactgttgttcttgttcaattaggtaaatatctaatttaaaaagcaattatagatatttaaggattgttgaaatattctcttaaatggttgagagattctctcataaatcttaatgaaaaaagtaagtaatagatatttatttatttaaacaattaatgatttaatgaaagggatttaactactatacatagaagtctgatttgagaaactagattaagactttgacataatttttactctaatatttttgaaatatagagaacataatttttttttctctcagttgttcttggtcatgtgttgagaacttaacaagaataatattatacactttatcctaatagcctacaccattccttttgttttgtggatggatttggaagacactggtgtgagtctaaattgtaaatttttcatcatcttgattaaggatacaacttatgagaagtttcagaaataccctgataggcttcaagaggtatactattaacttattgttttaaagttttgatttaatgtacacacatatggagatcctagggactatggtacaatgataatcagataatacaaaactcttccgttgcgtacctgatttagtaccataaaactaacaattggtatcaagagtagttctatgaatgtgtatactttaaatgttgtgtaggtttatgcatttatatatatgtgatatgtatgtgaatggatgttatttttattataaatgtatgagaggtgatgaatcaataattatatggtataattaagtgtaggttttgttgttattattttttagaaaataatgtaagctaattggggcataagaattttttacgtaattttaattttataaaaattaatttatatgtaaattatatacctatgtaatgctcatatcacggagttcggattcaatcaaaatccagccatgattgaccatgatgatccccatgcatggagctcgagcaccaagtgctccggccatgcacgcgacctcagtcatccatggaggttggatctccatgaccccggtcgtgcccctcgacaccggtagcacttcaagagcaagggactttggtaccggagattaatgttgacggtcgacgttggtagtggttggaccaccctcctcttccacgaacacatgcaggcatgtcgcatgcaaggacatttttatgtttgattttgtggaagagcaaagacctgattaggtctttggcgggttcaacccccatgctccccaaacaacatgatggtggtcaaacaaccgtctcatgaaccccaaggacttgagtccctcctccttgcaccgactaggatgtgagacgtctaataaacccgaatgggtctcgagatcaactgacctgtgtggcttctatgtcaagcttctcatcatggccaccatggccaccgtaggccatatggtggctgtcaaaccgccggcaaatgtggaccatggtggctggccctaaacccaaaacttgcatatatgtattacgatatatatagtatgtatattatatataagggcatttacaattttgtgtacattattttaattaattacaaaatatgtgaaaaaaacttatcatcattttc

SEQ ID NO: 322258 - DNA, 604 bp, Cannabis indica
atatatatatatcagatttattcagtcacatatatgtgctttcttcagtggttatatttcgtactttctttaatcttttgttcactatactgttatatataagactatttttacgacaaaatataagctaagttgccgaaataggtaggcaatatacttttcttgatggtgaaaaccttcatgttccctttctcgacgactttttcaggaaaatcaccgagaaagagtgtggctatatatattagagatcaaacatttcatttaattcaatctgaatgaaatgagttgatacaaaaacaatatatacaaggtcagcagaccaaaagcaaagtgaaatgtatgaaaagtcatcttggatacaagagttttgaattgatgggaattagtggtttgattaacatcgcttgagacacctttgttgaattctatgtcctaaaactaactatttaacggataattattagagaagatatgaagtataagtataatatgaataagagtaagtagcggcataagtatttaaaattttaagtttgtaagtgacataaaccaaatgtttatttttagcggcataagtacctaatatttgtaaaactttaatttt

SEQ ID NO: 322259 - DNA, 684 bp, Cannabis indica
attttgctttttagagttatgtgctagttgtaattatacgcatattccgttcttaggtagtaacaaaggaagaaaataaaaaaagaagacgtgttgtaaaacagcttagtttaatcaaaaaaaagaaaaagaaagaaaaagattaagatatggtatatatgttatgtataatgatctcagattattaataatttgcaaaatgatttattacaatctctaaaatgcagtgtttagattggattattttttttttgaaatggtccaagctaagtgccaagttttttatttaccgtatacaatcttttgaagtgaaagtcactagaatgtattgtacacaaattattgccaaagaaacatgacaatatgaattatgaagcatatagaattttttttttgaaagaaatgcaaaatttgttaataaaaatttaatgttacagaagaatttaaaaattgaggacaagcatctgtccaaacacattttcctaaactagtaacagaggttgtgtgacagtcagtagtcccgtgatccgtaaggggaaatatcgggtaagctgtgcaatcccacatcgcctcgggaaggtcaagtgggatggttccgagactgtgtaggtatgggactacacagttgaagaacttaaatggattgattggtactacctatatcaacaaggtgcatcttgtttt

SEQ ID NO: 322260 - DNA, 2733 bp, Cannabis indica
tagaattcatattaggatgttcatgaaacatacttggtagtaaatctagttcctggtaaaataatttccaacacaccaaagggtacaagtgtaccccacctgtaacgaacacactcctccaattgatacgcagcaagagtggttatgttgggcacagattgtttcttgaaatggatgatccaaagcgtagaagtgaaaaatatgatggaaaaattgagaaaggacgaccccctccacaggtgtcgggggacgatgttttagctcagcttgagcaaatacaatttcgtttgcctggaaaacacaagcaatttggtggagtcaaacataaacgttttgtagctgagttaaattgatcaaagaagagtatattttttaatctagagtattggaaggacttgtctctcagacataatctcgatgtaatgcatatcgagaaaaatgtgtgtgatggtgtacttggaactctgttaagtatcgagggcaagtctaaggatacaaacaattaaagattagatttggaggaccttaaaattcgtcgtgagttgtggttatttgaagaccgtaacgagaattggaggaaaccccatgctagttacacacttactcttcctcaacgacgtgaattttgcgaatttattaagtctgtgcagttcccaaatatattcgcttcaaatttagagaagaatgtcaatgagactgaagacaagatttctggtctgaagtctcacaattgtcatgtgttgctacaacgcttgatgctaaggggcattagaaagtttttcaagaaagaagttagggataaaataattgagctatgtgtatatttccaaatattgtgctataaaacattgaatgttatagacttgcagatcgtgcaaaaaagtatcctggacattctttgcaaattggaaactatttttccactagcattttttgacataatggttcacttggtgatgcattacctaaagaagcgatgcttgggggaccagtgcactttaggtggatgtatccaattgaacgagccatgtctgttacaaacaatatgtcaaaaattgatctcgactagaaggatctatttgtgaagcttatccatttaacgaagccttaaccttttgttcaatgtacttccgggaagttgaaactcgatttaattgtcaagatcaaaacagtgatgtcctccaaaataagcctgaaagggaattctctgtatttaagcatgttgggcgaccaattggtgagaggactattgttgctttaccaatgcaagataaattgaagacagagtggtacattcggaacaattgtaatgaagtggagaattatatcacataagatacattttccacagtcgatttagttatctttagtgacggcattatctaacatttttctcactttttgtgtagtgagcataggaatgagctacaacttaggggtcatcaaaatcttgacacaattcaagagaatgagtttcctagtttgtttaagtctcgagtaagtattgctttctactaattttgttattaaagtatgctatattaatctagtattaattaattttttttacttaatgatagatcaatcaacttcaagcagataatcctggagaagtatcagatgagttgtacgtcatcgcaaatccctctaacctaacatgttattgttatcctggatgtatttttagcggtgataaattcttagtcgaggatcaggatgaaaatcgtaacacccaaaatagttgtactttagtgcctggagaggatggtaacaatttttatggcgtactcaaacaagtgtctgggacttttaagatgaggatgatgataagacaacgactatacaagaaagaaaatttaatcgtctaactagcactgttggatgatgttgaatatgttcgtgatgatgttgatccaattcaagtgaccaacatgggtcgtgaacagtctaaccgtgaagatttagatggcttcattgttgatagtgacgatgaagacactagtgataatgataacgaaaataatgtacctgttaataatgatgatgattatgatgacttgtagactttcaagtattgtaatattagaagccactgctgattaaatgaaatacatgtctcttttgttaacaatatgattaattaattattcgtagcttgtatttgtagaatggctgatgtagcttcaagtggaggttagaaaaagggagttagggaaaagtataagggaaaaaatattgaacaagaactggccaagcagcctgcaggtcaaaaattgaaatttagattcctatggtgactggggcccctatagatgactatgacaacaagtttaacaattacataaagtttcttgttcgcaatactattcccatgaataagtttgagttcgaggacgttgaggaaacagtcattcagactatatgggatagaatagcaataacattctaatttttttatagtacatcaaacaatagcattaaataaaaaatataatatatatgactttagtatttttttcagaccaagtttgagttgccaactaataatcctatgttcgcggattatgtcaccaaatctatgtcaaaaggattacgtgattggagagcagatatgaagaaggcatggaaggagaatattaaaaaatacggggaggaagaagcgaacaagagatcacgtccagatatagtgacgccagaggtgtgggcagaagttatcgcatactgaaaagaccc

SEQ ID NO: 322261 - DNA, 750 bp, Cannabis indica
cacaaaactgggtaccccttggaccccgaacccaaatctcaaacttgcacattatatacacttctaatgaagtgtttctatcccatgtgagactccattcactcacacacttcactttttattttttatttttataaaatttcacaaagttctaacaattttccacttgaaatttttaaaagttttctcgagcaatatcaaacaactataagacagtgcttaaacaaagatatcttttgatttgtatcttgcgtagtgaatacaatttaaattttactagagcgactcgaaatcttgaactctatctctaacatcgtaacacacaccaatctttcaaggatctattcaaacaagcccgtgtgttaatgaccatgcacatctatttcaatatagtgaacactctagaaattttgttctaaattccacaggaagtggccccactcccacattcacataagttagtctatcaagagtactcatgtagctcggtactccactccacatagagtacagatctcattaagagtttctactaactcaccctcgtatcgttttaggacttcatacttctcatacaacaacaacataatcaacacatatctcatcataacttgttattacctgttgaacctgattcttgggatctccagtcattaggttgggttaccattaagactcactcatctttctaagggtaatagtcccattcctttcgaagttttatggactttctctctagctagtcctttc

SEQ ID NO: 322262 - DNA, 631 bp, Cannabis indica
ccacctcacaatgaggatctctctataatgcttgaataaggtaggttgatttacacgaaaactgaccattacgttctttggcccggatccacttgtcaaatccaatagctgacgaatttccacctttcagaatagcagtaactgttctatgtcaaaaaatctagtcaacttttaaaggtcctaatgtccatcttcagtcaacaggtcagccaccttatcgagaccactcgcagaaacccccttaggtttggggaagaaagagcttccatgggtcacccacggatcatcccaaattcttgtgtccctaccatcagagaccactttacaagcgcctttccaaagaatgtcattcgctttcaccacattcttctagatacaggagtcagaatttttatatttgcagtgaagcaactcctttcccttcaaatatttggctttcagaatacgacaacaaagggactgactaccaatgagcaggtcccaaccccacttagccaggaaggctagattcatttcttttgttttcctaaagccaaagtcggccctgagaatgtatgagcctaaagcgaattaaattttggggccctcagaaatatatataaaaaaatttaaaaaagagtgttatgggatt

SEQ ID NO: 322263 - DNA, 1693 bp, Cannabis indica
ttttgtcattgttcagtttttcggtatgcttcagaatgagtaagatggtcttttttgcaacaataatacttatttttgttggttgcattgtggaatagtttagaggtatttgacaccaagtttgttttaaccatttttagtgttttatgtttatagtatgctttgatttcttggtggatcataaagtttatctatatatatgattatgatatcagatcaatttgcccttgaaactgaggcgagaatatctccactgatcaatgagaagagaagattgtttaatgacttattgacagccaaaggtactgaacttatgtgggttttcccttgttgacttctcgatattttgcatcaaaaacacacacagaagccctgccacttacattatatttcgaacttcatcatgcatttcctctcttttcgctaaagatagttcttatagtactcatttttaagtagcctactgctaacttcaggaaacatcaagatagcttgtcgcacgagaccattatttgaggatgaaggcccctcagttgctgaatatcctgatgactttaccattcgtgttatgactggtgatgattccttttccaaccccaagaaggattttgaatttgatagagtatatggacctcatgtcgggcaaggtgagctgcagatatgtctagtgcttgtgtgtttatgtgggtttgtgtgctaacgtttgtttttgttgctgttattaatatttgtaaaatatggtgattgcattgtgtattgtattccatagaataatatatatttatatacaaagctaggagactaaataggaaactactaaatacaatttaccctaatttttacagctaatattctaacactcttccttaagttgaagcatagatgttaatcatgcccaacttattacaaagataatcaacccgcgtcccattcaaagcatttgtaaaaatatctcctaattgttattcgatcttcacatatcctgtggagatcaggtcttgttgaattttctcacgaataagatgacaatcaatctcaatgtgcgtagttcgttcgtagaacacgagatttgaggctatatgaaaagcagcttgattatcacaccacaattttgctagaatagaagtcttaaacccgaattcagttaaaagctgataaatccatatacacagattgtgctatagctctatattctgattcaacactggatctagacacaacattttgtttcttactcttcttagagatcagatcaatctgggtatgtccatgatcttgtaaactatacatcgtcctcgtgctcctttcaagtaacataaaatttgctctaatggtgtccaatgatgaattgttggagaagacataaactgagtaacgacactaactgggaatgcaatatttggacgagttacagtttgataattcaactatccaaccaatctcagatatttctcaagagcttcaaatggttccccatcacgtgtaagatgcacagctggattcattggagcattacaaggttttgctctcaactttcctgtctcaattaacaaattaagtacatacttcctttgaggtagaaaaatatcttgtttactccaagtaacttcaatacccaagaaatacttaagtacccctaaatccttcgtgtgaaactgggtatgaatgaaagacttaagggatgagatgcctt

SEQ ID NO: 322264 - DNA, 668 bp, Cannabis indica
ataatgtggtaaagtgggcgttttcccaccagaagtttggttttattctgttatctaccattcctataaatattttatgtaataaccaagaggtttaattgtttcttatatataacaaacacgcttttcttcaaaaaaaaaaaaaattatttttttaatttggtgttgggacaagttcgccaacaaaagttgttatgtcgacacaaaaaatgtgatatcaaaagtccgtcgattatggctttcgggggtaactttcacccttacattagtattatctagcggaaggtctttaataaatgttacttttttgttagcataatattacactagcaaaagacatttctaccattgtcgatactctttattaacacactaaaaattgccaataaaaatatttatggcggtcattaaaactctgataagaatttaactaaaataataataattactttttagaattagaattaaatttggaataatttagttgtaatttagttatttaaaacgtattaaagtatattaatttacatattgctataaatattaataattatttggatgcccaaatcttttatttattaccattaattgtaatcaacattcctctttttcttagtttccctttttcttagtttttaatatttcactcttgtatttgtataaatagg

SEQ ID NO: 322265 - DNA, 721 bp, Cannabis indica
accccttgttgtagcgcatcctagttgattctttgggaaaccaaaaaattctgacactcaactggtggatgactcgagataaagcatccatttccttattaccagtacccggtcaatattgaatctcaaagtcataacccatcaacttaaccatctaacgttggtactatggagcaacaatgcattgttctgtcaagaattttagaatctattgactagtacagactagaaaatgtcaactaaggacataaggttgccatttttgaacaacagaaacaatgaccatcaactctttctcataaataggctttgctcgagcttgactccccaagacatggctataatatgacattagaacaatccccataccataacccaaagcatccatttcaatattcaaaggcctctcaaaatcaggaagagctaatacaggaacaaaaatcatggccttttaaagagcttcaaaagcaagcttagttgtggcattctatccaaacttatctttctttaatttctcagtcaagggccaagcaatttaacgataaccttccacaaacttgcagtagtatcccgtgagacctaaaaacccttggagctccttattacttttaggaactggccaatctaacatagcttacaccttgaattgatccaccaccaccccttcaccagatatgatgtgacccaagtactctaatcacttatttatttatttattttt

SEQ ID NO: 322266 - DNA, 1203 bp, Cannabis indica
tcgcatcaatcggattaatattgagagagttatggtccttttattgaaggttgttcatcacccaatccccaagttgacaacccagcacacagattgacatccaacacccaagttaacatcttgggtcaatctggacgctgggtaagtggaaaaacgtcctagaattgtattttttgatgcctaagggatacgttgatatcacttagccatttggttaattttggtgaagttgttcacatgttctcggatatttggtttatggtgaaatcgcgtagactcaaagctccctgattttgtagatattccaccttgttgaaagggcaaaatatcaaagtgtgaattttatctgtcacaagttgtagcccttgtttactatgaaaaaatattcagatggttcagacagaatcagattctgataagcagaacccaacgcactaggccacatgttaacctgggagttgggtgcttctcgggtgacttcctgaggcttgttttgattctaaggcattcgagattgtgaaagaggtctcctaccttgtgtttgaccaaaataagaagaatgatcaaagaatttacattagatgagtagaaaaatgcgaactaggttgcatgtcaacttaggcgtatgacctagtgcccatgtctacttgggcgttgggtccctattttttctcctaaaggatatcatgtgctccccaagatcacttgtatctttgttatttctaaaaactaaaaagatgccttgaaaactttttgggaaaaatgactagaaatagcctaagttaacaaaacgtcagcctgggcactaggcccaacaccagtgtcaacttgggcactaggtttagctctttgcccctagatggttctatttgattctcagaaacactcgtatcttaattatttgtgaaaatagagaatatgtctagaagacttgtcgaaaaactaattggaagtagcctaggctgacaaaatcccaattctggctcctagatgactccgtttgttccccaaaacacacaaattttaattatcgatgaaatgaagaatatgcctggaagatttcttctaaactgatgttggaaatggcccggtcgatatagtgtcaacttgggcattgggtccctatttcggcctccaagttgatccgtttctttctcaaaagcacttgattatttttttagtggagaagaataaaatgttggg

SEQ ID NO: 322267 - DNA, 1446 bp, Cannabis indica
acctctcaaaagggtacatccacctcataaagacaggtccacccaaaatttcttcttcaggaaaatgtaagaccaactgaatcataacatcaaaaaaagctggaggaaaaattaaatccaacttacacaatatcaaaataaggtatttttgtgcttcctcgatatctttaacgtttatagttcttgaacatacttgcttgaaaaaattgcacgattcaaaaatagttgttgatatatctttcgggagaaatttacggacaccaactgacaataatctttggattattacatgacaattgtagaacttcaacccaagaatatttattaaatcattgttcactttcgtcttcaaatttgagcaaaatccatcgggaaacttcatgtctttaataaattgaaaaaatttcaatttttcatcaggtttgagaacgtaaggggcgtgtggcttcatcaacttaccattgtcatcttcataaatccacatccattcccttattcccaatttcttcaaatcatgtctcgcattagttgtgtcctttgatttatcgttgtccaagattgtgcccaatagattgtcacacacaatcttctcaacatgcataacatcaatattgtatttcaaagtgttcgtacaccaataatcaagctcatagaagatgcttttttttcctccaattttgatctctgcaacccgtctgcgttttacgcctcaaaactggtcatgttttccgagaacttgtggtacaagtttgtttacttgttcaaaaatttcctcacaagtaaaacgtctcagtggatgtcttctttcaatttctccatcaaagttggaatcccttctaaatcgatgggtattgggcaagaatcttctacgacctacataagctgtcttatcaatcactcgtatcgaagaatgttggacaagctttgtatccttgaccactccatccagacaaactacttcgagcaagaaaatcattaatagtccataaaatggctacacgcaacttgaacatagtgtttttcctacaatctctcgtatcaactctgtcagcccacaactgttttagctcatccaccaatggtcttagaaatatatccatgtctttacctggtgattttggtcctggattaagtagggccaacatgaaattattgtctttcatacacgaccaaggtagaatattatagttcgctaacacaacaggccacatactgtatgataggctcatgttgccaaatgaattaaaaccattgcagctaatcctaagagaacatttctaggttcattagcaaaatcaggatgtttggcatcaaagtccttccaagctagcccatccaccgggtgaggcatcacttgttcatcctttgattttctaatatggtgtcataccatgtgttttgttgtatgtcttgaaccatataatcttttcaaccgaggtgtcaaca

SEQ ID NO: 322268 - DNA, 1641 bp, Cannabis indica
taaatagctataaataatttcttaaataaacataaataactgctaatttccaaattaaccaagcgggctttacagtcaccttatcagtcatttgcttcattcccaggatttccttgattgtttggatctgcccccgggaagaagactgaagatttatggaggttaattgactgtcccgaccactcgcagtaagtggccaagcattccttgaaggctttagcttccttcgtagaggcttgcccaaagagcatgatgtcatcagcgaacataaggtgatggatagccgggccgtgtctacccaccttgatccctttaatcaggcctttcttttccttatccaaaagcaggcgggaaagcgtttcagccgctagtataaacagagacggggagagtggatctccttgtcgaaggcctcgctcatgcttgatcttacccgctatggaaccatttaggaggagcttgatttcatgcacagaaatataggcacggatccatcccaggaagggattagtaaaccccatattcgaaagaattagcagaatgaagtcccaatccattttttcataggctttctctaagtcaagcttgatcatcataaagcctctattaccattcctctttttcataggatggactatctctcttgcaatcatcgagttctcagcaatgcttctgcctttgaagaaggccgctaggttcgggaaaataattcttgggagtatcccacgtagtcccgaagcaatgattttcgagattattttgtaggagacattgcagagagcaattggacgatagtctttggtggataaaggagctacattctttgggattaatacaagggaggtatcattgatgaagcccggcagctccgaatgagtgaaaaagtgggtaaccatttcaaaaacgttctcactaacggtattccaatgatgcgagtaaaagctcgtggggaatccatccggtcccggtgccttatccttccccatttctaagatggccgcggtgatttcctcagaactgggtatggcattaaggagcaaattatccccatcattcagatcctgggaagggaagattacattcggactaggcatttgaagcgagacttgcttcgagaaaagatcattatagtagttgaggaagcattttgcaatgtcggcttggtctctaatctactcaccatcgacccgggtttttaatgcattggatgtagtttctcctccttctcacgatagtagatgccatgaagaatttcgagcacatgtctccctcggagagccattgaactcgggatttttggcgccaatggatttcatctctaaggagcgcttcagcaagtttcttctttgcagtgtctatatgagatatattatcaagagactttgtttccaattccctgagagagtaagaggcttcatgaatttgctgcttgagatccttaaaatgagttttattccatcgcatcagcctacggctggtgtttttggtcttacggtggaagttgatcatggggttggaatgtagtcttttcatccaggcttccttgactacccagcagcatctagggtccctagccctcattttctctattggaatttattttaccaggatcttagatctactcacaagtatgttgtttaa

SEQ ID NO: 322269 - DNA, 1109 bp, Cannabis indica
caagctcagcaactcagaacactactaggccggttgtttacaacattagcaataaatttaatttttgaggacattttccttctgcccaaacaaccaactctaatttaaatactttaatcaattcaccaatattttaacagtgttagaaaaaaattacttatttattgtaggaaagcatgcatataatatatccataaaaaattcattgtcaaaaaaaaaaaaaaaactatatccataaaaaataaaaaataaaaaaaaaatgaaaaatccatatatattaataattattactatagggttaactttttcataataactatggcaatatcttcatttatttatattcgattaatgttcctataatttaaacattctcttaatcctccgtcaatttatgcttttcttttttattatttttttttagaaaaattggccttattaaaacctttttttgcttttacatcttaattcacatgaaactatgtcgatcaaattaaaccaattttattaattatatttctaaacataaataagtaattatggtgacatgctatttttcaccaattgtgtttcaacagaaacataactcctccctccaaataaaacttattttattgtatgtctaaaaagcatggaagctttaatttgaaatatatatgtacatatttaaatgaaattgaaggttggtgggttatttgtccattatgtttgtccaatataggcatatgaattcgtatttgttgattgtctatttaaatactctttgcttagtcttttcttagattcaaatgttcaaggactttaattttaagagggaaagaaatttgaaaaatatatacatacatacagaagtaggtttagatgtgactttttcaaaattaaatattaagtacttctgaattctgatcaatgagcttgtgggagacaatatataacaaactgtctcttttgaaaaatttaaatattaaatcaaatataatatgctgacacatatactgtgtgaagaatataatagtgtacattgcaaatttagtttggcaagtaataactatcaatcaacatcattcaaaaaaaaaaaaaaagttatcaacaacaccactatcaaacaa

SEQ ID NO: 322270 - DNA, 725 bp, Cannabis indica
aaagactgtctatgtaccaagtttctctaaaaacttgatttcagtttcaagacttataccctttggtttttcctttatattttcagacaaattttttaatttatataataaatccgaatgtgttggaaatgctattttgtctaatggtcattactgcattaatttacaaaataataccactaataatgttatgcttgttctcgctgacactcaaagatgtattatgaaagaggattcctatacattatggcactagagattgggacatatctctattgataaaattaaaaggttggtaaaaaatggggtactcaataccttagattttactgactttgatacttgtatggattgcattaagggaaagcaaacctccaagtttgtcaaaactggtgcccataggagttctgaaatattagaaatcatacatactgatatatgtagtccagatatggactcacataattaaaaatatttcatctcattcatagatgattactcaggctacatgtatatctacttacttcatcataaaagtgaagcattagatgtctctaagatatttaaagttgaagtatagaaacaatgcaacaagcaacttaagatatagtgaaattaaatagaggaggtaagtattatggtagatacacagaagatggacaagcacatggtccaattgcaaagtttcttgaaaaaaatgagattgttgcccattacaccttgcc

SEQ ID NO: 322271 - DNA, 511 bp, Cannabis indica
ctctactggacacagtcagtggagaaggctgacctcccacacctctcgacctcctggacgtggtggcgttagagaggaaagtacacagccctcgactaaaaaactgaggggaggatactgagaacatgtttgacaaccccgatgatggccaaaaacttgaaggaggaatgaagaagatgacagtgacgactatgttagagacgggtattacaaggatggttatcactatgaccatgactaaaacttatttcaagtaaccaaagacttagaggcaactcatgcagagttggctgaacaaaaatgctcattgcaaaaatgaagaagatgatggagcatctgcagagtaagttcgaggatctagaaaatttgaaagtgaaattggtggtcgaggaatgtgcctgaaagcaaatagaggctgagacctcgaatccttataaggataagggcaagggcaaagtgggtgagccctcacataagcctgtacctgttggaatttattttaccaggatct

SEQ ID NO: 322272 - DNA, 1088 bp, Cannabis indica
ttttttaattcgtttctttatatgaattgtttttttttgttattgaatttttttaattccttaattaaagaaagactaaaactctaaaaaggattagaatgaccctgcatataaattaatatatcaatactaacattcatatatttcctttcataataatgtatataaactgaaactaagatggtatagtttgttattatttttttcttaaggtagttgctattaacttctaatgatgaatttatgagttagtcaacctttatatttttaaaattaattaagaaatcacattttattataaataaatataaattaaaaatatatattataccataaaattaatatatttcaacaaactacttcagattagctcaagtgattggatgcatgatttttgggattcaaaactagtatataaaaaaacaaataaataaatcatttttttaagaaagctttcaaaactaaaaaaaaaaaaaataaataaacaactatgacttttggaatataatttgcaaattacttttctttaagtttccacaaacccaaaattagataaagagatatgttctttttttcttctattattaacattgataaagagatatggttttgtaccatagttttctataagttattattaataatattcttaaaatttgcctaccaccttatacatattcagtaccctttattatcaatttctttttcatagtttgaaaaaaaaaaagtaactgatatttgttcaccatatattgcccacaattatgatttttttttaaggaacctacaattaggtttatttcataacaaatggacctacccatagtacatgaaacaatactgaataatcatttgaagaaaattatatgaaataataagtaggtaattaataatatcccattatcatttactcattcaattttaaaattacagtaataaaagtataaatgtaattataaaataatttaaaggaataattagataaaatactattttttctaaaatatttacatttttatgttcaaagaatgttttttaacatttttacggttttttaaaaaattaacatgaaaacaacataaaatcaa

SEQ ID NO: 322273 - DNA, 1005 bp, Cannabis indica
atgaatgtgcgaggagatgacgtaccaaaatttttagtaaaaaaataattaaatgaataacagattacactatgggtatataacaagcccaaactatccatgcagacaaaaaaaagtcctggataattcagagaagcataattaagagtccttactaactcaacttctccaaacggatttaaagaaaattgtgcctataaaaaaaattataactaggtgataatacaaatagaattgttctatcctatctttgatttataactaaagaaatcaagtctagataagaattttattttttgctctctcacaatattttatgttatttttttttaccacctactaatttttatgtcaatttcaaaattataaatagtgttaatataaccttattactaagtaaaaatatttaccaacttttaaaaattaaataatattgtcattttaatattttcaattattgtttaaattaataattatttttttattttaaaatttctaatttctcaatattagcaattaataaattatttatcatctcaagtttccaaattttttaacttaataactatttgtaatcattctattagttaaagttaacaatttaatttttaatattttaaagttatcaacttagagtcaagcataaacgttttgtagctgagctaaattagttaaagataagtatattttttgaactagagtattagaaagacctgtctcttagacataatcttgacgtaatgtatatcgacaaaaatgtttccgacaatatatttgaaactattttaagtattgagggaaagtccaaagaaagcaagattggaattggaagacctcaaaataggtcgttagttgtggttgttcgaagactacaatggaaattggaagaaacttcctactagttacacacttagtcatcttgaatggcgtgaattttacagatttattaagtctgtgaagttcctagataaatttgcttcaaatttagagaagaatgtgaatgag

SEQ ID NO: 322274 - DNA, 1054 bp, Cannabis indica
aaaataaaaaatccaattaataatttttacaaaacacaacatcttaaataatatttacgttagttttaattttaactgaatttattttattttctctttgagtcttatatgttaaagtttcacctgaaggactagataacgccaaagatatcatctacccaaatcgcctcataacgtgacacgtgtaattagtggcatgcatagctttgcgtgtcaccgaatttattcccttctctccaattatgggcccacaaactttttcctttttggtaataattattttatttatttctgcaacaccaaaagtgggtctctcaatcccaagtcaccaaaaaaaaaatttatatgtgagagttcataataattatatcaataatatcattgatagatattattgttgactcattgactactaactaatagttctatttttagttaatatttaatattgtcttattggaataatttcatttagatacaaaaactaattgaggagaataggaaaatcaaatgaatgaagattctctaatttagtaattaataattttatatgatgtaaacatgtccttatgtattgatttagacatgatttaggacaattatacaggagagaggagatgttcattcaaatcaaaaataattttcttttccacttcaagaaattgatatagaaagaatatgacattaacgtgggccgaagtaggtgaagtaagtaagcccatcagcccgtttacagcttactaagaagcccattttgaacgggtttcggggctttactgcattgtcttagcgaaacttacaaaaatactgagatttgggttaacatttacaaaaatactgtcacacggaaaatttttcaaaaatacagtgtttttataaaacaccagtaaaacacatagcagaacagctcaaaacaacagtagaacactaataaaacaccagtagaacaccagtgaaaacttaacacagtatactgcagtatgaaacttataaaaaatacagtaaaaaaataaaaaataccgcttgacagtatttttgtaaaaaaatgacaaaa

SEQ ID NO: 322275 - DNA, 1676 bp, Cannabis indica
attgatttaatatacatttaatacatgagattaattgaagtttttatttttactagattttgatctctaaaaaagtagagcgttgtctgcccttaatgtatgctctgtgacaattagtgtagtcatttctttttaattgtatgagatctaattctatatacatgaatttaactactcccgcctctatctttttaaactttcctactgtaaagtgagaatttttggttttttctaggtttactttcctccttcttacccttcgattgccttaccttctactgccaccatggaatccttcttaacagatgtgtcaaatgctcttactgaacgagaaaaatatgttgttagcatctccaatatatctatccctacctttaatgtgtctaatttccgtttactatgtcgtatttactcgaacaaaggatacaatcctaaacacttgaaaattttcatacttaagcactggattggaagatttcaggtgactatctcagactatgaaacggattcgtatatggttacatttggttgcgagggtgatatgaagagagtcttatttaaagaaccatgacattttcacaaccaacatatgattctctgtccattaagtgttctgtcaaaggtttctttcaactcatttaccattaatcccttttgggtccaagttaatagattgcctttcctcagcaaatctaaatctcttgctagagtcattggcaatctcattggcgatttcttagaagtccatgatgattccctaaatgaaggatggggtcctttcctaagaattcgggtgggaattgatgtttcaaagcctttgcttagaggtcaaatggttactttgccatggctgcaagatgagttgtggattgaatatcgatatgaaagaatgctagatttttgttactcatgtggtatcattggtcattttttttataagtgcgcacaatatctagagaaaatggatgaaggtttggatccagatctagaatatggcccgtggatggaaggagcaccactaccaaagtcttcatatgatcgctacaaacaggatttttctaaatctgggccatggccttttatcactcgtttggctagaaacactatctctcctattctcccacaccctactttgtctccagcctctccacattctacaacaattagggagaaggggaaacgagtttgtcaattctactcatattcaagaaggacatactaatcaagattcagcaatcatctttgttcaagcaaaggtgccaaatactgctagcaatacatccaagtgcatgatttccaatcaaagatgttacaaacacaataatcacaacattccataaagacaaaccaaccataccatcttcatcttcctctgggaaacaaaagataaatacagatccggacatcactcttccactattctgcaatgtgtcggattcaacacctattaacaacaaattagtgtgtcaaaccagcaaaacatcatttctatctactggactgtcaagtgtagatgcgtatcccctggatatctccctaacaagaaaatatcactctccatttctattggaatatgttttaccaggatctagatttactaacaagtatgtttttaacatcttaaatatgaatttataaaacaatgaaaataaacacataaaaggtatgagaaactt

SEQ ID NO: 322276 - DNA, 1425 bp, Cannabis indica
aaaaagatattacggtaagtgtacaatatcttttaagttgagaatattggtcatgtcaaatttatagccaatacatctgatactagtttactttactgatgtcctggaaaagacactccacttagaaaagtgtaagtaaaccttatcgctgattattatatcagtataaatccaatgtactgagaaatcatgggactaaaagtttaatcatatattcatatttattttccaatgtgtagacaacacaataatcatgaatattgatgtgatagggatttaatagaatttatatatcgaacatatgatcatccataaaacatgtgaatcaagcaaaaaaacttaaataagtaatgaatagaaatatgatcttttattgataaataatagaatttagattacattgaatttgatctttatttaggcaacaaaacccaacaaactctctctatcactaacataaaacaatcagtgcattttaataaatcctaaattcctaatgtgtttctcataagtagtctttggaaaagtcttcatgaaaggattagtaggattatcttcagtatgaactttctctactttcacgtctcccatggccacatattctgtgaagctgtggtacttactctctatatgtttgtagtccttgtggctttgaggttccttactgttggcaatagctccggtgttttcacaaagtaacaccatttgtttataaatatttggaattatgccaagttccgtgaagaatttccttagccagaccaattcctcagcagcttcaacaacagcaatgtattcgacctccatggtagagttagagattgcaaattctttaacacttctccagcctactgctccacccccaagagcgaataccattccaaatgtacactttctgtcatcgacacaagcctaaaaatctgagtcggtatatcctaaagggtcgagaaaaccacccttatagcatatgtcggctctagtgcataacatggcataaattagactcccaagtataggatattcttctcatgtcttctatctcttgaggattagtgggacacaggtttgtagatagacataaaccatgtctagagtgcatgcgagcacctttggcattagacattaagaagcgctccaacaccttatcaatgtaagatgcttgcgagagagcaagtgatcttttcttttggtctctaataatttggatcccaagaacatacttagcttcacccaaatgcttcatttcaaattgagtgttgagccacttctttatgttagtcatccttttcacattgtttccaatgaccaaaatgtcatccacataaaagaccaggaaaactatcaccttataatccttgagttgataaacacatggttcctctttgattaaacgaaagtcgtaggtcttgatgatttcatcaaacc

SEQ ID NO: 322277 - DNA, 1106 bp, Cannabis indica
ttgtaatctctctattatttctaacattacgagattgatgtataggttttctagctagtgtggtagataacaactaggaagtctcagtgggacccaatgtacgagtggtatgtaaaattttagacgtatttccagatgagctactaggattacccttaaaaagagagatagattttgagattgagttgataccgaggatagagccagtttctaaagcctcatatcctatggagccagtgtagctaagagagataatggttcaattgcaaaacatgctcgatttacggtttagtagaccaagtactttgtcctagtgtgcaccgattctatttgaagagaaaagacggttcactaagaatgtatattgattaccaatagttaaataagtttacaattaagaacaagtatactttaccatgaatacacaatttgttggatcaactttagggaaagactgtcttctctaagattgatcttcatcgtggtatcaccagtttaggattcgggaagaggataatcccaagactgcattttgcacttgatatgggtattatgagttcctcgcgatgtcctttggactacctaatgctccaacaacattcatagatttgacgaatcagttattcgaggacttcctcgataatcatgtgattttctttattgatgatattttagtatactatgaaggtgaggaagaacatgagaagcatctccaattagtgttgttgtgccttcgagagcacaaactttacactaatttaaaacagtgtaaattctatttaccccatgtgagttatttgggacatgtagtgagtaaggatggaatcctagttgatcctgtgaagatagatgcaattcaagattggccaagatctaagcagtatattgaggtcagaagcttcttagagttagcgggttattactgaagatttatggaagaattttttaagttatccactccattgacactactacaaaccaagcctttataggcactttttttttcagcaaatattaaagaaccgacggcatagggttggaattttttggaagagattttgacaccacttatggcgtcggttttttggaaataaccgacgccaaaa

SEQ ID NO: 322278 - DNA, 1590 bp, Cannabis indica
ttttgattcatgtcaaggctgttgaaaaaattaaagagttgaatttgttgtggtcgtgtgtggacctcttgcagacatggtagtgtcgccaatttggtaatgagttaccattgttttgttctatatcttcagaatacatcttactgtatgtctgagattagattgttttaccgttaggttatcatatgggcttctttactcgactgaaatttcttataagatttgtaatgaaatgtttttcttggctccaccattttaacaaattagtgagatgttattttccttccataattataataataaataaataaaaatatggaagcgaatcagaagaaagatagagacggtccatttgcaaatgcatctaaaaagtgagtgaagtggtgtgtcttgtccccctactaattgatcctcatgtagaataatagaaagggaattgcatataattgtgtctagtttattactaacgtctttgcccctcctctcaaatttttcttatccatcatcaaatttaggaaaggtgggaatattggtggataaactaatggcacatacctcttcaactaagcaggcccccacatgcaccaaaacctcttaaaagaaccccctgcatctatgatctgttccactctagtagcttggaccctagacatgaataacaatgaaaactacacgatttccagaatattttgccccataattaaaccactaccaacaacatctattaatactacaacgaaaaagatctctaggggcaacaattaattatcgttgcaaatagtaaggttattagcggcgtaattgcccctaataatcattgtagatgttggtatctaattttaaactattagagataagggtattttctatggtattaagattgaatctaatgttagagattttattacaatggaatcaatacattaatttacaactctattataatataatacaagaaccaacaaagagattaaataaatattacaacaacttacactatatatgtatttatatatatgaaaggtagaatagatgaataaattacataatattatataagatatatatattatgaagaagaaaaagaagatccgtcactgacaaccttatgtgtagaatagtggggataaccatgacatgaacaaggcattacatttttgtccaaaaacttatttctcttatctctaagcactgagggaactctctaagaaatagcattgggattatcagaccttagggttttcgagcaatgtgctttttgatagaaaacttggtccatttcaatcgagcaccaaagacctccttttataatgtgatcacacatagaattcaaacacactacgcctaatttctatgataaaaattagtatttatatgatttgtaacaactatatttcacaactttgaatgatatcatcaaatgtatgttacatcttttttattacattaaaatatgatcaaccaaaagaagttacaaaagcaattaaacttgtaactcctgtccatgttacaaagtgtaggttgttgggaatattttaccaggagctagatttactaacaagtatgttgaattaacatcctaaatatgaa

SEQ ID NO: 322279 - DNA, 946 bp, Cannabis indica
ctctcccattttgagctaaggtgtgagagcaggggtgatcgaagagtatgccactgttattgacgagatcattgaatgtctaatactcccaccccaatcctgtccaaagcttcttaattttcctatcgaattgtgtttctaccatgactttaaattagataaatgcaaataaagcatctgacttatttttgagctagtacagccaagtatgtctgctatgatcgtctaggaagtgtatataatttaaaattagtgtgagatgctacaggggttggtccccataggtctatatgaacaagatctaagaggccatcaacttttgattgagaattttgaaatggaagggcatgtgaattttccatactaacaagcatcacaaaatttttgtatttcattgataggaaagtttacattttacatgtttaggacttgattcaacacattaacagaaggatgtcctaagcgcctatgccaaatgtcttttagggaacgtaaagaagctaagttgacagaagaagtgttggctacatatgctgagataagtaagtgaggctgagatgtttatgtagtggtatgaagctggtacaaaccattcttaattgtcccttgtagaaccacattcactaacctttgatccttcacacaacaacaatcatagaagaattcaatgaagacattgttatctgctattaactttgaaatactaggaacatgaagcatgttatgtagtaataatgggttgtatgaattggattggatgataccagtaccaatgtgtgagataggcagctgagagccatctccaatagtaattctttccttacccccatattcagtttaggtttgcatcttgtttggattagagtttaagtgattacttactctactatcagcataccagctgtcatcattgagcatcttgttggaatttattttaccaggatct

SEQ ID NO: 322280 - DNA, 3340 bp, Cannabis indica
tgatcttacttaagctaaatatgtgaaaattagtgtaatctaattaatgattaaatatagcgtaatttattaactatggatattttatcggattacgggagtatcgtggataccattttctgaaataaaatatttttgggtgtggtgaccgtgaaaactcgacggaatggtcagaaatgtcacgacgttaagagttgtgttgtattggatttataccggactagtttagaactttaagttaacggtttgacgagaatgagtagaaaagactaaattacccttagattttattttaggtttaagttttaaggaggggcaaaatggtcattttcttaaaatattagaattttgtcctttagtgctttttatgctgaactttaagtttaattaaataatatttatttatttattttattaagttttataaattaaggatagatgggaataccattacaaaaaaaaaggatagatggaaataaataaataaaaaaaaagtcaaaaaggaaacctctccttcttctcccttctctcgacagccctaggaaacaagtaaaaactagaaattttaactccatttctagcagaatttgattgaagtaatgaggtgaagaagctgagcaatttggaggtaagtcttctttctagttcatagtgatttaccatggtttggattaggttttgggtatgaactttgtgattttgggactgtagtgtcaaactgagtatggattgtgttattaggattgatttagaatttacttaagcttagattaaatgatttaagtggatgttgtgttaaaattggagaattgagctttgaacacaattttaagattctaacatggtgatttgtataattggatgaattattgtgaaagaatgctttgaacatgttatatttgtaatactatattgatctagagcaattgaataggtttggtttggtttttgtttgagttgggaggtaaaaacccaagaattgtatcctgtcagaaccggtcgaccggttggttctggtgcaacagaattggttgaccggttgtcttgcagggggaattttcggggttttcctcaagatcagttttggcttggggattgtacctagtacctaatttaggttatttgagtattatatggcttattttgaagctaatggaagttaggttggtccggttacgggaattagggttagttcccagagtttcgatttgaggtatttattggattttgttgtcatgacatagggcccgagatcgtcaagctttgtttccactcatgttggcctatacaccttattgttggactgaggtaagaaaagtgttatgcaccatttatcgttaacgattttaattgtgatagtctcgattatgatcgagattccgatatgtgtctgttgtgactcgattatgattgaggtaataatatggaatgattattatcgtttgtgactcgattatgatcgaggtaatgatatggaacaattattattgtttgtgactcgattataatcgagtaaaagatacagtcataaccgttatgagtaattactcgtcgaaactgcggataggtttcttacttatcgttgctttatcgggcaataatagtgacatacatagctcattgacacgagtggtaagggtgctttatgaagcactgagattatgtgattatggtaatgtgtgattaaagtgctttatgaagcactgaaattatgagtttatggtgatgtatgactagagtgctctatgaagcataggattatatggctatggattggatgaatatctatttagtaaaatgataaaattgttagttatgagttgctatgattattcttgtaatgtgtaatgaatgtatttggacagacgttaagttgtatatgcatactaaatatgtaatgacccactagtgtgtacattatgttgtaaatgctagcagtttctatgtttttctgtcttgtcgcttttcttgctgagtcattgtgactcacgggtgcttcatggtgcaggtatgaaaaatagcagttgtgttcggccatgagtcagagctctcccagcaatgtacatatcagttgtggtgtcttggcttccaggaagcaggatcaatcccttttctatgattgaaaatgtaacctacttttgtaataacgattttgtaattagttgtaaaagaattttattagcaagggattcccatattaaaactatattttgaataaaagttttattccaacttaatcaaaaagtttttaaccaaaccacactttttcctaaactaataaattagtagtaataaggttgtaaaagcacacacatggcgtccctgagagtcaggacgttacagatccaatagtttgttttctttaccctcaacatgccccaaaagattggttctcaggcattggagatcaaattgagataattaacgatctcataaaagttactacacctctaacaaatgttcatcagcacaaagtttgacctgccaagatgattctaatattttggcactggagatcgtatatatgtaattggagatcaattaggcgtagttggagatccaacagatgttcatcacatccaacaccaatagattcaagcaaagaacaccaccaaatttagaattgccaacaacaaaatcagaagatccatcattgctgccaatccattgttgtcaagaacaaagattcattggccaaatgccaatatcaataaggttccaagacaaagttcaatcagggtagtaacactaggatcttcttacacctctatgttctgttcttagttgaaaaattgtatctttttatatgccaataagtttctttaataatagtaaagaaatatgtgagtgtaaagatctacgaaaacagaatgaaatcttgttacaacaaaacacagatttgcagaagcaaaacataaatagaaataaatagtgcagaatttataaaaaacttgacacaagagaattatacgtagtatcggtgttctttcaaatactcctagtccacgggaccacacttagagaatagaattaattagtaaagtatatcaaatattacaaaagcaattgacttaaacaaatttagacttcctttaataatttgtcgcaaccctttgtaatccacattgctaatctcatatctgaaacacaccaagtagtgaactcccttcagctagtgatgtgtgcttacttcctctcgaagtaaggcttaaacaatcttctcccaaaaatatatgctcacttcctcccgaaatgagacttggaataatcttctcccgaagacccacacttgttcaaacaagtttttcaaccaattctatgaacaatataagaacaaaaa

SEQ ID NO: 322281 - DNA, 794 bp, Cannabis indica
tctatcgtctattttctaattttctgtggaaattgttttaattatattacatcacttgatcagtgttgatctattacatgataacgagtgcgtacgtattgtctattaatttgagtaggttggacactagttatttttctaatcatcattcatcaagcacttttactcaaattaaggaatactagctatttaattgatgatcgaaaaaaattatggaatatatgcactgtaggtagtcatcaagccatatgataccatggccatgggacaaattttccaaaagagtagtcaaacttgcacggttgcaccaactattgtctcaaaaaatgtaccgatcgaatgcctaaaattaagatatacatacatttttaatctataaatgtatatattatatcttgagctatcataatttgcattatatagaataattatttagacgtctaggtttgacgaaaccatgcattcgttaatttgccactatattttgttattttatattttacaactttcattaatgttagaagatttcatgatgtacgtcacaaagtatgtttcctttgaggtgatcatgatgtcatatttatactttagggttttggaattgttcatatatttttaggccatctagagatttatttattatcttatttttttgaaagggataggccataatagatatgctttgatattttaatttgactaattaactaacactacaaaaaaaatattatttttagtgacaattatttagtcacaacatttttttttttttgactagatgtgacttttagtca

SEQ ID NO: 322282 - DNA, 695 bp, Cannabis indica
aaaataaaaaaaaaaaatcacttgttgtaataattacaaatactcatttaatttatattacaaaatcatataaaatacatattcaaaataatagaatacttcatatattaaataaagcataattataataaaataggatcgtctggtaatatatatagaaaatattgttttcaaagttattctcactaaataattagatttaatgttttgtaaaacaccaaaataatactaagaatctatcatattcctcatccctaactcctcgtcgctatttaaatggtacttaccatccattaataattatatacatattcaatctttaaataaagatttaattaataattaagattggactaagctaatctcatcgttctccattaacgattctctcttatacataagtaccaaactgagttcctgaaaggagaaatataggggtgagcttataagcctagtaaaaaaacagctaatatcaaaggatcagtagttttataaaaattcgtgcatggttagcttttaaaataaaatatatctcatcattatcatcatcgtcgtcatgaataaacaaaatagagagacaacaaataatcacaagagacaagctacccatgaatatcacatcgtccactagaccccttgtcacgacccgagccctaggccgtggcagatatgtaatatccataacttgggtggtc

SEQ ID NO: 322283 - DNA, 1091 bp, Cannabis indica
ggtgatattctaaactttaatatgttcaatttttgtgtagaaaaaagaaaaatatgttctatttatattataatatatatgtaatcattttttcttttaagaaaaaaaaaagaaacttatgaaagctcaattttctacctttaactaaaaaatttaaaaacttagggattttactcatggctggcttttatgcattcctaaaacttaatcaatatgagttgagtaataaaggaaataaaagatacgagataatctgatgtgatctacactgatggccctaatgcagtgaatatatatatattatttaaatgtatatatataaggagtgaaactggagctgatcgatcactggagggataactggtcactgctgctgctgctgctgcttctgttggcctaaaactaaaaagcttatattataaggctgcggatgccaaagcaaaccagacttttctttttgttttgcataacccctattccctattcccttctttcttcttcttcttctcatcaaatgcccttgtaaacctcttcctatttccaacactaattttctaccatttttcttccttaaaaagtcaagaattagcaaattttaaaaatagagatatatatccctattcgaaaaatagaaaaagaaagataatatatcaatttaagaattacttattacttattacttcgccatgcccttatgcttgtaaagcaatagtataataagcatgcatctggtcattcagatattttttttttgttttggctaactgcacattcccatattcccattctcataatattattaatggtatgtaataagctatatttatgagaaaatatgttaatgtaacggaaaacgataaaaagctccaaagttttattaaaaagaatattaataatatggttatgggtaagtgaataagaaagtgataattgatcaattaacaaaagaactggtaacaagtaccacagccactaaggtgcctagattagagagtacgtatatataaattcctttgtcaaattttgaaaaaaagaaaaaaaaaacaaagaaaaaatgaaagagagatcagtcctaagcttaattttgttac

SEQ ID NO: 322284 - DNA, 2958 bp, Cannabis indica
gcaaatgaatgattaagtgtaatttattaattacagagattttatcagattgtagagttattaaaatatattaaaaatattttcaggttcggcgaaccgtaaaaactcgacgggatggtcaaaaatatcacggtgatagaagttgagatatattggaattatactagattagtttagagaatggggctgtcggttagtagggatagctagaaaataaccgaaatgcccttaaaccttatttaacttaagtgtttaattggaggggcaaatttgtcttttcactaagttaggatttttgtcttttatggattaatatttaagctgagtaaatttttaagttaggtttatattattaaaatttatttcttttttagaaaatttgaagataaacctaaactaaaaaaataacgcatattgctctctccctctttctctctctctctctctcgaagacctaagaaaaccagctaaaaaactagaaatttcctcccaattcagtcaagtgttagctgaatcaaccaaggataggtgttgttcatgcttgaggtaagcgtttcacttctttccttttgattttgcaaggcttaggttgagttttgggttaggatttgtatgaattcggggctgagttattttttctaagttcagagcttgttctagggttaagttggaagttgtttaagtttgaattgattagaattagggttgttagacatgtattggaggagatgaggtttaatgagctcgattttactcaattatggtgttttgcttattttgatgaattcttgagaatcgtttgattgtatgcaatgtttttatggtctggaactgttttggaaggtttgagtaggtttggtggagaattggttgagttttgatgtgtaaaacaagagtttctcctttatgcagcaaaaattggtcaaccggttggcctacaggggaaaccctagtttttagttcaaaattggttttattcggggtgtttttcagagcttagattagggtattttaaggatgtctaagctaagttttgaaccagtggagagttagaatttgtctggttatggaatttgggttttttccagagtttggataagttgttaaccagatttcattgtcgtgacataggactcgggatcgtcgagctttattccactcaagtccgcacgcacacctgattacttgaccaaggtaagaaagtcaattgcactgttgagcatgttaagagaggaacgattattatcggttgtgactcgtttatgattgaggaaacgattatcatgttagtgactcgattatgataggtttcttggcaatgagtaattactcgcttaaaaccgcagataggtttctcacttatcgtttattttatcggacaacgaaagtgacacatgtagctcgtgagtgatgagtggtaaggatgctttatgaggcatcaagaacaatttgtcttatcagacaaataattgctatgtaatgcttgattacgtgttgtataagcgtttattgtgaatgataaaattgtatgctatgcactgttaagttatctcgtgttatatattgtttgtgttctaattgcttttttgatgagtttttgtgactcacgggtgcttcgtggtgcaggtaaagggaagggaaattaaagtggatcagccatgagtcagaggtctcccggcgatgtacatatcaatcgcggtgtcttagcttccagtggacaggatcaatccttttgactatgtttggaaatgtaatgctattattgtaatagtgattttgaaactagttgtaagagtttataaacagggaattcccatacttcagtagtattttgtataaaagttatgtttttagtttaattagaaagtttttaattaaactgcacttttcttaaactaatagattactataaataaatttgtaaaagcacacacgtggcatccatgtggggtgcgttacaaaaaaataaccacaagatctcactaagagtttagtgaactgctctgataccaattgaaattctatttttatgattactaagtgaattaataaacgtggaactgttataaaattatttgaacaaaattgaaatatgttctatcagaaactaaacttgatagatcagaaataactgtaaaaattaaaattgtagaaactaaaatgacacgcgatattttatacgtggcatcaacaatccttgtagattgccactagtccatagggccacacttaaagataagattcattagttaaatttcaacaagtacaaagtaattgacttaaacaaataattttgccacaagcttgatgtattcctatttgctgaatgaatctccttaagacaccaaggtttgaagtcccttaaattacttggtgaatgcttgcttcctcctgatgcaagacttatagaaatattctcccaaagatagcggtgcttgcttcctcccgaagcaagacttgtaaaaatcttctcctgaagatagtggtgcttgcttcctctcgaagcaagacttgtagaaatcttatctcgaagatagcggtacttgcttcctcccgatgcaagacttgtagaaatcttcttccaaatatagcagtgcttgcttcctcttgaagcaagacatgtagaaatcttctcccgaagatagcggtgcttacttcctcttgaaacaagacttggatgaactttctccgaaggttgttctttatattctggactttgatttgaaatttaatttatttcacataaaaaaaatctcaaagacacacaaactcaccaaggaataacagaactatcctttacaaaagaaacattctcttctataaatataagaaattaaaaagtggaagagctcaacctattgttgctggtttaggtcatatttatagtgataaatgacatccaaaaccaagctcaaaagttatgaatacaaagagaaaatattaattagtttttttttt

SEQ ID NO: 322285 - DNA, 2500 bp, Cannabis indica
tgtgctggggtaatttcaggatgggtgacctcatgggaagttttcctaggaagcgtgcaagtgaggacaaagcacgctggaaacaatcgtgttggtctgtagggtcagtcatcagtccatgaagcatccagagtgacgtactcgtgtataagagccattattccgtgagtgtaaaggcccaatagagacttaaagcggggacgttacacataactaggaaaagtaatcgaaatattaaaatttaactgaattaccattgttaaaaaaatttaattattttttatttatagttttggaaaggtatatttgttttttaatcttttaattaataaaattaaaataaaaataaagtaatttataaaggaaaaagcattccctaaaaagatgggaggagaattttaatctttcttttctctctaatttaagtgggtcactctaacttttctaagtaaacaaatgaaaatgaatcaataccacacaattgaaatcccgttaagtaaacatgacataagaggaacctcacattctctagcaccttttttttgggcttcgttgtggatctagtctagagagacgcccatggcagtgtctccctaatcgtcttcaatcatctttcctcttttgtgcgtcttttttcttttcttcggcctaggtcttttgctttcattgttgcgacagtctttttcgacatttttgggggagggatctaggtttagggccacatgtgggttattttcatcttcagaagatggctacatgaagaagaatgtgacagccctgatgatatagttatgaataacttgtataagaaatataggccagtataaaaatatcgggtctataagccgtaccgagcttgtcctttaaaaatattgtcataacatgataagactcatattttttttacaaaggatgttttcaaatttaaatctatgctgagaagtacatatcacgtgaccataacaattaatgctcgatggagattgcacaatcttatattatattataaataatttatttatatgtataatgaattaatatatttggcccctcaaatatatcaattatttgttcctttttcattagtaaaattatttattttaaactatttttataaagatggaaaaatttataataggacaccaccgacattatttttcattttaattttgtcactttaaaaaattgtaatttctccaaatgcaaattttcttaactttttattttatcactttattatattttatttactatttacaaattacaaattataaaacagtttgatcatactttgataggagagataatgtgtattaaatctcgattttttttaatatttagtaaaaataaaaacttaaacttattatccttaatatatctctaataacttaaaattaatttctttcacaattatacaagtttaattttttcactgtacactataatgtctcaactctaagttgatcaaatttagagtctatatataaggtgataaggtcataccgtcataagacaaaaaaaatatttttgggctcttatttaaaaatttgtagtattttttaaaattagtaaaaaaaatgtataattttaaaaacagagatttcttttagactcctgaactagataggcccaggtttaacttgcctatacttaagatcaggcctataagataagaaagagagtaaagatgagctgaagttagttgtaataaaattagaggaaattacacctattatgggattttaaaagttcttatgataaatatggcacatttaagtttgaccaatttatatggtatttttttatttttaggtctttttatggtatttgatgtgccatatatatgtaattaggttttcaaatctcatatttaatgtttgtatttgtttaggaaattttatttttgtcattgatgccggaaaagtcaccgaagttgctgccggtgccgaaaaagtcaccgaagtagcagtcggtgccgaaagtcgtcggagttgctgtcggtgccggaaaagtcaccgaagtagcagtcggtgccggaaatcgtcggagtagctgctagcgtcagaaaagtcgtcagaattggcattgtcaacgaatgaatcagaatttttcagtaatttttccgacgacttttccggcaccaacagcaaacttcgaaaaaatcatccgaagtggcatagtcgccggaaaaattaccaagaaactgcaagaaaccagtaaactctactactccatataccaaacaattcgttaaaaaaaaagacaagaattttatcaaacttaaaaagaattttcggtgattatgaaattggttaaaaatcaccagtaaactctactactaaatttattacacaacaataataaagattatgaaaacaaaacaaaatgatatacactgaaaataattttttcgatgatttttctgacgacaatggcaattctgactatttttctggcattggtagcaactctgacgactaatacaccggcagctactccg

SEQ ID NO: 322286 - DNA, 768 bp, Cannabis indica
agtgtgagattaatggttatgagatacctacaaaaactcaaaccttagttaatgtatgggcaattggaagagatcctgaatattggactgaacctgagatttttaaaccagagaggttcttagataattctattgactttaaaggtaacaactttgaatttattccagtttggtggtggaaggagaatatgtgttggcatgtcttttggtcttattagtgttgaattttctcttgctttgttgttataccattttgattggatacttcctaatggaatgaaacatcaagatttggacatgattgagtcttttggtggaacccttcaaagaaaaaataatctacacttgattcctattgcttatcaaccttcaaggaatacaaaatagcaaaattaattgttgtgtagtttaacatatagttatgtactacttttcatgtaatgtgataaaataaaataaaatattatattacatataaagacttgtttaatatttattatatctctgtcttatttatttatttatttttgagaatatacatggtactataattagattagtatttttctttgttttgattaattaaaacatagattgattaattaattagtgcataataaataattacatttgttagtcttatatttatttatttaaaaaggaaaacatacatttcatatgagacttgctaaatgatactattggtgtctagcaccttccttactgtcatattgtaattaaatagcgagtctcatataacttaaaaaa

SEQ ID NO: 322287 - DNA, 1168 bp, Cannabis indica
cccttaggcaggagattatgccccaatttccccctttacttatttttaaacgaatgctaacacactgttttatctcgcataaaggaatcttgagcatctttttcaatcatcaggcaagaagggaaagaagaggttgaccgtctcggaaactccatcagttgtcaacatggagcctctcaaaaggcccaggaagacaactgctaaaaagaagtgagcctccatgactgttagtctggggatccctaaaactgagactcaagctctgacccatcctttggcccccacacataccgatgagcccattcccaaagcgactcaattttcttcctcttcgagccaagtcctcgagctcttcctgtcgatgctgggagtattggcttggagtacactaaggaatgttgtgcagcttgttggcgaatttttaaggccttcctccctaatgaatgggacttgatcaacaatggggacctggagttgatgcttgaaaggagtgtcacccatggcctctcagtaaattcctctatccttatcctcttacttccttttttaacatccttaaaaaaatactcacgcatttttgtttgttggtttttagcaaaattttatctccttcgtcacccaacgatggggcatggaaaaaaggaagtacatggagagcgagattcaaaacatgataggtcaacacgaggctgtgaccaaggaatggattgatgccaaatcagagcacacttgcctaactaaagaagctgaggaggtgaagaggacccaccaggccgagcttgaagctgctaagaaggaggcaaaagataaggccaaggcatgcataaaactccaggcagaatatcaaaaactccaaggggaacttgatgcagccaaagtaacggtcgatgggaaagaagctgagaccattgagcaatgtaatgtcgttggacttcattccatctaccaagcctggatggcaaatccagggacggatacaagtttcttggaaagtccgagggggaagtctttgcttactgtgagaaggctaagaaggaagacaaggaagtcgaggcagccgaagaagaagaagaagaagaactgtccaagtctcctaccatgtaggtgtggtttttatttatatattttttttaggaaaatggccctaaggccgagacaatggtttgcc

SEQ ID NO: 322288 - DNA, 1294 bp, Cannabis indica
agctcaactcataaattgcaattaaaaataaattttattataaaccaaaaaaattgtttgcaatattatgagaaacgaacagggaataaaatcccaaacttgaaatccaaattgtttgaaaaattaaggcatcagcgatgtgagatgagagagttgtggaagaaaaaggctttataaggcatcaacgagttgtagagagttgttaactggtatgagccgaattgaggagtctttgattttgtctcttatgaagtgatgatcaagctctatatgtttggtgcattcatgaaatatggggttgttggtgatgtgaattgttgagcggctgtcacaatatataaaggctggagtatgttgagggatttggacatcgcgaagtagatactgcagccatgtgatttcactccctgttgcaccaagtgcgcggtattcaacttcagttgaactcttaaaaatggtgggttgtttattggtgcgccaagaaagaagatagtcacctaagaacacacagaagccagttgtggagcgtcaagtggtgggacatgaagcccaatcagagtccaaaaatccccgtagatgtaatttggatgaggcagagtatagtagaccttatcgtggactaccatttaagtatcgaatgagatgattatgagcttaaaggtgcggtgtgtgaggcttgggcatgaattggctgagattgttgactatgtatgtaatgtctggcctatataatgttaaataaagcaaccgaccaatcagttggcgatatagagaggggttatcaaggggtcccccttgttcatcatcaagccagtctaggatccatgggagtcttggtaggcttgctgcctatgtaccctgtgtcttcaagaagttgtattgtatacttcctttgagataggaagagaccttctggggatcgggcaatctcaaatcccaaaaaatattttagatgtccaagtgctttaaggttgaatctattgttgagtgactcctggattttgtggagtagagacagattgggtccagtgatgatgatatcatcaacgtacacaaaaagagcaataagggagtcattggtgccttttgtgaatagagtataatcgacctttgattgatgaaaaccttcctgaaggaatgcatctgaaagtttgcggtaccattgccttaaagactgtttgagaccataaatttggtgttgattttattattttactgctttaattgtttatggttgttcatactttgttcattcctacttttcctctgatttcttcttgtgtttgttaatctt

SEQ ID NO: 322289 - DNA, 1130 bp, Cannabis indica
tctttaaacataaaatgtaattttttttacaaaaaaatagtactttatgtaattatctcaaaatttaaactattatatatagtcttaaaatccctgttaaaaagtagtgtcccatactatgttaaactaatttaagtttaataggtcaactaactttttatttattaaaaaattaaacctttaattatgtcaacaaaaatagttaacatatttaatataaattaaattagttgacgtgtcaaacttagactggttaacataaaatgggacactattttttaacaagggatcttgattattttaaggaatatcgctaaccaatcatgtagcgctacctatagaaagtaataggcaccactagtgttcaatagcaatactttatataatattacaataatggtcccaatatttattaatttaaaaaaaaaagataaaatttagttaattatgatgtgaatcacaaatacacagggctttcctaattcagaaatctattggcccctactcttatcaaattattgtctacttattactaatcggagcaaatcatttagataactagggatctaaagtgacatattcatacattatcttagcatacaaaaaacttttatttatatgtatctttacatttttttgatgattggagtattatgtatgggagaagttgaaaaatactttttttatatacattaatcgaatttacctccaaataaaatttaattcaaatatacttctttttatgagtattgtgcctaaattatcctcacacactcacataactaagacataatttcaaacataatagatttgtattctttgtagatggatgtgtaggtttttgaaaaagttgaggcaaacttttgattagagaagaatgaaaatttttgtgaagtcataggagtaaaattggtagaatgattgaaaaagaggtaaacataagagattttgaaagagagggtaaaaattaaaggcatcaacttaaaagaggtatgtaatgtaattttctaattatatattacggtaattagtggcataattactcagagtttcaagtttgtaagtggcacaaacccaatgtttatttttagcggcataagtcccaatgtttgttaaactgtaatttttct

SEQ ID NO: 322290 - DNA, 892 bp, Cannabis indica
ttcctatcaaatggtatcagagcgcgtcgattctttggggcgaggggtgacggaaatccgatcggagtttcagcaagcttcgaatcaattagaaatgatgaaatcagctcttgaggctacggttggtcccatcgtgaaacggctagacctgatgatcgatcggatacaaaaatctagagaggcacgaaacaccaacgacactctaatggcgcctgaggttgactccatggtgtcggcacaaggttgttcgaagatgctgcttccacgattggcagaggcagtgacaaccattgaggaagtagaacaacgagacgaagccgataagggggaagcaatgacaattttagatctgagaagcgtcttgcgaacactcccagccaaacaatacgacatggctcttctacacatgtcgtcgaagtcgaaccgtagctcacgggagctaatgaagatgatcggcactcagttggagaataataacattggggaggagcagcgttttcgatcgccgtcgtcaagttcacgggagaggcgttgccgaccggagccgaagaagaaagaggttgaaccaccatcggagcttcaaaagagaatggttacttcattggataccaaagagattcgcgattcgtggccagataaacgacgttatcgaccggcgccgaaggagataatcatctcgcctgagaagccacttcagcgaaccttgacgcccagaccagagaagtggcgatgtcttctcaagcttgctaatggcgtccgttattgttggtgtgcctcaatcattaatgaggcagttgggttcaattctttctttctagacctaaggcccaactcagcccgtgaatatggcccattgtgtgctttaggtcattgtgttatttggggcttgggt

SEQ ID NO: 322291 - DNA, 1067 bp, Cannabis indica
acgcaaacatttattattttagtcaaacattacaaaatattactaaacttcatccctaacctcaaatttggtctatcattgtaaatacatcgctagatatcgcaaaaaaactagagaaccaattaaaaaacgtaaaaaaaaaaatcaaaattcaatttttttggctaaaaaatcaaaaaaaacacaaacacaagtgtgtagactattgaaaataaactatatacataataacatttttgagtctggctatgggtgctcttgtagagatgggctgacttgagtgtgtgtgagactttttagacaggtagagaaagacgagaaagagagagaaaaactattgagatgagttcgattttattatttcaagggaataattggaactaattaaacattgagagagagagggacattttctttgatgttttgtgtggtggtatacttagtgtaaccatgcttcacatttaagcatggtaatccaaattttacatttaaaagtttaaaagtcaggccacattaaacaaacaattcaaaattaaatgggtgttaagttttgacaagttggaactcaaactttattttttagtaaattggtccctaaactatagaaattttaacaagctagccctcaaactttatttttggtaaattagttcccaaacttttattttctcggatatataaaatcctcattcttaaatattggtattttatttatttagttttgtattaatattaaatatttttatattgatgtaccttatcaaattaaaatacatattttttttatttatatgtatttttttttaaaatgccaaagtaaaaagaaaaaaacaaattaagacattttttttaaacatgtcgaaataaaagggaaaatatatatctgttgacctcgcttttagccaacgacaacgagtttgttttataagcgataaacaatttataataacaaatatatgataaagcaataaaaaagacacaagaattttacagaggttcagccccgagcagttcggtaatagcctaatccttgttatttgtattgacttaagatcaaggagaaagat

SEQ ID NO: 322292 - DNA, 946 bp, Cannabis indica
ttacattaattatatataacaactaatgtatcgaattattattattattatatatataccatacatactgtgtctgagaattcatttctttcttacattttttttctctttagtttatttttgtttgcaaatgatatggtagttggatgtttacctttgtatattagcacatgaagttcaatccgaaagaacaacctaatacaattaattatattattagtgtgtactataagtctaactccctagtgttttgtttaaagtatacataattatattgttataatcaaataatgtaacaacaaaaagccagatgtataaatatatatataatatgtgatggtttcacgcttctattcacaaattctcaaaaaggaagtcccaattaatcccccttccctcaatatcaaatatatatatttaatatttttatttttctggtttaggttagatttgatacctactatactcgagtctcgagcacccttcaccgcagcatttgatcgatattgactgttatggcataaaaatattaataatattattattaagtttgaaagggtttagattatacaatttttacattatacattaattattatttatattgtttggcattgacctttatttacgtaagtgaaaatgattgttttttttttttgaaaaaaaaaaacatgggaatctattattaaaggaaacaaagattacactaaggtagcatttgtataaaaattgatttctagtataaaaatggtggtggtggtgttgtggttgttcaattttttttgtattttttttttttttttgttcttctagtttattaatcgtaagcaaaaaactaaaattaagtcgctggttggcactataatttgtcttccgttacttgaaccgtaaacgcaaaaacttaacttttttttttttgtttcttcggtttcgtataactgtaagc

SEQ ID NO: 322293 - DNA, 1174 bp, Cannabis indica
actttctttgatttttttctgcctaaaaacgagctttctaatttgcttttagcatctaggagtgaagcaatctataggtgaaagctaagataagaagtttgaatccttttggttttgaaaagcttaggtttaaaggttgactttttattttggaggtgctaggttaaatatgagttcatggcatattttgattgcgagcatggttttgattttttgttacatagaacatattgtatggatgatatatatgtgttctgtgaagtttggaattatttggttaggtttggagttagtttggaggattttaaggttgaagaaaatcgtgttgtggcttttcagaactgaaatttcgtttggtcaatttttgagaaatgtcgaattttgtattttggccataactttttattctggttttcgttttagacgttctatataccgttttgaagcttgtgacgagatctataatatggtctatgttttagagccaaattatgtatttttattttaaggttttctaccactaggtttggtagataatcttataccattttatgtgagtattagatagtgttttgggatagaaacttatcggtttatcgttgttgagacatagggcctgggatcgttgttaggctatttttagcctaagtttcaggtcacattaataagcattttctcagttattgtagcctttttggagcgattttacgcttgatttttcttgtttcgggttcctggtgcattgtagttcaaattcagtcaattgggaaagcgggacaatttggtgaaaaatctgctgaagctgccagacgtgattagtagttgcgaccatgacaaggcctagcgcgacccttttatctggtcgcgactagggtagattggcagaatgctcatttttcccattttgcctatggtcgcgaccaaccattaaggtagtcgcgaccaggtacgtaaacacgagatttttgacctaattccgatatttttccaattagaggcacaaccctaattcctatataagggactcgactcagattgtcaagggcatcaaaaaatcggccccgaaaagtgaatgaaggaggagaggaagctatctttaagatccggagagaaatcaccatctagtttctttcttcaactctttaatttccttatgtctatttttgtttcagat

SEQ ID NO: 322294 - DNA, 1436 bp, Cannabis indica
tcttcatcttcttcttctttcttctcatctactttatattattttatattattttataacaaatgcccatttttttgtttttttaagaaagtaatcaatctttattaactttcaaattgaaaaatgctaaagggtatcaatggtgtctaccaccctcttatgtatcgatatcgttattggtccaattaagtatcgagtcccacataatttaatataataatttttagggagtatcgctagccaattgcaacgtgacatgtcgagaaggtactaggcaccactggtacctaatagaaatgctctttcaaattcagcaaccaaaataggaagcagatcagttgggacatcccccatactaaagttacgatcaggataagaaatagcagctttagcaatcgcatgagctactaaatttgctgactgtttaacaaaagaaataataacaccccttaaactcacaagcaagttttgacactctttaattacatcaccaaaaaaggagattatatgaattggactacgaattgcttgtactaccaccaacaatctgtttctaacattacattcagctattgcttatcttttatccagctgagagcctcacgaactccaattgcttcggctaactccggtcgtatcccattaataacatagtctttgcaaatttaaataataagttacatattactcttaaatagattactactatatcaatttcgagattttggtcattcagttgatttttaacgataatatttaacttgcgtgttaaaattgtaaagaaaaataaatttaaaggagttttaccacaaaataaatgataagagatttaatataaaaatcaaaacataaaggaattttgcagcaaattactctaaatttaactccctattgcaaataaatacttaagtttaatttttagcattaataatacataatttatatttctataactatataagtatctaacattaagtgtcaaatcattattcaaaatttaatgacttaaaacaattagggattgtcaattgacaatttacttaatacttaatatttaaaaaatttaaaagcataatttaagtattattactttaaaaaattaaattaacatatttagttgtagcaaaaggttacacttaagtatttatgctcaaattactctaaaaatacattgtatattcatgtatttttttggcaaactttttttgttaattttgggataaataccattttggattttatattttacaaaagttactcattagagcttaaatgacaaattagatcttgtatttcctaaaatgttacaaacaggactctgaactaattttttgtcaaaataaaatttaataataatcctatgtaaatgtattatgacaaaattatttacatttttttatctattcaattatcttaaaattgattatattaaaaaa

SEQ ID NO: 322295 - DNA, 577 bp, Cannabis indica
ttttttattcgtttttccagtttttataaaatttttttatttctccatatatttctaaaccacttacaaaaaagccatatttataaaataaacccaatccactaaattaatttggtattccctacttcacaaaattgatcaatataaatagttaataggtaggagaacaattaagttttgcgaatttgtaagagagaattaatcaatcaacaaaggcatttaagattttcagaaaaaataaataaataagtaaacaaaggcatttaagatacttctttttaactaagtgattaagatttgttgtccgccaatctttacattatgtttggtaggagggatggcagaagagagtagaaagatagggggagatactcaattcatttgtttgacaagagagataatagaaggaaaagaaataagagaggatagtaatccttcaaaatttctcctttgaaataatgcatgtttaatatcataattaataaattagacgtatttggccatttttaaaattaaatttataaaaaataagaattttgaaaacaacataatattattttttattttaaaaataatt

SEQ ID NO: 322296 - DNA, 809 bp, Cannabis indica
tatatatatatatattctagacaagaaaaatatcatcatagtccatttatataatatatatcaaaagaatatgcttgatagtatataatggtatgccttgtgagctaattttctaccccaaacttacaacctaatattgttcccaatgtggctaaaattatagtcttgaattagctcgccacaagttacactcaccgcactgagtctagctccaagttctattacccttccattctctctaagactttcggtcttagcgacttcctccaagaaccgttggatgtagtcctagaggggctcgtcttcctgttgcttgacatctaccaaatcattgggttcaatcttgcattgtcgggaaggagcgaattggttgccaaaagcatacattagatcttttcataagtcgatcgatccaggggagagcttaaggtaccaccgctgagctaggtctgtcagtgtgatagggaaaattttgcacctgacataatctctcacaccttgtagatcggtctgcactttgaagaagtgaatgtgcgatagtggatgttccttctcagtgtatttatgcttgaacgggttcttgaactttggagggatagaaagagctttgattctttgaaagagtggtgaacgactctctctatcaagtttgaactctaaaaatttaggggtcgtgacccctttcactaaggtcgctaaagtatcaaattctgcccggttgatcccttgggcagtggtttacgtcccagctggagcttctgttactggggttgggtctcccctagaagctcttgttgggttttatgccc

SEQ ID NO: 322297 - DNA, 1528 bp, Cannabis indica
tctgctcttgttttttctcaaatactgagatttcgggctctccaaagcgagtacatcaaacatgtaagagcgagtacatcaaacatgtaagagtggttgagaatacattttccttgaacttgctgatttttgatcttccaatccacctggtgaggcattgaagtgtgttggctggaacatgccattgtaaccttaaaacatggagataagtagcagcaaaagtgcacttaaaaaaataaatggtctgcatttctttatgcactaagcataactcacagtgctcaactactgtcattcccattatcctcaatctattttttatagtttttgagcctttgttagattgccaaccaagcaataaaactatgtttaagggtatttagcttaccccaaacctgctgggaccattgtactttggtctggtctggacatagcaagatataacccttggaaatttgataattctgtaagaaaagttgctgccctgctccatctttgaattgctccttcaaggttacaaggcttctctagtaccaactgctttgtgccggagccttgtaactccaccagtcacagtccctgagatagatactatgaatccacctcaaccacaagctgtcctgtttatgagcaattgcctacatgtatttccccatagctgttttattccactcttggatcctcctaaagccaataccacttgcagttttagtttgacaaagagtatcccatgctaccagtctatgtccatttgagatagcttaacctttccaaaggaaagctttgcaaatcgactctaggttcctcacaactttcttgggtgaaaagcatcacttaacacatttatgcatgtatggccatgagaacagagttaactagaactactcttgctgcaaaagagaggtttcttgaactccatgttcttatccttgttgtcatttttttcagcaagggcagtacatttatttccaaatattcttttagcacagaaggaacacctaaataagtaaaaggcatttctttcaaagcaaaggcagaggctgcaagaactctacttacttcctcattaggcatgttgctgtagtagattgcttacttttggggtttaggctgtaacccagatgataaggagaacaacttcagtccatgcaacatgtagtagatgcttttgaattcccccttccaaaacagcataacatcatctgcaaaagccatatgattaatcttccattcagagcatctctcatgaaactagaagtccctcttgttaccaacttccttcagaattcttgataggtattccatcccaaggacaaaaagcaaaggggacattgggtccctttgtcttagtcccctttttgcttcaaaaaacccatatttgcacagaaccattaaacataatagaaaacctaggtgttctcacacaatttattacagtttgtatgaatgagtttgggaactgaagcacaagtaacatctcctccacaaaatctcattcaatattgtcataggccttctgaagatcaag

SEQ ID NO: 322298 - DNA, 1197 bp, Cannabis indica
gctttttttatcctaccatgactaattttcataaagtacagaaactttttcatcagttgatttttataatataagcaaattcttcacagaggcattttatacaaacaatatatcagctacaacaatatgacaaaatacgatgcactgagagctttaatatgggaagaaattgagcacaataaaaatgggaaaagtagaaagaacagatatttaccaataacccaccatagctgagtgaggcttttatgattggatggaaaagaaagtgagaagtgagagaaaggtgatgttttagatttttggaaaaataagtttaacagaaaaaactaacgtaaaatgacaaaaataacttaatactttattaaagatattcagaaaaaattagaataatttaaaatatgaaagaaaaataaaatttaaatagtcaattattttttaaaaatgcgtaaaataagaacataatatataacttttatttttgtaaattattttagcgaaatttataaaaatactaaaatttaagttaacttttataaaaatactgtcacaccgaatttttttaaaaaatattttatttttataaaataacagtagaacacaaaagagaacaactaaaaataacagtgaaataactaaaaaaaacaaccgtagaacatcagtgaaaacttaacacaacacagtacacagtatttggaaaaaaaaaatttgaccccacaataaaaaagttaaaaaattaaaaatttcagcatgtggtgtaaataatccattattttaagaaattgtaattctattttatgttaatgttcttctaaaagaataatttgtagcataaatatcttttaaaaaaaattattttaagttacaaattgttagcttaatttttagacaataagaccatctttactgagagatgtaaaaattgagttatatttttacattaacttttattattgtgttccaatggataattgtaaatctttatgtaaaatttaatatgttatttaatgtccatttaataattttttaaaaaatataataataataataataatacaaagctaaatgtaaaatttaataataaaaaaattaataataatgcaagtcatttaatgtaaatgaatatgttagctaaaatttaataataaaatattaaaaaataacatgataataaatttaaaagtatagcatttattgtga

SEQ ID NO: 322299 - DNA, 639 bp, Cannabis indica
ttgccttcattgtcaacaaattaggtcaatttatccatgctcccactacggttcactgggaggcttgcaagcgcctgtttcgatacttgaagggcacaattcatgaagggttacatataaaagcgagtctgcacatgagtctccaagcttactcggatgcggactgggcaagctgtcccgatgacaaaaaatccacaggcggttatgctctgttttttggtggtaatctagtctcatggtcagctaagaaacaggtcgtggttgctagaagtagcacagagagtgagttcagatccttggccaacacagctgctaagattcggtggttatgttctttgctctctaaattgcacatgtctcaaccagccccaccaatcatttgggtcaacaatcagggggctgcttctcttgcagccaaccccgtctttcatgcgccgtccaagcatattgaaatagatctccactttgttcgggatcaaatacttgcaaaagaaattgaagtcagatacgtgccatcactagaccaaactgctgatatcttaactaaagcactcagcaaagacagattcctatatttaaagaacaaactcaatgtgtgtaccacaccttttcgtttgaggggggatgataaagcaaaac

SEQ ID NO: 322300 - DNA, 634 bp, Cannabis indica
tttttttttttttttttgcaactaatctacatttaaataatatcattgctgtactacccttttattttctaaacattgtcaaaggctatctccaataacatgatatcatgccattttagtgtattatgtggtaaaagatttatttccttttgatgataaaatttccttttactttgatttttctttttacagtccaaaatgtattgagatggtttgtttttaaaagaccaatatggctttcttgtaacgtagaaaggtgaatacaatatctcacattacttttttttttgaaaatgatattttacattaattttgtatataaatatataaaatactctatttttttaaatagatagaaagactatttcaggaaaaagaaaaaagatagaaagtactcttctaacaattttttttacaacctagcttaatcttttacccttactcaaatttagaaattaggagcttcctatttatcaagttcccactcaaaataaattaataaggtgaaatttttaaaaatatcttttttttttatatattttatttataattttacagcttaaaaatttttatttacaaaaatactcttgtaaaattttaaaattacaaaaatatactttgttcagcaaaaagt

SEQ ID NO: 322301 - DNA, 1467 bp, Cannabis indica
tttttttttttttctttactctctctctatctctcaatctttctctctctcaatctcgaaactcaatctatttagcatactcaaaatgacaagtattggtgatatttataggctcaggataaagatcctaagtcggtggctgcaactgttaagttagttacgacttaacaaatttaacaaacttctcgtaacagaatctcctcgttagcacaagacaagtgcttctgggtaacacatacactttcagaacaaaggaccaaggagtatgttgaagggaaattccaaataggaaaagagtcaactaaggttgactatccggaaacctcttctagagggataaagctagtcatccggataagattccttccaggtggaaatgatagacatttgggtaagcccttccggatagtaactattattccacgagacttcttccagatagacaagttagctttccggaaaagctctttcgggagacaactaactttctaggaagatgaaaaacttacaagactttttttatttggaggaactattctacaaattctaccaagttacttcaaattaaattattgacggtgatgaaatgcatccatcataattggtgctctaaaaatctcagtttactaacttctgagattgatcaagtccaagcaatgcttgaacttgtttactagttaagaccttagtcccaacattagtaagattatcttttgttctgaccttctctaaatcaaccatctcttcttctatcttctctctaatctagtaaagtcttatgtttatatgtttgctcttttcatgataaaccagattcttgcaaaggtggatggaagactagctatatgagtacacaatcactccaccttttatttgtttcaattcaaatagaattcctcaaatccataacacttctttgaatgcttctatagtcgccataaattctgcttccgtggtggaaagggcacccacagagtgtaactaggccttctaacatatatagttctggtttgtcatgaaaacataggaagtggttgattatcttttatctctatctgaagcatagtcagcgtccacaaatcctttcaactctagttctccttttacttttccatagatcagaccataatcccaagtgccatttaaataccttagtaaccattttaaggtcttctaatgttcaaagtccagattggacatgaatcggcttaggatgcttagtgcataagctatatctattctagtgctcaccatcacatatattaatcccaaaatcattgcatagggtacatccttcatttcctttttctccttcgaactgttcgagcgctgttccttcgacaaaacaaattttctacctaacggaacagatgtactctttgcatcttccatgttaaacttctaagtaactttcttgatgaacccagactatttcaggctaatggtccctattggaaattattttac

SEQ ID NO: 322302 - DNA, 599 bp, Cannabis indica
acctaaataaaactcctatcattcgtttccacaaatgcaagaacaaatatagatgaaaatcaagtttttaatatactgattgaaaacccaaacttttatttctcctaaaatcaagcaaatatgatcaacccaactctatttatccaatccccaaaaaataaaaatccaaccaaatcaacaaacagatatttctttaatcaaattaaacaatgcaagtctattgcaccaaaaatgcataaatcaaaatacaaaatgacagattcgaaaaaaattacagtacaatgcacacttcaaaattagaacacatgaacagagagagagagatacctcaacagagaaacagtaactcccttgaagataaagtcgtcgatacatgagagaaaataagattattaaaactgcatcacttgtatcaatggagtacacaaaaatgaactacaccacattcccttcaaaaagattttatttttgattacccacagtgaagaacaaaaaagtatgaaaagtagaaccagagaaacttacttgtagaaccaaccgtcgagacccacgactgtaacaaccacaaaaaatggcagaacacgaataatgtacaccac

SEQ ID NO: 322303 - DNA, 975 bp, Cannabis indica
aaaggtttttttttataaaaaatattcattttttctcttgcttgtattaattaaataaaatataatatatataatattctttcactacataaaataaattttatttagaagaataatttaagaattattttacttatatttttctcttataaatttattttattagatgaaagatctaaacaaaacctaaggctaaagggaaaaaaaaaaaaaacctaacagtactatagtgaggtagcataaaaaggagacattcattaaatttatattgaatgggtaaataaataaaagagatcggctcaaggggttaggccattaagaaactgtctatagcatcccttgaggtaattaaaagctcaattatacaaattttactaactaattgataagtgaaaaaattaatgctatcataggcattaattactaaacaaaaagttctttagatgtcacccaacagtagttctctaggaactttagtttatctaacttctagtttagacaatgagaaacttttaattggataactttattttgtaatgttcagaatttataaaatatgaaaaaaatatatatattttttaagtagtgattagaattatttatgaatttacaatgtagatatttgtaaatagtgtaggaaccctcttgaatcaagatataactcatcgtctaactgaattgggtatgctttgccaaactatgaattgctaaaataagtgagcaacattgggacaaatatgcccccataaatttaaacaataaagatataacgtataacatacaacatgaatacaattgttttctgtctcaagagaacgaattcgttggaattatatggtttggagttggttaagtaagctgaaacatagatttatcatgtggttggccattcttgaaagattgcaagtgaaatcgagactttttagattcataatatgtaaagatgacatatgcttgttatgtaggaatgacata

SEQ ID NO: 322304 - DNA, 1453 bp, Cannabis indica
ttgtttaatttgatttattctataaggaaacttttaaaaggacgttaaaactgaaaaaattgggcgccacccatatgactactagatacacccaaagcaatttttataatacatgtgacaaagtatatctgaatcacttttagtatttttagtggtgtaatatatttattggtgcaattttatattaagtttcactttataaaaaattaactaaccaattataaaatgtcaagtcttccataaccttgcactttctaaatatactagttaagtacttttatcttttctaggttaattaaatttcatattttacgttttttttttttttttttatatgggttgttttcaaccaaaagaaattatcttcaatagttgggcccatatgtatcctaagttcattttatttccacaatcgtcaatcatattcatgcttgtagagcagaaatatgcctacataatgaatgatttgtcaatctctctacttaattttagtaaaatcttagggagagagatcaaattattagtccgttgtggcaaagcaacacaaagagaaacaattactaaagacttgtcatatatgttctctcgtggactacacacactttctttacgcaatcatcactactcaaaacgaagtaccataaatgaaaagtatttacggttaattaaattgaatctacattttagttcgtactgattaatattagtgtttctaatcatatatatgcccaaactatatagaactttccatttcttttttttaggtcacactaattatatatattcatatatatatatagatatctcttttcaactatttattaattaatattgtataatcgattttcgggtactttattaattacaactgctagtcttttcttgttggcatatgctgtttgatttgaagaaaaaaactactccacaacgatatcttttattatgctacaaaactaaataaataatttatgtataaacatatgttaattgcatataatataacttaaaatattttattaatccgattgtaaaaaggagtcaaaaagaagtttttagaaagccgaaatttaaacaattacttaactacttttatgtaccaccaatcctaaaaggttacgatttttctttgtaattgtgaacttttcataaataaattaataataatagtagagaaagatatagaaagtttagtttaaaagctctggaccgtagctatagctagaataaggagataataaattaatataataataaagctagatttgcttctcttttcctttaggatttaatgcaaactcacgtgactaatgcccgaaaatacttactttgagttgaatctgaatatatatatatatataggtatatatataggagtaaagaaagtatggcctgcatattttgtgtgtggggcaagaaagagagagatgaaatagctagaagaagaccccatttt

SEQ ID NO: 322305 - DNA, 2614 bp, Cannabis indica
ctcgaggtgaaaaaatggtggcctatttaagcaagatccaagacttgctaagtcagctcaaaaactacacaattaggtagatccccagagaacagaatgctacagcagatgcaattgcccgtatggcaagaagcaccattgccgacaaggcaaacctagtgtcaatacagttcctgaaggaaccaagcattaccatcctagaagaagtcgacatgttggatgacaatccaacatggatgacacatattgcagcttacctccaaactggagccttgcttgaaagcaagaatgaggaaaaaagataagaagaacggctgctaggtatctaattctagacgaagtaatgtacagactaagcttctcaatgccgctcttaaggtgtatcaccaaggctgaggctaagtggctaatgatagaagtgcatgaaggcttctgcagcaaccatgccaggggcaaagtctatccagaaagatattccgaccgagatacttttagccaacaatgatcaaggatttgatggactatgtcaaaaaaatgtgacaagtgccagagattctcaaagattcccagagctccacccaatgagctcaggatgatgaagtctccttggcccttcgtatagtgttggggatagacctgattggtcaattcccaaagggaaaaggaggggtgtagttcgccgtagtcgcagtagactactttaccaagtgggtagaaactgaacccctaacaacaatcacctccaaggaagtccatgaatttgttgtcaagaacatcgtaagtcgattgggacttccacaaaaaattgtgttagatattggaaagcagttcgacaatgacatgttcactgatttctacaacagacatggcttcatcaaaagcttctcggtcgtggcccatcctcaagcaaatgggcatgtagaagctatcaacaaaatcctcaaggacaccttgaaaaactgccttgaggaagcaaaaggcaattagcttgaattgctcccagaggctgagtcctcatagaaattactgacactttctgtgccactcctcctaccgtaggatcagattccgtcatatcctactcatttcttcattcttgattaaagtttttctaaaacacttgtcccgtgtaggtgacattagctgattttggcttggaaccataatttccacctgatgcgggtgtttatcttgctctttccaacacttctttttcttttgtgctactggttaattcctcaattctttctcggtactttgggaaattgtcatttgttgcaactcatcacccttgagttgtggttcagacccacttgtttggccgatctcttactgattttgagttttgtctactctagctcgcatgtcgaccattttgggaataaacttttgcatagattggctggcatcctcttgatgttgtctattttcatcttgattctgctggcatctttccttagccaagcgctattcttgttggaatttatcttctgcgagatgctgcatttcatcattgtgtttgtctcgcacaatcattcctcattttcatggccaaagcagtagtcgaatcaatgatagggttggaggtatccttcacttggaactactgccttcagtgcattctccagggatttcttggatcccgtcttagtttgtaacctagtcctcaacttcttcattctggtgattcccacatacaacaccaactattgatgttgaataatagctcaacatcaaatttgtattttgactgagaattctttacataagatttgatctaatgaaagtaggatctctatcagtttacacaattccctctaaattctctcaatcgttctattttgtctgcttctcgagctcaaaatgatctcgaggatgtattccaatagaattttgactagtctaatgtgagcaagaatttgttactctttttgaatgatggtatctcctatttataggtgggagtggtcattagttctttgtctttcttccaatctgattggtccacatggattagctcttcactgcttctttgtgtgtttctttctatccatttgtgcttttcaaaactctttaagctttgctcctttcctttcagctcttgcttcgccttttgcatttcctgctctgccttttcccctttaaatgaaatagtgcatttatcgaacctgccacattaatttattagttcttttcatgtataatggatagaattacctttgtatccctgaggttatttttatcacttacaccctatttattatttattattttttgtaatttattttttgagtaatttgcggcaaaactcccccaactatcaatttacttgcaaaaaaccatccaacctcatattttggtgggaaaaccctccaaagtactgtttcgtttacatttttaaggtgtcgtctgttcagcctcgttaagtcctaattttgcccacgtggcaatgacaggtcaataaaaaattatcctacgtggccatattttacaaaataaaaataaaaaatttaagagtaatttgcggcaaaactccctcaactatcaatttacttgcaaaaaaccatccaaaaaactttaaggttggatggctttttgcaagtaaattgatagt

SEQ ID NO: 322306 - DNA, 1711 bp, Cannabis indica
aaataaataaataaataaacccataaccctataatattatttatttatgccatataaaattaaactatactcttaattcccatatttatgaaaattcccctacatttaatttaaaagtaccaagtggtggagtgatccatttagacgttgatgcacaaatatttctcttttaaactaggagttcgctacatattactgaattcatcaaataggacttgaatacgtgaaactataatttgaggagaactaaattaatggcaacgaactacttggtttcgttctcctcaaatataccaagatgccaaaaggattaattcaaagtctgactgggataaaacttctaaagctttaatgattattagttgaaaagaactgttacaaagatattttttaagacattgaaatttaataattttcacaccttcttaaaactatgaccaaaaaaaaaaaaacagcatggctattggtatcataattgtaaccacataccgggcagtttgaatgggtaataatatttcttttctgcaacccaatattagtaggaagtatcccatggaaacctcactagataaaattaaaattttcttaggtaaatgcatcctccaaaacctcttccaccaaactgaaaacacattcttagaaggagacggttcagacaaatcaaaagcagaggccacaatataaccacttttggaaacttactaaggggtatagaactaatcattgagatatacaatgttaaacaactgttggagaataggtaaattccagcaactccccgaatcatctattaaatctttcactagtaaaataggatgtgtagtactaatggatgcaggtaaaaaagaatacgagcaaagcaattaaggatctttaaataccaaattagaatttccagttcctactcttttcaggtgcctttttttaagagaaagcgaccctagataatactacgccggttataggtaggggatttcctaacttcaaggaaatccaatgttactataactcaaataaagtagtagtagagtaccaagtaaaacttaacaataataaaaaaatcaaccaagactaatagagttagttaacccacttggttaatcaattaaaacataaaattagaagaaagaaacagaaaaattagatagtaagaatcctaatttagttattcaaaaaggaacgataatcctattcaaaataggacaatatgagtaaataaattcaccacaaatgtagttcatactaaaaacgcatatagatttaaaatacaaacctgaagcttccaaaaaggtagtatggtgatattatttagctttataaatttaagttagtaaagtatttagacaagtaagaatcctcttgagctactaacatggttttattgtgaaaaacaaacaaacaaaaacctaagccacctttggaaaacacaatgtataacaagccaaccaataaactttttatttatttacaaagaagtccaccaatatcttgctattaacccttccaactcctcacagttttcaaaggtaaaacaagacatcacgtaggtggtaatagattgaataataacttttagggcccgtttggtacgcaggattggactggattggactgaaaaggattggactggactggacaagattggattatgctgaaagtaatcctgtgtttggtttaagaatggactgtactattttatttatttcctttt

SEQ ID NO: 322307 - DNA, 1129 bp, Cannabis indica
ttttttttttttttttatgattagtataagttggagttattaatgacactgataaaatttttaaaaattttaaataattaacagtgacaaaaataatgtttaaatagctattaaccatgtgtatagaacaaaataattatgtgtaaaatattttttttttttgagaaatttaactgttgttaaaactggtaatcgtttacaataaaagagaaaatagaatttaggattttacccatacaacagacatcttcatccaactcaagagcaaccatgtgcagcttaataacatttctcttaacattaaaaataattactcttgagaagaaggataaaagacagctaatatcaataatcaaatcattaaaactagagaagtttccaaatgtagaattgagggccgaagaaacacgcaatgcatcggtttttatatgtgtaatcgaaaattgcaattgtagcacccaattaagactataaaaaaaatgagtgtaaataaaatatttaaactatattttttttatttcaagtaatataatatacattattataggagatcatgaaaaaaatacattaaattttttttttttttgaataaatacattaaaaaaaatttaaaatagataaaaaatttaccgatataattttttaagaagcatacttagcctaaaattctattttttaaaagttaaatatttttacatatggggtccattgggtcaaaaggaaaacgggttttgagcgctaaaatttaagttttaattcaaatttatagtggtagtacacgtggcattaaatgaattgagagagcctcagtgaacatttaatttgtgggacccaattttgaatttcccatatacattctcttctcttaaattaattaagactctcactcacatcttcttctttttactttaggttaattaatgcaataatgactttagctataaagttccaatttgctttcaaaaatttataagaagaatttgagataagttataagaagagaaatgctaaagggcaccagtggtgcctagcaccttcctatgtgttaatatcgttattggtatagctaagtatcgggtcccatataatttaatataataatttttagggagtatcgctagccaatcgc

SEQ ID NO: 322308 - DNA, 1032 bp, Cannabis indica
agtttcaaaacgtattaaaactataaataaacttaaaaaaagacattcacacagaacaactaaaagatgtcaagaaaactagtatacaaagtacattacagcaatttataaatatcatcacgaatatcaactaaaacaataatgaatcataaacgaaacctacaaaaattataaagaaaaattataaaaataacaaaacacactacaataagcattcaacttacataaattcaaaaccatacaaataaaaatcaacagcaagtaccataaccattaaaaagagaaacatggttccgaagttgaaaaatagaaatgaaacctaaaaccaactagaatgaaatataaatgaaactcaaatgacctaagcaacataactgacctaaaacaaactaagaaatagcctttttcaaaatactggaaccgtacctaaagccaataaaatctaaaatatatcaaaactaaaaaaaatgcaatacaaacctcaatcaaataaggagcatgattcttctccttttaaccaacatcaataggactcccttcgatttcatctcgttcaatgattttagatttcttcttattggcaggagccttcatctgtttgggtatggattcaacaaaatcatcataaaaaaaatcatcatctaacttgcttttccctttccctttttcaaaattagattccaatcccattttctgatgctttagggtctataattggaacttttttcacagagggagatggagaagatgaagaacgagttataaccgtttatatagagaattgtagaaaaaaatataggttgatacttcaatagcagttgaagatcgcggggtttcaatttttttggagatacttcttctttaaatcatttaagaaagtttaaacatgtagctgaaaataaaaaaataaaaaaaatgaaaggagaagaataaattaaaataatatgcagaaattggaaagataagttggttgagtgtgacggatgaacaatgatactaacattaagagaattatgtgtgcaagtgatattt

SEQ ID NO: 322309 - DNA, 1012 bp, Cannabis indica
aacggaatgacattttattccgctgcacccaatttccaacagacacttggggtagttggtccatatcccaattatttatcctgaactggggatggcttatgggcacatgatagccctgggacagcagagcgctataaatcctctgcagggggttggacgctctcaagctctacgaatatcgttacctgcccttttggctctactagctctaattagggtggcattacttgcccgagatcgggaaccctttatccttcaagacttactctacaacctatggatgaacatgtcgcaacaatctccggtggaccccatcttgctgaaactactcgcaatgcacaaaaaagatacctgagggaattataagagggggaagtatgcacactggtacaatctcctgcccagcatcccaagatgatgaacttgccaattaccttcacaaaggacgacaccaaaaatgtgcgcttcccccataatgatcctttggtgattgatgtgcagatcgccaacaaatgagtctctcgagttctcgtggataacggaagctccattaatattttgttcaagtttgcattcaggcaatgagtctctagagttctcgtgttaatattctcttggacagaagacttaatggatataaaaactatccgagaagagtttctagatgggtcagacttgttgaggatgtgtatagaatttatagacctgaacaaggcctgcccaaaaagattattttgccgcttctacgaatcgatcaaatggtagatgccacgtccgggtacaagttgctcagcttcatggatgcctactctgggtacaaccaaatcaagatgcatatcacagatgaggaacatactagcttttagactgataagagtgtttactgctataaagtgatgtcatttggctacatactagcaaattgtaaattggatgttcaaaaataaattagggaggaacatggaggtgttggaattatattttaccaagatcttagatctactcacaagta

SEQ ID NO: 322310 - DNA, 2569 bp, Cannabis indica
ttttatcaattttaactttatatattgtttattaagtatattattcaaatgagttcaaacaaagtgatattagacaatagacatagtaaggtgaaaaaagaaccaaatttaaaagaaagaatctttgatagaataataatgatttgattaattagaagggtggagggaggagcatagtaagagaagaaaggtattccattcgatcagatttttatcgatatatgtaatttattatgggatttggattaatggtattattgttgggtttgggagagtgaaaaggcttttaggttatgttaataatgcttggacgctattaacaattttgggattttgagttttggttacgttttctttttaggtttttatttgtttatttacgtaatgataagaatcactcatagattctgtattagtgcagaatttttcttgaactagaatagctcatcgtttaattgaaggacatgttttatctaattatgaattgctatagtaagcgagcaatatgggacaaaattatctccagaaatttaaacaataaaattatatattcttaaacgacatactaaaagagctagagtttcaatttgtaatatttaaaaaatatttacaaaatgagaaagataaagacaagtgaattaattttttaccaatgattagggatgtacatttttctcatggggatggggcgtcgcggggactcgctgcacctaatggggcggggattccctgtataaatgggaacggggacggggatcaaattttatccctaaatgttaaatagtgcggggacggggatgacactcttcgcccggggacccgtttaatttattaatattttatattttatatatgggtttgtattctttttagtgtattaataccatttttacaatttttgaagttgtgtttttgtataataattactatattgaatagtaaataatatgtaatattttgttttatataatttaataattttatacattaaattttaaaaataaattttattatgaaaatagggaatttcccgtcttgtccccgccccagtaggagatttcccgccccgtccctgatagggaatacgtagggatgaggattaaaatctttaacagggatggggacggggagagcactccccgctaatttcctgccccatgtgcatccctaccaatgatattaaacactaataaaagaaattctaaattattagcataaataaaattctattaccgtacattttaatatgtaatgtcaataaagatggtaaaatgatggagtttttataaaaataatgaatttttggtaaaagtttacaattttactatcacacgaattttttataaaacaataaaatagaataattaaaacatcaatagaacaactaaaaaataatcatgaaaacttaacacagtatatagtataaaacttacacggtatttttgaaaaaaattccgctccacaataaaaaataaaaaaattaaaaatttcaatatgtggtgtaaaaaattctaaaataattcatattataatatcaagactgagatctaaaaaataatttattgaatccatgagtacaaaataaaacatttctcttacctaatataataatgaccatgactaacaaaacaattttccatgaatttgacaactatatctatattctctaagttttcttccaacaaaaaatatatgttcagttttcctctgtgttgttctatagttgatttttagttgttttgcttcttttcatttttgatgtcttttcatgtatgttttcttattgtgccctagctctctacattttgatgcatttattatgttgtttcttttctcaaccaacttccatcctttttttttagtagttggtttaacctatgtaatttgaaaccaacatttgttaaacatacaaaataacattaaaaaaaccatgacagtgccaacattaatggttttaatatttttgcttcacctcggtagaattaatggttgtttctggctattctggtattactgtggcagttatgttcgtgagtgtggaagatgaaggacagtataaatggaatttttgtcgtgtggtaataaaattgtaaatatttacccaaatctaatattttataagttaccctaattattatctataaatctataaatggttaaatgggtactatataatattttgttgagatcaaactttaccacataattttattttattttcaaaattcccactctataaatcatttttcatttttgccctacatgctccttacgaataccatcatctctaacattgtggcccaatttaggattttgttggttcataaatcactacttattgtattccacaaaacctagacacattttgattgctcttccaatatttgcaagtgactaattttaatatggattcactacaaaaaatgttacttttagtcacaacaaaatttgtgactaaatgcagaggcgggaggggaaggggggggacatgtggggtcattttccctcctcaattttttatttatataaattttgtatataattttttaggtattttatattttgaccc

SEQ ID NO: 322311 - DNA, 1378 bp, Cannabis indica
cctatattgcttgcttgatctcaaagggtcgcgtcgaagctcacaactctttctagaaatgtctaggtaatataaaattcatatgtttgcgtttgacagcaataaagaactgcaccttcgattggctctctcgaaatcttctgtacttgatctttgtttttgtaaacatctaaggcaacttccaaatgatatttgtgagttagaatcattggaatacttagatatgtatggatgtgcatccatcgacatgtttcctaagcttccgaaaagtataaaaggattagatttgagtagaacatcgatacaacaagttgattcatcatcattcgactgtttaccttctctcgaaatcttatacatgagtgattgcaagaagcttgaaagtctcccaactattctttgtaagttgaagtctcttgtgtttcttagtcttaaaggttgctggcaattgaaaagctttccagaaatcttggagcctatggagaaactagagaaactttatttaaatagaactgggattgaagtgcttccatcgtcaatagagaatcttgttgtgcttagctatttagacttgagtgggtgtaaaaatctcaagtctattccaaccaccatctttaacatgcccaacatttatgatatctggattgatgaatatccaaaactccaaattctgccatatgatgattcttcaagtgaaaccacttctagtcaagtactactaacacatgatcaacaatatatgtgcaaaagtggttgttgttctaaagcaagtctaaatttgcaatatgatggtgttgatttcacctgttgtgagtgctttctattctacaccatacataacattttggctacccaatatttcatggataacattttccatgttgaatatagtcatggaaacgaaaaggtatataatatctctcttacttatattacttaataaaatacatttaatagttttttttttcaccattaatatttacttacacaaatcaaatgacttttgtttttcatttattattgtagggtttgattgaagctattagaacaagttttcgttatgcaggagatgcaattactcaatggtttgcctatcaatctatgggatcatcacttcaactaaacttacctgttacctcttcggaagattacggcaacttcttaggctttgcgttatgcattgttgttgagtttgatcccaccattttgagaggtgatgaagatgtgttggacttaaaatgtgaatacaatctgaaaatcaagaatggtcagaattttcaattctcttcaattctacaaagccaaaaagctgctcatcattttgatgatgatgattctaatttagactcgtcctcaaatcatcaagtgttcgtatggt

SEQ ID NO: 322312 - DNA, 2022 bp, Cannabis indica
tacttatgccgctatttacccagaaaaaattatttatcatgagaatcggctaagtagtacgctgtttttcttcaacgtaagagcatctctaacttatactttaaatttagtgtcacactaatgctaaatttagtgtcaaaaattatttccactcgaatcaaaatatcaaaatttgaattttaatgtgtgtttaaatttataattatatttttatttgtaatatttttttaaaacaaaatatatacaaaaatgttataatttttttacttaaatcctaaatgaaaataataataatgtatggtattcacatttaaatttacacattacattaaagagtgcttatacaatgcactcctctaaaatgggtgcattggtgcatctttatctatttcagcatatagaatttttttttagtataatttctttttatagtcatgtatgtaatagctgttgaagatattttataaattttgagaaatttagaataatttataatatagaatgcaatattcaaacaatctatttcacatgtgtataaaacatgcatgcaacagacagtgtgaacctaatttgagatgtcttaaatttttttgaatttctcaaaattttgcttgatgtcttaaataactataatgtacacgaccataaaaaaaattagactgaataaatttctcgaatgctgaaacaaatagagatacataagtgcaccacttttagagaattgcattgtagaactcactaaattaaattttttattttataaatacaattaatataaaaacaacaaataataatataattaaaaatgcattggcgttgctctaagaacaaagatccacacaaaattaatgattttttatctcactactacttgtacaacaaataatcaatctatagatggcttacaagatttttgacagatcaccacacgggtaatttttttaaattttattattaaaactaatagcaatgattaattcttcattctaatttcattttgtacgtagaccctaacacatgtccacgggcatgcatcattgcatcatggtgggaatcaagtttaaaaagtagtgtaaaaagtagaacgtttagataaaagtgtgctagtttttctttgggctggcgatcgaaaatctggataataatgcgcgtgaaggtcggcttttgtagctgatcatctcaacatggaatcataagtgtaattttgactttggaaatggaaagaataatggaatttacatatcgctctcttgtcggtcagaaatcgatgcatgtggtgtgggcgcgcgctttgccatgtacaaaattgcggcaccttacctctatttactccacctatattttatacatcacgttacgtatttaaacttttatttgaaatttttatttaacaccaaaaaacttttattcgaaattaatgttctacaaatatctaattatagcatggagagtggtcaatccaatttttccccatattggtgggatttaaataatatattgtgaaactatatttttgattaaatttttaattagtattattatataaatactctaaattaatatgtaaataatgtctattttatataaaactagtaaataaaccgcgcttcacgtgcggttgtataatttttttaataatatgaataattattttactaaatttttattattttgctcttaataacacaaaatatattttgtaaaatcttaattattttaaatattttgaactcaataaataataatttttaataatttaatttaatatagaaatatcattaattaataacattcaacgatgttatcatcattgtattttgcttataattatcgttattctcacttgtaattgaaattattctcaaaattgttgtcatcactgttatacccgaaatttggctggaggacacgtgtcaaggtaaagggaatgtgaattggtgcaatatctatttatggaataactcattaattgttaggttttatgccctaaataaaactccatttcaatgtaatctattttat

SEQ ID NO: 322313 - DNA, 1228 bp, Cannabis indica
aaaaagcttgattatattatgcatcaaataaaccctaaaataatgatgatgacaaaatcatggtttaaccgaatcatcactaacccatctccaaaaatgctttttttacagacacagcttcatctgcaaccctagaatttttcacaatccttgtatttcaccgtcctcaaccgtgcaaaattcaccatcgggaagaccatcgacaaaagcttccaccgaatgcaattcataccgagcaggcaagcccaggtacgaaaccgaattccgttcctccaccgtcttccggtacgatccaggaacgattctcacagcagaagaaccattaacaaccgaaccaagctcttcttcaacagccctaaccacagccgattcaatatcctcaaacggcttcatcttctcagataacggtctttcacggcttctaacggtaccgtcagataactcttgatgagactcgatcaaaaccctacggtcgtcgtcgagaattcgaactgtgacgacttgaactgtacgaaccggaggagaggaatcggcgagagaggtttcgccttcggagagttcgagccagagattgtgaacgttcttcgttccgggcttaactccccatgaggcgaaggagtcggagggtaaccttggcttgagccattccgataaggacttagggtttgcgaagcgagcgacggttgttgcagcggtccggtggtttagggacatagttggaattttgagaaaacgacgagggcaaaatgggaaagataaaattgggggcaaaggttgttgttttgagtagagaaaacaaacggagatagctgtgagaaaaagatcgggtaaggttgggagtttgtgtgggaggttgaggtggcagtttctgattggttggtgagagtgcggaggtgacatgtcaaaatttaagtggtttaaataaagaggggttagttgttgtgggaagtaggggataggaggtgtaatggaggagggtgttaatggtcaatttctgtcagaagataagattgagagagagggagaagaagaaggagaggttttgagtgtgtgtttggatattgagattataatattctgtgtctggttactgtcaaaactctggaccacacaattttatgggctttcacatcatcaaatgtttgggcctaatgggcccaaaactaaaatatggtattttttttgggtaagttgaaaaatacctattttattcatcaattaatcaaat

SEQ ID NO: 322314 - DNA, 540 bp, Cannabis indica
acaaaatcatatccctatttatatatttatataaaagtgtaataatatttgcaactatttttataggaatttttcaacataaaaaggttcaatttaccaaattaatgagtttcagtagaaattaagaaaaacatttattcttgtatatatgtactttaaaaaaaataaaatcccacaccacaccaacctgatcgagaatggatcttttcgtttcatttccctgcttcccaagtaacccaaccaataatcagcaattaaactcatttaacaccaacatctctttcaccctaattgatgatcactcctacctacccaaacatagaattaatacacacaattcatttttaactatatattattactacaattgcctttcatgtccaacatctctatataagaaacttgataatattgctccaatacaaatcatcaaatattatcaagaaaacatcattctgttctacttaactagattgccatcttgcactactaaaaaaataaaacaagatgaacaaacaactcatcatttacttctcattc

SEQ ID NO: 322315 - DNA, 1626 bp, Cannabis indica
gactatactgcgccaacctgttaacccttctctggtgaaaattactaaaatgcccctggctctccaacgaggtcttaacacgtcataaatcttaaaaattcacctatattaaattatataataatataattcctcaataatacataattatctaattaaggtttcgctatccatttcataatcctagggtattacagggttcaagtcccggtatgtgttctggtctaagtttgggtcatgttactgtcccaagtctgggttctcattccagtcctggtccgattccgattttgggtccgggatagggtctggatcccagttcgggtccgagtctgggtacagatctgggtccgggtcttggattcaaacactgactacgggtcaggttaaagcctcaggtccagattgggatctcggtcttggatctcggtcttgttccagtttgggtcctgggtcccaagtctcgggccgagtcctaagtttgggtttgggtcgggttcggcttcatggttgtgtcttggtagtcatgtccagggtccaaggtccaggtcgggtcctgtgtctcgcgtcaggggtcgagtttttggtctcggtcccgatttcggggcctagttttgggtccaagtcctccatcttgttctggatccttggtccaagtttgggtccaggttcgagtttggagaccaggtcccccatctaggtcacggtttgggtctcaagtcccaagtccgagtcttgggtcccgtgtcccggtcctaacccgagttttagtcctagtcttgggtccctgatttctgtccgagtccaagtcccaggtctgggttcgagtcccaagttcgagtttcaatcctgtgtttgagtcaggctctaggttcaggtctgggtgtgggtctgggtttcggtccaggtcttggtctgggtcttggtctaggtctgggtttgggtctgggtccgggttttggtacgggtctaggttttggtccagatcccgggtcacgggtcatgggttggaggtcctggcgcaagtttgggttggggttcaagtgtgcgtcctagtaccatcccagtctgggtttgggtctgtgttcggttcctcgtctagatctagttctaggtccaggtcaaattccttttcaaaggtcctgattccggttcttgttccaatttcgagtcctgagtccgagtctaggtttttggtccctggtctaaaaatggtcccaagttcgtgggtccatgctccgggtgatgggtcagatccggatcccaatattgggtcccagcctcattctaattcggatcttgggtcccaggtcgtctccgtgtcaaggtccaggtctcgggatcgagaccagggttgggtcttgggtcctagtcccagtcttgggtcctgattcttgttctaatttcgggtttaggtccccaatctacgtcgaggacctgggtctaggtctgaatctccaatcccggtccgcgtcttgcatccaggtttgggtccaagtccgtgtctgggttctagttcgtgccctgagtcacgatcgaagttttatttgggtctgcttcctggtcttggtctgggtctgggtctgggtcctagtcagattccagttccaggactgagaccgagac

SEQ ID NO: 322316 - DNA, 1351 bp, Cannabis indica
atcgaaccctggcactatcatttttcatcataatttccgtacaagaatcttgctcttatcaaatacttgttccctttcccatctgctggtcttagggtgtagcaatttttgtggccttggggaaaacttctcagtgttgaaaattgctgctcgagagtgtcagaatggtgctcaagtgatatagtactgcttacaccaacttggttttctataaatcctaagtctgaaacatagattaagccggttgctttgtcggtgtatgtcgagttttctggtattccacaatctatactgatgaagcctaatgcaatctaaaattaaaaaaaaaacaaaacaagtggtgggatttttaaattaattgttgtttcctaatgtgcattatattttatgattcatacaattagaatatgatttagaaattatttcatatgtacatatgttacatgtaatgttacctgattgagtttgagcatgaacaagaactgtgagagctagaatactacaaatgtaaacaaagagaaaatgctttaacattatcgtcatatcatatatccagtggtatttctatctgtaagagtagaatgaaggcataattaacaattggcctctatatatggtaataatacaagttttgttaatgcttcaggagctgtactcctaaggttactgacttttttatttaaaaaagaaatggtctgtgcaagtatagtaaagcatttatatttatatatgtccacttgttcttgtaaatttagttatgaattgaacaaaaattcagccatgtgatcaaaatgaaccaatatgagtcaacaccaagcaattaagcaatcaagcaattaagcaattaggctaataattcaacaatttacgccacacaaaaaattgacttaggaattcgaaattaagagattatttaaaggcctctaaacgaaaaatgataacacttaaatgtgatatgttatgtgatatgttgatattagtgtaatttaatattgcatatatttttatttaataaataaaattaaaaactgttaagcactcccaacatatcgatgtgatgttagttactttaaagtacccaataataatacttcttagggcccgtttggttggaggtaatgaaagcaatggaataggaataggaataagaataggaatggtaatggaatggaataagaataggaataggattaggttgtttggttagatttatggaatcaataattgaatacaattcttatgtttggttgactatataatggaatggaatggaataaattaatttgaacaaaatactataattttaaacatgattaaaaataaattaaatatattcaacttgtatatatat

SEQ ID NO: 322317 - DNA, 1293 bp, Cannabis indica
ttgtctaagaattcatatttagatatactgttgtaagagatctaagaaaaggaactattctccttgttcttaagtcaatacaaataacgaggattgggctattaccaaactggtcggggctgaacctctataaaattcttgtgtctttattcgctttactatatttctttcgtattaaactacttgtcgcttacaaaattagactcactatcgttggctaaaagcgaggtcaacagtaggaatgtccatctagaatccacaatatcctggtagtttgaatttaaatgggaagaggtctaccaacggcaacaagcagggcaatggaaagaaaggtaaattcactggcaatgccgaccgcaccctagtgagaatacctctaaatttactgctttgtcagtcctaacagatgacatagagataatctatgcaacaattgagtccatatatattgtcgtacaagaaactgtctcccatgaaaaaggatgtaagtaagagagataaatccaagtttgatcactttcatgtggactacggccacgacacaaacgaatgtaataatttaaagcaagaaattgagtttttgctcagaaagaataagccgcatttatagaagtacgttaaggctgatcaaaatcataggaccgcctaaacaaacaaaaatcagaaccaactgatgaccccacaagtggatggccatttacaggtcattattgggggtccacatcttgttggagactcaagtaaagctcgagaaaagtatgcccaagccttacagtatgaacaaaataaggcaatcttggtcgtggaagagcggaaacctaaaataccacgtgcaggggagccaaccataagatttattgaagcagatgcccgccatgtcatcttcccacacaacgacactctagtcgtagaagtacaaattgtaaacaagatggtggtgcggactatgatagactagagcttcctcaaacattctgttcaagataacttatgagaagatgggactccaactaaaagacttgatcccctgcaccagctcgtatatggtttcttcggccaaagcgttgcacctctgtgacaaatatgcctaccccgcactgttggaaaagctctgaggagcattactgtaatggctcaattcttgataatttatgtcccatcagcttttgatttcatgttaggccgactgaccctatatgactggaaaagcagttacatcagttattttatgtgtgcttcaagttctcaataaaaagtggatgggatgtctcaaggaaaatcaaagaattgcac

SEQ ID NO: 322318 - DNA, 2276 bp, Cannabis indica
gaacaatacaaatactggaagacttatgggagcttatgtcatggactttgagggttcatggagcaaatacttgccattgatagaattttcctacaataatatttattaaagtacaataaggatggatccctatgaaatattgtacggtaggagtagttaggacgataatcactattgacctcggggccttctcttttccccctaggcctaatgtttcttgggtgatcattgtcctctcgtggttggtcgcggggctgccactccctttgttgggctgtccttccaccatttctaccacggtcaccattgttatttttagtgtttcccctacctctctgtcttagacgaacattatgggagtcatctcgtcccatatagtgaccgggtaggacttgttaatccgtagggagcggttaattgttgttgtggggaaccctattagaggggtgactcctattcctctcttagttacttgggcgttcttcaggcccgtagaccaccctttcccgtttgtttcttggggtatggacttcctgtggttaggttcggtggtcttgaggtatttgttggttttgggcgtcagtacccaacccttgactgttttggttgaaatagcttcgtattaattcggtagcttcttgagtgcgacgatcttgatcgtcttggcgcctcctcaattctcgagcatgatcttccaaccaaaattggaactctctcctttggttagttagactttcaattagggtcgctcaaatttgagtttgctcttggtgtacagtttagaactaaccttacatttgccctatcgcatttcatagttgatctatctctgggtcaatttcttcgatatccacatggggttcatcccgtggactaaagatgctagggccttgacctgtttgagtctagccatgtcgtaattaggtgggacaaagtttttggtattgcctcttctagtgcaccgttagtagcgccgcctccagtagtagttgcattggtggtacgcccagccgttgtctgcccaacaccgatagtttggccagtggtcccacgactagcagtagtttgggcagtatcgttagtggttgttgcaccaccattaccaggacgcgggggtctctctccattacttctggcaagatttctcgttgatggaacttgctgggcattatccatctcctcatctggttgttcttgaggtcttttggtcaacaccattttttctagtaaaaacttcaaaattttggttaaagctctcaatgaaagcaccaaaatattgactaaatttttagccaaccaacgcggagtcgtaataaatgagagttaaatcaaaatcataacaatgaatatgagtattgataccaaaattcacaataaatgtaaagaaagacaccagaatttaaagaggttcgaccccaaatatttgtaatagcctactccccttgtcttttattaaatagagttgcaaaagtcaagaacaggctcttgaatgtaaagaatgaaagagtgtttttttctctaagtgctcaaaattgcggatccctttcccaggtcatgggtgacgccttatataagggaaaaggttagtgtttctcgcttcaggagacgtgaccaacgcgaagctatctcaattgtctccttggtttttggaggtggttgaagtttgatttttgtgataatatcatgctatttttgtgggttggcaactgtccttgaatttcttgtggaattttaatatttgaactagccactgacgatgagggtctcccaagggtgtggcatggtcgttaaccaccttcgaggatagaagataatagctgggggtgacacccctgagacctgacatgagaagggtgttaattgtcatcttgggataatcccccgagacctcttagacgttgtaagtagtcatagtgtcatgaggatgtactcatctacctttgagaatgtcattatgtctatggtgggggtagtgttatctaccccctagactaatttgacctgtgggtgtgtgatgattgtttatcccacttatgaaagtgttagtccatcacttttcttccttaaaggcacccaccttgctcaagctaggggtaaaggtgaccgtcaaacatcctttccaacggttatgaccacccatcatgattaacggtcaccctggtcatgactttacatattctttattaattcagtcccggtattttcatgccacgtgttgttactcttgacaagtcattatcattaaaatttgggtaaataattccaatttgtagaaa

SEQ ID NO: 322319 - DNA, 506 bp, Cannabis indica
gatccagatcttctattttctttttgttctcttctgtcaaaatcaccatcagctagtgactagctcttctgtttttaagttccaccctgtagcattctcgggctaataactagtcgtctctaatagttcctactcaagagtgtgtagggaattttaaggacaaatgcttgatcgagcttattgcccccaatccaattaaagctggacaacccatcgacacattatagatataggggatgtcgataactaagaactcttgcatttaggtcacgaacaattaatggtggtccccccatggttaagggaagttaatttatgcccaaacttgcaacactgtcgcctgtgaacccacacaagtttaccatgcagggtcttaattttgcttcttctaatcccatcttctttaatgtttccttataaagcaagttgatagagtttccattatccacgagaaccctctttactaggggtgttcatcaaactgctcaaactgcctgcaccgcacc

SEQ ID NO: 322320 - DNA, 873 bp, Cannabis indica
caatacctgcatatatttaaactatagctgaggatatatgtagatatgtgaaaataaggacacgaaaaaattggaaattttctcccaaaaaaatacaaataaaaagagagaaagaagatcgaagagcatagtatgtaaagtcatcagtatattcccttaaacaaataacagaaaggtaaatagtatatatttttgttggttttcgcctattgttatttgtcttcttgttgggattttatttttaaattttaaggcctggtatttgatttgaaagatcattattcccaataatctttataaaaaattatttgagttttagcatgattcgagcttgggtttggttgaaaagacatttagataatcattctattaatttaaattaattgtaggtaatgccttttgtacacatttttctttgtctttaatcaatggactatgtaaatgtattgtcggtcaagtaaagtaccagtcaaattcgcttaatccactttattaattaataacatatggttttggccttccaattaataattatgatgttaattaagatcttattttatttatcatgaatttttattcttcaacatggaatgttattaaaagttatgaaaagggttaataaaagagcaagactagagagtactaccggagtgacttagctggaaatatatatgtctcattttcgacactggtagtaatgttcaaatttatagaatgaatatttttttcttctcaaaatatattaaatatatatttttaatgtatattactttactattaaaaaaaaatgtaatattacccttaaaatatattaggctatttcattatgtttaagtcggtccatgtggccatgtgtacaatgaatgttatcat

SEQ ID NO: 322321 - DNA, 784 bp, Cannabis indica
ggattgcatgactaatgttgggatttggcgctgataccaatttggcaaggatcatcggacactacatgccatctccactaggtatgatattgttcgctttgggcaagccctcacggttttatttttgggcaccttcccaaaaggcctcataccaatagagatatgtacatccttatatacccatgatccttcccatttttagccaatatgtgaaaatttatttgcattcctaacatgagtgtcttaagttattgggagtgtttgaaaattatttttaagattctgagattttaaaagcacttttactggctggttaggtaacaaattagtttagttcttagctctaaaaattttgttagtcaattttagtaactttttcaggaaaacttcttgagaaactaaaaataaaaagaagaaacgtagccaaacatgattttagtttttttgaaagctacttctaggtttccgaaagctccaataatacttttactaataattgatcagtaactttcacctttaagctcctaaacagctcttttaattaatagaaacaaactttagtaactttttcagaaagagtttcttaagaagctaaaatcagtattagaaatacaaccaaacagaggttggttggtcggactttgaaagctgtttgggcgtctaaatttcttttagctttaaaatattctattacaagagaagtcaattttagtaattttctcaaaaatatagcttctcaaatgtaacatcctgcttcaagcttctattgggtccttacactcac

SEQ ID NO: 322322 - DNA, 827 bp, Cannabis indica
ttttaattaatcacgattttcattaacctagttgattagcaacgagctgcacagtacgtttaaaatcacgtcaacatgcctatgctagttagggtgttacaacttagcagatgtcttaactaagcaacttttccccacttaattccacagcattatatccaagatgagtgtcaaagatttttacacaccaccttgaaggggcctattagagttactcttagtttaggtttctattatgttagttcaacttaagtcggttagttagttgtaactaacctcatgtacctaacactctatatagctcttgtaccattattttattggaatcaatcaatataattttcaatctctgtatttactctggtttgctttcttgcttactaatattgtaacatattatactcttaacaatagtttagtttttaagaatttaataaatattcattttatttttataattttttagtataacgtaatgatattatttatttataataacttagggatattgggtttgaacccatgttttttctctttttcccacttctaccttaccactgagctagcttcagtggctttattcatttttgtttttgctattacagtaaaatatttacttaagaatactttatccaagaataatttttagtttatcataaaaatttaagttttaatttaaaacggttataaataagaataatttttaaattataatttattatatagtttaaatcttatatgaaagtgtaaatctatacaagaataattacatgtctattctatataaaatgtggctatacaacacaattcttggtttatgagaaatt

SEQ ID NO: 322323 - DNA, 836 bp, Cannabis indica
ttcagctttatctgtgggattaatagttcgattggaaatttgaaataacattcaattattgggattagagaataattgttgagagtggagattaacctttaactatttcttgaatatcatagtattgcatttttatcttctaatttattttatttaattctcataattaaaaactccctttctaattctatgactgattattgaataaatttataagcataatacttatgggatcgatccttacttacttttatattggaataattaaaagtattagaatcaaaataatagtaaattttatacggcatacgacacacatcaattgataatacgtataagtctcttgtgtcaaattttcatattctacactattaattctactctgttactgcaaatctgtgttctgcaggaacaagttttcattctattactatagatcgtaacaattgtgtttttaattactgaaatttaattaatatattggcatttacaaaatcacggttttacacatttcctaattgacaaacatggagttaggattgtaaatgaatctggtcagatctgatccgactatgatccaacctgatctagatcatgtaatgattcaccccgcctgcctcgctaaatcagatactcagattggatctaatccgacctgacctttttctttttcttctttttttatatctaaacttataattatatattcagttaattttttattagtattatttaataaaagactatgtttggtattgacttgtattaatatattgtgtaaagttataatatatttttaataaactcgatcccaacaccaactacgggtcgagtcc

SEQ ID NO: 322324 - DNA, 1715 bp, Cannabis indica
gtatcatattttgattcaaataattatttgtaattttgatatgagcatcgatttcatgcttaagtatattttgaaattgtcatatatggagaaagtttggtaaataggtttttgtcctatagaataatatttattagggataagatgttagttgcaattctgttaagacaagttgtaggttgttacaacttgtccactaggctttcttgatcatgtttagtcttcttgattaagactaatcctactgctataaatagcttgttgtatcttttactcattaattgaaataatagagatatagaacagaggatttactctactctcttcttccttcttcttaaagttcttcatttctcatatggtatcagtagacaaccttgaccatccttcaatggcgaggccctccacacgctcccaggatggtgttcctccacctgcaactgagcaaactcaatcggcttctaatcccaattcaaattccgcaccagtcgccaatgttcccatggctcctcaacgtattccaccttccagatctagatccagatcacagaatgaggaagaaactcttgaaccagttcattcttcccctgttcctcaagacgacaacatctctcaacctgttcgacgatcccttcaagatcgattagctcacgaagatgttgccagtccttttttctcagcacagccgaccacccagggctagttcttgtctccaccattctcaatggcgccaattaccagtcatggaaaaggggcataacaatggcattaacagccaagaacaagtctgcctttattgacggcactcttcctcgacctacacctggtaaccatctccttaactcttggaatcgttgtaataacatggtaatgtcttggctcataaactatgtatctcctgaaatagcacagagtatcatgtatttcgatcttgatacagaaatatggcatgatcttcaagaaaggttcaatgagggtaatggccctagaatctttcagctgcaaacacaactcacccgtttgcagcaaggtgatcaatccgtcaccacatatttcacaaggctcaaatcaatttgggacgagctaaaagaatttcaacctaatgccacctgctcttgtggtgccatgaagttgtttcttgattactataaccaaaaccaggtcctacaattcctaaccggcctcaatgagtcttatgcctctgttagggctcaaatccttctcaatgaacccatccccaacctctctatggtattctccatgatagtccaagaagaaaggcaaaggactctaggtttatctaatgtttcctctcttgcctcctcggttagaccctcttcttccactaatccatctcgagccaagaaacctcagccttcttgcactaactgtggaaaaccagagcattatgtggacaaatgctattttcttcatggatttccaccagggtatggagacaaaaagaagaatgataaaggcaagggtactgccaacaatgtggctgcaacttccaaaccagatgttgccccaaatcaccctcaaactgatctttccagccaatgccagcagctgatttctcttctcagctagcagctcagccacggttccactcgagaggaaccaaacaacactgcagcagcatctaacatggctggtaacaaatctttaatttaaaaaattatcttggatagttgatagtggagccacacatcaca

SEQ ID NO: 322325 - DNA, 638 bp, Cannabis indica
atttaaaaataaaaatattattaattttgaaattatttttatattttcaatataacaatattagatttacctatataaatttgacatatatacaaaaatgtatgtataaacattctatattgacaattaattttaaaaaaaaatgacactttaaagtgataattgagagaatttaaccgtaaaaaacactattaattaacaattcattatattaaccataattaagttttgcgtacaaaccaaataatcgggctactaaattttgttagttgtcagtgacaaaacaaatttaataagattatggacaacaatattaaccgttttaaagttataagagaaactcagattacatatttctcaaagagagtcaaattacaataaatgtctcaaaaaattaaacctaaagacaaatgcaataaacgttaattgttgttaattatactcaccacgctcaatctcaaactaaatattatccaaaccgaacaaaaccacattaattaagacattggattcaccttagattttcttttctctcaaccaaccatatggtaaaagtcatccacatgcacaattagtaaaattttattttattatcttcgagtatcaacttttggtcatcaatcattatcctaaaatat

SEQ ID NO: 322326 - DNA, 1426 bp, Cannabis indica
aatgcgatgaataacggtatttgtttagttaattatttttttttttttgtttaaattaaactatttgtttagttaaaattttgttgatatttgtttttgacaaattttcattatcaatttttttagttataataatattccatttattatttttttttttttggtttgaaacattgtgaaatttatcactatgtaggttctaatataatgatcacaatgataaaaagtaacatgatgggcatgctaatttttttttcgttaatattttaagttatcatatttaccttttcttatttatctataaataggtatgaaataagtgaaaaggacaaataagcccttccaatttggtgggtgctaaaaggcaattacgtggcatgaaaagcaacaaaagttagggttaatttgggaaattaaatcctcaataggaaaagtccttggttgggtgcctatatctatatagttttgatgaacaaacttaaatcagtttgactttcttgagccttttcctttaaataaataaataaaaaatttaatccatttttattttaaaattatttaatgattgagtaattactaattaaacttaattattttgacaaattcataacaatcaaatatgcaacgacaaaaaaaaaaaaaaactaatacacacaagattcaagaaagtctaacacatatatacttttttgttgagcatcttcgatatatcttaagtatactcttattaagttaaagttggtctcatattctcatgttgttgatccatgttcttaaatttaataatgttttattcgaaatattattaaaaaataaaaataataattcacaataattgaaccaattaaatgaatttatttcgtaaatgtgtaatgtaatcatccaaattattttgtatttattaataaatgtgtaatgtataaacaagtaaacaaattgttttggaaatatttattcgagtttttttatatttatactttaaattagtttttttttacttttactaaaatgtgcattgtaatttatatagtaactaatagaacaactaaaatttatatagcaatttatataaaaactaccaaactaactatcgaaataattcaaactgtaaattaaaataagttaaaaaaaaataatatatatataataatttcctttatttattttttatttgtttagggaaggtttttgaaaaaattaatgtgtataaaaatacaaaagtgtgtatataaatagcattatttcaaaaattaattatttgccacaaaagtattaatagcggctagttattttatgactatgttttgttttgtatgtataatccaacttctaaaatacacatatgatatgtatatgaactatgtatagtaaaaatacaatgtgcacaataattttttcttcttttgaaatttgtgcacaataattt

SEQ ID NO: 322327 - DNA, 1489 bp, Cannabis indica
tggagatttatatgaattcagattatgttaattatgctatttatgtgaattactcatttttctataaatgtgttcagtagcagtggaacgtgatgttgggccatattagagtcatgtgtttcatggttaggttttcgaagtatcgggaattgacggggtttggtaatgaccaaactacccttaaatttcattaaacttttggttttggtcaaaagagtaaaatgtcatatttttcccttaattcctattttgtcatcttgtggacaataggatctgatttcttttatttattttaaataaaaaatagtatttgattttttatgaaacacctagaaacttaggaaaacccattttttgtcttcatcaagctctctctttcccttactctcgaaccaactagagaccagttggggttttgattttcttagatcaactcggcaagatctagtggacttgtgagattcaagctaaggtataccatcctaatctcttcctccttggatttctttaagttatgttagctttaatgcaagaattgggggaaaatggtactgtgatgttgaacttgtttaattttgagttttagagttagtctaggtttatgagagttatttttagctgaattggaggggtttagggtgatttgagcaaagatggggtttggaaacccaagcttagtgctctaatggtgttttaatattttgagtttgttgttgagttttgttgcttgaattggcttaattatggtatctataggtaatctggagattttagtagagtttgggattgttttgtggtgttggggacatttttgatggttcctacacttaaccagttgaccagttcaaggggacctaccggttgtttccaaggaaaccccatcaaactggaattctagttggggaacgggtctactggttgggacaattttataaaccctagttttcccatttttatgatatttaggttattgtaatgttattcattgatagggctatttctagttttgattttaagtccctgaaaagtgttttagcatgtcttttattggaattttaaatattgtggtttagggccttataaagcatcgagttacagttccactcatgctgactggcacacctgagcaaggaaacgaggtaagatagcataaaatatatatatacatatatatatatatgtgtgtgtgtgtgtgtgaatgtatgtatgttattatttgtttacactactagtgctgttaaagatgtagttataagggtgagtacagtgtaaagtcttagggtagttacagtgttaccaacacgagtaccagggggtacgaagtgcaggtgatacaacactcagtaactccaggaagtacaataatggtcgtaccaacatgagtacggagtcagtactctagtgcatatggtacaatggtcgtacttctgttgagaacgttcttaaccattgggtgagcttagaaattgggctcaggacgacttaagca

SEQ ID NO: 322328 - DNA, 1271 bp, Cannabis indica
tcttataaattaccattctctaactccacaacaacctatcacacaccacttgagttactacactcatacttatggggccctgctccaataaactcatctaatggctataggtactatataagctttgtagatacttactctaggtatacctggttatacctacttagaactaaggatgaagccctacaaacctttaccaagtttaaaactcagattgaattgtaactaggttacaaaatcaaagccctacaatctgattggggaggtgaattaagatccttccctaatatgttagagagttgtggcattgtgcacaaactgacctgcccccatacacatcagcaaaatggcactatagagaggaaacacaaacacatagttgaaacaggcctaactatattagctcatgcatctacgccactaaaattttgggatgaagcctatagaacagttacctatctaatcaataggatgccgaccttcactctacatggcttaactccccttaagatgctctttcacacaaaaccagattacatccaattaaaagtctttggatgcttgtgttatccaaatttgagaccctacaatagacataaactccaatacaggtcaaccctaggtgtgtttataggctacatcatgtcacacaaaggttttaaatgtctttccaaagacaaaaggatgtacatctctcgagatgttggatttgatgaactgcattttccatatgcaacttctgctatacaacaatctcttagcaaacatcctaccatgtcaccagcctcttcaattccaaccttgtcagctttgtttcctgctcttgtccccaacattccaacaaatgtgcccttgtctccccaaaatatcactccatctcaaccaaattcaccattaccaattcctgatccaacttctgttatcaactctcctaccattcctcctactattcacacctcaactcttattgaagttcccattcaatatgaaaatccacaaactacttccctgccagtcaccaatgctcctattggtcatacaccagatgttactaacagtttacttgcagatactgctgttcatacaacaccacttatatctagacatcctatgacaacaagactgaaagctggtataaggaaaccagcctatggcctaaagactgtaaagactgatcttcaggagccacattggtgttcggttttatgccctaaataaaactccatttcaatgtaatctatttaattcaacatcaataaagaaacaaaagt

SEQ ID NO: 322329 - DNA, 927 bp, Cannabis indica
atgtgtcgtttttttgaatctgtaataaagaagatttttttcttttttcttttttcttttttttttccatggttatgactattgatggtgtcataaaactattgatggtgtcgttttttttccatggttatgaatctgtaataaaactattgatggtgtcgtttttgagcctgtaataaagaaaagtctcattttaataaaaaccattaaatgggagaagtctaatttatgatgagaatttcaatgggggctccttcgttaagattattttgaataagtatagttgaaccattatgctgtattaaatgttatcatgtaacatcatattgtaaaacggctatttatagcgatatgaggcatttaatatattggataagttagtaaacaaataaacattgtagctggagttgttaaataattgtggaataatacttaatactaaattcatgagtacgtatagctatataatataaatgtttttaattacatagcaactgacatgagaagtgatttgtcagtaactattattaaataaaaagctaacaattattgaagttttataatgaagactcaagagtgatcctgctacggctggacctggagtggactagtaggaaattatcttttaagactgtagttccaatctccaactactactttatatttagatttatattctagtttactccctagtctttaaagcccgataacagccaacacgtctagtttgctcttacgctttgagctttaaatgtcttatccaattgggattgggttcagcctaagagagcccaaacagaaatgatccaatccggacattggaaaaactagataattcataaaaaaagtaaagttcaaaaatgtctcttttattaatcaattaaccaaatttgcttctaattttatatttatttgaaacatacctct

SEQ ID NO: 322330 - DNA, 580 bp, Cannabis indica
cagggtgatcaaataagaaaacagattaaagttagaatagataacaatcatcgattccatctcaaaattaattagtaatgagtggagtaattcatattcttgactctctgtttacatttaatccatgcccaatatctcctctcaagatggtaagggatcgaatatgtttggatgtaatgctagttagggatatgactcttgataccatgacacgaatcatggagttttatctcaaagctaattggtaatgagcggagtaacttatattcttgtaaatggttcaatatttttacatttaatctatgtgagataatattgacttaatgtgattggtaactgcgaatttgttatccttgcataacttgttgtagggtggaaatattgtggagtcaagcaagaagcaagacatgacaagccatattagaaacgagaacaaattagaatagataacattgagatatcgaagcagcagcagcagtacaatcttcctccacttgttagtgctgtgaagaaaaaaagctcaaaaaatgctgcaactttccactttcccggtcacaacagaggtcgtggcgccccattt

SEQ ID NO: 322331 - DNA, 817 bp, Cannabis indica
accaaccggttcatttccgggtccataaccggttctgacggcgacagccagagactcatcgaaggagacggggtcgaagaagtgcaggatgaaagagacgacgtcaccgccgcagaagacgggttcatccacggcggaaccacagccgggacggtagaattcaccgacccgagtgacaaaaccggatccgggtcggtcacaaccatggtgagaattaatgaaagctgggttgactgcgaaaatctccagaatgtggtcgtactattattccagcgatcctactccagaattaccggaatatttatcttctgggcgtaactattggtactactgatcagcagcgagggagacgatttgttgttcttactcaactggtatgtgggtttgggccttttgggtgtttataagaagtggttttaggtggtaaaaaaaaagaacaagggagtgaatgtgcaatagttttgtttttaaggggtgtattatgtaaaattaacagggctagtgatgggattaatcactagttttgttttagttatagtgagagactgagcgttgaagagagtgagatatagaaggtagtggtccgtttggagtggcagagtgagtcagataaggggtggacaagactggacctttgagcctcttttccctctccttttattataatttagtggtattttttatttctgcccacttattattactgcatgtagccattgaaaggtaccgagtgaaaaaagaaaaggaaaaaataaaatattgtgtatagtcctgctaagggatttttcagtgagggaaaaagcatataatgggggaa

SEQ ID NO: 322332 - DNA, 757 bp, Cannabis indica
cctttattgacatatttgataaattaagcaaaaataatgtttgtggtatttttgaaattggctttaattgtttattatttatttttcgaaaatttagcttctctttcttgtgtgaaaaggcttttaaaatcaaacttcatactcttttgatttattgtgaattaaatatgagtttttcttttatagaatatttgatttatcctttactttttaaggaatttcttaatcatatttatttttttatctgatttctagaccaagaaaccgtatacagctatgggtattaatgtagtcaaagttgccttatttgtttatggaaactttgctaaaaaactgttcaagttcactgtacctgtttgaacggactaattgtctgtttaaacagattttaactttcctatttgggaagattttcatttaatgacttggtcctttcttggttgtttgaccacaacttagagggtttctaaactgtataaattcatccttagatagttggtattagttagctctcttgatgtatcaattctaaactgtatgaattcatccttagatagctggtattgaccactagtgttttctttgttctgtaaagaacttgagtccaacaagctcttattattttattattgtgttactctgtattgtttcttgttgaaaatgtgcacgttgaacaccttggatatagttaatcaagcttcagaagaagtcttgttcgtgagtcaccttccaagaggaaaagtgttggaaattattt

SEQ ID NO: 322333 - DNA, 701 bp, Cannabis indica
tatatatatatatataatttttccaaaaagaaaattgagttgtgtaactatttttgctgcttattcctcgacctttcgactttcttttattcccattaactaatatttctttatttaattaattaatgtgatcaataactaatttaaaatctgcatagggatcttaaatttacgcaattaatgttgtgtccaccttctttcttatcaattttagagattttttgtcagtattctgaatggaatctgtcgttattttcttatcacatgatccattttgtcttcttcattaaatatattatactattcgtgttagtagaatgaggatttatgaggatattaactttctttttttcagtctttatgatctttagactccctattaaataagtagtgtacagcttttataagaagacatagttaagaaagccagctgaataagatcacacatatatagatttataattttatatcacccaatatcaccaaagatccacatatcttctatattcagaatgcagttttcttgttttttttctgtttttgttagaatctaaaagtatatggttaaggtgtatattgttaagatgtatattttcattcattttatatatattataaggctaattagtaattttttaacctgaactttaatatatatcaaattatatcttttgaatttttttggccgttaaaaaattccc

SEQ ID NO: 322334 - DNA, 1178 bp, Cannabis indica
ttgttttgatgttattttcatattatttttatgtaattttcttgttgtttttgtgttattttcagaaaaccgtaaaaatataaaaaaaaattcattaaacctaaacatacaatttttttacaaaatatgatgtcttatgtaattatccccatctttttacatagagaagaaaagtattaattctctccacacttttatctgtttttcttaaaaaagctacacgataatagaacagtaaattataataatggaacatatgcaaacgtgcaattcgaaaaggaagttgttccttcttcagtgaatagtaaactaagtatcaataacctacctataaatatatatacatatattatataatatattcattacttgtatcaactgtatttttttttttttttttttgtaaagcattgtatcaactgattgaatcataattagcattgaaattgaccatttttgtcactccgcgcgcaaattacagcaagggaacgaagtacagcaactagcgcggtacgtacatatgtaaataattttctatattaataaatgacagattacattgtaatgtatctttttttttgaaagaaacattgtaatgtatctatgttgctcttaatattatttgttcacgtgttctcttttttacactgtttttttatctttcttcttttacacttcattattagagaacacagctttaaaaagtataaacaaccgaactaaaaactacacgttacaacaaatgctcttaggggtgcatatcaggtgagttttaacaggttttgagttttcaagttcggatttgtcaggtttgggttttggaatcatgagattgaacccgtccgtatggagaccagattcttcgagtttcgaatccaagtgggtttggtttgagttaggacaagttcgggtgggttggatcgagtttcgggttaggctagactttttttctttttaaatatatctctttaaaaaaaaaaaaacaaaataatacaattataaaataaattattattatatatacatattacataattaacacatttacaatttaacacgcttacaaattcacaatacatatatataatataattatataatatatatacatacaagaaatatcacttttgcctagcatatttttgtattggcaaaagttagtattgttctagtaaaat

SEQ ID NO: 322335 - DNA, 1449 bp, Cannabis indica
tatctcatatcgtagtatcacttaatttgttttttttatgttattttattctaatcttcaaaatctcctttttctaattcttgtcactaatttaaaaaaattaaataaacgtagtcctcgtgggatcgactcttacttacatttatactaaaataattgaaagtattggaatcaaaataataataaatttgataaggcatacgacatgcatcaaatttttggcaccgttgccgaggactattattttattttattattcatatttaatttttattttactaacttgtttttactttgacaatctcaggtgtacatgtctagtgcagaagataatcaagagagactatcaagggtaaaataatatcttgagtcatcgtttgcttcttgatcgacgaagactatcaccgacaacatattcttttaacctcttggtcctgtcaaagagcgactattaacaaatcctgagtctaattctaacgactcaattaattctcacaggatggctaaaaatcggacattgaaggagttggccgcaccaaatcttgaccaacaaccactatgcatccattatccacccttggatgtcaactttgaactaaaattaggcctcatccacttatttccctctttccatgggttgcccgatgaagatcccaacaagtatctaaaggagtttcatatcgtttgttgttgtatgaaacctccttcaattattgaagaacaaattaagttgtgggccttccctttctcattgaaggataaagctaaagagtggctggactatctcccacttggtacaattaaaacatggaatgacatgaaaactgtattcttggagcattactttccagcatctaaagtttgaagtatccgaaaagaaatatgtggcatcagacaagttttaggggagtccttgtatgaatattgggagcatttcaagaggttctgtgctagttcaccagatcagtgaaaaaaacataatccagtacttttatgaaggtctcttatgatttgataggagtatgatagatgcagccagtagaggagcattagttgataagactcctacaagagctagaagcttgatttcaaatatggctaccaactcacaacaatttagcatctactaagacgttatggcaccgaagaaagttgattaagtgagcactcccattgagaaccaacttggtcagcaaatagctcaattaacctctgtggtacaacaactcaccttaggtcaatcggtgtaaccatgtggaatattttaagttgtgggacatactactgatacttgtcctactttatttgaagggccattagaagatattaatgctattgggggttcccaggtcaaccaaggcagcagtataatccttattcaaacacatataatgagggatgacgagctcgaggcgtggattacatgttaggggattgtcacgatgtttt

SEQ ID NO: 322336 - DNA, 625 bp, Cannabis indica
agtcaaataaataatttgtaacaggtaaatgttacattttttttttcatttgtgtataaacctagtaacatgataggatccatccaaatcagtgtgtgcatgtgcttatatgtttactttggacttagatgcatatacgagcctatttaattttgaaaattaaaatgaattagattgctaaaataaaatagataatttacatgtatacacgtattttacaattaaattacacaaataacttattatagagtaccgtgatttaccgttaatttgatcatgagtttgtttttttcctttaatttttttgctgttgatttgactttactatagcatacacatacatgttgcatttctattaatttttatttcttttatctttcacttgtttctgtctctctctccatctttatcaatttctatttcttttctaactttaaaaataattttttattacatcattaatttcaaaaatattatcattgccatttacttttttaatatgattattttaagatgtagaaagtgtatatattttcacattttctaaaattaaagtcactatttagttacttactatatcaattatatacttatcagttacatttcaccaatttataattataaa

SEQ ID NO: 322337 - DNA, 938 bp, Cannabis indica
tattacttcgttcactagctcgatattgcataggtattgaaacactcataaataataataataataataataataacaacaataatttggagtggagattattcaagtaccatgtattcaatgagtttgttttaaatttacgaagacaactaaaaattgctcagtttgtccaaaaaaaaaattagcttaagttatcttttaaaacaaaatggtgaagttgacaaccagtttatcgttgagaaattaatggattaaattgaactagtcagtctgcaaccaaccgccatttgaaaatatatataaaataattaaatgtatttattatattgaaaaaaaaaaatcataagatttttttctaaatggaatttaagagaaattacacattgataagatttaatattatatgttatattttgtaccagtttaaattaactgaagaattgtcttctctatataagataactaactttaagttataattgttttgtagcaaaaatatataataagttataggtgataaaaaagaatgtataacaattcaaaaaaaaatgtgagttataattaatacaaatatttatacttgaaattaggaaaaggatagcttttttttcaataaaatgatattttgttctttcataaaaaaatcgaacttaataaaataacattttgtgatcgcgatttggaatataagtttagtcctggcttgtttttctttttttaatgaattggtgctttgcacctccattttaccaaaaaagaaaaaattagtaataaatctatttcaagaacaattatttggtttgttaaaaaacaaacacattttgggcttagtgatcaaagtattttgctctgcaaaacatgaaatttcattgtatactcattttactttacttattttaatttttatctttatttttatattatttaagatatatcca

SEQ ID NO: 322338 - DNA, 600 bp, Cannabis indica
aatttattttttaaaaaacaaaactaaattcaagactcggactcggattgagacctgcacccagacccgggacccagaccaggattggactcgcctgggacccaaactcggatccgaacctaagacatgggacccggacccaaacacccagacccgactgctcggacttggacccagggcccggacccttcacccgacatgagactcaggaccaaactcgaactcgggacccaagatcctaatctgagacccaggactcatatctagacccaaactcgggaccgaactcgaactcgggacccaagatcctaacttgggacccaggactcgggcccggaatcggacctagacacatacccgtatccagactcgggacccaagacccgaacctggaccagaagaattattgggtttgttgatctcttgtaatgtggttaattaatgaatactcactttcaccataaaataaataaataaaaataataacatataatattaataaaacattctgcaacatatatatataaatatatatatagggcaagactatggtaggacctaacaaaagttccctaccggtagggaactttttttaaccat

SEQ ID NO: 322339 - DNA, 1675 bp, Cannabis indica
ctttattagtactattttaagtaagattttaaagtgtttttagtgtgttttagtgtatttggtcattaagtaagtaaagtaaattaccacgttgttgttcctgattggtccagatccttaaatttttatttttttgtttaaaaattaatttaaatagctactaataaaaatggcatgtaaataataacgtgacacgtaacggtcaggtacttacagttaggactttattaatactaagtagatttttaaagtatttttagagtgttttagttgtgttttgtgccattttacgcttttggttattaatgttttcaagtttaatagtgaagaagaatagaataaatttgagaaaataaaatgtgcaaagaggatgaattaaataatgtcttatcgctagagcactaagagatcaattcgagaaaaattcaaaagatttgatgtgattggagctttcgaaattgaagatctgaataatttgtagtagcgccaccacatagaaattcaatgtcatggtgctaaaaggcaaaaatttagtagtaaggtcgtggttagaaggtttataggcgggcctcgacattgagattcaacgttaaggcaggggaattattaattacttactgcccaaaattgagctttaagcgccgcgacatgcccctgcagtgttgcagcgtgcctcctgtttttgaaaaattcctgggagcttttaatagacatgggtcgtgatatgctcttgcaatgttgcggcccgcttgctttaagtgactaattttagagttttaaccctattaaaaagctatataaagaactcttttaacactttcaaagcaacaatggagagaggcaaaaattggaagcgagaaagcggctttagagactttcatcaattatttttaaagagttctttctttttttctttgttttcttatatatgttctaatcaattgttgttggttatttacaatgaatatgagtagctagactttcaattaggattattaataaagattgtttgacacctttttagtttaatgtaatttaattcttgttccaggatctaattttgcttcagaaaaagcataaccttcacttggtgatctgatttgtatcatcagtagacgtttgctacactcatgggcggttaacattcgtattaggccctttgaatactcatctgggtatgagctaggcagacttctatatttgaactccttcggatccgggaaaggcatcacaccttcctcgttcggaaagctaaggcaaggccaaggggacatccatatatccttcagtctagacttgttcctagtttcatgaagcctcccgcaacaagattgtagtggggggttttaatcaaggaaattatgatataattctttttctttaaatgacatgtgtcacatgcttagaaacgcggataacacatatataactataaaacattaattaaattactaataataagctgctaatttccatgtcaaaatatgcgatcattatacgtgtgattatatgctcatccttagacactaggttaagtacatgagacttgaattttttttagaaatatttctaaagtttccttaagtatcaatgtgagagagaaaataacttttaagacaaaagaattttttgtctttggtctaaaaatttattaagagtagtttttttttttttt

SEQ ID NO: 322340 - DNA, 804 bp, Cannabis indica
aaaaacaaagaaagaaagcttttaattcaaattaatatataccttgtatagagtcacaatttcgtcatgagctttgtgcctcctgctaactttcgctaactttcctattctgaaaatcgatttccaccaaaaaaaaataatttcaaaatttccttcgtatatcaaaaaaatattatatatatttatatttaagaccaacatatatcagttacaaaaaaaaaaaaaaaataccaacacatatatttactgttccttcaaattcatattagaaacttgaaaaaaaaaggagcttatttattattttgtaaatagaaagcagaggaagagaagatgaattgcagcagagggaggcttcaatcgtataccctacggttgccagcaaattgtatcaataatattcaaatatcttcaaaaaaaaaaaattgcaagtgaggtctgagagaaaatcgtgagagaggtcgaggcattggtttttttttaatagttaatgcaatcataaaaatttacgctattggtgttggttctgatactctcttgtccatggctctccgtttcctgctcaggtcattaatctctaactcccttttttatgatttaattgtatttttttagttttttaattaataagatttgttttatttttattgggaaatttgatattatatgcttaaaattaatttatccactaaaaatatgctagcatattttgcatcatgcaaaatatactcacactatttttctatccaattttacccttaaacaaataaaaatcaaacatccatgtctctctctctttctctggcg

SEQ ID NO: 322341 - DNA, 1049 bp, Cannabis indica
taaaagaatgagtcgggccgggctgggccgggtacattcctacctagaacatggtccagtcggacctggacgctgaacccaaaccctagaccccgaacccagactcaggtttgggtttgggttcgaatttggggcccaagtcccagtttggatctgggtccgaagcatgttccaagtccgagatttgggtctggtgttcgaggttagggtcggggtctagggtcagggtcaaggtccgggtctggggtcggagccaaggtccaggtccgggttcggggggtttggggtctaggtttgggtttgggtccgagtccgagtccatagtcacgtatgggtccctgtccgaggtccagggctggggtcagcgccagggttgactctagaacctttgtaaatattataatacaagctaatacgaatcatttgttgtatattaatacacgacttacattatattaaaatttatgatcgtaataattaatacaatacaatattttatccaaacataatgttatttgctatttaatacaacatgactcttatacgacctactaaacgaacctttatagtacttacttttgtatctaacttattacttaagcttattcttttagtggaaagtattcaaattgttacagttacgccttataaatagctaaattattttttattttgcagcaaatatatgcatatgatgtttgtcaaacataataatttaaatatttttgttgccaaaaaaataatgtagacatttaagtgctacaaacataacaatttaaatatttttaccactaaaataataatttaaatacttgaatactagaaattagggctgaacatcggggcgggtttatcgggtttcgggttggcgggtttcgggttcaaaaaattaaaaccgaacccggacccgaatagggcacgggttggcgggttggcaggtcacaggttggcgggtttcggttggtcgggtttagcgggttggcgggttgacccggtcaactcagtcaactcggtcaactctttaaaaaattaatttttattcaaataat

SEQ ID NO: 322342 - DNA, 928 bp, Cannabis indica
tttttttgttattttataggttgttttatgaagggcctacatttacaaagaatatactgataagtttaattttgaatattatctgtttgatattgatttttagcaatttaaattggggtgctaggatgttgttactagccaaagggtaatacctttggctagttatacctaaaaattttgttggctttttggttctttagtaatattgagctagtgatatgggttgtgtgttatattctaagtttgtatattaattttattttgaagattgtcattctaacataactgtatttttttatatggtgttgtgacatttttcaatttcgctagctctggcaataactattaataatgagaaggtatttttcaatgcgatgggtgatgtttgaagacgttataactttattgtctaaatttctaagggcagttttgtctcatggggctcgcgataagaattttacagctcatggtttggcaaaatatgcccttcggttaggcgatgagctatcctggttcgaggaggttccactgcgagttgtgatttgctgcattgttaatcatgtatgactctgttcaacacatcaaaaaaatcatatgaaatttcacaatactcgttcttaaaatggatacacccatgaattattatctttttttgatatccgaaaaaaaatttagttaattttttctcatgatcatatacgttagaattatttaagacatcctgcaaaattttaagaaattcaaaaaatttaacacgccaaaaatagggttcaaacatagtactgcactcatggctatttttaaacaatgcttcttatattgtaaattattttgaatttttcaaaattttataagatatcttaaataattataatttacacgaaaataagaaaaaaaatgaactaaaaaattctttaaaatgtcaaaa

SEQ ID NO: 322343 - DNA, 974 bp, Cannabis indica
gatgttaatgaaacatacttggtagtaaatctagatcctggtaaaatatttccaacagctcgggcatcaagaaaacagctaaatggaattcagcagcactttttaaatatatgtgggctctagcaaataaggaggataatcttttggttaaatgggtacacacggtttatatcaaagaagaaaattggtaggattatcaagctcctagtcatggaagttggtattggaagaaaataatttcatccaagaaccaagtaaaaagcctcattgatgtacagcagttttctcaaaagagatacaaaatttcagcaggttacaacatgatatgtcccattcaaatagggtgacttggagcaatgaagtttggggaagttttaacacacccaaacatagctttatcatatggctggctgtgcaaaatcgtctcaaaaccaaagagagattgcagcgatttcaactgtttactaatcctatttacagtctctgtatgtcgtcgatcgagacaactgatcacctattttttaggtgttcctttaccttttactgcttacaacaggtaaaggaatggctttcatggggagcttgagctaagaccttgctcagttgctcaaacggatacacaaagcaaaaatcagcaggtttaagaagaacatgttggcaacagctgctacccatctggtatactcaatttggcatgttagaaatgaccgaatttgtaataatcatgtagaaaaaaaagatgtaattgtacaaagaattaaaaatagtgttaaacatagaatagaattattttagccaaaaaggattggtcaacaagatagagaatggcttcaatcattgtaaaaaagttgattatgaggtctttgacataaagatgttctttctttataattgatcgtaaaagttttgtgaattaataataaatttactgattttataaaaaaaaaaaatatgacaaaaaaaaaaaaaaacaa

SEQ ID NO: 322344 - DNA, 719 bp, Cannabis indica
atatgtgttgttatcattttaaagcattaattaataaattagataaaggaaaaggaaacccttcttccacacacacactttctcctctatttcccctatcactttcttcactaattaattattgagcattgctattagatactagtggtgactagtactttctcgacatatcacgttgcgattggctagcgatacttcctaaaaactattatattaaattatatgagatctaatatttagttagactaatagtgatattaacacataagagagtgctaagcaccactagtgttctttagcatttttcttaattatttcatattttgccaagtatatagaaaaaaaaaaaatccaaatatcataaaaacaagcgttagaattttttgataaaaaaagtgttagaatatattaaaagaataaagaacaaccttaacagaatttttttgttgataaaagaatttatactcttcctcaataattacctttttacttttttaaaaaaattaggataattgaagcaattgtttactatatttaggggtgtatataaattgatttgataatcaatgatctaattaaaattgatcaccgaacattaaatatccaattgtaatcaaattagattagatattatttttaaatatgcaattagattgcattgaatattagatggggtgtccaaaattaagtagaattatacatatatgaaaaaattataa

SEQ ID NO: 322345 - DNA, 541 bp, Cannabis indica
ataaataataataaaaatagaacgcaataatattatatagattgcattattattatatataatattgtataatgtattaaatatattaataattactgctcaacagaatgaaaggaattgaataattaatatgcaattaacctagctagctcctttttccagaaaggtcaaataaaatatatgaaaagagaaagtagaagaaaaataaatgaaaacaatatatgcatgaaaagatgattttgaagaagaaataaataaataaataaatgaaagaaagaagcacataattatgaggttgaggagttgttatggtttttgaatttgatggcaatgtgtgcctacccaagcgtgtgccaagcgtgtacttcaaaagtgaaagtatcaatatatatataaaggaatgcacaaacctgatgaggtggcgctctctaacatcattttaatctatatacttatttataatcactcaaacatattctatcttttttcatattttctttcttttttttaagtcaatgttaattaatatatcataaaaatc

SEQ ID NO: 322346 - DNA, 860 bp, Cannabis indica
tcattgtgactcattgcttcatggtgcaagtaagagaaataaagctaagttcggccatgaattagaagtctcccgcagtgtacatatcagacgtggtgtcttggcttttgggaagtaggatcgaccttttttctttcatgtgtgaaagtgtaactttatttttgtaataacagttttgcaacttgttataaagaaattttataaacaggggatccctatattttagtggtgtttcataaagaagtttattttaaatttaatcaaaagttttaattaaaccacacttttcataaactaaatgattagtaataataagtttgtaaaagcaaacacgtggcatccctgtgagtcagggtgttacaagaggtgtgtaaaaagtgaaaagaaagccttcgatatcaatttatactttaagaagaaatcagaccttttcaaaatcgatggccgggatctcctttacaaacgcatcatttgatccaatggttggggagttgaaagaactgaaaagcatttatttgccatgatttgccttgagtccaacaaacactaaagaagcttcttttcaaattatcctactgtcaattttacctttttctgacagatgcgccccaacacgcatgtaagaaattgaccagcgcatttaatatgctgcataattgccacgttggtaagccctaacgttccatctgcccttaataaattagagctcaccaaaaagatgcgtccacaacactaatagttagcacgtgtcaaaggtcaatttcatggaagagaccacaagctctccgaattcaaagagtcccagaagcttgggggtaaatgttatctgtgtttttgagcaggagacacgtggcataatt

SEQ ID NO: 322347 - DNA, 799 bp, Cannabis indica
acaagtggtatcagagccactttttgctaaattgattgaagatcagatgattttgtttataaagtttaggaatttcaaaattagggattatatcttgagtatcctaaattagtttttgagaatttacgataataatgttatgatcttgatccgattgaatttttttaagtggggatggaattctttttgattttcatatcaaagtatataatttagtattcatttttggcttcagcttcagactggtatttgtttgaacaaaccacataccttatcatagtatgccttattgatggattttatgtggcagttgatttttttttttatcttagataaaatgaatataaaacaagttatatatgaattttcttaccttggtaagtgcttttggtataaaagctcagcccagtataatttgttttgttgtattttttttttggtaagggtttcaggtccatttatgctgttagttgattggtatatttttttcaatttgaattcattttgaattgtatgctatttcattgttatatgttatagtatatatattaggatgcaggtttatatctaatattttgaataaattaattgaaacaatagatcgccaaagtgacctcttttatgtagattattttttttaaaatatcaagatggttgtgtgtttgtaattgatgcatatattgactaacccaaaggtaagtgaatattttgctatttcaaacatacctttggcaataaatatatgacaattataaggtattttgtgtgaacaatatgttagtccaaagattaatctatt

SEQ ID NO: 322348 - DNA, 834 bp, Cannabis indica
aatattgtgataagttgataatgtaggtatttgaataattaggagtatgtagaatttgatgtagcgtcctagaagtagaaatttcttagtagctaagaaatgataagataattattaataataaaatttttattaatattattattataatattaacttttaattaatatattagtattattaaagtttttactgtcgttataaaatctatttttagtgttttattttagtcaaatttttattattttcacagtttttaataattaattaatatattagtattaaactagttttataaaatcacacacgtgatgtttctatggattaggacgttacaccaaaggtatcaaatgctatttttttttcatgtttaaccctttcaaagattaaaggtccacaaccaaaggtccacgggcttccctctataacgcattcaatatccaccttatggtagaattgaaaaatataatggttcagactaagctctttaacgtaaacacccctacccagtttccaaagacaaaccatcttgttttgcatcgcttgaaaatcaatattgcatttcgtaacgaacattccaacaaggcaccatctatcatctatctctgataaatcttgatcctcatcatcatacaccagtcttcccattgaaatatcatctgtcataatatttctgtcaccttcttccatattgagagagctcgacaacccaccgaatcgaacaacaagcacactcacacatggacaagaaataggaacaactcaaatcatgtcaaaagacaagacttatataatgttaaactttgctaaaaaaattaaattaattaaataaat

SEQ ID NO: 322349 - DNA, 1027 bp, Cannabis indica
attatttttatattgttttcttttatttttatcatattttttaaagtctattatttttaaaatattttaccaattttatcctatcacttcaagatacttttcatgtgattttcttatatcaaggtattttgggtacaatatatgttttaattaaatataaattagaggtaaatttagttaattaataaataaaaaaatattttttaatttacaaattaaaaaatataaagcccaaatatttttatttactcacagtctctaaatagcttaaaaccgatcctattttaagtaaagtgatcgactcacttagacttaaatagcttccttcataattaatattaaatttaaataataaaaaaaattcagatattgatgctaaatagaaagtcttaattagtatattctgattttattataggtaaataaataaataataataataatgaaaattgagtaataatgtgtagaaagggcaagcatttataagccatggtagaccttatcctgtgatgcggcggcaaatgacatgtgtcggctgagggaagtgggtatatgacgtggcacccaaacaaaattctggtcagaacgcaaatacactatatataataataccaattaacgccattattttaacgccgttacttatgtttcaattctctttcttaccattttccttatcattcgttacgccgttacgtggattccatccattggcacacgctgtacgttttttttttttttgtctctctctcgccactgtcttatcttatctcgcataaagtttcaccattcatatttcatattctttttcttttttaattaattaataataaaaaacattattttttaactgtcactatagatcagaattaatttacttaaagacaatgagatgagatgaggtaaattgaagaattactatataataaaatatgttaaaaagaaattcattgaatgggattgaaaaatatatataaaactaggtgattgttacgtgccaaaccacgtagtgttagttttatttaat

SEQ ID NO: 322350 - DNA, 1855 bp, Cannabis indica
attatttttcatttattacgttatatttgttcattaatttatataaagtaaacaaaataaatcattattattctatttccaaacaattttaataaacaacatattacaaatattgattcaaattatttttttatttattccgttatatttctccattaatttattgaatactatagaataaatgtgctacacataatttcctacctaatatatttaattttaaccattcaataaagtgatatatttctcgttaaaactatcaataatttttaataaaaatcatctttagttaaatttagtagtctttttttctttgtctggatagtttaatggatttctttccatgtgaaaaagagatgaaacacttacttaatgaaatattaatgtctttctttttttcaaatgataacatatttaattatttaattaataaaaaataataaaaaaaagatatttacgacaaaactacttaaattttatgattagtgacagttaaccacataaatcgattttttagtgataatttttagtgataaaactctccaattttcatttctgatagttatttacccctcccgtttaaaaggctttgtcaagtgccataatgaacataccacaacgtacacaagtgtacacgtgacaatttttagtgggagatattagcagcaaaattacctgaattgtataattagtgacacttagagcaagtccaaggagacactataacatcaatatggtgtaaattttttctccaaggtaacactaaatccttcaccaatttgctgtatatactacagtgcacggcatatatgccgtgcactgtagcgcacaccatcttcttctttttttttttttaattttttatttatattattatttaattttataaaattaaaaatttattttaagaaaattttacaataaaattcactttgtgcactgtatgtattcctgtttgtttcggaatctgaaatttttttatagtcgtgtacattatagttatttaagacattctgtaaaattttggaaaattaaaaaaaaattaacacgccggaaacaaggtttaaattctctgttgcacatatgactcttttatcttatacacatgtgaaatagattgtttgaatattgcattctatattatcaattattttaaatttctcaaaattttacagaatgttttaaacaactataacgtatacaactatgaaaagatgcttttaattgtggtgattttactaaattaatataatactaaaaataatattttattttatataaacattaatataataataagaaatatttttttagtgtaaattttggtgttacgttggagttgaaataatttttgacaccaaatttggtgatagtgtaacaccaaatttggtgcatacgttggagatgcacttaatcacataaactgatttttttgtggtaaaaccttccaaaactcacttttgtcagctatttactcattccattcaaaaggctctattaagtcctctacgagtggaacaaccagatctccccttccccccattccttcttcttcttctgcgacggacccaccaaaccacgacgaacccagggacaatcactaacgaacccagtgaacccctccaactgaggtggtatcggcgaagagttgcagaagaaggagaatcaaatccggcgaggttgaggcgagaaagagaaaacttcaaagaaaggttggatctcgggacttagagggaggctaaagggttgggtgtgtaaggttaggaacttaggaagtcggttttggggttcgtttgggttgaaggtggccgaaggtgacttgtagaagttgtgcgagaaggagaatggaagagag

SEQ ID NO: 322351 - DNA, 912 bp, Cannabis indica
attggttttttctgacagttttaaacagtcgggtaaagtatttccatcgatttcaataaacgtcgcatattcgactgtcgtaaaataggcaataagtgactgtttgaaattaccgccaatctaaacttcttgatagtttaaataagaaaaaatttaaattttgagactattattattattaatgaaatatgcaaaacattattagatatcatttaaaaatacattaattaaagtatgtagctacaattagcctgagaacttgaagttctagtgaaataataagcaacacgatttgtagaccgcttaataaagtataaaaaaaatatcatgtaaatccaaaacaatacaaaaatcaaaagaaaaagtaaaaaaaaaaaaaacacagagagagagagagaaattacaaatgcttgaacagtaaccaaactattagattcaactaccacatcatttgaaacaggtatataaatataataatatattgtaaaattttattatttaaattaataatattaataattggatatattaaaatttgtttgacaaaattgtaattaattactataacttacatttgaatgtaaattttccagaatatctttgttatagcacaaatgcacaagagcgacaatcatcgcaatagcctacagcaacaatgcataacaattttcctgtaatttcaaataattttatttttcagtactcattgtcatgataatttataatttcgaagactgaatttaaacatgcgtgttttcttatgttttattttatttttaatacggatataacaaattgttttgcgaactctaatttcagtatcctaaattatttttaatttataaaaaactttcacaagatttttttttttttttagaaaaggtctgttattataaatgcaaagagtttttt

SEQ ID NO: 322352 - DNA, 526 bp, Cannabis indica
aagggcaagtggtatttttgtaatattttcattttgggctgtacaaatgttgattgggccggcccacagtattgttgtaatattttaccatttttagaatattcctatttttttcccttaattatacatatacaatcttttaattaagtttgcaaataataattaagaacacaaattaatataaagaaactaaaatatttacttaattttcacataagtttcacgttgggcttgtgaggtggaacacatggtcacattaggttttcccaaaacaattatattattatatatcgaatatttttaatatatttttttttatttacatatattatagtgattcaaaggccaatacaacatgccaaatgtggtggtcacattcttaacgcatgccaagcaaaatttattcatcagaattaattaagaccttctccaaagtccaataatccatcatataaaataggagaattattccatatgttatttttttttttttttctaaatttacggtttggatttctaaagtggt

SEQ ID NO: 322353 - DNA, 1007 bp, Cannabis indica
gttatattttgacttgttttaatacaaaagtaacctattttttgttttgtcttttatcttgttttataaaataacttgttacctaaaatattaaatttggttgatgtgctacatttgtttacggttttaattcaaatataacctgcacacattaaaaagtaacatgttttctatatttttgctttttatcctcctttctaatgtaatatggtacatggtacattgtgcatttttcactatatttagagattgaatttcattaatggtgcttgcaacctaaatatgtgtaaaactttaccaaagaacaagacacataaatcaagaaaaacaaagaaagaaaatgattaatttaattttacttaaacatgtaacaaagataataacataaagtaacctagtacttaaattgacataatggtttttaaattgtatattttaacaattaagattatgttaattagcaattattcatgttgggtgccatcattttatcttttttttgttattaggtatatttttaaaaattatgtaataaaaattcgattaatatgtactggttggataaaatatttttattttactttgtcactatttgttcttatttgagagcatcatacacttatcatattagtcttattcttcctcaactattataaatattaattacagtcatatgaggaaattctttttaaaattaaaaataagaattaaaaaaaatcatcattacattcttttatagaatataatataaaaatattaatctatattcaaataaattaaaacatactttgtaatgattaagtaaaaaaaaccgtctacaaatattaatataatataaatatttttttgaaaaaaaaaataaaataaaaatgtagagtagaaataaataaaataattataataataaataatataaaagtatatacattaataatttactctaaaaatattacgaatctctaaatataagttaataaaataaagatatggctttatttaataaaaac

SEQ ID NO: 322354 - DNA, 901 bp, Cannabis indica
gtactcaattcggtaattatatttagtttcctaaaatatcatttacaagtagccaaatgttttaaagataaaatacatcgaaggataaaatagtaatttagtccctactcgatgtaaatcatttatagaggatcttcgattgtttagattgaaataatagataattcatagtgtatctattcttggtaatagagtgttctatgtaatgaagagtacattttcgaatctgtagtggagtcaggaggaattaatatataagatagagaattaaatcggtaaattctaaaactactttttgggatcttgattatacaagcccatagtccccaaactacctgagataatgttgtattgtatactcaactaattggtttttattaattaatttaaattctaagtaagactatgtcttaattatgagttccattaagcaagagcaaaattgagaagaaaataaaattaggatttatttattaattaagagattttagaaaagctaattaataaattagttaaatggtaattttatttgatagtttatcataattatcaaatagccaaaattaacatttaaaagcttaaaacttgaaaatagtattgttgagaaaagataagttttgacataaaatagcatttttgaaacccatggacttatggaattcagctatggtgttttattaaaggcaatttttttttagggtaaatgacggcaaaaccctcaatactttcgttttagtttcattaaacccccaaaacccaaatttctgcgggtaaacccccaaaactaggaaactgttagcaatttaccctttccgtccaaatttagctgttaagtgccatgttggcttgtccacgtggacacaatatacacgtggcaccattttattggtccacgtaaaaa

SEQ ID NO: 322355 - DNA, 789 bp, Cannabis indica
ttttgagccttatagtgaaagactacatgcccacccattgcaagtcaagtacttaatcatagtgtgcaagactatgaagaatccaacaaggaacaagggttagagatgtgagtggaaggaggcatattattccgttgaaatcaatgtaaggcttcttaactttataagtgtttaaattccattgttttagaagattcatatttaggatgttaaacaacatacatggtagtaaatctagatcctggtaaaataatccccaacacttggttctttcgcaccagccaccttcaatgctacagggcctttcttggctgaaggacatccaagcgtagatgcattgggcgtcttctgcatcggagaaggcctatttgctcaattttgtgtttttctagtaagatttaagggcactagagtctttagggtcacccactttagccttccccttgtcctgtacaggagcagaggctctagaatttgtggggttgtccttggtgtttcctctgacatattccactgaagggtcatcatcagaatcctcctcatctagatccccaaacttgctttgaaggcagtctagaactttttccattttttgatagaatttttcttggtgggctaactttgtttgatttcgaataactcttgggagattcttgtgactttagggtcatgctcataatagtaaccatctttgtaaaatccatcactgacggaatcgtcttctttgtctcttcctctttgtatgtctcaacattaacgtcatggccaacatggtcatgctggttgttc

SEQ ID NO: 322356 - DNA, 1568 bp, Cannabis indica
  modified_base (1327)..(1327): a, c, t, g, unknown or other
tgaaattatagtataataattaagtatgtatatatataatatatatttagagagagacgtacgtaaactatgcatgtgtatatatttaaatcatgtgtatatatttaaatcgtaggaaaaaaaacctaataatgcaattctttattactaaatagaaaaattagtatttttatcctttaaattttttatattatcaagttttacaccttgtagtatataattttataacagtatctttccaaatataacttctatagtaatataatctttttatcacattttatttaattttatgtgaaataagtgaagttataaatggcaattgataaatatataaatacaaattaaatatccttcactatttttacgtgaatgaatataatagaataaatattttattataataatatatattttatatttttaattttttaatcattaaattaaaacatggtacccaaaggtattacattcatttgtcaattatctacgatcaatccatcatgttactcgttcacgaaaatattataatatgataaaaaaatcatgtcattgtaaaagttaaatttcgaaaagtattatttaggaatcttatattatggggcacaacttaattttgtaaaacatttaagcctagacaaaatacaaataatttatgaacacttaaattacataattttataattaattttagtttttttgagtaaagtgcaccaccattggggatggtcaaataaatttttaattagataatttcttcacaaattttcttataaaaatttggtatttttcacgatatttttttattcatatatgtatggatttaactttaagaataaatgtaaataataagtgtaccaaacatactttttacaacaaatatttcaaaaaaactatcatttgttgcaaaaaaaatgtgtatatatttataatttaagaaaattctacaatttactgtgaaataggtgtactgatgcacttttatctattttgttaattaaaaaatatttagtccaattttttttataaccgtaagcattgtaattaattaagacgtcccgataaatttttaagtaattcagaaaaatttaacagtcgaaaaaaagattcaaagagactattttgcacgaatgatttttttttttattttatacacgtgtgaaatagacggtttgaatattgatttttatatagtaaattattctgaatttttcaaaattttataagatgtcttaataaatataacgtacacgactttaaaaaaatttagattaaaaaattcttatagatgtcgaaaatataattagttagggattgcatcacatanattattttttttgaaaaatattaaattaagtggaaatatttgttatatttttatttttttaaatatatataaaaatagttatatatatatatatttagttttaaaagaattgttatatatatatatatgacattaattatgagtatgatcgagaaatatatacgtgtcaatccacaatcatatcacgggactccaaaagtcaattatatactaataataatatatttattttgtcttatca

SEQ ID NO: 322357 - DNA, 840 bp, Cannabis indica
aatttaataaaataaatagttttattgtcaattcagtcaataatctgctttttacttccataaactatcgttcctcccacgatcatatttaccattttattgtgatggacaaacacaaaaagatctctcttctaccttacgatttttctcagagtaatttttttgaatgtaattgagcgctatcattcggtgcaaaacgattcgtatacagagctcgttttatcttgaggacgatgtggttgatagactgtcgtgcacacttcgagcagaatcgtaatacatcttaaaaagagcgatatagtccgaagctcaaccaaaaacatcattgagtaattcgttccagtttatttaattttcgaataacatatcttgaaataattttcatatagttacaaaagattcaacttaacttgggactagttttaaattggaataaactcctattataaaatattataaatatattactgaaaaaaatgaaaaatgaatttgtgtttaggttaggttaattctctcttctcatcactttctatagactttcagttagggttaggttagataaaatgaattgaaataaaagattttgggctgaaatcaactcttaggggcgaaatcacatgatgggctttagagttagatttttgccactttatttcaactaatgaaacaaaagcgtcttttctaattttaacacttttctcatctaattatttaaataccaattttattttagtaattataaataattatcaaataaaataaaatgtaaatatatttattaattgttaggttataattaacctatatttcgggtctttaaagttagcattatctcgtcta

SEQ ID NO: 322358 - DNA, 1166 bp, Cannabis indica
ataatatctttaccagatcaatatcggtcccagtccaatgtatacaccatacatccaaaactagcatattttgccaatgttctggaaagaacataacacttatccaaggtgtaagtacacttcctcgctgattatcacatcagtgtaaatccaatgcactgatgaatgagggactttgtcttttgaagcatataatcacaatcacattccactgtgttgaaataactgtaattgtgaatgactatatgttcacgactaaatagattttgtatatattaaaccataaacatgaaaactacatgtaaacataaatgacttctaatctttcattgataacaaataaaattagattgaagtgggttttatttagggcataaaatcccaatagttttggtctctgatttggggcccaatccccgggtttgggtccccagtctacgtttaggtcctacgtctcggttcgggtccaatttcgtgttttggttcgggttcaggtctcgagtcccagtttgagtccaggtccttatttgggtttgggtcccagtcctattataggtttcagttttgggtcccaggtccgagtttggttcttaggtcttgggtcgggccttggtttttcggtctggttctaagtctgggtctgggtcaaggtcccgatcttggttgaggtcccaagtcacaggtcctagtccgcgtccaagtcccagtatgggttctggtttgagtttgtgtttaggttcgggtcttgttactgtcctaggtcttgtatctagtccaatttcaattttgggtccgggatcgagtatggatcccggtcttggttcgggcccaggtttggatacggatctaggtccgggtcctggattcaaacactgacaatgggtcaagtcgaagcctcaggtccagatttagatctcggtcttgttctagttcaggtcacgggtcttgggccacgtcctaagtttgggtttgggtccgggttcggggttgtgtctcagtaggcatgtccttggttttgggtccagggtcgggtctcgtgtcttaagtctagggttaagttttgggtaacagtctgttttgggtccaagtcccccatcaaggtctggatccttagttcaggtctaggtctaggtctgggtttggggcccaagtcacccatctaggtc

SEQ ID NO: 322359 - DNA, 771 bp, Cannabis indica
gctttttcttgaacaagatacacagtaaattataaaatgaggcatatatatacatggtaagtttttttactttcaacataaaattgatatttatatattggacacgattttgttgtgttattgtacttttaaatattccgtgatgtattatagtcattagatggaagcattatttgagttaatttaaagataattagggttaaaaatgtaatgtactctgagactcattattacttgctctaaaacccgtttaatgtactccctagatcgtgtttatgtggaaatactaaatggaaggaggcaccactcttttacaaaggtgagccttgagttaatcaaagataaacaatgaaaacacgtgatgcgtgattcttgaatctgattgtttttgtgttgtgatggaaaattcttttcttatgatttttttatttgaacatattattaatgattgtaaaagtaatttgcttgcttattgaaaaatgtttctattgtcttttattacagagttagtagctcgagcttccagaattttcgtcaaaaaaaatataataagagccataaatacattatagaaattcatagagatgaaataattaatgctttcatttcttaacccagaaaaaatagccaaaaatttgcacgtcttcctacttctacctattaaaatacccagaaaaagttatattcaatcacaaataattccatattatattctttgaaatgagtatatatacagctaacattaaggtcataaaaaaaaaaaaaaaaacc

SEQ ID NO: 322360 - DNA, 1343 bp, Cannabis indica
gtgtggacaatctaagatgacacttaacaaaacattagtttgagaagttttacgttaaaatgtttattttggaggttagttgcaaatgttggaaaattttaaggagtttgaccataattcacttttattaaaagtaattattctaatttaaattttaaaattagattccctaattgatccagtttaattagcattcacctttcaaatttaatccaaaagaactctgtagctcatggttttgtcccatgtggcttgcgataatttatctagtttaattagcattcacatttcaaatttaatccaaaagaactctgtagctcatggttttgtcccatgtggcttgcgataaaaattttacagctcatagtttgacaaagcatgccctttgattagatgataagctatcttggttcaaggaagtgccactacttgtgaattgctgcatcattaatcatgtgtgattttgatcatgacgtaaaaaaaaaaaggtacatcctcattttctcacctcaaacaattatattgaaaattgacaaattttgaggtctaactctagaacctattgaatattatgtagtttacacacaagggcatgaacgttgactagtttttttcttttcaaaaacaacattttcaacccaacttggtgtgtttgaaatttgaattaattttcatatgtaatgtaatatgaaatttccatacttttgtcatatagagcacaattcttcatactatacatttattattgaacaaattataaattttatcggtttgtatgcagtatgaaaaatattttttttatttaaaaaaattatttgacgaacaaaaaatcaagaaaaaattataaaatatggaaaaattatgtaagagtaatcattaccttatactattattttcatattttttgaaagtttctcattttttttttcatatttttacgaagagtttttagcagctaagtcctcttttgatggtaaaaccttttaaactactggactgttaacaaatttagagtgttatctatttaccacaattaaatgctaacataaacgtactcttatacatatgacacaagtacacatgatattattatttaaaaattacaaaaactcttttacaaacttaacatttaccttaaaaactataaaaatgaaaaaagaaaagaaaagaagtggactagtcaagtctacgttaatgttggaggaaattacactctataccctttttatattatcttcttttttaaagtctatcatttttaccttatttattaaatattgtaccaattttgcccctgtcacttcaagatactctccacgtgactctcttatgtcagggtattt

SEQ ID NO: 322361 - DNA, 1468 bp, Cannabis indica
actcgccattctaggtcgaatactcgcacttgtcgcttccctgaaaattctcctttatattaattaaataatacattttggtgttgcgaaattcaatcgacaacagaaccaatttcaccaacctaatcatattcaaatctgcggaccaaggttgaccaataacaggcttcttatcaaattgaaacattccattctcaagaacctcatctctagttgcttcatcattgaacttaatcatagtgagccccttagtcattttagcaacttgaacaatgcctaagtgcccccaaattctacgaataaaaccttcaacgagcacagctggaatgtttgctcccaacaccatatgaataactgctgatttccagctttcctcttccaatttcacctcttccaaatctatgtgggctattttcctaccctccttaatcactggttacgtaaaggataattttgcatcagagtttagcaccttacctcctgaaaactgttgccaatggttctgcgatgctgattgtagattttcaacctcatcagcccaacttttcctttctgatggcagagactcctcttcttcccgaaccgtgctctggtctggatgcaaaggaaccatctgagattcctggctatcgagagatccagctacactctccaactccagttcccgacgctgctccggagaacctgcttcaatcgccaccttcaatcccggccgacgacctggttttttcttcctcgccatggggaacgagagaacctaggtcagaaggtcagaggcttttttcttctgaaggtttggaggtggctcaaattcactttcaatgttttcaagttgcttcttcatgccataatgataaaactgttggagattattttaccaggatctagatttactaccatgtatgttgtttaatatcctaaatatgaatttataaaataatagaatttaaacacatataaagttcaaaaaatcttacattggttgcagccgaattaaatgactccttccacttagatctctaacccttgtatcttttctgtagtagagtatcaccaagatttgagctcgattctcctttaattgattggattcttcacagtcttacaaactatgattgagtaccaacttgctatgtgtggacatgtactctatcactataaaggttcgaattttgaagagaaagagagaaagaaggattcaaaattagagagaagatagatggctcaaattttactggaaggcttaagtgcatcaactattatcatctttcaatttgagtccatcactatctatttataggaatccttctacatttaggtttaaattctttaacattaaaaatttgataaataaacggtaaaattaagcacaagtggccagccataggatgtgggcccaccacttgcaattttgccattttttcaactatttatcctattttttttacaaatgccatattttctaatt

SEQ ID NO: 322362 - DNA, 878 bp, Cannabis indica
atatcttgtaaggttttttgattaagattatcaccattatgtcgtaattaatttgtaaactaaataaaaatattaatgaaatgataatataaattattgaaagaaagtcctcaaaatttattaaagtaaaaaccaaaacaagagatttaaacttataagtgaaaatctttaagtgctttctaaattgagccaacaaaacttcacaaattagcctaataaaataacacaaattaaccaaaataatatggcacaaactcaaaaaatatatatatatatatatatatatatatatccaaaactagcccaaaagagtggtcagcaatatcttagttaagttagtataaatctttctaattaatctatctttataaatagtttagtgtatgtttgtgaaatgcaaaaggctaatatcatatcatattaacatattaaattttacacattttagtttaataaataatataataaattaccgacttataagatgttaccttttatataatgttggacattttgtaacattaactttataaaacacaatgtcaaatgttaccttttatatagtgttaagtttgtatgtgtaagtcacggtttggctaaacaagctttagtgatggattttgattctgtttggttaggggagatccctcctactatattttctgttattgtaaatgacactttgaattataatagcaaatcttattcttaaaaaaaaaagtttgtatgtgtaagttattacttataatttataagtatatacaaattatattttaggctaattagtaattttttctttcaaaactttaacatgtaccaaattatgtttcctgaactttttggccgttaaaaatttccgctgaactattgagattgtt

SEQ ID NO: 322363 - DNA, 778 bp, Cannabis indica
ttatgatgtcaaacatgcacttacattttcttgaactatttgcagttatgaaatatgtaatttttgttaagttgtatctcaagtgattaatataatattaataacatattagcagtgtaatataaattaaattatttattttttattaattaataaagaataaaaataaattaattttaaattttcttataaaaacttgttaagaaaaggaatcccttaaattttaaattatacatgttgctgttgcgtttatgtagcaatgacacaataatttaacagaaatcttatatagcactatgtataataatttaggagaatttttaaccgataaataaaagattttgtaatgataataattggatggtaaaaaacctaaatgaagtatataagttgaaccttttcgactattaactttaacctggctgattgggtcactcttattgtccttttcttcaaccacattttctaactttatctctcattcccaaattaatgactcccactcactcacgttataggacctagtctactttgtctaattcttctttacacatttgtgtttaaaaaatttaagatataatttgtattactttccctaatttttgtttttgtgacaaatattactttccgtaattagtattataaatatttcaatttttttctttcacttttttttttcaaaaaagagataaaattaaaacatttataaatagtatttactgaaatttttaaaaattaattataaaataaataagcttcaaaaaaaaaaaaaattaaa

SEQ ID NO: 322364 - DNA, 934 bp, Cannabis indica
ggtttacgaaaatatatgtacaaccctgatatagagagagttagatgcatgctaatctatattgaattgcctgagactttttgggcagaattagctgttatagcctgttatttgaataacagatgtccctcatttgctattgattttaaaacacctatagaggtgtggaaggagaagtgttaacgtagattttcgttaactaaataattagccttttttgtaataaataaactgcagaattaattgtattgcaataacgatctaagaagaaataaataacaagaaaattttacgtggttttaaagttaaatcttcataatctacgagtccatcttattaaggatttttgtgtttgtatacataataaaatggtattgttttttaggaatgaataatagcaaatattatctattttcctagattggttatcctttgttccttgggttctgtccctatttatagatgtataggatgacagttattcccttgagatctaattattcataactgctcatgaaacatggacattctccacgtttcatctatgtgcacatagaataataataaataactacctagtcgttctttgtttttatccatagacggttatgctgactatgcgcaattgctctcactgtttgaatgatatctttcttaaacatctttatagaaaaaagttaagtgttgagttatgatgcatctcgtagccttccttaaccattgagaaagatattagtgaggtagttactttaatacgttaagagcaagatgagtgaatgctgaagttattttcattccttaagcatatgtactcacgagaatgtagatcaataagctgcaaactcatactcacgagtatgtgaattaataacaacgaataaaaataaaaatatatagtatactaataaaattatatgtcatgtcaacaaaagta

SEQ ID NO: 322365 - DNA, 2346 bp, Cannabis indica
cttgaagcgaggacgttacaagaccaaatgtcaaacttttagggatcttgtgagagatttgacacgtcagatggatctaggacattaaatgtcccaagaagagtggtgagtgctctcggataggtctttaggttcatattctttaccttgtctaatgtgggtaggacttttacggtgactgtgcccattttggtccaacaatctaggaccattagttaagccgaagggcttatttgaaactagctagatgtccagaatcgatgttttatattagcttgagttggagacaatgctatcttagtttgggacgatgtccgttgtttgggaccattttgcttatccgattccaaaccacaaggtcgagttcttgccagatttgggccttcaatcacacttgggcttttgtcgacttaaaatggacccacttatcttttggactttcttaacgtgtctcctcaataaaaacacgaacaaaaataccaaaaattacaaaaatgtaaagaacaaaattacaaaaatacgaacgcccatcattgtagatacgaattaattttatttcaataaaaaattacaaattaattatatttattataaattttgatttttttttttcaaacaaatatttaaatttttccaaaaagaaaaatatttagtgggacacaaagtcacatgtatcatgtatgtctttctctcttacctactatatgtctagtgccattgataatatagttggaatcttcctcaattgtttgatcgatgatttttttttaattcaacatcgtataattctaaatattatatatgaagaaaaaatgaattcttttttcagtatcctctatttacaagcaatgaaagtcaatatcgtataattgttttcttttttttttttgtcttcatgactttggccacaaatcacgccacttacaaatttcattccctaaaaagaaaaagaaaatgtgtgcaaatctcttgcaattaataataattattataaataaacagctaatctattactcataactaaaaaattgataaaaatagagatcatggtattattttgtttaattttgaaaaatacaaaaaatttaatgggtaacttttataaaatataggatcgaaaattgattttagtcttcttataatgttaagaattttgttttggtattaatattagaacaattatgttagatactttttatttgttcgtttgttttttcttttctttttttgaaaatttttgtctatcaaagcctcaagtgaaaaataaaaccacatgaaagtcccttagaatatatgatctgaaatgtaaaattggtttattaagtactgtaatcatttttttataaagttgtaagtacaactgtcataactgtcctctcggcagttatcacaattaatactcttaaatgaatagataaatctatatatatatacactagactctaattcattagtactctaagtaagtgtaatacttaatttgtaaggtattactcaatttaataaaaatagaggaagaatttagagcttatatgtgtgtggttgtacctttggttctgtaaaatattttcgagcgtgttctttggagatctcttgctgtgagatcataggctattcctaacaggtggtatcagagcttggagatcaaaaatcagagtcaaaggtttaagattcttgtagaacaacccaagaagcaatggggaatgccaattttgatctagaaaattttactgtggaaaaaataactttgatgagagctctacttgttcaacaggatttacaagctgctcttcttggagaaagaaatctactagagggattgactccaaaagagaagattaaaattcttgaaaaaggctcatagtgctctcatattgagtctcagggacaaagttcttagagaagtgtcaaaagaagactctgcagctggagtatggatgaaactggagagtttgtacatgacaaagtcactggctaacaggttatttttgaaacaaaggtattcttttatgatgacagtaaggaagagtattgaagatcatattgatgatttcaataaggtgatactcaatctggaaaatataggaatcacgattgaggatgaagatcgatcatagtattgaattttcttcccacagatagttatgagcattttatagatactatgatgtatggtaaggatttattgacattagaggaagtttaaattgcattaatgtttaaggaattgaagagaaaatcaatacaacaagaagaaggtgttggagatggattgttcactactacaaaattggcttttcccaacagtttataactgtcttttatactatttcccaacggttccta

SEQ ID NO: 322366 - DNA, 1095 bp, Cannabis indica
aacttgttcatatagacataatacaactattccaattagagtaagggaaaaacattagataataaaaagaatatattatttttttgattaaattgctgaattaacctcaaaggactgcctaggtaactaacagataataactaggtaagcttaagtgtaggttttataataaaaaagagaaaaaatgacataataaaaatagtggttttaataaaatattaaattttaagcgaaagtttataattttattttaatgtcatgtagaattttttataaaagtaccgtctttttataaaacaattgtaaaacaattaaaacaattaaaacaacagtaaaacaattaaaaaacaactgtagaacaactgtgaaaatttaacacaatactcagtataaatttacacagtattgttaaaaaaaaatacagtactttttaaaaaaattacacctcacaataaaaaagttaaaattttggccgtaaaaatcctataaaaatcattaaatatggaaattattaataagaaaaaacaggttttttaatccttaaaaagtaatgtaagaaagaaaaatgtacactctaatacatgtttttttttttaaaataattacagtagtcctatatttttcattatttgacataaaagtgatatagttaatgtatttttgcaattattttttactcttaatattcaattctatttatttggaccttgctagaagcataagaagtccatatgtccaattttttatggcccatactcaggtccataaatttagaaattcacaaattggaattatgaatgaatttatagcagcatactcagcagaattgagaactagctagtagtagcaaataatccaaacccattgaatattattctaataacttgtctaatataactcgaataaacccaacgttttgtaatttttaaaaatactagtgaagttatacgtgctaagtggagcaaaatattcatgagcatataaatattgagaaaaaatattacttatactcaatattattacaaaatattatatcactattattataattaattaaatattaattctcactgttaactatttgtaaggtgaaga

SEQ ID NO: 322367 - DNA, 607 bp, Cannabis indica
ggatgcccacctctaatgaatatgatccttctcatgaaatgacttttcgggctccttacgagattgtttcgacaaattaaaggatcgttgtatgtgatcaacccttataaagttaccatatttccacttatggcctctcggtactgtttccagtagcaaagcactctctcataaagggtggccaattcttctacaacaaaaacgaagatcgggaaatctttcatatttaagatgaaacttagacttctcctcacctttaattaaaccaaccttcatgaatttagttaaagacttagtaatatccataccaacacaaacacgtaggaatctctctaaaaaatcttttgaagaattttcatcaatctcagtcaccggtccgagaagtccaccaagttctcgtcccatatcaactgtcatgcacgagataggaacaagatgaatctgaacccaaaatttcactcgatcaaaagccaaataattataatcaccaacccccgttagcagtagcggactcaaaatttaagttgagggggggggacattttttttttttttataagtgagaagtgtgtcttttttttttttttttttttttttttactatattg

SEQ ID NO: 322368 - DNA, 1919 bp, Cannabis indica
actcgttctcaagatggtgttcccccatccacacatgagaacaatcaatcggagtccaatcccgatgcaacttccgctcaacctgtcattgacatcgctgtagcacctcgacgaaattcaagaactcgaagctagaatgaccatgacgaaccagctcactcttcccagatcccattgttgatcttccccaaccccttgttcagactcgtcgaacctcgcctcttgattgattggctcatgaagatgtctcgagtcccttcttcctcagcactgatcaccctgggttaatcgtggtgtctagtgttttcaatggcgccaattaccagggaagcgaggcattacaatggccctcactgcaaaaaataaatctgcgttcatcgacggctccctgcctcgaccaactacaggtaaccctctccttcattcttgcattcgttgcaataatatggtcatgtcttgacttatgaatttcgtttcttctgagattggacaaagcatcatgtattttgatcctgccaccgacatgtggcatgatctttaagaaagattcaatgggggtaatgaaccccgaatctttcagctacaaactcaattaactcgattacaacaaggtgatcagtctgtcacctcatactttaccaaactcaagtccatttgggacgaattgaaagagtttcaacccaatactacttgcacttgtcgtaccatgaaaatctttcttgaatactataatcaaaaccaagtgttacaatttctcactggtttgaatgagtcatttgcctcggttcgtacccaaattctcctcaatgaacccatccctaatctctcaagagtgtttgccatgattgttcaaaaagagaggcaacgaacccttggcttatccgactcttcatctctggctgctactattcaaccttcctcttccaacaaccctccaggatcgaagaagccaagaccctcatgcactaattgtggcaagcctggccactatgtggataagtgctattttatccacggatttcctcctcggtatggcgacaaaaagaagtctgaaaaaaaaagatactgccaatcaagtcagcaccagcttaacatagctcttaactcaacttaaacaaaaaacactgtacctgaaccttcctggtcctgttatttatgttaagagctaagttagttataactaactcagctcatatgtcctctatatatatatactttatcttctttgtaattgttacagaaaatcaataataaaaagtctctaaaagctgttaaagcttcttctctttatactttattttttcctcataacatacttgtatgtagaaagaatgactacatttatccatctcgctccttatacgttgaagtaaccacctcgttaataccttccaatgtgataaaagagaaccgcgagaaacattacatctttgtacttagcatttttttctacaaaggtgataaagaaagataatgcacacatggcgagaatcattcagtatagtcagcataaccgtctaaagataatgacaaaagagcaattaaatggttatttaacatcatcccatatgtataataataaatcgtggaaaatgtccacgtttcatgaacgattatgaattaatagatctcaaggaaataactgtcaccctatatatttataaataaagataggatccagagtaaaattaaagggacgaccattttgagagagaaaaataaagcaacatattattatgattgatattactgtattcggtattctaaatattatttctaataaaatagactcgtggactataaaaaattaacttcaaaaacattaaaagctttctagtgtttatgtaatatcccgataagcctaatggtaaataatagggtttatatttatattatgggttaatcaggtaataagtggg

SEQ ID NO: 322369 - DNA, 453 bp, Cannabis indica
ttaattagatagaaaattaagcataaaaactcaaaattttctaattttaccttattcataggtaatactcattaatagtgcacacatatatgtatatatgctagttaaaacatctactttgcacttgcaaattatgttatggtcttacaatagtttgtataattttttatgcgtttatttggtacattatattagattatatgtttttattaaattgtgttatatattatacttttatatatattatattaaattttaatttaaattacaagttagtatcaaatatttatttcactatataaaaatataacacatgatacaattcaatataataccatcttaataaatggaacatatgatacatgatacaagttagtatcaaatattttttttcaacaaatttgcaccaatcagcagcgtcgatctcggggtgcttttcagggacttgtgcca

SEQ ID NO: 322370 - DNA, 513 bp, Cannabis indica
ttttattttattttatatatcttagttattttattaaggattttttcatttttattattatatttaactattgcattaaattataagtctttattacatttatttattattattttataataataattatgattttatattttttaataaaagccttagctaaaattatttttgcatcaagttttaaaattgtacacaaatgtaatttatcataaagtttttttttcgccacataacataatttttacttctatgatgccgtaacaattataaggaatctaaggttaagctaaacaaaactacagggatctaaacatgtcttaataattttattttctaatcaaaagccactttagtacactgatcaggaatgacctttttttttttaactgcttgtaaggtatgtaaatgtgaatttatgtacaaatgctaagtattaatattgtctagcacattcttaatgtaaaacccgcttagtttaatttgaaaattagcagttgtttatgattaatt

SEQ ID NO: 322371 - DNA, 603 bp, Cannabis indica
ttttacagctatgggttgcttttcgtggggatttgcgttgcgaatttgggaaagggtttatcgatgtgttcaggtggcctctgatggctaatgaccgaggttgggtgaggcttggggtggagtgttgtggtggtgggagcttccggttaggggaattgttttgggaatcgcttctttatgatgtttttggttacattctaccttgttattttgtttttcatttttaataattctgtagatacatcactttgctatggttatgctagtagatctttgtttattctccgcaagggataatagtcttgttttgggacgttcatataatttctattggctcaaaatatgtttgtgtttgtagcatgattattcttgtccttgttcagatcagggagtgtaacgtccccgcttcaagcctccatgaggtccttacacccacggaataatggctcttagtacaccactctggctgcttcctggattgatgattgaccctacagaccaacacaagtgttttcagcgtgctttgtcctcactcgaacgcttcctgggaaaacttcccaggaggtcacccatcctgaaattgccccaggtgaagcacgctta

SEQ ID NO: 322372 - DNA, 620 bp, Cannabis indica
ttatttaaaataaatttaattaaatattttctatgtaaatttaaaattaaaaatatatataattaaaattaattttaatagacataaaataaaaaagtaaaaaaattatggtttggaattaggtttgaagttttgtttgttaaatctataattaataatatttaaaattaattaattataaataaatatattaattatggtgtagttttaagagttaatttgagtcattggattaaatcaaagactataaattattatcctattgataagtattttacctaatccctattgtaatagccctctattttaatatactgtaattattaaatatatttatttatctattttagatattggcattgaactagagggaaaaaaaaatttattttaaggcgagcttttcttttttatgtaattcttttgtttggtaaaggctatggaatcaacaacggaataagaattattatgtttggtattgtatggaatggaatagaacatttattattttgaccaaattaccctttactcttcaaaaataatatttgttttattaaattaccattattttataaattgaaaaaataaataatatttttagcaaacaaatatatttatcacgt

SEQ ID NO: 322373 - DNA, 1304 bp, Cannabis indica
gtagagatattttttatgattctacctaagtattattattagttatttaattcatttaagtttatttaaataagctagatttttaaaaaattatttggatacttaaatttaaattgagatatttagattttgttagatttaatatttttaaatatttctactacctaatttaaattcaaattttgatatttttaataatattttatatattaaaaataaaatatcttaaccaactttccatatcttgttacttgtttgtttattaattcaaaatttttttgataaacatattatttatttgatttaaattgctatgattaactcgttgaaagatccaatgatctaaatctaaattagctatagttcagttgtcaatagatcaaacaaacaatatgtaattttataattttctttcatctgtgttaaaccttgtaacatgataggacccatccaaattatttacttttgtgagcatatatatttgctatagggcttagatgcatataggaagttgttatacctgaaattcggctatgtaccagatcctgacatgtgtaccacagaaggaatgcgaatcaactcaaagaatataataatgatgttgtatcattaaatgtaatgaaaaaattcgttacaattaaatataagtttaatagaaaatgttcaaactcgttatcagtgtagtcttacgcgagacaaaaataataactattaaacttatattgacgagacatatgggcgctccgggataaactcagataaatatacaaggagaggatactcactcgctcgagcagattaaaagtaacaacactcaaccgccttgtgttacacatagcgcaaagatcacctcgcaattaaataccaataaagagaattaactagataaattatcttcgaacacttagtgttttttcctattaagctggacaagaaggagaactcatgtctgacgagacacaaccttccaagtcagcaataaccgtctagatgataaaaataaagaacaggtgggtagttattagatattatcccttgtgcgattaaatgaaacttggggattacccacgttttatgaacagttatgaatgaaccaatcctaaaaagaacaactgccagactatgtgcctataaataggggcagaattcatgggaaaaaggatgccaaatttgagagaaacaagaatgttattcaaatattgctattgtacttggtatctagaaaatatctctaataagaaggactcgtggagtatgtagattttaactacaaaccacgtcaaatatctggtgttattttatta

SEQ ID NO: 322374 - DNA, 1756 bp, Cannabis indica
attattgtgatatatattttatgttgaaaatattttgtatggatttaattttgtttgtgtttgattgaaaaaatagcaattgtgaaaagaaataaagaaataggagaactatggcctaaggccataaaattggcatttttgaagcacaaaacaaaggtccggccaaataggcctaaccggcccttttttgctcttcaggggaccgcccgccacgtgttgggctgtcattcgtgcggcagaaagaaaaccaggagcaacagctacttttgtcacccagcccgatcgacccacgcgcgcgtgaggagcatgacgctgtgtggtctgggcgagtcatgcacgcaccaggcacgcgactccccttctcagtcgcgtggtcctaacagccaaagagacttttgtctcgcttcttcccagcccaccacgtgtcctcatgcaactaattataatgtgacatgtggcactctaaatataactattagtattcacacatttttactcacatacaatttgtaataagtttaattgcgcattagtcattttaccttcctataaatagaaggttaggtgtttattcaatacagttttagacagaaaaattcagagaaaacgctcgaagcggtcagtgttagtttatcgcttttcttagttaatttttttttttagtttctaagttcccttattattaaggcagacgataaaacctagtgtatttaattgagtatttgtttttattttgattctcagtacaatatatgcctatgattttcgcttcttaaaataatttatttcatctttaatatcacgtatgttcgatagttagaaattattagtgtttggttctacattttattaaaataatattatttgattttttatacattaaattgtttcacatttaatgcttagaggttataattttttttatgacgaagaagatacttcattaatcaacaaagtagatacaccctcaggtctcaccaaaacaaacagcccacaaacagaaaaaagaaaacaaattaattacattgtattctattcaaatagtccctctcctgtctagtattgtttttctgttttttacaaggtataatttgaataaaactatactcttcacttcaactacaattaagctaactattctggagcagcctttaaagatgtatttgttcctattcagccatatacaataacaagtagcaggaagaattgcaatggttatgctttttatcaaacctaaatccttcatggacagccaacttatccagcccccatacattgttggctaagcattgtatcccagccatctagagattcggtccaacactcattgagagaggccacagaaagaagaggtgatcatgagtttccaaatagtctccacaaataggacagctccaagtagcaagctcaacatggaacttgctcaaattatcacgagtgagcaaatgagaattcacaatttcccacaaacaaaccggtgtttgggcaaattcaaatgagaattcacaattttccatgattaaaacaaatgataaaagagatatagggtctccctgttgaaggcatttagcatattgtaatacgactattggtagaatgcaggaaacgatatacaatataataaatattccaaaataatttgaaaaaccgtgtttttgcaaatgtcaattatatataagaaaatataaaacagtatgcgtctgcagaagcagaaagtaattctgctacagcaaaacagaacaggcagaatataaaa

SEQ ID NO: 322375 - DNA, 809 bp, Cannabis indica
aaatggagtgtctttaaaaaattgtaaagtataaataaaattttccaaaattttttttggtatcgtagtgttgtttgttttattattttttttttaatgaaaattcgtttagttgttgagtgccacatatattttaggacagtataattattttatactgtgatagaagagcataagatttttttttttaattagggagaatggcgtgagattcactcacttttttttaaaaaaaaatattaattattagattgtatgaaatataggagggtttgaatttcataacttatacggttcattttgatatttatatgaaacaattccttcattgctaacttatttcaaccctgctgcataataattagtattaactactgtattcgtaaagtaaaataaatatgtatacatgtgtttcgtcaatgttacatctacattagagaatcatcaataaaaaatataaaagtttgagctatatttagttttaaaagtaattttgtgatattttaatattaatttttaagataaatacttttttaaatcctgtattttgtaaaagttatcaattagattttctattttgttaaatgataaaataaatcttatattttccaaaatagtaaaaataagatccagaactcaattttcaataattttatttttttaatataaccaactttaatacaatttctaacacgaatagatacaaaaaatataataatcagttttgtcataacatttctagatcagattattattgcgatttattttgacaaaaaaaattagtttagaatcttatttgtacaatttta

SEQ ID NO: 322376 - DNA, 2060 bp, Cannabis indica
tgcccccatgatggcggcctgtttgccatcatcacttagattctttaccttggtttcctcctgcataaagcgttgaatgtagtcttgtagtggttcatcgggcttctgcttgatggtgaccaagtcacccaactctactggtatctttcgggctgaagagaattgggtatggaataacccttcaaactcatcccaagaagtgatcctccctgggggtagtttcgcaagccattgttgcgccgtgtttgtgagggttgcagggaagattcgacacctgaggtcatccctgatcccttgaaggtccatttggattttgaagttctcaacatgagttaggaggtcttcactacccgtgtacttgcaagtgggcatttcgaattttgctgaaataaggaggtcattgatcgtttgggagaaggcagaccctccctcctttctagctctaaatccgtgagttttggtgtagtaaggtcctctaccaatcaggttaactcgtccaactgatcctggatcaccaaatctgtggctgctgggggttgagcgacattaacgccaacattcgcttggtctctttgaattgactcgggtggatttactatgttggaactgtagttttgcctatttttattgagggcatcttgaagctctctaccccctcggaggcctacccgttcaaaaattgacagggttcttggccttcctcctgcattttgactatcagcccttccatcgaccaggggtggtacttggtaattcctacccctttgaggcgtattctcaggttggtgttgcctattaagggcatacgaccctctggcttgataaccccccagctcaggatttggttggttattgacctcactttcagcttcaccatcatcgtgatcgttggtgtagtttggatagtaatcactattgactttggggtcgtctcttctccccctggacctactatttcttgggcaatcatcgccctctcatggttggccgcgttggtcccggggtttccactccctacgttggggtgtccttccaccgtttcttccacggtcaccattcttgttcctagagtttcttccaccactccgccttaaacggatattgtgggagtcatcacgtcctatataatgactaggtagaacttcattgtcttggagcggtcgattattgttgtagagaaccctattagaggggtgactcctaggcctctcttggtttcttgagtgctctttaggtccatagaccaccctctcccattggttcctcagggtgggacttcttgagaataggtttggggtatctcttggttgtgggcgtcagtacccaaccttgagtgttttggttaaagtagcttcaaattaagtcggcagccttttatgtgcaacaattggtcgtcttggcgcctcctcatttcacgagtatgatcatccagccaagattggaattctctttgttggttagcaacacttttggtcaaggctgctcgagcttgagtttgctcttggtgcacaatctggaactggccttgcattcgccctatcgaatatcgtaattgatccatctcggggttgattccctcgatatccacatggggttcactccgcggcctaaagataccagggcctcagccagtttgagcatggcctgtgccgttagtaggtggaacaaaatttctagtactaccccttctggtagcgccgtcagtagcaccgcctcgcgcggcagttgcgttggtggtatgccaagcagttgtttgcccaatggcagcagtttggccagttactccatggccagtagtctgagcggcggtggctatcccgctgttccctggacgcggggtctttctccattgttcagttgagattgcttgctgatggaacttgctcgacactatccatctcttcgtcaggtcgctcttgatatctttgggttaacaccattttttctagtgaaaatgttcaagattttgggtaaagctctcaatgaaagcaccaaaatgttgattggatttttagccaaccaacgtggagtcgtaataaatgatatttaaaccaaaatca

SEQ ID NO: 322377 - DNA, 558 bp, Cannabis indica
ggcatgtccacgtaagccaaagaaagagtacacgtggagtacagccctgccagtagcagaatagggcctatatgcaagatatagcaaaactgccaagcagcaactgaatggaatgaaacaagtcctcaagaagttgtaccaacatccctggctggtgaagagaagcatattggtcaaccagagtgatcctataagctggccaagatctggctggccggccaagaagtgacttctagaccaagggagcttccgttcgaccaagggaacctgacctctaccaggaaataatgtacaaagttgtcctcaacttgcaaaaagctggcctccacaaccaaaggttggcctcctcttggtagagctatagtgacttgccaggtgctacatgccttgacttgccaaatcttgcaggccttgacctgtcagatcccgcaggccttgggcggccaggattaacttggcaggactctatatacaacccaaaatgtggacagcaagtcatgggctgcaaattcggccctaaaagcccaacacaatggctgaataatatttagattcaag

SEQ ID NO: 322378 - DNA, 1498 bp, Cannabis indica
ttttatgtctagtaacagtagaatacgatatttggcctataaagccaattagatatggtttagtatcttaaaattagcgagactttagatatttagaattttggaaatatttggggttatggcttagaccatcttacccctaagttttaaagattactttattgtaatggcaaaagacaatttggtattttctctaagttagtggtaattgtatttagtgtaattcctaatttatctaagttattctagtttatttatgcctagaataagacaaagaacttttactattatatttattaaaccaaaatcaagaagtcaccaaactagaaaaatccaaatctcttcctctctctctgttcggccataaccaagacccaaggaaaaccacaaagtccaccaattcaaagtaaattcaaggagttttgacaagatcttttggtatccactcaaagtaaactttctttctaaattttctttgaaatttcaagttaaagactagatttcttgcatatttgattaggttttagttgttgtttgaatcaatggtgcttgggaaggttttctttgagttatatttaagttgttctaagtggtttatgctggtttttgttgttgctgttgagaaagaccaaggtttgagctttcaaattcaaacttaggtctttaatggtgaatttatttccaagagattataattgttgtttttggttggattatgcttattatgtcttgcataggtgttctggagagtttggtgcaactctgggtatatttgtataggttttcgaagttaggtcctttttaaagagaaaaacagttcaccgttttttccaaaaatggtgaactagtttttctggcgggaccccaaaaaacagtaaaccattttagggttttagttcacgagagttttcagattgcggggcttagttttttacgttttactaatatttagggtgttaccacgctatttatcgataagaaaacctttagttttgagtttaagaccccaaaaagtgatttagcatatcacttaccagttttacgtatattgtgaattaggagcctgtatattttttcgcagcagttttcacttagattgactcacacaccttaatttggaatcaaggttagattagtataataattttatatgtgtttacatgtctagcatgcatattttatgattgtatgttagataccatatcagtaagaacgatattagtgtacatagagttgcactaaatactgacgaatataagtttggtaaagtacagattgaagctatcacatccgtacgactacagcaccgagtataggttgatattatggtcaattatactattgtatgaacgctctaaacttagtatgcgtcagacgcgagatagggttgtgattggggtgtatgggcaccatattataatccaatttatgtttacattatgattatacttttcttattgagtctatcaactcatatatattatttatatgtgtaggt

SEQ ID NO: 322379 - DNA, 1334 bp, Cannabis indica
ttcaccaaagtcacaaacaagggggtaaatttatctggcttctttgtaagcatagacaaaaataagtttatacgcttgtcattttcaataactttagggcgatacattaagcctttcatgtacttggattcacttccaatttcaagtcatgctgcactttgtcaatatcaagttcttcgtacaaaaaatcaaccaaatgtgagtagcttacgttcctatcaatctcgaatgtcaaatttttagctcggttatgaacccaatctctacccttaagttcccagacaccattatacataacgaacaaaaaaatacttgaacctgtcatccgcagacatttaaatataattaaaatttagaacaaaaatttaacaaaaaagtgataaaaaaatcctaaaaaagccataagtctgtcaagcatcaaacacaatcggacctatatcggaccccatgtaataaatttcaacaaaaaactattggacataaccatcggacccatatcgaagcaatatcagaccccatataataaattccaacaaaaacctataagacacaaccatcagacccattggacgtgggatataaaacaaaattctaagtggcatcaagcttaatatcggactcaccattgggacactaaagggcattgaacctatatcagactcacccatcaagcctatttagacatcatccctaaccttggaactgatctaacaatcagaccatcatctgaccactatcaaacaccatcaggccagacgaaaaaagaccaaaaaccaaaaaaatgcagaaaacttaaccaacaaccatttccatacaaaaaacaacataaaaaagcaacaactaacaaatcgaccatcaaaataatattataaaataaatataacaaccaacaacaaaattaaacaaagaaaaatcattactcattcaattcgtatattatgttccgtacaaaaaaaaaaaaaacaaccatcaccaaagcattgagtttgtatcaaaaatttgtgttatttagtaatgaaatgagtgaagagaatgaaatttgtgagtagataaaattgagagatgagagaagagagaaaagctgaagaagagaagagagagagaggaaaatactaattttttgggctgtaggagtattatggggattataattaaagttagtcttttaatattgcacaatatgagtttagaagaataatttcccaaatatatgcatgaaaagttgaatttctcaattaaaatacatcacacataaatatgatatttaatagaagaaattacactcactatgagattttaaaagttgtttacttaaatatgacacttttaagttt

SEQ ID NO: 322380 - DNA, 1531 bp, Cannabis indica
ggcataaaacccaacaaagacatgtccggttgtaactcaaatgcctcataactcaagatatgcattggatcagatatgtacttcctcaacattgagacataaaatacattgtgcacaactgacaattctggaggcaaggccaactggtaggcaacatgtccaaccttttcaagtatttcaaaaggtccaataaatttaggacttagcttacctttcttcccaaaatgcctgattcccttcattggggatacatgtaagaaaacatgatctcctggttgaaaagtaatatcccgacacttgggatctacataacttttcggtctgctctgcgaagcaagcatccgagctttaatcttgtctatcgcctcatttatcttctgggctaactcggggcctaaatactttcgttcttccattttgttcccatgaaatggggagcgacattttctgccatacagcagctcgtagagagccattcctatggtactttgatagctgttattgtaggagaatttaatcagaggcaaatacttgctccacgaacctccaaaatccatgacacaagctcgtaaataatcttcaaggatttgaatagtttgtttggactgcctgtctgtttgaggatgaaaggtcgtgctaaacattaaactagtacccatggccttttgtaaactcacccagaactttgatgtaaatttagggtctctgtccgagacaatagattttggtaccccatgaaggcaaacaatctcttacatctctttcacatacaagtcaacatactgatccactgtatatgttacaattacaggcaagaaatgcgctgactttgtaaaacgatccactacgacccaagctgagtcatacattcctgtggtcttgggcaaaccaaccacaaaatctatcacaatatcttcccacttccattctggaagtgataacagctgaagtaatcctgctagtcgctgatgttctgctttgatttgctagcaggttaagcatttaatcacataatccaccacgtcccttttcatcccgtaccactagaaatagggcttgagatcttgatacatcttggtggttctcgaatgtagtgtgtaaggggtagtgtgtgcttcatccaaaatttctttcttaagttcaaaattactcgaaacacacacttgagttttaaacaacaacatcccgctactagaaaccaaaaagtccttagctttgcctgctaagacatcttctcgagctttgatcagtcagggtcttctagttgtgccattctaatcctctccaacaattctggctgaagcgtcaaattatgcaattttccaatcacaaactcaatgtttgccctagacatatccgaggctatctagggagaaatcattaccatgttgaacgtttgatcaggcccttttcgactcagggcatctagaacaacatttgcctttccggggtgatacaaaatttcacaatcatagtctttcactaactctaattaccgcctttatctcatgttcaaatctttctgagtaaa

SEQ ID NO: 322381 - DNA, 759 bp, Cannabis indica
tataccaatacgatatgtgacaactaaaaagtttataaaataagaatacaaatatgactcgaatgaattttttgttctgttggcaggttgtaagcaaattgttattttagtgtttattgtgtcgtgtgaaatttttaaatttattttaaataattgacacgaacgcaactcgtaacacaaaaatattatcagtactcaaaataatctaattaattagaataataaaacagagaatataattgtttgaaagaatttaaaattaccccacaagaaataatattatttccacaatgataatattataaaagaaaaaaatcttgtaccaaatatgaaaatacaaggtcatgtttagtttattgtaatgataatcctaataaaatcataaatataattatattgtttgatttatatttaaaagtgatgtaatggacttacaatgtaatgatatcatataaatgaatttccataaaagcaaaactaaaatgactctaccaagactgacctatgaatatatggaagctatttaaattttgggtcatcactttgagaatatattaaaaaagagtgtcagggattcaaactcacaccattataatgtgtcatacagagggattcaatgtaatctctattattcaatattaataaagaaacaaaagtatttttcattcatttgtgtgttacttggttcatgttatcaattacttgtctatttgatttataaattcatccaaacccttttcacatttatattcttgttta

SEQ ID NO: 322382 - DNA, 738 bp, Cannabis indica
ttttttttctaaaaaaaaatcatatttttagtttgattggttagataataccatatttaatatcatttactttttatgttatatttatcataaccttaataattttttccttttgaaaataaccctttgctatatcttaagcttcaaaatattaatttatcttttctaacaatactccttttttcaaaactttgttatatatataataataataactagctctcattatacgcacaacttattagttgtagccttagccttacactaataagtaaaccttgcttatttaatttggttatcaaatcaaggtatatattaagacatagatcaattgacaaactaattcaaacataaatgttaaaggtcataattatatggtgttgtcgttactgacctaatgcaatattgaggtcttacttattttatttcaataataataattaaattaattaacatttgaaataataatattattatttgaattagaaacatttaattgatgatgaagtgagaaaatataaatagatgatgagaagagaagaggccagcttgcaaggtgtgtaagagcaagtgcaaggaggcactaaactttggatttggtgtgtgtaatcccttcaaggaggcagcaaactatacatcatatatgccgtgtggctacagtgcacggcatatatgctgtggcactgtagctacggcatttttttttcttttcattttgtaataataattattatttaa

SEQ ID NO: 322383 - DNA, 605 bp, Cannabis indica
taaaaatcagttcaggatcttattgtaccatttaggaaatacagggctcattttgttatttaacaaacagagagtccaattaataagttttagcaaaacataaagtccaaaataatatttacctcaattatattcagttatttattaatctttataaaacccaataacctgcaaatagtaaaaatcataattttttttactaaaaatattatcactaaaatatattttttttattttttttattgtgagggtaaaactatattaagcataaattaacctacaaaaatatagattgttatttttacaaaagtattatttatatttctatgttgttcacatgactattaaaaacctaatagatcaaaaaaaaaatatgtaaattaatcatacttcatcaaaatatgtaaatttttgcgtagcataaaaaaattaaaaaatatgtagcatattagacactttgtataaaaattctaactttagtatgtgcggaactatgtgtagaagcgtacatgctcctaattcctaaagggaaatttcattaattgaccctaataaaataccccatttcaaaatatataccctccactaatttatacaaattaatt

SEQ ID NO: 322384 - DNA, 1431 bp, Cannabis indica
aacattaaatgttatttctgatctatataaataagtaaatctgattatattgaaatgagttttatttagggcataaaacccaacaggttgattgtaagcttttgataccatttgaaaattaagaggaattcttattgtagaaggagagcaaggagcagaaggcaccagtggatgactccaaccgtgttctatcccttcaactctatcttttatatctttagttaaatttcgttaattttagaatgtcttttagtagctaagttcttttatgaattattatgtgaaccacttgagtatattttatggattaatgtgattattcaatttcttcttcttctttttattcaattccatacaaaatcttttttaattttgaagttatttactaatcactagggatgcacattttaaataattagtttattgaataataattgacgtaaaatattttaatttttatgtggtttaatatttttatatatttaaatgtttattataaactttattttttttattaagggattccctgccccgttcccacccccattaaaggattccctgccccattctcgatggaaaataagcgaagatggagattaaaatctttaacagagatggagaatcagggagaactccccgccaattccccgtcctttgtgcatccctattgatcacccttaattattatttataaattaaaattaaaatttaaaaagtgagatttaaatatgctatgattgttatggataaaaatcaatttaggacgagagtatctagattatttgtatgatttttactagttgctatgcttaatgctatctttgtgattaaacttaccattgaaatataagaagttttcatatagattgagtttataaatcttaaccatattataaatttcttaactcagcttatcaattgaatggaagaagagaaattgggtaatcacattatgaagtaaaataaataatagtggggatcataataatccttatttttatcattgttattttttaaaaaatttaattattatttgttttatttactttttttctaacaattattattcatcaaatataactaaataattaatcaattagtaatagataatcagtcttcgagggaacaatactttatttgtcattatattactggtttcgatttcatatacttgcgtatcaaatttatgaaacactagtcaaggctgctctatcatagtgactactctatgtcagtttgctgatttttctgtcttgttttcttttggttatttatgttagtaacagttatctttttgtgttttctattgccactggtgtttttggttagctattatgcattgtgtttctggtttaattgaattggtgtccttgagcattaccttctcttaaaaaaaattgtaaatagttcaaatatcatttataatgggct

SEQ ID NO: 322385 - DNA, 1179 bp, Cannabis indica
taatcatagaaagtaatcatgtgaaccatgacaacataaaatatttctgatcttttattaattagtaaatctaatcatattgaaatagattttattagggcataaaattccaatactctccgacctcattttaccgtctgaacggaagaacatggggagcctcttcttcttcttcttcttcttctccttcaccattaggaaaagtggctgcatggaccttaccctaatccttaaccttttgtacttcaatgtccccaacgaccatttcaacatcctccctaggaggtccagctagttctgcactggccatcgtaaaaatttaggcaaagtgtgggtccttatccgaagctttcctataagtttgttttgtttttgccatcaccttacgtttgggtggatgatttggtttggaagtatgctttgctacaatgatagcgatttctactagtgcagagtttttcttcaaaggctctgatcagtcttctggcattgtgtttgggacgtcagcctagaccttgtacatccaagtagcaggcagataattcctccaacctctgttcaattcccaaatgaatcgattttatccttctgtactgatttggttagggtaatgaggtgctgtaccataggctccgggaactccgatgagtcactcgtgactttccactcgttgaagctagaagtagatgagttttcactcgatgaggatgaatctataagaagtcagggttggttctcgtaaagaagatgaagtaggtcgttatctatttggtagttacctccctaataatcgtctgggttcatctacaaaacaaggaagagagagaggtaagaactggacaaaagtatgaatttttgaaaggaaaaaacatgtctaatgtgtcgaccatgcaaatttaaaaaaatagatgaaatttcattttagcaatggaattcccaaattggaggtttaaaaaaagtcatgaacttggaaaatccctaaaaacttcaaacaagtaattccgaatagctactagcaaaaataatgagagaccgatggaaacttgggttgtcttaaggtcataagtgcatgtttgataaattgcattttaagactctgttggtgtgtcagtggcatttttataattttgacccgagaggggtaaaaattataattttatgatatatcgtgcttatgga

SEQ ID NO: 322386 - DNA, 1689 bp, Cannabis indica
ctttcatgttcgtactcttggcctataggcactctatttttgaacattgctattgtttagccctgattctttttattatggatatgtgatcaaccaggcgatctaaaatcctggctatcttcttattgccttgacatgtaagtattcggatttacttcttttatgccaagctgaagtatgcctacacttgacttagaggtaggcttagtagcttatactaacggttaaaatttctctgcataagttctctgtgttagttcgatgcattgtatggtgtgggtgtccgccaagtgagcacgcaaacttacgttctcttggtcacttgcaattcaccaagttttatagaccttgcctaggaattttcttggggtgctacctgatgtacatatggagaattgaaaaaagaataactttaagaagttaatcttgttagcaagtggtttggacacaacatattagaacataaacattgtttttcattcaataattggtctttgttgatgtgctacttacataaattgaatctacaagcttacattattaaaagtttgcttctagatatcaaatggctacccctgcttgacttgcaaagtagaggccaccgttgaagaacgatggatggccacgctgaaaggctatgggcactagcttttttatcctaactctaatgatgagttggtaactactactattgagtagtgttctataagctggtcactagtagtacttgcaaaggtactctccattctagtatcttggtagtagaacgagctccatgttcttgttgtactttcccaacttataggctcccttacttgttaactatgtagcttggtagaggccttcccagttgtgtctgaacacacttactgctggatctttggtgttcaggaacactctttggagcatcaggtctcctatgaagaatttcctgtccttggctggtttgttgaagtaccttgcaaccttctgctggtaggcctgcaactttaggttggcttgacctcttctttcttctagaaatttcgtcctcaaaatttatttaaacaattcgggatattacccccgtatttacggttctaactctcaaattgttgtttctatcttgctatttttctatagccctttctcaactagtggaatcgtctcatttcatagtacttcctttttctagtctaaaatttggacaagatatttttcccatataataaatttttctgaagtttaacatcatcatagctcaaaatatgggttgagtttgatacatattttctcagcatggagacatgaaatacattatatactccggacaatgcaggagttaaggctagctggtaggctacctagcctacttactccagtgaacaggtgtctaatatttctctcgtaccacacttattaaagtacttaactaatagtacatttaattattatttttagacaaatacttcattaggagaagagattattctaagataatctaacctttattcaatatgctcacaacatgtttataatattccattgatcttctcaggttacccatctttcaagaataaaacatcatactatttttgctttaaccttcatggttctcaataacattctttaattcttaacatcatagccacagatataaccttgaatttcaaaagatatattctttcgtatgaattccatatcctcatt

SEQ ID NO: 322387 - DNA, 672 bp, Cannabis indica
  modified_base (660)..(660): a, c, t, g, unknown or other
ttttttcttaattaatattttaaactccaaccccaacttaaaaattgggacctagactctggcctcgaccttaaacctgggcttggactacgatcccgactccagacccaaacctaaacccaacttaattaaataaaattaaaaaccacttttgttagcctcaaatctagcaagggtgattggaccaaaccagttgatggtatgttaaaaattaacgtgaatgatgcgatttttgaagctaacaatgagtatggtactagttttatagctccagattgccatgaaaagttgactgaagcttgttttacattgaccagtggcatttgtcaaccgacaatagcagaagtggtgagcatcaaagaagcgttaagttggataaagaaaaagaacatttgaatgtggtagttgagaccgattgcatcgtagttgtgcaagcaatttatagctctgtttcgctgccttcaatctttggtttgtttgttcaaggttgtcagttgcttctttctattttaaataatgttacgatttttcatgttaaacgatctgctaacaaagccacatattgtatagctcgcgatgcttattattggtctaatcgtcttattactgagagcaatgtctctcctgctcttcagtcaattataatagcgtatttagctntttaatgaatta

SEQ ID NO: 322388 - DNA, 917 bp, Cannabis indica
cgtggcttcctaccaaggaaaacccttatgtgatttcatctcatgaggctctttaggactgtagagtatttaacctccttaaaactgattgtttgaactgggatgaagagcttttggaggacctgtttgttctgagagatgtggagttaattcgtagcattcctctgcctttgactcctgaggtggatacctggttttgggattttgacgcttatggtggttactcagtcaagagtttgtatcgagcattgtaactacgtaatgggagatggaatatgcaagataattatggcttttggaagaaattttggtatttgaaactacctccaaaagttaagaactttcttaggagggctctcaccaactgtcttcccactttgatgtctcttcaatctaaaagggttaatgtgtatagtatctgccgtctttgtaatggagatcatgagactatttttcacatcatggtgggctgccctttaacccaagcttaaaggaatcgaggccatgggtttgattttaatgatgggggagaggaattcggttactggtttgagagcttcggcaattcccatccaggggactgctggaatatattttaccagtatctagatttactaacaagtagaatgtttttaacatcctaatatgaatttctaaaacgatgaaaataaacacataaaaggtatgagaaaccttacagtggttgcagcagaattaaatgaatcctcccactcagatctctaagccttgtatcctttctgtagcggagtatcaccaagatctgagcccgattctccttcttgttgattggattcttcacagtgttacatataatgattggcgactcacttaatatgtgtgggcatgcaatcaatcaataatggctaaattttgatttgtgaagaatggctatggta

SEQ ID NO: 322389 - DNA, 715 bp, Cannabis indica
acctcatggtcattacaaaatagtttatctggaatgaaagacggatcaacaataccagttacattattggcaaaagcccacttaatcacattatgtgttgtaaaattacatagtttagggacaaacaaaaaattacaactgagcaaaaggtttgagagatgtttacattgaagcatatagttaccaacaccccaaatggaacaagttccttccagcatgttgatgactatcttagaatcactctcaattatcacaaacgaatattttcaaaggagtgttgactccaaggctaataaacaagctacaacttctccaattagtgggccagagaagttgaggatgttgctagccacccacaaaactgactccttttggtgtctagccaaagccaccacacatattgagtcactaccaactttaacgtcagagttgatcttgacccaatcatctagaggggtgactaaacaggttgcgtaacaaacagaaatagagtcaatacaatgcttgatattacaaatggaattattatgtaccttatcattctgggatttccaaatcatatccacttcaattgaagcatacagaaacaaatcctggacctggactcctttatcatttaggctccacaataattttacccaatcccacactcgggccgcagattccagcactggcatcacctctcaaggggaggacctcctgttggaaattattt

SEQ ID NO: 322390 - DNA, 1369 bp, Cannabis indica
cggacaatattgaagatatttacgaatatgccactaccgtacaaactaagcatcagcatgccgccagcatgcccaccaacatgcgcccaccacttgaccaccacttggccagcttgtgggcatcacctagcttgtaacgtaccatcttggcacacacgttacatctctctcacttcaacatgtcaatgccctcatcgacggactacaagtaaatcttcctgatctcgactcctaagcttactccaagcttcatttgaatcctaggtctacactgtccctttatcttcgtagaaccaccctcttggtggaaatttccctcgccctctcttggacatgatcaaagaacctgtgccactatcgttattcagaatcacccatagagtagtgcctccgcactagaatacttcccccaacatgaactcttccgagtcaatcataatttccctctagctaaccaagtagcccttgcaatactgatgttaaagctaacacttcctctgatagtatctcactcgccaattaaccaatgcatactccttttaacaaggattaagtatggtgcaccccttggtgtgaggtttgcaaaccaaccgtacccaacaacacctactaagcatgcttccactaaagccaagtccttttaaaaacttcacaaccaactcaatggcgcaccatcctcctgatggcaattgaccaagacactcttattgcaggataaaatttgatgcgtccctcatggaggaggctcgcaagccaactgtacctaatgcagcaccaagtacactcttgcacataatctcttcgcaaagtactcaatattggccctctggccctaccgcacacccatggcttcatgcaaaaggtccttctaagccattgcatacgtgttcctctgagcttttttcatgtggtcaatgatctaacaatcacccaaaaccacgaattttccctttggctcttgctcatgtcgactctctaacactgtgtcacaagtccatcacctaaaattaaccctgcatcctctgatgactcgctaaattttcacaaaattaataacataaagtcttactcttaagactcaaatcccaatctgctatctcccatcgacatatgctctctgaaccatttggcttatagtgtcccatacaacaccagtgttaccataaacacaaagcacgcccataacatgtcgcaaactagctcagtctcgatcttagcctatgcccatgcataaaatctatctgtagcttgcagcaatcatgaaagtctttacacttaacaagccatctgttgtagtgtttccctctggattcacacactaaaactgaacgagtaccttgattctacaaacatatgaattagtgggctc

SEQ ID NO: 322391 - DNA, 422 bp, Cannabis indica
gtgagtagatctaagattctggtaaaataatttccaacaaaaatcacatactcatttctaaaaccttaaaaattttgacatttgcctcctgtctctacaacaaagttatgataagactcttgcttcataaaaaattgttcacctttcactaaaaatgaccccaaaaattgctcaaatggaaaagtgtttgggtatggtgaagagagaatttggtagtgtttatcgagatttttgaatatcaattaaaatgagagctaagaaattaaaaatattagtaaaggatggagatggagatttttacgtggttcaggtattaattaaccttgatttatgaatcacttgtatttggtcgaataaccttgatgtattataatggggtttccaagcttaagaaccctaactttttgctatattattttttc

SEQ ID NO: 322392 - DNA, 529 bp, Cannabis indica
attagtttgattaatcattgtgaattggttaaaaaaataatagattacttggaatttttgtatcttggaaaagacaatctatctcgtgtttacgatgtttgcaaaacctcagtctcttaagaactactttatggcatttaagaggacattcaaagagcttaatgtgttgttgccttttagtcttgatgtgaagattcagcagcgccagcgagagtagatggctatcgtgagctttctagtaggactctcatgtgaatttgactctgcaaagtcacaagttctttctgggtctgatgtctcctctttgcaggatgtctttagccgcgctctttgcacaaaagctactccatctgtttctgttaatagtgctttgggtcataataatcatgcaccatggcagctactcatggttggcttgtacatcagcttgatattaataatgatttttttgatagagatcttgaggaagaagtgtatatggagcaacctcttgagtttgttgctcagggggagttagggcgagtttgtc

SEQ ID NO: 322393 - DNA, 753 bp, Cannabis indica
cagtatttttgaaaaaatttccgtgtgacagtatttttgtaaaagttaaccaaaattccagtattattgtaagtttcccctctttttatttgtttctcaattgtattgtccccttggtgataatttgcaactaaaatgggccaaaaaaattaaaagaggaaattaatttttacactctttttaatattttacttttacatcctatttttatagttaatgtccttataatattatttcttcaacccaaataataacttaattttcagtatgtaatgctaatacccattgtcatctccactcttttggcgtagctagcccctactaatgccatccaccggcaattttagcttggtttatccttaaaatttcaaattaactatacacatattcttttactctttcttcatacatataaacacatttaaataacatttagtatttatatacatataaatttttactttatttaatcaatttcgatatgaaagaattcatttgttggttttttatggtggtcgaaaaattgaaagaatgtatataggatgataacgtgtatatcggttgtggtatatgtggggagatagggcaatctccttataaaactgagtataatttaaatgaatactttgtagataattttagttaacttacaataacttgagactagttcaagtagccataagtgagtgtgtgagtgttggaggtcttgggttcgagtccaggtaaaacatgttgtaatatatacacgcttaa

SEQ ID NO: 322394 - DNA, 2317 bp, Cannabis indica
tcaagtgaaaaattaagaccaaaatacaaaaaataaccttttttggtacaacccaactagactttcgattggtaacatcctataccaaccatatgactcgttcaaaacactaggagcttgaaaattttaagttttcaaagtcccaaaacttgctccaatctaacccatatgctatcaaacctttcagaacacctatatacgacataataagcatatttcacatatcaaacacaacaatcacaccaaaactcaaaagtttccagtaaagagcaatattgagttgaaaaaaactcaaactcactcaaaactttccacaacaactatcaagacttaaaaaccatctcaaataaccgaaaaatcaagcttaaaaacaatttcaaacttactcaaacacaaacaaaacctcattctaaaattacacatgcaaaccatgctttaaccttcaaaattcaaagagaaaagaggctaaggacaaaccttgatcttcctttcaaatcacatgaatttgttgaaaaatcttggcttcccttggtgtttcttagggtcaatcatacaagagagagaagagagtatgtatgtatgtgagatttctaacttagttttattattttaatcttatcttctaaagaaatatcaacatataccttaataacatatagttatccactaataaaatcactagaagctaataacaataaatttagatggcaaaagacaactttgcctttacttgaccactaagttatatccaaatctaggggtaaaatgatcatatccacatactccacataaccccaatattcaaactatccgtaaatcttacctcgctaattacaaaatactaatccatatcgtagcactgaaaaactcccaagaggtcacccatcctaagatttaaccaggtcaagcacgcttaactttgatgttctcaagtgatgggccaccaaaaaataagatggaccttggtgatataggtagcaccaatcaatccattcaagccattttcaactgtgtagtcacatacctacatagtcttagaatcatcatacttgaccttccccagacgatgtgggattgcaacgcttacccaatatttctccttacggatcaagggactactacctatcacaaacttgagaaatccaaagctaagcatgcttgacctggagtatcttggatgagtgaccacatgcaaagttttcctaaggagcatgagagtgaggacaaagcacgttggaaacacttgtcttggtttgtagggttagttgtcactctaggaagcagccaagtgacgtaccagtgtataagagccataattccatgggggaaggcccaatagatgcttcaaacgggagcgttacaaatggtatcaaagccttgacctagccaaaagggtggtcgacgaggactttggaccccgtaagagggggataatatgacagttagttgtcccgtgatttgtaaggagaaatatcgggtaagctgtgcaatttcacattgcttggggaaggtcaagtgtgatgattttgagactatgtaggtatgggactacatagttgaagagggcttaaatggattgattggtactacttatattatttataaggtgcatcttgttttctggtggcccattacttaagaactccaaatttaagtgtgcttgacctgaagcaatcttgggatgggtgaccttctggaaagtttttctaggaagcgtgcgagtgaggacaaagcatactggaaacactcgtattggtttttagggccaatcgtcatttcaggaagtagccaaagtgatgtgctcgtgtataagagtcataagtttgtgggggaagacccaatagaggcttgaagcaggggtgttacagatctcatcaataaaataatctagtttattaaatccattattactcctatataaatataaaatttcactcttagacaataaataattatatttatagaattctttctattagtccattaatataatcaatataagtatttcgtcctctaatttattagttcataattaaagctggttaaaattatcgttttacccttctaataatctctttattccttaagtaccattaatttatagtgagcatttaatctgtaatccaattataaatttgagctcaataactgaatttactcccaaaattaacattttaagagaactaaaattcgattctttcaaaaagcttggatcgattccacttattatataatatattctcatccatccatgttattaatctcacaaatagaagttttaagaatcatctcaagagaaactttaacgagtgaatca

SEQ ID NO: 322395 - DNA, 936 bp, Cannabis indica
aacataaagagataatattacaagttagaatagataccctctatttctttcaagatacatctctagtagttgaaaatacatctacccaaaaaaaaccaattgacacatttatccccaaaaagtgacttaatttcaaataaacaaaaattaaaaattaaatattatttgtatgacaataaatattgtacattcccattataaaagtgactatactaacctatatctacattgttgttttccttgtcttatgtgagggatgtaaaacctcaaactcaagtgaggttttacataaggccccattattatttaaaataaaaagaacaatgttgcatttctttacgaggaattatcatttttatttaatattttattcataattttatatccaaaatttttttatttataaattttaagttttgaaattataaaataagaaaagtaaaaaaattaattaaaaattagcgaaaaattaacatcgtaataatcataaataaattataaaacaactaaaaaataatataatataattataaaataaacattgttaggcgatcgaagtttgccaagatggacgataaaataatccaagatcgacgtccacgatctttttggacagtcaacttccgtgatagacccttcaagtacccgtccgagtatcacttgggtagtctttgagcttggaccactccagatcctggagtggtaataagtctttcgtgtgagagaagctagagtaaggcaaggtacatctctacatacctcttcacctattcctgaaaatttttatccccgaatgttaaacggggcggggacggggatgatactccccgccccgacgaggacccgtttaatttattaattatttttttgttaatattttatattttatatatgcgtttgtattttttttagtatattaatatcatttttacaatt

SEQ ID NO: 322396 - DNA, 931 bp, Cannabis indica
tagtggtgcctaacacttctagacataccgccttataattggctagcgatactccttaaaagttattatattaaattagatgaaactcaatacttagttaaaccaataacaatattaatacataagtggttgttagacactacagcttcgttttagcatttctcttaaggagaccctgtttgtgatgcaattcaagaatcttagtcaactgttcattgattacttgttattgaatgcactcaagttagttagtataaaattaaagaacaaaatggacacttgggtaatgtactaactctttcaaactacacataattgaagaagaagaagaaaacactcaaacatgaaggcatgaatgaatctttcttcccattcttgaatcacataggttcaatataaatatatctgccaatcgaaaccttcagtaactcgaaccattaaacgaatcatgagctagatttgacttcagcaagttagtccaacatgcacaattggccattttgaagttaaatacagttcaaagaaacaaatattttactcactgctccagagacttctgcatttgacagcctcggaacgattaagaataagaataacttcatcagaagttaactagtatcgacaccatcatcatctacgctcgtgaagtaccaccatgttccctctcaacatgttctacaagcgcaacaggatcccgaaaccctttactgcacttggggcatgcatcaattgtcactttctttccccctaatctgttaccaccacccttttcgtggactttctccacgtgatccaccaaagttgtaacagaagaaaactttgcaccacattgcggacaaacctccatttggtcattgctgttactggtctgtcccacaccatcctttgcaatctgccatttttggctaatttcattgctcaactttgtcac

SEQ ID NO: 322397 - DNA, 724 bp, Cannabis indica
gccatggttgaggataaatgacacttatttttgaaattttattgtaggttgacgaggatgaaacttactggagacaaaagaagggagatgaggagttggagtggtcacatgattccactcacgtaatagcgcaattagctcaatgttttagtgagtaaaaacatctgtgttttttttgctcccacactttttagactaaacaaattaatattacacttctttatgccatgtttcataaaggctccatagatgtttgacttttactttagattgatattacatgaattagttacggttgttaatactcataagtcaattgtaatcattcaactccatattttaacaaagcttttacttcttggtaacttaattttcacctagcatcacttgtataagtttatgtgctcttatggttacattttttggggttgaatattcaaccatgcttatgggatcttgtcatcatcaacagtttgtttacaaaaatgttgtgctgatgtgaactgtgtagattgcttattatattgctacttttctagttcattatctggagggttaggtttttagaagggagattaagttcagtagattattctgtaataatatataatggacagacaaactatggtctgtttctatcttcatttgtttccttttccattttccctgatgatgtttgtgtgtttgatctcacttttttttttctttctttttctcttcatga

SEQ ID NO: 322398 - DNA, 1329 bp, Cannabis indica
ttcaaacaagtttaacatctcttcttcctctaggatacacgccgaaagggggagcttcctttgaatgttgagtgtaagttggacagagcttatatggtcttaaacaagcatttcgttataagtatgccaaacttagctccactttacttagtgatgatttcacccaatcataatctgacctattttttttcatttgctcaaagaacaatgcgtttcttgtcgttttgatttatgtgtatgatattgttattgctagaaatgctgataatgatgctcaattgtttaaagcaaaacttgactctaaatttaaactcaaagaccttggtcccttaagattctttcttggtttggaaattggcagattttctaatgccatttcaatttatcaacaacctttcacattacaactcctaacaaagataggttatctaggttcatcagtggcttctactccaatggaacctaatgtccaactcgaaaaagaaacatcatacctcctttctgaccccattccatatagaagtactttaattggtatgctcatttacctcaccataggaatgcctaatatttcttatgttgtcaataggttaagctaattcctttcgcttcttgccaacctcatcttcataatacccaacccatctttcaagacctgaaaagcacactgggtcaatgccttttcttccatagtagctcctcacctcaactcaaggcttataccgagactgaccttgctaccaacaatattcaactcaaagttttctcaaatgctgactgggatacttgtctcgacaccctacggtttattactgagtattgcatatttttaggacaatcatatatcacgaaaataaaaaaaggctatttatcgttcttcaacagtttcagagtaccggtccatggccaataccccttgtgagctagtatgactcttagctcttttcaaagacttaggcatcaaccatataccgcttaagctctcatgtattgtgacaacaaattggctatccacatctccaaaaacttggtctttcatgaacaaacaaaacacattgacaatgattgtcatatagttcgtgaactcattaaaacaggacagcttaagcttctccacatcaatgaccaaccataatcttactaacttgttaaccaagcctctcttctcttctcaattaagaaattactctccaagtatttttatacttcccttttctatgtttggtaataatgatactttatcctttgttggtgtaagggctgttccccatttatttatactttcttgtctttttccatttataatgggactatgagctgtaacttttt

SEQ ID NO: 322399 - DNA, 1513 bp, Cannabis indica
ttacggaccgaaaagcatgatacacgacaagcttagaaaatacggcactacatattaaaaatcttataatttattattaataataataaatatgaatttatcaattataaataaattaaaataataataaatttaaataaaatactgaatattataattctataattaaaatttaattaatttatttatagggtcataataaaaatttaagtaattacaagtatatactttaaatttttaatgatgtttaataatattttatataactatctttacaatattattagaaaagttattatataacttaacctttagaaataattatagaaaaatatataataaaaaaaaaataaaacacaaatttaaattcaaaatataaaaatggagtggcttgtttaaaaaaatacgagtgggtacaataataacgaacttacgggccgtgtctgacgtaccctttaaaaatattatcacgacatgactaatatttttctataacatagcacggcacgacctatttattgaaaagcacggataaatacagaccgaaccaaacacgtatgaacttacaatactaccaagataaagtattatcgtataattaattaatcattttctataatatttattaagtaaaataagtgaaatctaatattaaatttcactaataataatattacacctcacaaagatagtaggcaccatacctatcctttgagagcttctccaatgggacactaaaatcctaaaaatagtggagtttggacacaaaattgttccaataaaacactaaatgttatcctatatatgtggaaatctatagtgtcccacttattttagtgggacactatagactacatctaaattttctttttctttttttaatatataaataatatgtttatgatgaaatttttatatttatatacatattatagtgtgagataatttaataaaataatataataataaagaatatatttaaagtgtaatttttagtattgtagttaaaatattttaaaaaaaaaatagtattgaaatagtatccaatttaatactaaatttaaatttcacgaacttgccataatatttctcatatgataaacactaaattcccttttttattattatattatttttggctgtattataacacatgcatggaagccaacataatactatttattgtggacaagtgacgtatatataactttgactaatcccattaataaaaataataaataaacaaatgattgtacaaattaatttattaattagcataattaagaaaaatatatagaaagctcaacacacaaaaacttagtgattactttacttgacacatagaatagaatatagaatattgaagcatttgtacatgaccgttggtgttcccattttttaaataaaaacgtaagatatcatccatgcattaagaataagattaattatccaaattattatgtgctgaattgtcttgattgattcattgaagattggagatgggcttgactat

SEQ ID NO: 322400 - DNA, 987 bp, Cannabis indica
aaattcaataattttttttgggaattacttcatattttattttttaactttttttaaaaattttatagtttagattgttccggtgatttctatgtgggttgctatacggattttagttacaatttaagttgttccgttagttactataagtgatgtgtgaaatttcgtaaaaatgtataaaaaaaaccctaaattttttaagagtaaaaatatctaatatttataaaattaaaattttccttaaattctattagtatcttaaatttgtaactaaatttattttttaaaatttattgaaagcaactttgaaagtaatcaatactacacacacctgcatagatccaataatttaaaatttaagtcttatatgtgtcttattttttctaacgtatcctcctgtttaagatactaacagaaattgtaatgttccagtcatttaagcccttaaatttgtaggagtttttacaccatatactaaaatttcaattttttttttctttttcactgtgggatgaatttttttttcaaaaatactgtgtaagtttcatattgtgtactattttaagtttttactattattttatggttgttttttagctgttcaacagttattcttaattgtcatgttttgttgttttacggttgttttaatttgttttataaaaagacattattttttttttgtaaaaaaatttcgtgtggcggtaaaattgtaaactttgatccaaaatccaatatttttgtaaaaatctcaaattttaaacattatgatgtgtggaaaggttagattagaattttgttagtgaattttaataggcatcttaaatttgttaatactatctttgtttggtaagttttgacaccaaaattttagactggatggatactttatttttagaaaaagacttataatttggaaaatttgtacaatacaccgaaaaataattttttttacattttttacgaattttttttatttacattttt

SEQ ID NO: 322401 - DNA, 1500 bp, Cannabis indica
aactaaaaataaataataattaagtgttatttctaaaatatctttatttttattctatataaaatgtaattatctaatggtgttaataagattaattttttattaatatgtttaattttaatatttttaaattttatatttatttatttttctttcaaattttttaaactttaaatattatttttttaaaaaattaataaattagtttaatttataaaattttaaaaatagacataacaaaaataaaaattaaacatataattaggtatatatgcaatacaccaaataataatataataataatatagtaaatatatatttgatgttatgaatatgtgttcataaaatggtcaatctaatccaatccgtacgatccaatccaataaaaccccaaaagggaaaaaatatatatatatatatatgcatttgtacaaattggattggattggaaaatttaaaatctgcactttgcgaattggatattgattgatatgtaaaagtaactgatctaatcacatacttatatttataaaaaaatgttaaaaaattatatatataattaaaattttaatgtaaaaaatagtaatttaaaaatctaatacatataataatcatatattttaaaacttaataaatcaaatgtatattccattcttatatataatttttttttctatatacaatttaaaataaaattaaacatttctttatacatacaatttttttattctttgaacttgttattttatttagtttaatttgttattggagacataatataacaataatttattatatttttgttgctagttatgtgggaaaaaaaatatttttttataaatattaaataagttaatattgagaatctaacataatcgatttaatctgtatttttgcggattaaattaaattagatttaagttattgtgtggatcagataaaatctaaaatataaaattgacacgtaagtgtagatcggttgcactatgaataaaataatacaaattaaattaaatgaatatcctaattaagatagacactcaattatttataacctaggaatttaaaaatataacattttcttttctaccgtccatattatatagtcgggtgatttggtggaccagaacgtggtgtgggtcaaataaactttttaaaaaatctatattcttttttttaggtcttagtcgagtgttgaatttgaaaattacaatttgtatactaatttattttggttgtactaataagagcttggcacgtgttagtatggtcatgtgatgggaaagtaaagaccaaattgaaaagacatggcaatggaattaagaggacttgttcttgtgatcatgatcatgtctaatcaaatcattagagtattactactgaaattttgcaatctcaaagttggtagaaaaatttgaagcagaaactaaaggtaatttgaatagggaaatctaaattgagtaatttgcggcataaatacttaagtttaactcgcagttg

SEQ ID NO: 322402 - DNA, 1098 bp, Cannabis indica
gaacaaatgacatctaaacttacctggtatttggttggagatgatggaatagtaagaaaataatttttattttattattttgtttgattatattgaaatgctactcaagtagaattatcttttcatcatttcattttagttgaataattatttcatttttaaaaaaaaaggaatgaatattcagaaaaattcatatattttttatacattttaaatttaattctattttattcttattcttattcttatttatatttccatttctattattatatactcattcctcctaactaaacactacttaaatttaaacaaataacaaccatcatatttaattttgctagacagaatattaagttgtttgcttttttagttgttatatgtttatgtaattaattatattttaatgatctcaggttaaagagtgtgacattacagtggatgaattgatggaagcagatgaggtattttgtacgggaacagcagtaggtgttgcttttgttggttctattacatatcacaacaaaaggtatttcaaatgtccacttattttattcgaaaaaacaaaaatttctatttattttatttttactttttaaaacctcactaaattcgaaatactaccactaaaatatgaaagagatatttttttcctgtctaattcttttcaaatgtgttaatgtgaagagtcggattcaaaaccggttctcaaacggtatctcataaactctacacaagtcttgttgggattcaaaggggtgttattgaggacaagaagggatggattgttgagattgcttaactttacaatatatttatccaaaaattctttggtaatggcatgtattttggtcacattgataagaacgtctgagacctaaaatttataatccaattttcttttataggacagtatacaacatctctaacaatttttcatgacattctcaataatataaagtagtgcaaataaatttcaaaataatgagttttacacatgaggagtgcttcagaaacaaatgttggaatatataaatatatatatatatatatttaaatttttttgaaagctgtcttcattatagttataatattatt

SEQ ID NO: 322403 - DNA, 2113 bp, Cannabis indica
gaccatgcattacccatggtatatttattgggaacacccaactttattgatagttacagaaatacatgtactataattctgggaatcaccccaccaaaaacactataaataccccctcaaagctcattaatggggtcgagaattttgggttgcataagtgcaagaagagtaaatactcaccaagaacattctctgtatttaatatactcataaatacacagactcgtggactaaggctcattaatgccccaaccacgtaaaaatctttctcttaatttcttacagctctttaatcttttattattttattggttgccgaaaacctcggtcaacagtttgaaattcacttattcataatttaaaaatagaaaaggagaatgtaattttcttaaaaattaatctacacaaataaaatttctatctataaattttgtatcatatattaaaaaaaaatgtacaacaaattaagtctaacattcttttctcaaaattttagtcaagtagttagatatacattctatagccaatttttaaagtattgatattacatacaatttgtcattttaaccaaaaatattaaactaaaaatctaataatatattaattatttaactattattatgcatttttggtaattaaaaaaatatataattataaaaaccgcgcaacgtggcgggcttatttactagtttaaatatatttcaacaaatatttatagtttaaatttaattatgataactatttaattaaattgctctaaaccacttattttcacattataaaaatataaaatttagatcactttagaaaagtgttacttagaatttctcccaaaatatttagcagtttaagagaaagctaggtggcaatgagatccgtgctataggacacgccatcttactcactcccggagcttgatatcacaagaggataattacatattagtcttctttgggaagtgttgattagacaacgagtattccttacctcccatattttttcgtaagtaaatttgacccgaagaacggtacgcgagagcatgcaaattatacacactacttgaggctgaaaacactgtatacacatttaatacaacatggggaagaccatccatcaccttacgctgaacatacgtgcttaagggttcaaactcatagattccacacatcaattgacgactgcataaatgatctgtcaagtcataaataagagataagtcaaaatctcacaaaacacctatagatagtccaaatacatcataaaagtaggtgatcatgccctaagataagatttagaaaattgtgcaaagtatggttcaaacaaacacgataatagtgatatttttaccaccacaatgaacttatgaatatcccaataatgtacagaaaagggggtcgaaaaaaattctctataatatatactcataaatacagtgactcgtggactaaggcttattaatgccccaaccacgtaaaaattttattttttaacattcattaattgcttcgcacaactctaattagtggttatcgaaaaactcagtcaataataatttttttaatttttaaaaaatatatcataattaaaccttattgaattaaaattaaaaaaaaagcataagtatctgtataactgtatacaaagttatttttaaaatttaatattttttacaaataaaattaaaatattcacactaaaccaacaaataatcaatattgtaattttaagaaaataaaaattaaccatgaaaaagatgtaaattattaatttatttattttgtactttattttttcaatctaattaaaaagtgttagaagtaaaaatttaatacactagcttctcaaataattattcaaagaaaaattatattgaaaattagtataattaaaatttaatataattttattacttagttatcattaaagaatatatatgatttattttatataattaaaaaaaattaaacatcacctaaggggttatctaggttattggactaataaagtataactaatggtgaactataatttaaggggaacttacaaaaatactgtaatttagattaacttttacaaaaatactgtcacacgattttttttttaaaaatactgt

SEQ ID NO: 322404 - DNA, 851 bp, Cannabis indica
ataataataatgtaattaaaatttatgcaattacatttaaaaaaaaatgctattaatgaatatatgtaatataaagaaccatataacactaaattaatgttaactatttataataaccaaaataatgttatagtatgctatttaataaaatgtaaaaaatattattaaatatcaatacttttaattacatacgttatcttaacagttgcttaagtgttataaaatatatttaattatagtttttaagtatgtaaatatttttgcttgtagtgatatattaggtggatgatcacctgtgggagcatatccatcaaaggtatcgagagtgggagtaattcctcactatgctaaggatgaatcggagatgagatggttcgatgcagatcccgatgcagatcccttcttcaccccttcggtcatattggcaatcccggagacctcatgtcagctatagggccttatatacctcaacctgccttaattgaatcattgataactacctcaagggtcatattggcaatctatgagatcttatgtcagctataggggtcttatatatatacctcaacgtgcctttattgagtcatgataactacctcaacggttcttatcactgagatgataccacctacaacactaagctggccttcagaatggacaaaccttaatccctttcaagaggggttgtgatggatttcgaacccttaatccaagcaaaaaggaagatgcaagtaaagataatctctatcaacacactacacaaccatgaagttttgtctgcatctatatttgcttatgcctttttctcttttgttttcactacaaaaaatcttatttttagtcacaaattt

SEQ ID NO: 322405 - DNA, 866 bp, Cannabis indica
atgttgtctagcatggtcgacacattgaaaacaaggttcgctaatactctcatggctgcagaaatcaggaatcagtcaactgaactgtttaggatggcatcagatcaagctcgttttgaggagaccaagaatttcatcaatgcacggatgaagccgcatcagaatgtgcgtgatcacctgctctagattgcaagttactttcaggttgctgagaatcatggatctattgtagatcaagaaactcaagtgactttgatcttaaatagtttaactctagctattctgcccttcacctcaaattatgtcatgaacaagttgacttttgacttccacgagttaatcaacaaccttcagacatttgaaagttcgattggaggtccacaaaaagaaggaaacaaagctcctagttttagtaatgttgttaatggtacgaccaaaccctgaggcaaatattgcctctactttaaaacccagcaaaaagaagaaatggaataattgcaagaagcctcttaaaggatactaatctaaaggcaaaagaaaaagagaagtgcttctattgcaacaaaaagggcccctggaaactccaatgtcctaagtttttggcaaagaaacaaggtatttctatctttgcaagaaactcatgtgttttagagaattattatccccttgggttactaagtctggatctactaaccatgtttatttttctttttaaacttggattgctatcataacgagttgagttggatggctagacagaagggtggagaatgtccaagttgaagatgaatctcgttatcttctttaatttttgaattaattattttagtcaatgaacaatttagtttcaattattagtttgggat

SEQ ID NO: 322406 - DNA, 606 bp, Cannabis indica
tttcagtattaatttgcataatctctcaatcacgtgaaacccggtcggaccatttatgattggaaaattatagtaaataatcttaatttataatattattttagtaaatgtttttattttaaaacttataaaaaataactttttaattttttttttatatttttttaatattagaaacaaattatttaaaaatcatgatatatgtatattaattttgtgtgagatccttagaatgagacttgcagatgaacgtagtacttatcttggtctctcttgtgtcatgagaagtaataaggatgccattttagggttgttaaaagacaaaatgcagaagcgcattcaaagttggaagggtcgtttcttgtccaccgttggacgtgaagttctattaaaaattgtagcacaagctttgccaagttttgctatgtctgtgttcttattgcctttgaaaacatgttcacatctgaaaagccttatgactaagtattggtggagtttgagtggtaggaaaggggtgagttggtttatttggaggaaactatgcaaaaataagaactctggagggatgggttttcagagtttgcgtgagtataatctgtctttgtt

SEQ ID NO: 322407 - DNA, 570 bp, Cannabis indica
tacagaacgcatttttattttttaaaaataaattttttaaaaacaaaaaatttactttcattttgtgattaaaaaattaaaaaacaaaagtgttaccaaacgacacctaaattaataataataataaaaaaataatcattactttaccatttttaatgtttgattcttttctttcctctcaccattatgagcatggagctaagcgagaattatatgttaagggaaaaaaatattaaaatttaattaataaatattaaatacaaaatgtgtttcttgcatgtcaccaaaatttacacaattattttagcaatttctcttttaatgtatgctacatagaaaatataaattgacaatttatttacaaaaatgcctccataaggtaaatataatatttataccttttatgtgattttaattaccaaaataccacttatactatcacttacacaatcagatgatagttgcagggtggttgctgcgtggttgcgcggtggttacatcagaggaaggtttcaatcagacgatagttgcaaggtggttgctaggtggttggccaaagattgcatcaga

SEQ ID NO: 322408 - DNA, 833 bp, Cannabis indica
acaattagtaacattttttactaatttcttaagaaagataatatggagaagagttacaaaaatttgtttttatcatctttaagggatttgcaactcattttttatgattttatgttcatattatgtaaatttctattgtgtgttagtatttgacaaaattaataatttatcacatattatgttaatatgttatataatataacataatattcttcaccttaatttaagaaataattaattaagattatcatagaccctatagtctttattttttctatttttgaaaacaagtgtttatatataaaaagaataattacacctcctgattattatataatgtttattgttattgttattgttgatatctcaatcatattagttaagttttgaacaaaagttcatttagtcacattacgagccgtaaaattacaaattaagtctaaaaataataataaaaaaattataatctacaaacaaattagaaaatatattacattgatgcatttagttataataatacttcaactgaaataagttccctttagcatattaataactgtctcaaaaatctcaatcatcacaaattaaagatgttttaaaaaaattgtcgtctccatagttaatagacaaaccacaactttgccaataaaacgatcagaaaaactaagtccatgtttgatatcataattaaaaattatattttgtttttaaaatagaaaattggtttttataaataattagacttgtttagccttattttttaaaaacaatttttagaaaacaaagttacaaaaaataagaattttaaaaacaacaaactatttttttaaaaa

SEQ ID NO: 322409 - DNA, 797 bp, Cannabis indica
cttatttattttattattcttgtagtataacacgtggaaagcatcagatttatacgtctgcgttggttgttggacacttttgaggtcaacatatctttattcacttcaattttcaagtaatctatttacattaccatatgagcaatacaaaaaaagaaagacactttctttttgaacatgcaattaaattctacaacacaattattcttgtaaaacatgtaactaaaaaatcctaaattgaatataactaacttgtatatgtatagggaaatatagataaacttttgacgtcactgcatttttaatgcacaacacaaggctctcacagtgacatatataaatatataaatataaatataataataagggtgaatgaaataaagatttcaaagacttaaaaaaaactatcaaatataatcagtgaaataattttctaaaagttcttttgagtttcaattaacttgaatttttaagatgaaccttaccaattcaaaacatattgtctatgctataatagacaaaggtaagcaaatagggtagtatacaactttttcatttttttaaatgtcattatgttctttagtttaaacaaccactttaaatgaacaataattacatattttttttaaattattattgtgagactttgacatcaagtatatttttcatggagtcaattgtgtaatatttcttactaaatgagtttgtttagcatgaattcaattatttaatatttcatattgattttccaaaaaaaaattagtaatatttatttttattagtttattattttttta

SEQ ID NO: 322410 - DNA, 1035 bp, Cannabis indica
gagttacggtgattagagttttattatttttttaataaatataattttaaaattatacataaatatataataatatgtttaaaattatttgatatgattttattattcaattaatatttatatgtacaatttaaaatatctataaaatagccgcacgcaaagcgtgacttgtttaccagtaaaataaataattgaaaagaaaatctctaatcgtagaattagcagagaccgtattaataatatgatagttacatcgctatccgtaactgatatgataatttcctcacaaataagaccaaattgaattattttcatatgaaatgaaaaacaacaattagttagtaaacatgaggctagaaagcattgttccaaagaatatgcggtttttcggttgcatctaggtactactcaactcattccaataatgttgacaaaatgaatagttaaaggtttgttgcttttgagtgtccagcctaaataaaggtaggccccaatgtaatcttgaaacattttaagtctcattcattgatatactaatgatgttggaacttgttcgttcgtgtgggtctttacttgggaaaatatatcttctccaaaatgttgggcctaataataaagctaaacaaagaacaatgagggaggacactccattggtatgtatatacttgaacaaactcatatcttgattagttcacatatactctcttttggatcattaacaaagttctacattatcaatttcttatctaaaatctaaaaatatataatttcataggtgtatgttgtattgattgaagtacataattttcatttatgaatttaaagttcttttcttgcatcaaattttaatatgaatggtatattttattcatttactactgcaattttggcatttggagaggatttcttaaagtttacagtatcgattttagcaaaataagctaccgacgttgttccaagcgatggcataaggaagaaaaaataagggctcatatgacgtcgattattatataataaccgacgccataaggtctt

SEQ ID NO: 322411 - DNA, 1056 bp, Cannabis indica
aaaaactaatataattaaatatatcttttatataaaataaaaattataaaattgaagtgtactaataaatttttgcaatagttttttttttttctttttggcttgaaacggtgacttgtaccagcttgtcataaatacaagtgttatagctgttaagtatttattgttactaaaatactatcctcataagattaagacttggtaaccgcaagtacatgaacgatatattttgtttgttaagctaattttcgtttatattttaggaaatctttgctgcagggagtgagacatcatcctcagccgtagattgggcaatggcggaaatgataagaaaccgaagagtaatggaaaaagcacaagaggaagtgagacaagtgtttaacaaaaaaggcaaagttgatgaagcaggaattagtgatttgaaatacttgaaatcagtagtgaaagagactctaagattgcacccttctgcaccattgttactcccaagagaaagtagtgagaagtgtgttatcaatggctatgagatacctaagaaaactaggatcatagttaatgcatgggcaattggaagagatcctaaatattggacggaacccgagagttttatgcccgaaagatttgttgatagcaacattgatttcaaggggaacaattttgagtatattccatttggcgcgggaagaagaatatgtcccggcatatcatatggtgtcctcaatattgagctcccacttgcatttttgttgtaccattttgactggaaactcccctatggattgaaacatgaagatttggacatgactgagttgtttggtgtatcagttagaagaaaagatcatcttagtgtgattcctattgcttatgatgatttaaaaattaattcacaagaagggtaaaattaacatcattagtttgtttaatgatcgttgtggattgtaatgtttgtaaataagagtacgtattagtgatatcaattagggctcgtttggaacgccgtattatgtcgtattgtattgtattgtataaaattgaattgtattttatgcaatattt

SEQ ID NO: 322412 - DNA, 952 bp, Cannabis indica
tctcatatggtgacatgttgcttttcttgtaagaataagatttgaaatatgaaacactaatagtaaggttccatattccacgaatcaaaaattaattacacaattagatagcattaattatctcaggaaaattatatttttccatgctgtggaaaatataagtgtcgtacattaattcaattgtaatttcatgttcttcaaaaaaaaataaaaaaaaaaaaaaaattaaagtgagaaactttaacttcattaattttacataaaatatatgagtactctactacataagtagtgtattctgtcaatttagaatcgaatgaaaagtaattttcgtcggatcataatatcaatgattatgggtgccataaatttgggtgcttttccatgagtatttttgtaaaattaatccaaattttagcatttttgtaaatttccctaataatattcatattcaaattctcacacacatactcaatcaattcacaatattattatattttttttagttatataaccgggtttttttaggtagattcaagtggtccaatatttgggtttgtcaaatttttagaatccaaatccgatctgatttggtaccgggtttaactcgatcccacattgtattcttttaaacctaattttttcgagtatggatttggtcaagtttatcgagtaagtgaattttttgagtacaaatgttttgtcctaagtacaatgtcaatccaatgaccttttctttatgtggacaaaatttgccttcaattttaccttattttattaagttgattaatttttagggtcttttttatcctccctcttcccctctctctctaaaaaataagcatcttttttgagctctcttacgtgtgagaacaacatccaattactaatttttttcaaaaaaaaaaacttagatatatttttttgaagaagaaaaaacacttagatattc

SEQ ID NO: 322413 - DNA, 882 bp, Cannabis indica
gttacaaatcaaaactctaggttgtactcccaacaacttttctataatatacaaagcttgaatatttaaagaaatgtgctaacaaagaaatccatcagatgatttatattgattctttaaaataaagaattagtaacactctcatcaacttctctactatatccttcagaatactataccgaaaccctactttttctattttacttgaaatttttacatcacaccatacataaatttccttatatttatattatatcatttaaatattatatatttagatattatttatttatttaaatgaaaaatatgagagagaaagaaagagaaaagaagaagaaaaagttaaaataataataaaataagtttgaattatgaatagtgtgtagctacatttgaagaatgaattgtgctagataaatttcttagagtactcacaccaactctcttctctattctttaaaatacttcactaaaatttcactttatttattttacctcacacttttacattacatctcgtaggggtgcacatcgggtggatttggctgggttggatttttcaagttcgggtgtaggaaattgcataccaaacccgcccattataacactgagtttagagggtttctagtccgagtttgaaacgggtttggtgtgttccactcgatacacctgaaaaaaaatttaacctaaatctaatctcctcactcttcaatcctcacttactttcatcataaaaaaaagatacatctaatctctatcttctcctctctccttcacatatatatagcagtaattagcagtaattagccgataatgtacaaaaaattgagatgtaaattgatagtttgagcaataaaagtttccttattcatcaaaaaaaaa

SEQ ID NO: 322414 - DNA, 2639 bp, Cannabis indica
ctagacgagcaagtgcatctactatgacattctactcttagtggatctgcttgatcgtgtagcctttgacctgacttaacaagtatttcattttgctcaagtaggctaccattctatcacctcgagttgtgtatttacccaggacttgattcacaactaattaggaatcgctaaatatgtcagggtggttagtccgtacttcatgtgcaagcttgaggccatctattaggcttcgtattgattctcattattcgaggctttgaacctaatttgattactctgtgcagttgttgcgcccaagtgttgtaagggaaatgcctacaccagacaatttatcagtgcaacttccgtcaacatacagtttccatgttatttctcctggggttttgttgctgttcttgctctcgcttcttctctggctcttgttgtcctcttgagtctttaagggtctcaagagttgagttggtgcactaagccacgaagtctgtaaggaattgaccctttatggttgttcttggttggtatgtgatttcaaacttgccaagctcagtggcccatttgagtagttaacctgatgcttcaggtttcttcaaaatctaccgcagtagttgattggtgtacacatttattagaggtgccgggaagtagggcctcaactttctagaagccaaaagtaagctgtaggtcagcttctccatgagtgggtaccgactttttgcattgactagccttttgctgatgtagtatacagggtgctgtctgccttcttctcttgtgaggacagcactcacagcgtgctttgtgactgctaggtacatgcctagcttttcattatctagggattagacaacaccggcggttgggccaatggcttcttcaactcctacaatgcattttcacattcctctatccactaaaattttttgttgcctctgataatgttgaagaagggtacgcatttatctatagacttggacacaaatttgcttaatgctgcaatgcgtccagttaggctttgtacttccttgacagttgtgggcgacttcatttctaaaagggcttagattttgtctagatttgcttctattccccccgacattgactatgaagccaaggaattttcccaagcctacgccaaaagaacatttgaggggttgagcttcatgttgtagcttcaaaggattttgaagcactcgtctaggtcctccacataccccaagactttttggacttgacaagcatgtcatccacatacacctccatcttgcggtcgatgagatctatgaacatcatgttcaccagcctttgataagtggaccctatgtttttcaacccaaagggcatgactttgtagcagtactggcctagttctgtcatgaagctggtgtgatcttaattaggtggatgaatccttatctaattgtaacctgaatatgtgtccataaaactcaagacttcatgcctagtcgtggcatctactagctggtcaattctaggtagtagaaagcaggcctttggacaagctttgttcaggttcttgaagttaatgcagactctccacttcttgttgggttcaggtaccagcactcggttggatacccactgagggtagaatggttctgttatgaagtcattggccctcagccttttgacttcatctttgagcacctgggcacgctccttgtctagcaactacctcttttgctgaaaaggtcggatggtcgggtcaattttgagttcattggttatcacataggggtcgattccgaccatttttccatgggaccatgcaaataggtcaaagtttgaccatagaaattttgtcaatactgacttgatttttggagccaagcctttaccaatcttcagtcttcttgttgggtaagtgggatcaacctccacttcttccaactcttttacaggtccaaagattcctccaggatccccaaagcgaggatctatgtctgtgtccctgcattgggctaaacatcattaccccttactaggctcgtcttctagacttctggctggcatcttctcctttacagccttggataaggccaagttgtaatagtgatgggcagaatgttggtctcccctcacgcatgccactccatgccttgttggaaatttgaggcataagtggtggatagacttcactaccttgaagtcgttaagggccggtgagccaatcatggtgttgaaggctgagggaatgtcgatcccgatgaattattccaccaatgttctggtggttggattttcaccaatggtgaggggtaatctcatatacctagcaggtgtgataccttggccaaagaagccatgcatcacttggttgcaaagactccaggtcagtgagttggagccccatcttttcatacgttgatttgaaaagaatgttggaggaggatccctcgtccaccatacatcttgctacaatcatattcccgatttgcacaataatgaccaggagatcattatacgggaaacttaccagtgttgcatcttccttgacaaaggagattgtgggttgtatgggcttttgttgcttagacctctgatctttgatagctaggactttgaatttaggctcgtgatggaatttccaagcatagcgtgttgggttttgtgcccta

SEQ ID NO: 322415 - DNA, 680 bp, Cannabis indica
taaattgtttaattttgagttggtatttgagaagcaaaacgaggtggtttttatagaaagaacatgagagacataatatggagattaagatatcaattgaagtagtctagtccaagtcaaataaattaagacattgagttgatatattatatattcaatattttctttgtttttggccggcgcctatgcataattaagtgaatatattccttaggtacaatataatgccaaataaaactggatattactgcacattaattatacttaaattttgttatacaatattgttttgaatatactattatggacttactattgtccacctggcatgttaattaagatgagcttaatgatgttgtacattatttgtttggctaatacatttgatgaacgtatatatatttttaatgtatgtcaatcatggacaacacaaaagacggatgttcaagttgtttgtggtaagacggccaacagctcattctaaattcttctgtattaataacaattataatggacgttagttgtatacataattatttcttatattatttgtccaaaataccaaaaagttgcttgagaaatcattttattttatttgttcagaagatatattataaaaatagggatatgattttgtcccgttattgtactttcacggattgtaatccgtgatgtacgac

SEQ ID NO: 322416 - DNA, 817 bp, Cannabis indica
ttcatattattcaataataagtctttatagagctgcatggcacgtcaattaatattaatattaactatatatatgtaaacaatattataaaaatgtcatacgcgcgcgatcatatattaactacaaacattattataaatatatatatatgatccacatttaactagattaatttgcatgaaaatatgtacacaaacgaaccaatggtgcagatcggcaattaagcttaggttttgtaatgttgatatgattataaaactaggggaatcgatgcgaaggacccgacatcatgagtgatcgtatctatatatataatacatatgaagggaaagaaaaggacaattgagaaacttccaccatcaatataaattaattatgcaatatcctttcttgtcatcactttgtccgtttatcaatccccaaatctttacttttgcactctaattaatgataatctgtattgaatattcaaatggggtccagagaattgaacaatatgtatcacaacccttaggcataaaggaatacagtttatcctggctttttaattgaatgcatcagtaatcatcaaacgtgtaacatatgtatatgtttatcagtactcctattcatatatattatatgaaatatgtaatacttactattatttatatcatcatgcatagatgcattagccaataaatgcacattttatttatatatatagattataatattggaagaaaaataaaggtaagatatagatagaattgttggattaaaaatcatatgtgggcacatatgtataatgtatatgctattataaagtgtgatacaa

SEQ ID NO: 322417 - DNA, 796 bp, Cannabis indica
gagttttcaaactcaatccttgctaaaaccttaaatcaattcacaaagatagctgcaaacaacttaatctactaccaaaaagcttcagaacttcaattagaatgacaattatacttacagcaccaaaactcccaaaatcaagctttaaacctaacttatgctcactaaaatcaaataggaaaagctaggaatccataccttaaattgaattctccttaatgagattagcaagactacaaatccagcaacaaaatcccttctcttgctggttctttggggtgcacgaaagagagaggaaaagagggatgcttcaaggttttcttcaatttttctctccttaacctttctttcttttaatattcttattattatctaaggataggtttaataaaaggtagcttctactaaccactaaaagccaaaataatactaggtaaaatgacctatttacccattcaattaaaaccaaaaactaaacaacccaaggacaatttggtcatttccaaaacccgacaattaacacttaacaaaataccccgagcaaataacatacatcaaaatataagatatgactctctaaaggtcccaacgccgcgttccacagcttccgaacaccacacagaaattaggtaattaacataaaataccataaaaaacatatatgatatattaaatatatttctaaaatatgcatttcataattattaatttaatctcatttaaaaaccttaattatttaataattcaaagcaataattatatgcggtctttacagtatcaccctgacccaaaagta

SEQ ID NO: 322418 - DNA, 826 bp, Cannabis indica
acccgggcaacttgcatcatcttgtaatacttcgctaaatgcgctcgcagatcaattcttccctcatacaactcaatgtggtgcattttgaagtttttcgaaagtgggatcactgcgatcctcctcacacaaggtttcagatcttcatctttcaaattcgagagagctctactctgtttcttgaccaacttggtcagagcagctatctactcctccaatcgctttgtgtcactcttgggagatcacaacccatcatcttattactcaagtggtttctgaggtcacccccacatagccttgcttacttttgtacttctcgtacttggcatctaatcgccatcgaaggtcggtagtggaccagttcctcaaaatgtcccacagttgtccttctgtcctaattgactgaatcactaaggtggttcctttgccttttaagcttaggtatctttacactttgtcctcgttgcacagttttgcctctaggatcaaaagggcctctgggctcgaaagcacaggtggccttttgcatcctttagggttggccaactagattcatatcttttcgagaaggtttaggagtggatttttgtgggggctcacccaccttgcttttacctttatcctagcgaggatccgaggtttcaacttctgtttatttgtgggaacattcctcggccattacttccactgaaagctcattgtcagactcctccaagtcgtcaaacttgttttgaaggcgttctatcattcttttcatttttgtggtgagcttcctctgttctgctaactccgtctgagtagcttctaaatctttggtcactcgcaa

SEQ ID NO: 322419 - DNA, 675 bp, Cannabis indica
aagttatactggtgtaaaccatggtataacttgtcatttaagtacagaaaaggagtaacagccagtggtttggtgaataagtcagctaactggttggatgagtcgacatatcgaacatctagctgattggcaatgactttatcacggacaaagtgtagatcgacttcgatgtgttttgttcgagcgtggaaaacaggattggaagctaaagaaccagcaccaagattatcacaccacaatatggggcagattgttgtttgcaaaccaagttcagtgagtaaggattgaatccaaacgatttcagttgtggctaaggcaagggctctatattcggactcggtactcgatcgagcaactacagtttgcttctttgaacaccaattgatcagattacctcccagaaaaatacaataccccgaggtggacttcctgtcatcataacatccagcccaatcagcatcggtgaatccttgtatatcaagtgtgggactcggtttgaaggtgagactggtgtcgagagtgcctgaaagatacctgagaattcgtttgcaggcactccaatgttcaatggtaggagcttgctggtattgactcaatttattgacagcaaaagagatgtctggccgagtcattgtgagatattggagagccacaagaacacttctgtattgagtt

SEQ ID NO: 322420 - DNA, 690 bp, Cannabis indica
ggactggttccgtcgcttccttgggcccaccttggctcccttcgccgcggagatgactggcgagttcgcttctcagcttacccggtgcgcacctaagcggttcgcaacttgcgcctccctgaactccatcttccaggtccaggacctcagccactccctcaccgtggtaagtgctttgtagttttgcgtttcccttcatttttctttttggggattctttcttacacttgcgttgttgttcagcttgctgctgaggctggccgcctctccaagaacattattaatcatggccgcctctccaagaacattttcttataaataaatataaaatagataaaaatataaatttttaacaaaataaaaaatagatagagtgaatggattgtaaaatgctacctcaatgctttaaaactctcttttatatattgatattgatattgatattgatatattgattagatagagataatgggtaaaggcaagagaaaatgatattctagtaattaatttgtgattttaattaatataatatgttattaattaataaattatagagaagatgataggtttttagataatagtattaactttttttttttagaatagataatagtattaactttaaatattaataactagggtataaatccgcgcttcgcgcagttttaataattttttaaaattttatat

SEQ ID NO: 322421 - DNA, 788 bp, Cannabis indica
tatatatatttataatgacttcgtgtaaagtttaatttgcgtttacataagatattgacatttatgtaatgcattcaaaaggccatgcatctgtttacatttagttgttcctaacagactatattttaagttttttatgtattaattatgtcaattaagtaagacttataatgaggtcttggacttaataatctgctttatttataaaactattagtaatacatctttctaagcagcttctaacatacgatggatccctgttttcatttacctactatacatattaaatgtttgtcgttatgttgatttagtcaaaatgatttttgctgatgttgatatatcttattatttatatagaaaaggcttcaatttgaagaccaagaaacgaaagacgataaagtaagaggtactacttttgagtatctccaccgagtgctataaaaatggtgtatttctatattttagcatagttaagaaaaatattattctaatggtattctaaaaagtgtgttaaatttgacatatactaaaaattctgctaaatttgacataagatatagcattgtgtcaaatttggcccataataaattatacctttttttttgacgtggtgaacaaagtcacacatgataaacaatgcagcacaccacaattggcggtggagcccctcgaaccaggatagctcattgtctaaccgaagggcatgttttgccaaaccatgaactgcgaaaaacaaaacgcaagccacataggacaaaactgcccccagaaatatagacaataaaact

SEQ ID NO: 322422 - DNA, 1713 bp, Cannabis indica
aaggaatttgctgaacgacttatccaactgttattttttgcgaagcctttgaggatagggaattttgatatgatgattaatgctaatgggaggtgaagtttctttttattggagaccttcagtagtcttttttttttctacttatgctgatgttggtccatgttgatcctgatcttcatcctctgacttgtctttgtttcactcgacatagttcttaccacttctcaaagtaatcgtctttcaaatttcttttggattgacttcagtaatgcaaggaaagttaccttgattcttgttagccatttgagtagccaactaccccatctgagtttctaaggctttaatggaagatctagcttctttcatgaactgaagtagcaaatctgtctgaagattagaccctccactagaaccttattgttgtgactattattgattttgttggggctaatttctttgttggtaaagcccttgttgttactgatttgaagactgctcttggtaattctgtcgacgaccccctccttagttttaaccatagttgttgttctgagaatagttcccaatggctttagattgatccattggaaaactatttacatccaccaaataaatatcatatgtgtgagatccatagctcacaagtaacttgatctagctttgcttgagcagtcatcaacttagtcaaagcctcctcctgtgttgtcaacttttttatggcatctatttcatgcatatctgcaactttcttttattggctcctttcggttggccattgtctgttattcatggccatcttttcaagcagttcataagcctcattcgcactttttctcataaaagccccaccaactgcgacatctatgattgtttgagtattgccatccaacccattgtagaagttatgaacttgcatccacttttcaatcccgtgattagggcactttctaagcaagtccttgaaccttccaagcttcataaagagattcgctgtcttgttggatgaagttgttgattttagatctcagcttcgcaacctttgcaggaggaaagaacttggtaaggaatttcagggcaattcctcccaagtgttgatagaattgggtggcaaagataccaaccaactcttggcttgatcccttaataagaatggaacagcctcagtccgatggcgtcatcattaactccattcatgttgaatgtctgaaaaagctcttcaaagttagtgagatgcatgtttgggtcttctgttggcaaccccccaaactagactgtggattagagcatcttcagtatggccaacttgatctcaaaattgatagaatcaacgataggtggccatatacacaatctagaccctatcaggttaggaagcacatagtccctcaggtgaggttgattgcaaccatccgcttggtcttccacaccacctccattattgccattgttttcgacgttggcattgtcagccatgactacttcctactcaacctctatttcagctctttccaatcttttcctccatctgttttgtctacaaatcttctcaattttaggatcaacaggtaatctgacagttgctctttgatgttgcataaattagttgttcctaagaaaagagaaaaatttcaaacgaacagaattagtaataatattgaaaaaaaaaacaaattagaaaaaaatttaatttttattaatattaactaacaatcc

SEQ ID NO: 322423 - DNA, 1213 bp, Cannabis indica
gaaactcactctctctctaaccctagacgaactcgctctcctctccctcaaatccatccttgatcaacaatcgatcagtgaagctttcttcaactagaacgcagatgacccaacaccttgctactagtttggcatttcctctaattgggaaaagttttcttggactgatactcacctggaacaaaatctctagtaaaattctgtcggggatttggtgaagaatggaagatttatccaactcgacctctcttcgaacaagttaataggtctgatcccaaaagatataggcgagatcatgtcatttacggttactctaaatctctcttttaatcatttatctggaaaggtcccaaaaatattaggcaaatttcctgtaatggtgagttttgatcttcatacaataattcaaagggaaaaatacctcaaaaggggttgtttttgaactaagatccgagagggaaaggtggagggtgggtttagggttttcgaggttttgggtttcaggaaaagggacccaaggtccacttgaggtgagaggggagggccggagcaaggtgctcctggtctatcgccgacgcctcacaaggagagagaatatgtttctgttaacgcagattttccttaactaaattaaatgacctattcgtaataaatattgttctgtagttaaaatctacatactccaaaagtccttattagggatatttattgagtatagaatacaatattaggatttgaataataatatttctctctcaattttgtcatcccttttccatagaatttacccttatttataggaatataggttggcagttacccttttttaggattgattcaaatataactgttcatgaaacgtagataatctccacgtttcatttaatcacatgtgggatagtacctaataactgcccaactgctctttgtatttatcctttagacacttattgttgacttggaaggttacatctcgcttgatatgagttatcctccttgtccatcttaataaggaaacatactaagtgttgagaagtagtttgtctcgtcatattatttattggcattagtagtgcgaggtgatcctctcgctatgtgtaatgcgaggtagttatgttgttacatttattctgctcgagtgggtgaatatctccttcttgtctgtatatttcgaggtaggcatatgtaacgccctaatgctaaggcacgctac

SEQ ID NO: 322424 - DNA, 477 bp, Cannabis indica
gccaaactaatggcaaaaagggaaattgaacgattcccttacgccatgaagtctaagggagaaggaggagaaatgtgcatgcttcactctcctaccaaaactctcaaagcaatgcatgccaaccggccatggcaacaggtgtcaccaaaacctaaagcacctaggccatcgagctcggccagtataaggctacctttcaacctagcatggttagaaaaggccaagatctcacccacttcctggctaaatataaaacaatatctccctaaatctctcaagattcaggagaagagcaaaagcaagacaactcaacctagaagatgcattgaccacctgcccagtgcaggcatggcgctcaggacacttggggagaaatggtttcacgaggtaataaagatcgattcaaagcttctaaaaatgaggctgaatatgaagctttgattgctggcctcaagctagcacatgaagcatgggcta

SEQ ID NO: 322425 - DNA, 2192 bp, Cannabis indica
aaaaaaaaattacaacaaaaattataaaatatgatattattttttaaaaacaaataaaaaaagtttacatactaattgttgacgctgaaaagtcaacaccagctcactagattggcaagaagattaataaatttaataatttagagagacacacataatttatagtagtacaccccttatatcgcgatagtaatagggttacgtctactctgagtttttatttttcacgagatggtaattacagtaataaactaactatcaaaaactctagactagagagagaagctttgaccttgtgtagttttctgaatgtaaaaaatgagctaagggagctctcttataataggtgagtgagacccacaaaaataggagacaaatacaaataagttatttttcaccgttaatgatgatctaatctaatggtgaaaattagcttctggtggtgatggccaatttttggtgcccgatgagtctagttgcaagttacccggaccttatttttgtatgatgatagctttataattgagactagggtgtgagacatgacttgatatagcatttaaatagcttcaaaatgcaagttgaatcacatcaatcggataaaaattgagtgggttatggccattttactgaaggcagttcaggttccaatagccaagttgacatccaacggccaggttgacatcctagcgcccatgttgacatctaacatcaacttggacattgggtaagtgtagaaacgtccaaaggatgtcccttaagattcctaagtgatagttggacatcacttagtccatttatatgttcaagtgaagctggtcaccaattatcggagatgttgctattttgcgaaaatgaaagactcgaaactcttcatttcctggtgtgctggaaatgagaaatgcaaagttgtgagttcgatttctttgacttcatagatcattgtatttgtgaaaaactagactgatggtcaaaacgacatcagattcgagtaaacagaacccagcgcaccagaccatttgttgacctgggcattgggcctaattttttccaagcctcaaagatttaatttttgatacttctaaggcttctgaacttaaggataaggtctccaaccccattttgaccatttcaaattcaatggtcgcatcggattgggcagctcatgaaggcaacatccaaggttaattgtcaacctaagcattgggcccagccctaggtcaacttgggcgatgggccctatttttagggactcaggtttgttattttcttctcgagtagtttacttgaatctaattcattattttttatgcgaaaaaaaattcccataacactttttatttataataatattattatctaattttttaattttttaaattatttttttataatatttttaaaatcaatatttcttggaccactaaaaatttgtcacgtgtacaagtgtgtacacgtggataatccaccgtgacacttaactgtgatttttggacgaagggatatagagcaaaacataatgggagtttaggtagttttgcccctaaaaaatcgatttttgtggttaagtgttaaaaaatttaaagttcaggtagtttagtcgccaatatcccttaatttaattagtaaagatctattaacaagttaactgtggttaatttggacccttgggtccattaacaagttaaccataattaatttaaattttaccaattaattaatcaattgatacaaaacaaatatgtaacaaccttaaattaatttattttatttaataaataattaaaatatatataagatttcaaaaatttagttattaaataaccaaaatatcttgtgtttggaaagtcacaatgtaattggaggtaattacacaatttggcatgtttgtctgaccatgtaattacactgtaactatgtaattggaagtaattgaagggttccaattacactctccaattctcatggcccttcatgagaattgaatgtaattacactgtgtaattactataaactttccatattaaacattagctattaaaaaaatgttattttctcatgtaattactaactattttgccaaacaagatattaggaattcatatgtaattaccacctcatacccaaacacaccttgcattttaaaatatagtgtaattactaaattgtttaattactaccctagtaattac

SEQ ID NO: 322426 - DNA, 842 bp, Cannabis indica
ttttttttgaaaaagattagaacataagaaagatcaaaaatgagatttgaacaaaaggaaaaagaaaagaaagatcaaagatgagagcaacaagagacttttcttatatatatcactacaagacaaaaatgttattggcacaattaaattagtgttaacaaatttaatttttaatgcccatgaatttgtaggcacgccttgttgtgcccttttggtcgtgcctaaaaatgtcaacatataccacaaataatatcatgccaattgattgatctaatggcacgacacatgtaatgaccatttaaaattgtaaacactattagccaaactattatttaaaaaaattgtaatttaagattaatttatatttttatttacaatataattattactcttgtcaccagatctttgtggcaagacttttcttccttcgaacaagggaaggtctttccttgttctagaggaacctggttggacagtttgtcagtaatccatccccaatctatcgactagtctctcttgaagagaatttttgatgagatcctgacctcttccggcagttctttcattgaactaccttatcaggttgctagattctctattacgatggtctagctctgcctggtgagattggaggatgttctcttggtcatccatccatctcagaattttgcgtctctgttgtgcgaatacatcgcagccaacaatgcatggttctttagtttggctgacttggcagatgacctctccaagtctggataactcgagatcttatcccaagtctacatggggtcgccaatggctggcttgccaattattggccctgtctctccagcataatactg

SEQ ID NO: 322427 - DNA, 1089 bp, Cannabis indica
aacaagcaaaggagatggttgaggaagaggtagtgattgaagtttagggacagccgaatgtatagaagttctggccaaccgagtgagcaatggccaggcatttcctttggggaaatccgtcctatatcgatcatatgatgatgtaggaagtttagagcctttaatttctggaccatatggcagttctggttcaatatttagatctaacttctcaagaaaaagtgggcatttttgatagagatgaccaatcaatccacattccatacaatagtccggtaaccgctcataacgaaactctacccagaattcatccttaattcttgggagagaaatcattctaccacgcagaagtggtttgttgagattaagattaactctaaaacgcaggaaagggccccaaccctcattaagagaatcatcatgaaccgcaagaaactcaccaaaaatagaagccaaagccttagccaaagatcgggacttacttagaaaaggcaatctataagcttgtacccaaaatggactatgaatcatgatgtctggagtaagattcagatacaaagaaggatcaatgaggacaatgtgatggttttgaaagtgccacggttccttttccaacacccgagtacgatccccctcacatccaaagcatagcagaaataggtccgagtgatgatccttaatattcactttaaaacgcccatcccagtgatctgccatttgcctttggaaagtggataaccagacttttttgcttgttaaaacacaagcaataagaatgtattctttggacaaaacaacatcagaaccatcatcagtaatggttaaaatttccttctcatcttcagtaagaaccattgtcgatttcattttgtctaggagaggattcatagtgagaacagtataatataaagagtcaaactagggaatcagatcaaggttgatcgtggaaaagatggaagaaaagcaggggaaatttgttggaaaataactgtaaaaaactgccacagagcatgaacatgggcagacactctatccaactatccttacaaaaaccataattatgatattaatttttgcatttttttcagt

SEQ ID NO: 322428 - DNA, 681 bp, Cannabis indica
taaataatactaatttttataaagtaataatacttttctttagttttagacaatttatatagttttgtaattataatataaattttggttttataatatatttcgtattatatatatttattattatttttaaaaattggttttatttaatttaattttattttatataataaatatattttttctaaaaaaaaaatatatatatttttccggtgagcaagatgcgccaacaaaacttttacaagtaattaaatcgaggttactcacggacatcagaaaactgtactagcaagcgttaattaaaaatttcataactttgatatgttgctgattgttttatttataactagttattttttatttttcatacaatacaagtcacaacctcatatatgaataattttttttcaatatttatatataaattattatatataaaccgcttcgcaagcgcggctatatatttagcttctgttgaatttgcaatactaattttgtaattaaaaagatcttaaattgttcatatcttttattatttatacatataaattgattaatatcaactattgtgacagtcagtagtcccgtgatccgtaaggggaaatatcaggtaagctgtgcaatcctacaccgcctggggaaggtcaagtgggatgattctgaggctgtgtagatatggga

SEQ ID NO: 322429 - DNA, 972 bp, Cannabis indica
tttatttttaatttttaccttttttttattactctttaatttatatacaattttataggtcatatctaattttgataaattatgtgaggttatatttaattaaaaaaatatttatcaattgaaattattttataattatatttatttaatgcgtaataaaaagagacaattctcaacttatttcttattttttgatgtggttgagtgctcataaaaaacaagctaaacaagctaaaaagtaaatgccaatttttgatattgatgctatccttctttttatattttaaattaaattaaaataattaatatattaaataatgatgcgcgtgggattataattcttaaaaagaataaaataaaatattatatttttagatagcataaaaattgtcagcatcttaaaaattatttctttgagggaccacacatcttttatataaaaaaaaaacagatctaacttcccaataaattaaaatttattctcttaatttctaacaatttataattttgaaatccaagaatgagaatgactcttctcatgaatttttttttttttaaaggaaaatcttctcatgtagttaatgtgaaacatcttccataattacccaaacaaaaacataaattaaacaggttaaaatttttcattattaaaaaaataaacaattaattaatttatctcaaaaaaaaaacaattaattaattaaaatgaaaaatcaaaccaaactaataatacgaaacagttagttacttccgagttccaactggataataataataataataaaattaaaaatgatcgacgcgtgtcataatatgattggtgaagaagttaagaaagaagttgaagctgaactactattattacctcatagtagttttactcttttccaagttttaggattcggctttccaaaattcctgtaataaacataaatctttgttaaaagtttagacagaaaaatcatacaatac

SEQ ID NO: 322430 - DNA, 836 bp, Cannabis indica
agtgggagacagttagaaataattggagtaatattggggaaaataaagcaattaatataattacataatatatataaataaattaactaatttccaattcgtttacctcatccccaaatccctaaaatttcctctcgacaaaaactctaagctctgttctcctccatcttcgatctcaactactctatcaagtcacaaaaccaaactctagcccgagagaattttttttttttaattctcactattcttctttctctctcactcactcagctcattcagagaaaaagccaatacaagttaattttaatattgttttgttcaaaaaagaaaaaaaattgggagtttctatcttttttctaagattgggtttctctcttatttgagactctttggttgccagatcgtcgacgacggcacttcacgacctccatcatcctctcctaccgttccgtctcgaaaaaagctcagcccaatgcctcttgtttacagtatgtctttttttttaactcaaataatatctgagctatttttttcattcatccattccgtgtttttccttttatatataaacattgatgagttcatctacctggttttttctgtgtgttttgctagtaataacaaaattagggttgtagttgatggtattctatttatttattttatttcatcaagttcattgttattctcgagtttctcattcaattaacaatataaggggttttttctcttaatatttcatctattattatctttttgtaatgtttttctttatcgagttaattttactgtgattattcgtaatgaccgctttagtaatttggattagtaaaggc

SEQ ID NO: 322431 - DNA, 804 bp, Cannabis indica
tcatgtcccaatttaacccagaacttacacttccaaaatccttaaaattagactatcctcaatttttaggcatagcttttaaacctcaaaccatacttgaaattaatgatgagaaaattaggaaccacctcattaggtctaactaggaggaagcttttaaccattataggcgattcttacaagaagtcattaagggtagacattgttatttgtgagaagcagcttggcttgaattgtctagtttagttaatatccccttagtgagtttaatgtttttaccttcaacaactgttacgttttcaccaggaaacttgtatttgaaattatggctacaaaggctcgcaaatttaagaccccatagaaccctactgttacctttgaggttaagttgatagagtccagggtcaggtcaatcggcctttatgttggggatgttctaagatcgtgtgacattaggaatgagaaaggatgtcgtattcgataagtggctcaaagagaattcaattgttacccacctaaacgtctgcttcaagataaaggttgtagcaccagcgagcccactagaattggtgcatggagcgttgatcacataagggttggagttgttctccccctcacagtttacttcaaagaattctacaactaccttggtattgctccatttcaactcgcacccaattcttataggatccttgcctttttgaaatctctctaccatattctgaagtgggagtgtccaacaccccaattttttatttttattccgtcaaagcctatcctgtgagaaagcatggagaaatgcta

SEQ ID NO: 322432 - DNA, 839 bp, Cannabis indica
tcatccaaataagatctaatagcccaccccattcctgagtgttgaggctagcttggaagatcaatgtgtagattcttcaatcaagttcttggattggatgttcgattgttataccgaaagaatcaagaataccctgattgacatcaataggtaattgaatttctattagatttaatctatatttattatgttgagatctttaagcttatggtttatattagataaaagttgtttcattaaaattctccttccgcttttataattctgatatgaaccataaaaatcaacaatttacgttgggggacaaaagcagtcaagcgtaagcaacctcaacctgtactaatgaaatttcttaggtatcagtggcaaaggtgatgattgatgatacaacatcatcaaataccatgtttaaataaaccttggaaaaaataggtttgtctttgaaagatctggagtagggccggcaaaacgggtcaaacacaatgacacgactcgaaacccgcacgagagttagcgggtttgggtttgccttaaatgggtttgggtcgtgttcgggttgaatcgtataacccgtttaataaactggtcgtgttcgggttgatacgcctaacacgatattgacccgttaatgacctatttaaagttattttagtactttaacgtgtcataaatagattataaacgtgttaaatacttcataaacgtgttattagttgacatgtttaaacaaaatatacttataaacgggttacacgggtcgtgtcgtgtaaacccgtttataaacgggtcgtgttcgggtttcattttttgacacgattattaaacgggtcgtgtttggg

SEQ ID NO: 322433 - DNA, 1375 bp, Cannabis indica
tacgtggaccaataaaattgtgctatgtgtacaccatgtctgcgtaaatatacacatgaatatccaaacatggcattaacacttaaaatggatagaaactataaattactaacggtttcctaattttgggggttttaaccgctaaaatttaagttttggggttaactgtagtgcaagcaaagtgaaagtatttagagttatgccgcaattaacctactttttattgtatatatgtgtgcatttattaaattatttttatgttattttttagttattttaagtgattttcagaattttttttatctaatagcaattttttagttgttttttttttcttttttttttatttaagtgtatttttttatggtgtatattttttagtttcttcttgacaattattttcgattgtatgtgtatttctttgtagtttagatccatatatttagttttattttttttatgacacatttaattaaagtaaaatcataagatttttttattgacacaatatgcattaataaatattgacataagctttgtttataaaccgtcaattagaaaaaatcatttcatatcattttttttaaccatcaattaaaaattaatttcttttccatcaatcatttcatattatatcattttcaaatagcaaaatatatgttttatgtgaagtatgtatgtgttaaactttgtttatttttggatgtaaagtaagaaaaaagatatttattgtgttcaaacccaaaaaaaaaaaaagaacaattatttatttaaactctatgagacgtaaggtaaggtgaacatgtgctttcaatttatcggaattggtaatccaattttattatttattttaaaaagataactcacatttttgttttgcatttatttgtctattattatttttggaaaatgaagttttggtttactaaaaagcaaccgcctatccacgatgagaattttttggacatcttttttaatcagtaaataatttggaaattgaggtaacttagagcacctctaatggataactataaatgtggtgcattgttatttttagaatattttgttaaaaattaactctaatagtgatgtaaaaggtatgctaaatttgactcaagttaaaaattgtatcaaatttggcacaaaagatactatgtgccaaattttagttcacaataaataccatattttttaattaactatttaccactcattaatactattcattattaaaaaatatttttatatttataacttattaaaataatataaataaagttaattatttatatatttgggtgcactcttaatggatattacccatgaatgggtaatattagaaagttttgagtttttaagattaatttttctattt

SEQ ID NO: 322434 - DNA, 2391 bp, Cannabis indica
atatcttatcttataattcaaattaataaaacaaacaaaaaaataatcaaatttcaaaattaaccataaaggcaagtttgtggaaaaattaaaattttaaattcaaagcctactagtatctaaaattaatttaaattaattaaaaaataaataaatattaattttattctgataattagatttttatttgaaaatttagatttttcacaaaattctaccaaaatttgaatttttttcattgaagaatgatttttgaaactcaaaatatcacaaaacaagtgtgatccgagaaagaatgatcagttcatctcgcttgatgtgaacttaagagaatacgcgatcgagataggatctagttgcatactttgcctctgcatagtcaaagaataagcaggaccgagagaagttaatactggtcgtgcatataccaactatatgcgatgactgagtatatctctcatgcgatgagtaaagatcatttctttacaaagattttgtcggaatgactaatatgtgagatggctcgtcagaactcgcatgttccaagttatcaacgcatggaatatctgattatgcaatcaagagcaaaagtaaacatttaacgaaattggcccaaaggcccatcctgcgagtataatatcgtagagcccgtgagctcgtgtgtttggaatatggataaataagctgcgacttatcaagtcccatacattgctacaattaagtcaagaatggacacaactgttcttcatttattctttaaatttttatcttgattttaattctatcatttattgtaaaaacagtctaaactgaccgtttatgtaatcctaaagaacacttactttctatataaagggggtgatcttaaggtaaaactactgcctaaagtggactaagaagaccaagctctgactgaacaactataattctcatgtcttttctatattttttttctttcttttttctctattttgtagcttacactttgagtactcgctattctaagtgagtacttgcataactgctagtgagtgttcttaatttctttgaatactcacgttatttagtgttatccaaattcctctaacaatatttggcagagttgatgggaacataaataattttgagattttggaggagaatcgaaatggctacaacaaacaaacacgaacaacaacaatggtaccttcaatgtgggcactatcaaagttcctatttcgggaggaggaaaaatccatgtcgataccgttataggcagagtaagacacaccaatatgacttccctcaatctatttcctcaattctcatgccatgctggagtaatctcgacatcggcggctattgtgggacagtttccatcgattaggctgttgtcgcctctgagggtatcatcaactaataacctcgcagtacacggctatgcaggaacagatgcaggcaatgcatgcaaaaatcacaggaagagataagatttaagcccaatgtccaccacgagtcccaaaatgacgtagcactgataatctagtaactaataatactaggtgtcataatgaacattctaatatgactcgtaatcctcgggaacacttaggtgagaatgatcgaggtgggttcaacttgaatcaacctattcgtgaccccgtacgcggtagaggccccattgttcccaacacaaatcgacagcctagtttgagggtggaaagactacgagaagaggaggatcctaaacgatgcaacccacacagttgtgcacaaccgtgaattgaggtaaatgacatagaatctcattcctcttactcgaggactaactccctttcccccagtgtttacactagctaggtcaggatcggtgtttataagattaggaagaaggtaccatgtgtaaagaggcaacttgaaagactgcctttgtaacgccctaacaattaggcatgctacgattttcagataaacataacctaatctttctaaattaggattactagaaataagagcaaaatttaaggaatgaaaatataacttgtaaccatttaaatttttcaaaccattctaaaatattacacatgttccaggatcccgtaaaaattttcacaagatattacaagtcattttaacatgtcgacctaagccacaaaattgagaatatagatacatcagctggtagacccaacccacatggtctagtgtggcctgaacatgtacaatccaccgtcaagtcgtcgaactcatggctgatcacaaactgatttaccctttcctgcacagtagagtacccgtgagtcaagcccagcaagatagtataaataacaatatgcaatatattcacaattcagataaatactaatgccgccgcatctactgtctatttagcatagacctacgtgttacact

SEQ ID NO: 322435 - DNA, 1168 bp, Cannabis indica
ggcttcatcaccattggcttacgatcaaaaaacacatacccctgctgcatcactttgtctctctactctagactttggaatctggtgatgaagatgcctttggctagtaatcccactttaacaacctcatatttccacagcttccttacgaacccttccagtatgctaattggaggattggccccaataacttagcaaaccaatgatggttgccaataattgacttcatcttcaatatctgcatacttgatcttaaccttcttcttcgtttcttccttccctgcatcattcttcgattgctcaaacgaagtctccagcttcctcactatgttagatttgagaattgggggagaaatcctcttcccagaattaacatcctaagtagcccgatctgcaatagaaagccagtctgagaaatcttggcgaatctcactctgtctaataatcaatgcctccgattcctccggggagaagactctctcaacatactactctattgagtgatggcactgttccattgaatcttctgcttcttcaacttccagttcttgaatccctagtacagcatccatggatctagtcttgatgactctatccgaggaagatggtccagttttcttgccctttgatttccctttcccggccattttcactctttctgccatagcaccggtgaagcaccgaaagagagagaaggagcgggaaagagagggttacttaagttcttttttatgtttttatttgtgtttcgtttaattatggattcgattatgagctaaactctctatttagggatttgatggatattgattgagattattctatggattaatgttatttgattcttctttcttcctctattattgtgatttattcatatttgtgcttatttcatgtttaaacttgatcacctattgcatgttttatgatctcaatacaaaatctgaaaagtgagtattgagaatgctctaaatgaatagacatagattttgatgtgaaacgagagtattcacatagtttatgtgacttttagattattgcttaatgcgaattgtatgttgttctatctcagagatatgcagtagttggcatgcaatttaggacatttatgatctgaaaagagtttaggttaatttataatttgtcatcacataggaggaagaagaat

SEQ ID NO: 322436 - DNA, 1752 bp, Cannabis indica
gagcaaagcttctgtttttatttagagaatgaatataatgtgaataatacctttatataatcaagggtaatttaggtactaaaaaattataaaggtcatttactatattatttttaaaaaggaacattaaacttcgagaaaattatatcgtatatacccatttattttacttgttttgaatttttacctttattttcatattttttaagatatacctaacttttatagattatgtctccattaaaccccttaaattatataaattatatcgctagatttaagtacatagtaaaagtatattaggcaactcactcaaaaaaataaatgtattttaataaatatataaaaaaaaatcgatttattgcttaaacttgattaaaaaaaatatagggccatttacgtgtccccactttatagactggtactctgaatattattaaactctactagtacatatatattcactttagaaaaaaaaaatattgatatagcaacagcttaatagcttatgaaatttagagttagagatatttaattccttttgttcaaaattaaatgtaagagaagaaataaataataaagtgtaaaataatattgaaatttatctatatagatatatgatagtcgaaattgaaattaacaaggtcaaatatttaatgaaaagtaggcggatggattatgaatattggtgaaaaggaaagaatatacacactgtcctaccattttgttgaaaagcataaagtaatggtgaatttgtggaagatcccagctgatttgaaggtgatccttctctttcttccatggaaattaaacagtttataataattaaaatcataatgttcttatagaaatctgggaaagtttgacagtactactgtgtagatcaggacatccatcatatggtagtatatatataaatgagaattgttaaaatgaattattggtgtctagtatccttttcggtgtcatgctaatatttgtgtaattagagaaatgctaaaggatagtattggtgcctagcaccctcctatgtgtcaatatcgctattggtccaactaagtcttgggtctcatatagtttaatataataacttttaaagagtatcgataaccaattgtaacgcaatatgtcgagaaggtgctaggcactactgatgcttaatagtaatgctcgtgtaattaagtatcaagtcccatataacttaagaaaataacttatatagaatatcgctatatcaatcgtgaagcaccatctacacatacaaagtactagacactactaatattcaataacaatgccctctatatatatctctttattaattccttcttttccaaaacaatacaaacacaccttattatatattaaaatatatatgagagaggcacacatacacactactatatatatctataaaatatatagttttaaaaaattacgactaacaatggaaaactaaatcaactaaactttaaatatcaaataattagctatgacaagatttaacaaacacaaacaataattgaagaaaataggaatgaacaaagtatggaaaaccagaaaataaaaaaaccaacaccaagatatatactacttcaagttcgatagatcgatgtgatctatggctctactctagttttggaataccaccgaaatcctctctattgattgagcaagaacagatacattgccgtcgagatcaattctctgttgagttctctcaaagtgtttcaactctcacactttcaccca

SEQ ID NO: 322437 - DNA, 535 bp, Cannabis indica
tattaaaccttagggtattacataaatactcttcggtgactgatattgaagttgtattatgagggatgggtaaaaaaccccaccggggagtgaaatagaacatgaaaccataagctcccaagcagtgggaggagcccagggctctgaccatgtgcctgttgaagaatgagctgacaactcatattcagtggcttggttaaaggaacccaccagagctgtagcaaaagtgagtcttcatagggcaattgtcactgcatatggactcaaacctgggtgatatataatcaaaatagtctttcttatgatcttacgattgtgttaacccaaaaaattgacagagttgatttttgagattaatcaacgattagtcccagtggtcgagagacatcaactgtaagagtcggtcgaagaatgactaagtcaatgcatatggcctaaggatcactaatcttggaaatccatgcttgcaagtctcggattatatccatacaactcgaaagtcaaccccgtaacaactcatgagtagagttagtaa

SEQ ID NO: 322438 - DNA, 1207 bp, Cannabis indica
tgacctctgtctcttaaaaaaatgttactcgaaatatttcacaaatttcctatccaatccacaaaaaccatatcttatgaaaaaatactaatgtatataaaaaactatctactctgtatatgtggcctcaaactcattttacaaaatatatgagaagtgaagtgtgttagcgacataattcacgactcaaccagaaacttcattcgataattcaatggaaagaatgaagtaaagggtaaagagactgttaccattgaagtgtctcctcctaagaatgtagaaggcaattgaaataaacacaccagctaatccaacggtgacagctacaagtatcactactttcttatgatcacttcttgctttttcatgattcatttttggaactgagaaaaatcaaacataaaagttataaccaaaacaaaatacttgtgaacttgacataagttttttaccttttgttgaaaatggtattcgaatatatacagtttgtccatcagaactaagctgtcgaatatcaaacagatccccaaaccagaggacacagtcactgccttcatctgactctgtataactataagccatacaagagcaattgctcaagcatttcgccttgcattcgtcttgattaacgctcttactcaactgaatatactgactatcgggcactttcaagcccgaaaagccaagcaacacatctttctcttttgtatcacagctcacagaactgtttctcacacacccttctgaccaagacatcattgagttccaattttcttgatttttcggattgaaaccttctaaacatttgcatacttgattatttgttatgatacattccgagttagctccacagatgccatacttgtcacatttgtctcctggaattgtgtaataagaggaactccaactgttttcttcttctaaccattctgtgtattcaactgtttcggttaggacaagtcttacaatatttgatccattaaggaggctgaaattgtagtaaacttcatcatcattgttgacaaagttgtaaagaccactgtaccaataaactgatacataaccagtactagaatctccactgaaacttatgccttcccatggcgcttcgcgaaacaattttgctgatccatttcggataaatagttgagggtatgtatggtcatggtgtggttcatcaagctcaatcccataagtgaaatctcca

SEQ ID NO: 322439 - DNA, 934 bp, Cannabis indica
attttctaattcaatctaattcacataattcacacaaatgtgaatatctacactttacaaattgaacggattcaatttaatcgattattttataaacactataatagcaatggttatttttttaaaagctaatttctaccaaggtgatagaggacaaaaaaaaaatcatatttatttatgttttacttgaaaatttggttacagtgcatattcaatgcacccctaattatatattcctcattttttataaaagttgtgagaattgtgagatgatgttgatgtaaaatctaaaaaaaaaatctgaattgtgttgtgttccatgaacattgggcaatatgacacgtagattttaagtctcaaagctgataagatctttcaatgatatttggataccattattcacacaaaattataataatatatattttattttattttatttttgctaaataaaaacttttaaactttcacatcaaccacaatttatatttatgtatataagaatattttattaaaaaataaattaaaagggttttttcatttcttacattttaaaatagtttttttatttttttataaaatttcacaccgaaatttctataacaactaatggaacaatctaaattgcaaccaaaatctatataccaatccccataaaaactatttaaatagtatatgtagtaattcaagtctcaatttttgttagttataaataaaaatagtttttaaattgtaattagttatatatttttaaatctcgtttttaaaaaatatacatctatataaaaataattatatcttaataaaatatagaataatgcttaagtagagttactaaaaatatatttacatacagacattttttttttcattatgtgtcactctattgttttatatcaataataattaatttttttttatattattttttgaa

SEQ ID NO: 322440 - DNA, 1266 bp, Cannabis indica
aatagttgccgaaaatctcggtcaacagcttcgaaataggaaatcgtgcttccaatctctctctaaatagaatttgttgtttttacagaatgagtaaaaagttcgaaaactaagaccttatatttataagtgagatacactattagtatctgtgtcacattaattgtcagaatattttgacaattaatttaaaaaatcaaatcaaataataaatatctatatatagaatatcaactaattaactgtattcagattcagtaaatataaaatatttatttataaataaataatattctaatacatcgttcacatttaatgtatatatcatattataaaataatataacattataatttatttattttttaaaaaaacaacttactacaaataaagaaaaaaaaatattgaaaaacagggtctatgactctatcttatctacctctttgggggtttaataattactaattaggaagaagaggcaagagagaaaaaaagttgggagtgggttctcttgtgggcacacaataaaataaatgatgtgtggaatgtaccttaatgcatacttatctctagtcataaataaaaattcacttgtctactctaccttatacatttggggtggacctgtctatgaaataaatcattgactctaattaaactaatttagttgacactaattgagttacaaatgactaatgaactaactcttacatattaacttcatctaagtctcaatcatgataaataacaataaataaactatacctaaattcccattatttatttgtcaaagttgtttttaactaaagagcacttggtagtagtagtagtagtaggcagcttcactaactcctttaactaataaaagtaaataaatacaaggaggaggaaacatcatcattttcaaggatcttttgttatattttcttttttaaaaatgttagaaggtattgtgaggtgtaatatagttattggtttaatttaatattagatctcacttattttagtttaataaaaattataaaaacgtaacaatgatcatttttttttttttagaaatgctaaaagatatcagtggtgcctagcacctttttatgtgacaatatcgttattagtccaactaaatatcatatttcatagaatttaggaataggaatgagaatgggaatgggaataggaatggaatggaataaaatttaaaatgcataaaaataattgataaaaaaataattaaattttttttcttgttacattggaatgatcatt

SEQ ID NO: 322441 - DNA, 809 bp, Cannabis indica
gccaaagtagcgtactcgtgtataagagtcattcattctgtgggtgtaaggacccaatagaggtatgaagcggggacgttacaactcgtaacggtaatgactgtttccaaccctcagtcataaccgaggaataataaacacataatcaggatctcgatcataatcgagactataacaaacacaaccattaatcacataaccataagtgatggatatcacttctcttacctcggtctagaaattaagtgtgcgggccgacctgagtggaaacaaagctgggcgatcctggtcctatgtcacgacaactaaaattcaataaatgccttaaatcataactttgggaacaatccctaattccttaaaccagacataacctaacctccaacaacaacaaaataggatatacaacacataaataacctaaatcaggtactaggtaacacctcgagccaaaacagaactcgaagaaaacaagagattttccccctgtagggcagccggtcgatcggttttggtgcaccagaacccaccggtcgaccagttttggcagactagagaaactttggattttctccccaaaactcgaccaacacctaaccaaatttgtccaacagctccaaaatagtacataaatataaaaataaagtattcaactcaacaattcacaataattcatcatattatacaaatatccatgtttaaaattaaattgaatcctaaaatttaatcttttccatcttcacacataatagccacaaacttaagctaatagaacctaattaaccttaaaatcaacacccaaaacaaac

SEQ ID NO: 322442 - DNA, 666 bp, Cannabis indica
aaaaatataatttgtaaatttatttatgttgaactaatatttttattttaaattataatatatgtgtaaatattatatttatttaataataattttattatgatatagtattaagaatcgtttattgttattgttgttatatttaatatttcaagtgagttataaccacttagttagaattcttttagttttagatggaatattttattttgtaaaaacatatcatggccatacgcttcaattaaaagaaagtttcaaatagtgacaaaaatataatataattagagaactccaataactaaagatgaaattttattgttttataaagaaagtgattgatgctcctaatatctaatctaaactagaaaaatattcaaacaatcaatatttggtttgaactttgactattgctaacacttgcatcccaagtatataaaaagtgccttcaataatatacattagagcaacttttctccattaatcaaaagctaagctttcttacaaacctttcgactccaataaaagcgatcaagtgtttcgatgtattgtatttatagaaattttaattttcatacttatcttaattattggtttaatttataaatggtaaaaacgagcattgaaatggtcttagcacttaaatattcatatgacaataaaaaaaaa

SEQ ID NO: 322443 - DNA, 1526 bp, Cannabis indica
atacataatgttctatttatattagacaagtatggttaattatccctatacacgaataaaatgatacaccaaccaaaaataagctaaacctataacccaataacaataattaattttcaagtattcattcagaacttgggaaataatatatacaaaataattatatcattatatgatagaccaattgcgtgtaaagccaaaaaacactttatttctaatgagtgatattttgtatagttttgggataatgaaattgacagcgattacattaataaaaacaaaagtaaaaaagaattgaattcaagggggtctagtctagacctactttgtatccttggagaatcaaaagctacttttatatatcttttacaaggaaaaaacttatttaaaaagtaaataaacaagtgtcacttttctcttgtttgggataatttttatctaaagctcaaatgattgtatttctaaaacagtatattttataaagtggccaacttaggcaagttttgataaattaagatcaaacctaacctaacattaatcaactttcaaataatgaaccttcaatacccatttgaaccaattcctcaagatagcatagtttatagaaaaatcatcatcatcatcatcatcatatcacacacacatacacataatatatattaatttatataatgtgaaagaaatgtcatacatatacatacgtatacgtcacaacacaatgacatgtagataatcatgcattatatatttgtatcgtttagtttagtttagagttaatgtatgtacacatatatgatacatagtccacaattgttgaacaaatggattttacattacattgccatcaatgggtcacattcaaccatatatattatgtgtatattttattttaatgtatataatggcataattttcacgaaacgtctacttagtttattagcttaacaatttaatttcttcccacttacttgttttgagtttattagaatgtgattgactaatagtctatagtactaatcatatatatatatgataattaagacgaggtcatttcttggctgaatttagtgatgattcagtgtgttatacatatactatgttgaaagtttttacttttcaagtgaaattgtgtgtgtgtgaatacatactataagttggacaacatcataccactcccactcccactcccacacttattcaaaatacatattaccaaaactacatttttttctctttacatcaacttttctttatattttctttttatcacttaaattatatatatatctttatatattaaaagtgcctatctaacggcatttcttggtttaacagaatataccttaaaaataaaagaatattctgttaaatttaacgatgttaataggtttcatctccgttaacaaataaacccaataattaaacccaaaaaaataaaaaaaccttttttaaattaaaaaaaaatcaaaaaattaaacaatctttttttaaattaaaaaaaaatcatcttagccacatatctctct

SEQ ID NO: 322444 - DNA, 482 bp, Cannabis indica
tttttttaaaaaaaaaaatgttgtatgtacatattaaaaaaatacttttaacctgtattttgatactcgggatcccgacctatatagttataaggatataatatattaaagttaatcttccaagtttagtaaatataaaatacgggcgttacaaatagattggaaaaaatactctaaaaacagaaacactcattaataacagtgactcggggattaaggttcattaataccaaaccatgtaaaaattctcttctttaatactaattaattatttcaaacaactctaattaatagttcttgaaaacttcagtcaataaaaatttatcaaagacatttctagagcaaatcaagtgtcactgctacctcacgtcatttataagataaactcaccatatatgacaaactactatatatatatatggtaccaaacaagacacacttggcacatacatatctattctatataaaatgtgactatataa

SEQ ID NO: 322445 - DNA, 1561 bp, Cannabis indica
gatctctagcacaacaacacccccgcttagccaacccttggttagccccttagtgatacacctctggctagccaacaaggtgaacttccttcccgaaacttttgggagcaagtcacccaaaggccaatctttaaccaactaggtctaagaacgggtggaaacacccaagacaaaaacaacttaagaagtgagtacaatcacttcaaatacttagatccacctaactttatcaattggtatgatctaccctttgttaacacacaggctgcaccagccaatcaaggaagagcaggtggccaagccatgcccagggtagggctaaccagccaaagccagctgttaggtttagggttggttagccttgaaaatactctctcccagggtatggtcgactaggctctggccaatccagagctacaacccaaccaataagggccaatcaaccaggctccaacagcgtcagatccttctgagcaagcacaattggatcaaataagagacataatctagggcttagcttgcccaaaaccttcagaccttgaactggatatgttaaggggctcaccattcttggcatacatcaatgtcttgcccttgcccaagttcaagatatcgacgtggaagatgtatattcgacgagaagaccctctagcacacatcaagtacttcgagatgcaacttgatctctaaaaaattactggtgatttgcggtgtcagatcttctcggcaaccctatcgaaaacagctcagcaatggtacttcaagctggctcaaagaagattcaattcgtagaataaattttctcgagaattctatactcagttctcatcctcgagactgataccatcggaaaggaagaccttgtcgaggtcaaacaacgacagggagaacctttgaaggattatatccaaaggttcatggtcgatgccaccaaggtcaaagacctaaacagaagaagaccgatatatggccatattggggggcatccttccgttgagtgacttcttgaaagatatttggaggatctcgaccaacaagataactttatcaagctggaggaagtcgtctgacaagcccatacaaggtaagtcaacaataggcagattgaacctttttgaagggaagagagaattgtttttcaactaagactttgaacagtaggaaggtgggataggcttgggattttagagtaagggggaatatccatgtaaacatactgaaatcatctagaaagtgaatgtagtacctatatccttccttggatgggacatatgaaggttcccaaagattagtgtgaaccaattctaagggaaaggaagctctattggatgacacatgatatggtaattcgtgacttttgcctaacttgcaggcatcacaaaacttgagttggttaagggtgcttgtgtgattgacatgttgggttttgtgccctaaataaactcatttcaatataatcagatttacttactaataaagatcataaataacatttttatgttgctatggttttacgtgattttatttctattgattatatataatataaatgtaatgaatt

SEQ ID NO: 322446 - DNA, 882 bp, Cannabis indica
gcttaaatgcacgattataatgaagaagttgcaataatcagatcacttacgtcatgcatcatgatttttgtaccttagttatgattgagatatctctctagtctttgtctagatacttggactggactacgtgaactttgggatacagaaagaaatgccttttttagcatctaataaacaatattacacagatttacctctttttgtgattttacttactaaattaaccctctgaattgaaactatgtagagcatctacaaaggagtgctattaaattttatttttatttatttatttactaactaggaaacaaagagtattatacggtagtattttgtttagtgatcagtaaattataaaattatatcaaatttcaaattttaatacttttaatataattttatataattttttttaataataagagtaattattttactaatttttttaataaaaaatctcttattagaaaaagaaagcaaacaaagagatatctttaaatgttataataataataaaaaaataattagagattgatgaattttcatacaaaatagagatttaaaaacacaattgatagatttataaaaaattcatcatataatttcaaaattattgtcatcattgtatttcatttatagtcgttgttacattcaaagctgatgttatcactgtagtgtagtcattgtttgtatctcactttatttgttcactatcttttctaactatttactttttattatatgaatcagtctcttataaatttattacttgcgcaagtgttttaactatgatgaattatccaatagatctcgattctcaaagtagcttccaagcatagcatctctcgacttttttacaaccatttaaaaaacaaaaaa

SEQ ID NO: 322447 - DNA, 1032 bp, Cannabis indica
ttgctaaaagcaaggtcaacagtttataactaaattgaggtctcaatctatgttgtgttgatttatttttttttgaacttcatcgtcatgtgtatttactaaattgaatcccaaatgtattgtcagtttaatcctattaaagctagtctggagtgtgttgggaaaattgtgacccacgagagtaacaaggctaaagctgcggttatggaggtagttaagaagcaatttaaatgaccaaagctcttccatcagcatccataacaaaaccagtactcagtccatctaagtctcctcgagaccctcgattcagcacagtgaaggctaggtctgagaacatgtggactagaaagagcaagtctcccaaaacccgtcactctaaaaggttggcatcaagtaacaagtagttcacaaacactattgtagctaactgtcacaaaagttaggttttagttcataagttatatttagtgttatatattgtataagtttgttggaacaatttgtatcatactactgtaaggtgattaggaattggactaatgttggtgattagcatttatacttgtggtaattttcggaattcggtggaaccaattattattactatatggtgattattattactaatgttatcttttagcatttactataagctttttggaattattttcaccataacactatatgttaagtacattattgagaaatttaaattaaccaatttaacaattttgttgacaccttttgttttacgccaattatgtcgataccaaaaataataaaaaaagggaatacctagaaatggtgatagcttcactgatgtagtaagataatggcattatttctatacttgaatctaaatttggatcataaaatgttctttatatgtacagtacaatatctaaaaatatgaattaatcaatttaccaattatgttgacactttttgttttattaacaattatgtcgatacctctaatttattaaaaataataacaatggtaccaatatattaaacattaaactccatttc

SEQ ID NO: 322448 - DNA, 976 bp, Cannabis indica
ggtataattgccatccctaagtaaatatagtttcaactttgtattttttaaaaatatatataaattatattataatataaaataaaaacattcaaaaaatcagtcgaaatagctcagatttaatgggtgggttggctttatttttaactcacccaagattggagaaattattaggggtgggcgtcaattggtttatattacactttaggaagtttttttatttttatactttaaaatatttttttttatttttacggaatcccatacaaaatacctatagcaaccggagcaacctaaagtacaaccaaaattcacatagcaacctacatagaaactaccgaagaaattaccggagcaacccaaaccgtaaattaaaaaaagttaaaaaatagtatatggggtaattcccctgcattttattcaactcagtgtaaagatcggattacgaaaaatcaagtgaaatttgcctaattaaggggaaaaattgtaaaccgcctaatgagttggttggtttcttcgagttaacctgtcaaattgactaccaatatttttttttatttaaattcaatttttatattttaattaattgtgataatgatataaattatatttatatattaatttaaagttcaaatcaaccactttaaaacaaacatggtagtttgaactttatatttattaaatatgtatataaattatattatagttcagattgattgggtaagttagcattatttttatagggcaaattaaatttttatcaaattttcggtttatatttttcgttaatttattcaagtttttctatttgtatcttttgtctaattttttcaaattttttaggttaatttgagcaaattatttaagttaagttaaacaatttacaaaaatttatgtagaatcccaatttcactacacacaaaaataaaagtaacaagagtgaaaaaaagaacgaacatttttttttttttttttt

SEQ ID NO: 322449 - DNA, 993 bp, Cannabis indica
atagttaatgacattagaagtaccttgaagatgggattatagagacatggggttaagggcctggttagggacacttttgttttcgataaggtcgtatttagaataaagatatagccagctgctcccatcgtttgtatatgaacaagtttctagcaaaaaaaaacaacaaacactagaatttttttgcttttagtagcactagtattttttttttttttttgtagaggaaggatgccctaggaagaaagtaacgctagaaattgagagaaccgaatgcgaaatattgaagtactaattaactatttatatataaacattttatttgatagagttacatggaggaacacgtggcataaattcagagcagtctacgtgttgctcagcagattcgccagttcactgatgccatgcaagctatgggagttcaattaataatttagaaggcaactaattcgcgtcttttataatggttataattttttaggttactaaatttttgtattaataagtgaaataatgtatgcttaatttatgatataaataattaaatttaatttttagttgtagataaatatttgaatttaatttttatttaagttatttgagtgtaattgtgtaagttaaatataagtatttatttataattgatgttaaatttaagtatttatttataatcgaaaattaaatttgttgtccttgaatttgggtcaactgacaatggagctttatttattatcaataatgaccacgtggaaattgtaatagcaaataataaagtgacacaatgatttattgtttagtgggtaatgacctactctcctttttattgtattgattctggaaataataatatgcatattacaagcttaaatcttgtaatggtgaaaacaaatttagaacaattgagagaaatagactaagtgctgcactagagaggaatggcgtgtgtgtgagagagagagagagagagagagagagagagagagagagaga

SEQ ID NO: 322450 - DNA, 905 bp, Cannabis indica
acgaactaaattcaccaaaaaatcctcttttcttgaacgtttattaccgaaaaattttgtcagtgaggtgtctcgtcagcaaaaggttaccggtgaggtttagttaccttttgtcactgcaaaatctcgtcgacaaaagtctattttcttatagtgattcaagcttatttgtcaaagtaaagcaagtaaatatggcgattgttctagtatctgtcgatgatattattatcactagagatgataaaacagagattcatcaaacaaaggagaactcgtcagttcgctttcaaatgaaaaagcttggagaattagaacactttcttggattagaagtcaatcaaactaaggaagctttatttctctatcaagtatgctaaagacttattgtaaatatttggaatgctcaagtgcaatcccatctcaacacctatggaagctaatacaaagttatgtgcccatgttgggaaggacatgcctgatggagcaatatataaacctctggtggggagtctaatctaccttacattgactcgaccatatatttattatgcagtcgaagtggtaagcagatatatgcaacaaccaaagaaaccacatttagaagtagttcgatgaatattgagatatgtcaaagataaatcaattattgtctcctttataaaaaaggtgataagtgcaagattgttagatattgtgatgcagattatatgctaaagacagggacggagggactttagcccatgtgtaggctaaagccctcactcaaatatatacattaaacttttcacatattgatatatacatatattaattcacttcactcaacttattaaagcccaattcacaaaagccctcactcaatatcttaatcataattcatgggtctactcttattctaatgaagc

SEQ ID NO: 322451 - DNA, 993 bp, Cannabis indica
aagaagctcaaagactcggcccccttactgccttggcttgtcatgggagactttaatgagattatttcccacacagataaattaggaggccccataaaaaatgattctcaaattgatgatttccgaaataccattgatgcaagtggattacaagaattgatatttgagggtgagagatttacttggcacaacaacaatacttgtggttccaatgtgaaggaacgattggattatggattcattaactctccttggattcaggtctttaaggttccaattatttcccatcttgatttttttcagtccgatcacagggccacaatggttaatgctcagcctctttcgtccattcctgcacagaaattcaaatctagatttagatttgaaaggctatggctccatgaagatgattgttctaccattattgcaaataactggcattcttctttggcaaacccgacttcacagttgctgcaaaatcttgcagattgtgccaccaacttacaatcttggcatagagctaaatttggagacttaccaaaaaagatcaagatctctcaagacaaagttgctgcccttcacaactcatatgacactagtagatctcattttgaagaactcaaatccagtgaacacatccttgacgaattactttcccaagaagaagaatattggcaacaacgatcacgaacttcatggctaaaatcgggtgattccaacaccaaattctttcaccaaaaagctaatactaggaagaacaccaacagaatcaaagaacttctcgatgaccaaggtgttttacataccacacagcagggaattggttcgattgttgagaattattttcaaaacattttctctactgctggttttgatgctgaagcagtacagtatgtgttaaacaaagtgccgtgcaccataccagatgagattaacagattgctgctggttccatatactcgtgaggatgtttttaatgctctatcttctatg

SEQ ID NO: 322452 - DNA, 1075 bp, Cannabis indica
gatatttttctaatcttcttttattttaaatctacaaaaattaaagataacatgcgtaaaaatgctccaaacacgattaaaacataatcaaaatatatactaaacttaatttaaattaatactaaaaataacctaacatcaggaaaatcatctaacatcaccacttgttcgaaccaaagctcacgactaccaaaccatcgttgatatacagatgctttagaggcatcaacaaagccttgaacagaggatgggtcgactgtggatgtaggggctttcggaagttttgattttttagagcctttggatgactgtttgggagatgaggctgtagctgggactggaataggtttggtcttggattatttttcaggtggttgatacgtggtatcacgtgaagatattctttttggctgaaccctttcactgttttgggaaggaatagaaaccttagatggagcacgaggtggtcctatgggttttgatttaggcacagatgagggctggacaggagacgaaggagagtggaaactcgaagaggaacaagtgactctttttgacactgtcagagggggtgatgacagagacgaactagcctttttagacaggtgaggagccttaccttgaaaagtgcaaggtttctgaatgactggaggcgatgacggagacgtagtcgactcaagacatggaagacaagcagaagtactaacgtctgattggtaaggaacaatggaacgatatggattagtcatactagtctcgactacaggtgcaactacaggatcaacagaagttgacaatggtggaatgagaatggcaataggggtcaacaccatgggagcagtattctccattgtagatagagaaatgtgaaagctataggtcttatggtttctgagagtaaagtgagagagaaactattcactttccttaggccttcagtagaggcacctgacaacggctgaccaagcaaagaaaacattaatttttttttttaaatttgtaactttgaaaaaatgtagatgtacacgcctaaaatgtaaatagtttcctaccaaactagacggcataaaaagcg

SEQ ID NO: 322453 - DNA, 693 bp, Cannabis indica
taattccttttagtgctcttaaacaactcatagtataatatgatataatgcttactttgaaattaattctacaacaaattgattacacatgtttgaattaccatgcaatatgtaattgatgcaataaaaataatattttattgaaatttattactatgataaatataggtttttgtttgtaatattctacaaaagatctcactataaataatatggtcccctatcattagggccggccctaagcataggcgggctaggcgcgcacctagggcccattcattttagacgcccaaataaaaaaaatatcttctaaaaatatacatatttttttaataatttttaaaaataccatttatttttgtagtaagggtctaaaaaaatttttttgcctataactcatttcaactcagggccggccttgcctatcatccatcaatgtatgatgttctttgactcgtcgttattcacgatgatgaagttattatatgttaaaaattacttatagatcggatcttattactttcatattatttgtaaattaaagtttcataacatataaaaccctaaaatatatatatgttaattctaaatgtggttctcttaagtaagtgatcaagaatcttaaaattagaaaattagaaaaattatttgtcatttttgtgaaataactttgcacaatttagtgagccgaac

SEQ ID NO: 322454 - DNA, 2757 bp, Cannabis indica
tggcgcttacaaagcaacgtaaagtctcgagacaacagttgaccacttccgttagtccatcggattgggaatggtaggccgtactatgcttcaatgatgtgccttgcaaccgaaatagctcattccaaaacaaactaaggaagattttgtccctgtctgagacaatggaacgaggtattccatgtaacttatcaatctcatgaacaaatacctctgccactgttggttccgagaaggagtggcgaagagggacaaaatgactgtatttggtgagacgatcgaccaccaccaaaatagagtcgaatcctttggaaagtggaaggccttcgataaaatccatggagatgtcctcccaaactctctcgagaatgggtaccggttgcaggagtcccgcgggggattgagccaaatacttattctgctggcacaccgaacattcagccacaaatttcccaacatctcgacgcattccacgccaataaaaatcagctgccaaccgttgaaatgttttaaacacccccgaatcgccccccacgttgctgctgtgatactcatgcagcagaaaagaggtgaaaggagaggacgcaggcagcaccaaacggcctcgaaacttgaggcagccatgaattgatttggagcaacttttgatcgcaatcatgactaggataaaatttcttgtcacacttgaagcataatctccttgcatgtttttcttgataatccgcttcagataaacatcgataagtcgggaaattcgatgatcgattgttgctagctctggaggctgtcgaagccatagatgttgatattgagttcccttgattgatctgtgaacttgctggtagggcctggatgtatacgggctgtagggtggcctagtggggatgattgggctcaaattaggcttggtatgattgggcctagtggctgggcccagattgagtaaatggtggccctcctccacacgttgcgttgtgtccattatagctaccaatcctttgggttgaagcaaataaagtgcaactttgatttcttcctttaggcctttcacgaatgacccctccaggatgtgctccgacacaagaggcaacacctcccacctgacacgatattccttcacggtcctcgtccgagccaccgagagaaactcttcggagagggaggggagcggctctaaatcaaagtaggatcaattatttcaacatattctaagaggtgattgggcgacgctgattttcccattggaaccaagacagagcatcaccgtcgagatccacaatcgccgtttctaacatcatcgactctgtcaacttcgagaaaaggaagtaccgctcgctaaggtaaatccaagcgttcgggttctcaccattgaacagaggaactttcatacgtggtggccgaaaatcgtgagtgtaggtggaccctgacgagaatgaccccaattgaatcggaggtacctccggagaagcgaattggggcatcgtctgtggtaacgtcattctcagacccgtgggtgagcgttgggtattcggctgagcacctacggaactggattcccccatcgatgatgcattcccctcaatcgcacgtcgctgccgatccacgctggtcgccactgcttcaggcggagttcgagcgggttggagcatcatttgcgagatctggcccgccatcacttccaagtgtttggtcatggcaatatcgatgtgcttggctacaaattgctcaattgaggtgtgcagcccctcgtgagctacctcatcgttgagcttcaaaacatctcatcagagattcgaaacttccaacccactttctcttcaatcatttctgccatcgcatcttttttgggtcccatgaaacgagcgctctgataccaatttgataggaattattctatcaaagtgatattagcagtaaaaattagagaataagggaagaattggagcaaaaatgaagtagtattgtattaaccgggaaattcgagagcctggactctccttacaataggaaaacaatcataattctcataccctccaacagaaacacaattcttatttatacttagtcctaaggacttactgtgcaccgcacctcacccgaacatttccctcataacacaatttagagggctgcatcccctacatcactccccacattaagtttcttgtttctcttagcatatacgtatgacaatggaggtctatcaaacccacactgaaaaattattgtaaggtgtactacaccctccattagatcggacatctatagcagcctacttgaaaagtggcacttgtccagcaagacttgatctaagtcgaaattgtttgaagccataaaagtaaccacacacaaaagtttcccacttgtcaactatgtgcttcggcacttcaagtgccacactttaaagggaagatggaaaaagaatcaattatttatgagttatgacatttccaaaatttgttgttttatgtactaaaattaaattatcaacttgcaattctctgccatttcagttaataaagtatgcattcaatagttgaacatccaaatattttaattatttttctcttaaaccccatgggtacctgggccccacccaactaatcccacaggtgatactccacggggcctgctgccaacagggttcgctggtgttcaaaccagataggtttgtgataggaattttctatcattttagtacaacagtagcaaaagtagagataatagagctaatatattgatattggaatgaaaaga

SEQ ID NO: 322455 - DNA, 1338 bp, Cannabis indica
ggggcataaaatcccaacagttatgttccatgatactatatttcaaaaactcaatccaccttcctttattggattacatagctcattctaagctatcgttcccgctccaccacgttctataacacccttctaaagaaatgctcttcaaatagcattaattttttgtagaattttcttaggcaagagcattatttgagcccaataagcaaatatagataccagtactgagttgataagtgtcactctaccaacaaatgataagtttctagaactcttcctatgtcttcagctattaccaggtctccgcgtgtaggcttattgttaggtttttattagtactattttttagtttgattataatgtatttttaaataagtttaactcttattttgtgtaattttacgcttttggtagttgttattttggaggtctagaatagaagaaaaatgaaaaaatattgaaaaaaaaaatgagaaaatggtcaaataaatcaactcttgaggaaatagtactaagaaattaattcgtgaaaaaatccagaagtttcggtgcgtttggagctcttaaggcgaagaaattacaaaatgtggaggagcgcatcaacactaaaactccatatcagggcattaaaaggcaaaaaattagcagagaggatcgattttgatcaaggcataagcgtgccttaacgttggaccttagtgttgaaacagaaattcgtaaagagctcactgcctcaaataaggagattaatgcctcaacactagaagctagtgtcgaggcgtgtgtctacaaaaatatcaggaagtatctcattcgcatacacaggccacgacactaaggccctagtgtcgcagcccgcccccttgttatttggaattttatatttttctatcttttttatcttttttcggttataagaagaagtagactttcataattttcagcaagcaattagatagtacgaattagagagaaacaaagtgaccgagaaggctttttaacagaacttttcaataatttcttcttctctattttcttctaatgttcttacttaaattgtgtcgaattattacgatgaacaagagtagctaaacagttattagggtattgatggatattatttgacatttgttttatagttttaatatgatttgattcttctccatttttctatgtgttctattttatttgtacttagtccttttaattgtctaaccatcaattaattgtttatgattatgattacgagatctgagaagtgggtttcaattatgctatagcaaaatagaaataaaattttgatataggacaagagtacctatgtggtttggatagctt

SEQ ID NO: 322456 - DNA, 1230 bp, Cannabis indica
gaagaagttagtcttatgactataataatagaagttaaacttttttattagttttgaaggtaaagaaataaattcccaaaatatgataatcataaaattaggaatatagacttcgaaaatgttatttagtacatttcttatttgtttccgtaagtaagaaagtttttaactatgtattaacacttatttaaattttaattttaatactttaaactatgcaaaattagtgtttttacgacaaaaaaaattgacgcaaaattattaaataaaataatttaaaaactgttatgaattttctaatgcaagtataggtgtcgtttacattaattaccaaacaattaaattattaaattttatttagctaaaataataattgagaaaaaaaaaagagtttaaaaactattgaaaaagtaaacaaataaattgaaatgaaattaacaataattcaagcttatggcgattaattttgattgcatctattttatatggttcaatataatttaatttttaatttctaattttcatgtgatcgtgaatttataaagaaaattatatttaggctagaacatataaatctcaactttcatgcaaattttctacttgtgataaattgaataaataggaggcattaaaaatcttaaatgctacgtaaaccatatataagtaatctcatcctatatcgaaatctgtgtctatagcataatcaatactcattttttcagattttgtattgaaattattaaataactaattggaaaacatgcaattaaaagtaattaattacgaatgaaataaatttacaaaaaattgggaaagataaatcatattaaaactaaaataaagtgtctaacaatctccattaacaccctaataaaaaatctagctactcataatcattgacaacatatgataacaattaagaacataagaaaaaatagaggaaaaagaagaactcttcaaaaaataaatgttaaaagtcttcagaaccgcttctcgcttctaatttttgtactctaaaatcgtctcctaagtgttgaaaaatagtctttatatagctaaaaaaagattgaaaaaaaaccttcttttcgtagtttaaaataggcgggccgtgatactacaagtagtgtcgtggcgcttaaagttcaatttttggcagcaagcttcatggtacgacgattgatgatattttagccatagctctttcaatattgctcagaattggacgattca

SEQ ID NO: 322457 - DNA, 1595 bp, Cannabis indica
ctgtgtgatttgggagcaatcatcaatttgatgcctctatcagtaaagcctactacagtaaccttgcagttggctgatcgatcgttggctcatccaaggggggtcatcgaagatgttctagtcaaagtggataaatttatcttcccaacagatttaatagttctagacatggaagaagacatcaatgttccaattattcttgggagacaattcttggcaacaggccaagcgttgattgatgttcagaagggaaaattgaagctgggggtgcaatggcaagaagtggtctttaatgctctcaaggcgatgacttttctaaaggcaagtgacaactgtttctttgtggatctcgtgaacactatagtggagaagaaaaagttgatggaagattcattggaagtgagtttgactaaagaggacctgaatgagcaagatggaattgaggttttggaatttgcaaaatggcttgactcctatgggtcgttaaatagaaaatactttgaagagttgggggtcgttccaaagaagcctgtgccatctgtagaaaagccactagaacttgagttgaaggtgcttcctgatcatttactgtatgaatttttaggcaatgataagacactgccagtcatagtgtcagcttcactttctgatgtaaagactgataagttgttaagagtactcaaagcacacactaaggccattgggtggacattggctgatatcaagggaataagtccctcaacagttattaattgaattattattgaggaaggaaccaaaccaactattgattcacaacaaagactaaatccaccaatgaaagaagttgtgagaaaggaagtggtcaagtggttagatgctggggtggcctacctaatttcagacagtaaatgggtcagcctagtacaagtagtgccaaagaaaggggggatgattctgattaagaatgaaaagaatgagttgatccctataagagttgttacttgttggcgaatctgcattgactagaggaagcttaacaaggcaaccagaaaagaccattttcctttgccattcattaaccagatgctagaccggtttgctagataggagtattattgttttctagatggctattctggttatcatcaaatagccatagcaccgcaggactaggagaagacaacttttacatgcccgtatggcacttttgcttttaggaaaatgccatttggactatgtaacgctccagcaacatttcagaggtgcatgatggcaatattttttgatttcatagaaggttgtataaagatctttatggatgacttctcaattttcagttcgtcttttaacgattgtttgaggaacttggaaaaagtactaattaggtgtgaggagtcaaacttggtacttaactaggaaatgtgtcattttatggtgaaagaggcgactgtattgggacacaagatctcaaggggaggcactgaggtggatagggccaaggtttctacaattgaaaatctaccccctatagtttctgtaaaaggagttaagagttttctaggccatgcatgattctaccgaagatttattaaggacttctcaaagatctccaa

SEQ ID NO: 322458 - DNA, 610 bp, Cannabis indica
aaaaaaaaataataaatttataaaatatagaggggtataaccgtaattacagagattattttcctattaataaaaaattattccaaactgttacataactattataaatagaatttttttttcttaataaaaaatgaacaaaagttattgaaaacaactagtaaagatgcttaagttaatccgtgatatatggtgttgttaacttaatcataattatgatttgtttagcttgagaaaaagggaaagaacaaaagttatggataaaagagaaaagtgttaagccagctgagctgaggtggtgttcttaccaatttgaaaaagttgcaaattgtgggtttgtggtgacccacaatgtcacaagaaattacaacaatcttagcttgagtggtaaagtaagtgctgtcctcatctcctaaattcatatcatcatttattgcctttatctttttcttttcctttttatctctctataaaacatttaattctatttatgtgtttttcatgtcaatagtttgaatctatggaaatgggatgatgatgccttaaggattgaggaatgaataccattggccttgtcttttttctatattgttttttatttaaagaaata

SEQ ID NO: 322459 - DNA, 657 bp, Cannabis indica
ttttttcttgtaaatcagccttttgctggttggtatcaaatccaacggctaggggcttgccttggacgaagaatttatagaaaagttgtgtcccatcgaaagttaaagtgtttgggtggcttgtgtatttagacaaaatgaatgtccacgataagatgcaaaaaaggaagccattcctatacatttcctctggttggtgtgttagttgaaaaggcaacggacggggaagatgttggacacctattcttggagtgcaaatttattcgacgcttatggatcaatgtgctaatgaagtttgagctatcttgggttttgccaagctccgtatcacaaatgatagcttccaaattaattggcagcaaacgcagaacaaagctatggtgaacggtgatcttggcaacaatctgggctgtatggttggaaagaaatgccagaatatttgaaggggtcgttaactcagaagtgggcgtgtgggagaaaattaaattttggaaagctacttgagtcttcagaaccaaacactttgaggatctgtcctttttagatttatgtagagagtggaaaacaattttgtaatggcagtaagaagtttcgaactggtttgttttggctgtttatttatttattgggtcagttttagagagtaacatagggctt

SEQ ID NO: 322460 - DNA, 822 bp, Cannabis indica
tggattggtcggtcggttttcaaattgcaccaatctagaccgaaaatcgaattttgaatttttatatagaaaaaaccgaccaaaccgatcgatcctcatccttagttacagtggtttttggggagaagagaaatggtggttatggtgggactgggagttaggaagagagaccagaaaaaataatatgtaattgttttaatttttaattttaatatttatttttatttttttattttaaaattttattattattttaaataaattttataaaatttaaataattaaattgtaaattttatgtggaccaataaaattgtgcttctaatatggcatttaacttttaacaaataaaattagatggaagtgctaaactgttaacgagtattaggtgttatgccgcgaaaatttaaattttaaagattaaatgaaagtattaaagattttgccgcaattaacccaaaaagaatctcaattcttcattcacaaaccaatcaacccaatggtactttcctctacaaaatagtttagacattcaagtattacaaatttaattatatagacactttcactccttaagaaaacataagtgctatgaaattataaatgcaataacttgtgtacattggcagcaaatattacatgtaaatggaaacattttttttaagagattaagaggaagaaaaagaaaagggaaatttgaaattctatgcttaaaatgccattttatttttttcctaaatgtatagttattaaaattgttcctatatgccaacttttttcattttcctaaactacccccctcatttgaatcagcctctctct

SEQ ID NO: 322461 - DNA, 1246 bp, Cannabis indica
atattttctaatcttcttctattctaaatctgcaagaataaaagatgaaaagcgtaaaaatactccaaacacgattaaactcaattaaaaatatactaaacttgatctaaaattaatactaaaaataacctaacaaggtatcaggtaccttttagcgatgttcgttctttataaggagataagctggcctcaacccactccttatgaagtcaaatactattttgatttggagtctacttcgcagcaacatcggtctgaatacttctattttaaccaagttggtcaccagtggctagatgattctaacgagcatgccaatgagtacttcgttgcttgagatgttaaagggatccgtcactgacgcttctaaagagtaccattcatcaagcgttctatccccacataacaaataagggatagagcgaatcacatcctttctctgtcagttgagaagaggaacattatctggttgaccagtgtagataatttccagttgtatggcttgcatcctcctactcctcgagctacaaagataatagctacagatgaggctgtccatgaagatgggcaaggccttgacttggatgatgatgatgtaccattgtctcgtattgttcaaaatttggagaggagagagagggctctctgtaggcgcctggcctgtgggggtcaagttggtgacgcctctcttcgtatcgggcctaaaggctcgacttctgatagacctacatgccctgtgcctacatctaggggcaagggcaaagctatggttgtgagctctgatagctcttcttctgatgataatggtatttgatagtttataatatcatgcttttattcttgtgttgaatattattgaatgcattttgactccaaaatttcgacctcctttagaagaacttcctcccttgtttgcctggatttgacgtcctcttccaagttcatcttatccttggttaaggtggcaagaagagtttggagactttccctctcatccttcagaccattgacctccctggacagagcctcgacatccgcctcaagctgggaggtagatggcatatcctgaatctccttcttcagctcctcaactcgattgttggcggctagaagttgtttgttcaccttgcctagctttgcccttacgacctcagcctccttcttgagctattcggtaaggcatcacttcagtctcgctttgacgcgactaagaagtacattaatgcacggatggaacctcatcaaa

SEQ ID NO: 322462 - DNA, 796 bp, Cannabis indica
atagtttagtagtaattaatccaattctctgtggttcgacctcacttgcgtgagtatactacttgattacgtgcacttgcgtagtgtttataattttcgtaacacctaataccagttgttaaaacatatcacattatgagttaaagacaattcataatatacaataatcaatgctcataatgtcatctaaaattcgtattttatttagggtataaatacattaaaacatacctcttaaattgttcatcccatcacattgagctatttcaatttagccaaaaccaacacactaacaagagcaaattctaagtgtaaaatgcaagagagagacaattgtggagcaaccccttaatcaatttctcacctctcaaaacctcttgaatcttaatatataataacccttctaaccctgtggaattgttgggttaattgggccaatgatggttcaactaatggtggattataattaaatgagtcaattatatctataaaggtgtttttatgtgcttctaatacatttagtaattattaaccattctacatcttattaggttattgataaattttaagcacatagttttttttttgaaaaatgatgaattttattaaatcaaatcatctgagaccaaggaagcaatactcggaggtaaggcatccccagaaaaagtacaatcagcctctgaaagagaagatcgcgccaagaaatgcgcaaccttattagcagatcgttttacaaaattaaaagaaacatcaacaatatctgaaaacagagtcatacaatctgagattatatggc

SEQ ID NO: 322463 - DNA, 533 bp, Cannabis indica
gataccgtatttttgaaaaagaacgttttggttttttaattttgtttattttctaaatagcaataaaaaagtaaactttaggcctaataaagctataatagaaacaatcccattataaaataacatatctatcgttactttagtaccgcataacaatactcaaaactaattatcatgtagctaattacctattatacaatgatatgatttggctaatgactcataataaaatttacaaaaaatgtggagggtttttttttttaccaatctcctaacaaaggaaagctaattctcattgatgatggcagtgacggtcctagaatttaaagtgagtggggacgtaattttttttttataaaaggagggagggcataaataaattgaaaaagaaaaatataaagtgtatagttagtaggatttgaacctttaccctttaacatatttatttgcatctaccttaactattacaccaaacttactattatgtttataaatattattttttaatacaaatatatgttgtaactaattaa

SEQ ID NO: 322464 - DNA, 875 bp, Cannabis indica
tatttaaatcattaagctttcttaaacactaatatattgcattcagcattcaataataatctcactttcaaataacatagaaaaagcctagcataaaattgagtatacgtgcctcgcacgtagttttttgctagtatatatatattgtggtatagttcattttaaatgaaaaagttctccaaaacttttacttacaaagttgtgaactcgcagaagtcagtcgtggaaggttttcttgttcttctggggagggtctttatgaaagctagctcttctctagaaaggagttctagataggtagttgttcctcccgaaaggtagtcctaggtagtcgactccaacaggctctttcctatctgggaaggtccttcaacgagtgtcttaatccttgactccgggagcattcatactcgctcctgaatgcattcctacttatgctgacgtgaagattttgctcataggggtgttggttaagttagttattccctaactaacttaacaacataagttattgcagccactgactttaggatctggatcctaatcttgggaattatgccctaaaagtaagataaatagataatatattagagaatatatgaaacatacttataagataaatgatatattaattataagagtataattattaaatatctgaaaatttcttattcatatggagaaggtataatcttgtaaggatgtacaagagaattaagattatacgatatgaattgtaaagaccgcttagtttaatttggaaattagcagttaatcatatttaattatgaaaaattatttatagatatttaaataattatttatgctgttatttttgaattctgaaatgcattttatgtcatatagtgaatttc

SEQ ID NO: 322465 - DNA, 1260 bp, Cannabis indica
ttacagggccctaaaccataacgttcaaaacttaataagagacacgctaaaacacctatcggggactgaaaattgaaactaaggataaccctatcgataaataggatgctaacatcataaattacataaaacgggaaaaactagggttcgagaaaaaccccaaccggcagaccggttcccaaccgaaagtccggttcctggcattaaccagtcgaccggttgctacaggcccccaggaaccgaaattcctgttctgaactgggaacccaaaaaccgacccccacaccttaatttgatcccaaactttccaataacttccagaacacctacttatactccaaacaactcattttaagcatcaaaccacaacaaacaactcaatttaagaaaacaccattaaagacccaactaaggttctctaaaccttagcttgaacaattctcaacacaagcttcaaactcagctcaaaatagcataaataatcaactcctaactccagaatgacataatatattaccctaatacatacagccatcaagaaacacaaacttactacaaaaacataacctaaaatacaaaattcaagaaggaaagcaaatagaaaggattaccttggccaaagctcttaagaatcactaaaattccttgttttaacctcaaaatcccaatccccagctgctgtccaagagaatcgaaagagagaaagagagagagagaatgaataaagaggtgaacccttttctcgaaattttctttgattttcttctaccttaagtaaacatagattttcttttaaaaaaatcaacttatattcagtcttattataactcaaataagaaaaaagaaatctttgccaaaagaccttcttgcccctctagctaaataaaataaccatacactcccaaggataaattggtcatttaccaaatcccgaaaattctaacacttctaacatctaaccatgataccccggtaatattctaaacatacaaaatatgactctctaaaggcccaacgtcgcttttcacagcttccaaacacaatacagaaattgaataatttatataaaatagcataataaacatatatgaacttaaatatacttccacaacatgaattttataaataataattaaatcccataaataaaccctaattatttaataacccaaaacattaatcttaggcggtctttacaattatccccccgttaacaggatttcgccccccgaaatctcacctgaacaactcaggatgctg

SEQ ID NO: 322466 - DNA, 427 bp, Cannabis indica
aaccacgtaaaaatcacctacattaaacttcctacagctcttctcattctactatttcattggttgccgaaaacctcggtcaacaagtttaatataataacttttaaagagtatcgttagtcaatcgcaattcaacatgtcgagaaggtggtaggcaccaataatgcctaatagcaatgctctttttgtacactttaacaccacctctctctaatgcataaagaacaattaattatctttttctacaatcacacataaaacaatgttatctctgtagttttttttccttgcaattaattatctctgtaaggcatgatgtacgtttaacaccacttctctttagtctctttcaaatcacaaaattttatatatttatatatatatatatatatatatatatatacatattaaatttaaacttaagttt

SEQ ID NO: 322467 - DNA, 1411 bp, Cannabis indica
ccgaactccaataccgaagctatcgtagggattgaagctcaaagatcaatggctggaggtatttcgatccttcattgtatatatattatcgatatgattatagtttatttttcgcatttcatatcgtatatatatgttgtatgacatatactatatataatagtctaacagagattgctccttgacaagcaatcgaagatatcgaagatgacagaacgcgctcggatttcccagaccctgcgcattccaactgacgattttcatggttgattgcggggctgagtcttagccaccgcagatttgtcaaaaaaaccagattgatccattacagaattgcaaatgttctggtttgattcctgtttaggagacaatgttggagaggattctgagtgttatggacccctgcatcttttgagtattttcctgatcaaagtgttctcaggtagtctatttgggtcgatttggtggacagttttctttgtccattgtttgctgcaacatttgtgttaatgacagcatcaatagttgtggtttgcctcaatgttgcatgttgggagccagacccacttagaggagtattaacaattcgaggcatgagcgggtaggttgcaatggtgttgtttttgataccagtatctggcatataaagttcagtcaagtcatcaacatcttgaatttccactgttggtgtgggacagtgtgatgatgagattgatgaggccatattagtggtcataatatttctgtcgctatttttctatattgaaagagctcgacaaccaccggatcgaacaactcatcacacacgaacaagaaacaagaataactcaaatctataaaaaaattaaattaattaaataaattaattatatacattttttttggcattctataatatcaataaacatcaatcaaaatagacatatttatggtacaaattcatatggcagaagctaataagtttatgatatgtatatggcatgattttttttgaattacttaatgtaattttacactccttttatgtaaagataaataaattctttgtgtattaaaattgcatttaaattctcaaaaagttaattttgatacagataagtccttaaccttgaaaaatagcgttaatagttcccaagttcgagattcttgtaagttctttagtcttcattttaagagatccattagttctccaaaaatgtcacatgttgatattaaattacagtaaaagttcttaaaaaattcactttgatgcaaataagttttcaatctttaaaatttgtaataatagcctcaagctcaagattcttgtttgtctgtaggtacccaatttaattgctctgtttgtttctcctaaaaatgacacgtgttgatattttattggtccaaatcataatttcaatttaaattaaat

SEQ ID NO: 322468 - DNA, 1569 bp, Cannabis indica
ttttggcaaggattagggctcttaaaccgtaattaacaaaaattaaggacttttagacttttgatttcaaggacttttggggtgacaaaaaaaagtccggagacgatcatcattattttttagcgaattctttcttcttctttaattttcatgttcttaattagtaattgttatcaattgtttagaataacagtgagtagctaaatttttttattagagtgttaatggagatggtttgatatttctttatggttttaatgtaattttaattcttcctcaatttcttatatgcatctattttatttatgcttaaatcttatataattgcctgatcatcaattatatgtttatgatttcaataaaaaatttgagaaatgagtgttgattaatctatagtaaaatagacatagctttcaatattggacgagaatatttgtatatcaatgtagcaattagcatttcagatttaatacgaattgtatgactaatttaccacagaagagtaggacttaaccaagcaattttatatatcctgataggtgtatagattgaaactattaagtttcttagttctacttagtatagtgttgctggtttcctactagttcattatgccttttgtaatgtttgtttgtgttttatttgcacttagctatttctgtacattcagttagttttcttgccttgtcagcctttagttcggtattttctattttctgttaaaacagtttttacctaactacttgggtctgttttttactgaggtacaagctataaaaggcttgcctctcccctatttttccttaatcgaatttcactctttctcttttcaaatagttgttctctatttctcgacatggtatcgagcgggaaagataggcttttcccattcgatccttccagttgccgtatttctttctccggtgtagctgtgtgtttctcgatcatcttctccgatcttccctctctctctctgtacattgattccgcacaatggctacagaggaagatcaacccagaatccctacggctgttgttgatcttggcaaccagtctgcttaaactaatcaaagtcttcaagtagcttcgatcaagaatccattagaagatcgacccagttcgttctttctgcaccatggagataatcctggaaacacgttggtttcacagcctcttacaggacaagacatctatgtttcatggagcagggcaatgcagcttgcaatttcaatgaagaacaaaattggattcctcaacggttctattcctaaacccactatttctgatcaaaatctttatagttcttggaatcgtaataataacattgtaatatcttggatcttaaattctgtctcaaaagaaatttcatcaagtattctttatgatgaatgtaccttggctatttggaatgatttaaagatccgttttcaccaaaaaaatggtcctcatatatacaatttgaggaaagatcttatgaatcttaaacaagaaaatcagaccataagcatgtactttactaggcttaaaactgttgaaatttattttaccaggatcttacatctactcaca

SEQ ID NO: 322469 - DNA, 757 bp, Cannabis indica
atatggcttgtattattaaggccaaaaagtaaaatttctctttgattatttgcattgactctaagaaaaaaaaacacaagagaattatcgttatgaaaaaaaaagaatatgtattggaggagtactatatgagagacaagaggcataaataatgaattgttatggggtgaaaaaaaaaatacttagtttaatttattttaaataattatacatattgcctattcatatgtaacttatttgaaacacaccaattaaattaatttaattggtgaaaccaataatcacctcaaactaataatcactctaaaatataattatgttttgtttgatttataaatagcatatttgagttttacttcattttttcttttttgtcaaattgaattatacttacttcgaaattaatatagtgaaattcattttttatttattgtaccataaatttgattacataatatatatttgtatcacatgcacacacgtgccttacatatcatatcttcagaattacaatactgttagaatatattttatcaggagctagatttactaataagtatgttttaaatattctaaatatgaatttctaaaacaataaaaataaacacatataaagtatgagaaccttacattggttgcagcggaattaaatggatccttctgctcagatctttaacccttgtatcatttctgtcgcggagtataatcaagatctgagcccgaaactcctttagttgtttgaatttttcacagtctt

SEQ ID NO: 322470 - DNA, 987 bp, Cannabis indica
tggctttagacgatccgttagaatacgggcaatgactttgtaaccgaagttacatagactaattggtctaaattggtcgaaagtaggactttctttcttcggtatcaaacacaggaaagtatggtttaattccttaacaaaattgccggacctgaagaattcttggaccatattgcacacatccttcccaaccgtgtcccaataagtgcgatagaaaatgcctgggaaactgtcaggcccagggcttttgaggggatgcaaactccacgcagctttcttaacttcagaatccgaaggaatgttgcacaatgattcattttccagagatgaaaccttgttgacaaacagctcttgaaagtcatttccgagtcatggattagaactttcaaaaagatttttgaatttctccacaaaatatcttccaatgtcatcacggttgcagagccagtggtcttcatagtcattgatggcccaaatatgattcctcctcctctgtataatagtggcagaagtagctcatattgtcaattgatttggaaatggaatctcatatactttactttaaattttaataaaattataaaataagtgagacccaatattaaattaaaacaataagggctcgtttgaaacattgtattagatcgtattgtatagtattatattaaattgtattttatataatatttttatataaaattatatgtgatatgaaattttatgaacactatataattatttagtataaattaaaggttacaaacgagttgtaaataaattaggcaccataattctttcaccttgactgatgttcaatattgcaatttgcacgtttccgctcgtagggaataaattcatccataccccttaactgttaaaataaataaataaagggaattttacaaaaatactgtttttggaccaaaactttacaattatactgggacacggcaaaataacattttactgccccagcccaatttcatt

SEQ ID NO: 322471 - DNA, 1067 bp, Cannabis indica
ggcattaaaagatctcaaccttttttagggattatacaatagcaacaacatagtatatttcttttactcctgcaacagtactaggggcagaacaaaatggcaaaggaaaaaaacttattgtcgtacaatctcaaacatctaaacaaaggttctttccaaaagggccccaaaacaacgattgcaaattagtttgaaagtcatcgcggtaactcctgcaaaaagaagaatagcaacaataaggcttatgacttcgaactggcagcaatagatatcaacatgactacaaccaatggcgcgaaggttgttctaaacagagcatatataacaacattcatgaagatggcgattatgatttcagtgacatgatcgcacaatcaaaaatatgacataaagaagaaggttagaaagagggagcaacccttcgttgttctcccagccataaagaagcaaccccaaaaattgcaacaaaggctccaacaatcgcaaaatcaaggcgtacagtacattccacactttgcacttcgaactccgacattccattggagaaataaatatggtcatcaatggagatcacgaagctctaaatcaatgaattgcagatccgtttatacaagtgaaacgacgttgagtaaaatggatattcatctggtatttggtgagcgcataaaaagatggaaaatatggcgttgaaatcgaaactcacctagttgtctctcttgtcaccgatcggagaatttcaagcgatgaatatatgttttgaattgaaacgccagtaatatatatgccaaccgttcgacaataaaaacaaattaatacaatgacaataatatgtgacaagaaggaccgagaacactttggtcattcccgtcatttgagaaaaacatttttgggaaattcattacaataatttatcagcgctaacaatggttaaagcatacactcaattgtgaaagatttgaaaccctgctaaagagaagcaaattgggccatggagcaaagtgccttaatgaggaaattatgtagaatatggatttttttctaaagtttaataaatatggagaaattat

SEQ ID NO: 322472 - DNA, 552 bp, Cannabis indica
gtccaacatagttggactagaaaactctctaaattattttctagtccagcagagatggactagaaaactttctataacatttttctagtccagcatagttggacttgaaaatagaccaattttttaaaaattaaaaatacatataacgtccactatttgttttctagtccaacattgttggacatgatgaaatttttttcatgtccaacaatgttggactagaaaactccctaaaatatttttaatgtccaatgctatttttgttggacatgaaaaagggacataaaaagaattttttgtagtagtgaaaattggtgtggtgagtgtgtgtgcggttttataagaaaaattaggtaagtttttgtttatttatttttatttccaatgtaataaaagattgtattttgtatcatttctttaaaactagtggtgtgattttatatataaaaaaaatgatattactcatgtgtgatgtgtgagtaatgtgtggtatttatattagctactagggggtgttcattgggatcacatctaatggatttggactcatcc

SEQ ID NO: 322473 - DNA, 1393 bp, Cannabis indica
gaattactaatgaagacaaggggccatggaggttaacaggaatgtacggtgagcctaatcgctctcaaagatataagacgtggaattttcttcgtacgattgtgaatgaatcttcacttccttggtgtgtaattggagatataaacaacattgtctctcattctgataaaaaggtggtaaccggtatccgaatggcttgattgaagggttccaaaaagcactctctgattgtaatttggttgatcttgatttacacgggtatccttttacttgggagaggggacgtgggactgagaattgggttgaagttcggctggatcgtgctatggctactccgtcttggattaatctctttaactcatctcagttgctcaatgtggaaataacaagttcggatcattgtcctttgttgcttgaattggtgaatcggaacctaactactgtctctaaaaaattcagatttgagaacgcatggcttcgggagccgctgtgtgtgcaagttgttcgggactcgtgggaagccaatgctggggcttcaatcattgagaatatcaagagatgtggggagagtctttcgagctggggcagtgagtatacaggaaatttcaaagaccgtattaagaagtgcaaaagcgatattaaacggttgaagaggcttcgtgatgatgtttctgtggcagaatttaaaaatacagaaaaaaatttggcagaggcgctcactcaacgtgaggttttttggaaacaacagtcaaagcaactttggcttcgtgaaggggactcgaatagtaactttttccacgctaaagcaacatcaaggaagatgtcatctattcttatttctctgatttattcagttcaacaagctcgttagctgatgtggttgctgctggtatatctccttcggtttcggatgctcaaaataaggaattactgcggcaagttcttgaagatgagattaaaaatgcattgttccaaatgcacccggataagtcactgggtcctgaaggtatgactctggggttttatcaaaaatgttgggatgtggttgggcgtgatgtggtgagccaagtcaagagcttctttgattcaggtgtgttacccagtaatttagcactaatattattcttatcccaaagaagaaaaatgctagtagtatgggtgacttgaggcaactatctctatgtaatgttttgtacaaggttatctctaaagtattggctaatagattgaagacattgcttccccagcttatttctgaaaatcaatcggcttttattccgggccatctaatctcggacaatttcatggtttcttatgaagtcatgcattattttaaaagaaaacggcaagggaagacgggttatatggcgttgaaactcgatcttagtaaagc

SEQ ID NO: 322474 - DNA, 1090 bp, Cannabis indica
ttttgtgatttatgtacgatatctttacatcattatgcaatatggttttttttttattattattttcttgttgtgttttttgtgccacattgtgcaatattgttttgtgtttgtgtgatggtgagtgtatattagacaactcactcataaaagttagtacattttaatgaaataaatataatatgatggtatttttgattaattgatacaaaaaaaacaagcattcccaacttatccccatttatttaaggaaaatacattatatactcactttacttcatatgttttaacttttatctttatttctatattttttaagatatacccacttttacagatgatgtcccaattataccatttaagttaatgtaaattctgtgctaaacttaagtagaagatgaggatgtattaggcaacccaatcataaaagtgggtatattttaataaaatataatataaaagtatttttaattaataaatagcaaaaatgtatttctcaagaaatccctatttatttagtaaagcccagcccacttaagggaagcccagcccacttatctcgtcttcttcttcttcaactgactgcgtttaacttcggaccttcttcagttcatatatatatatatataatatatactaaaatatatatatatatatatatagctttttggctgacgatgatcagtttaatcattctaggtatgtctaccacttgatctatatttgtagtcttctagttttcaattccttaattttgttcaagagagtaataactgaggattatgactgaaaaaggttttatctttgagaatgtaaacttgtttagaactgttgtaattcaatcatgatgcttatggttctgtctttacatacattgacattgtttaggaaacccaactcagtagttatatgcactcattgtttagtcttatgttgctaacatgaacattttatgtttgttaaaatgtctacatgagcttgttgtgcttatctaactcagattttgtttatcctagtatttaatgagttaaagaaaactaaggtggtgttcggtttggaggaatgaaaatataggaataggaatgagaat

SEQ ID NO: 322475 - DNA, 1028 bp, Cannabis indica
ttattcttagatagagattctactatagttaatatataatctccacattaaaaaatcttttgatgagcttggttggtttgaaaagcaaatataatatgctatgagaacatgacacgtggatctttgagtttgtttatgtaataaatttttgtataaattggagttgttttgtagtttatttcctcatttatttcgattatgtctatttatgttttgcacatgatccttaagagcaaaatattcacatggtttttcttcctccaaagcccaaactcacgagacttgtccaataatgccaattacctttatatatgtttgaaatttgatttcttcataactttccaaaattccaatatttggaccactccaattaataataacaatataatttattgattggggtacttgaaaattccacaattaatttgagataaacttattttgaatatattttgattaatattaattttcatcttttcttttttcgaaaaataacataatttagttatatctttttataaggtcagttctaagaatatatgggcctaagcacatttaaattttgagaccctcacttttagaaatatataaaaaaaatattgaaaaaaattgacatgggactcgaaaccgcactattgtgtaatgtgtcatacatctcaactaactaaattgtgaatattgagtgatttgttttatctaacgtatatgcatttcaaaatatttccaatgttctgaaaaaaaaaatgaaaaacttggacaaaaagtaattttagtatataagctgttttcttgagcttcactatgcttaaaaattgaaaatttaaatgtttttcagaggtgtcacaaaagaaatttaacgaaaaaaagatggcataaaacttgtttttgaaaactaaacatattctttcgaaaattctagcgtgggctgtaacgccccgatattttgccttattttacaaaaatactattttcatgcataatttgaaaagataaaaaaaataatttaaatacaacagtggattttaaaa

SEQ ID NO: 322476 - DNA, 966 bp, Cannabis indica
atatatataaatctgactgtcagaaggaagaaaaatataattctctgatcatttttgtttgttcttacccaagtaaacctgtttcccacaatccctgcaaaaatttcaaaatgactcagagcaagtaacacaaaaataaaagagaattgtttcaatgcatatgaagcaattaatcacaaaccaaatatgagattcccatcttcccgttcttcgataaaacgtgaccccacgatactgggagcttcgagaccttggtcccctacgactcttcttcacctgcttattctgttgttggggcgcgcttccctgctccgcaggaccaccgtaagtcccttctgagcaagacaaacctagccactgcctcctcggtacggacgacctattattgttgttgatactattagccaccggaaaaagctcgatagtctgagcgaaacagctccgatgaacatcgtgatcattcgtagtagagacgtaaacttcgtcgttcctgtggttgttaaggatatcgaagctgtaaccaaacaaagaagcagttgcgttgaggttggaagaagagtcgtcatcggcggtagtgaggttggaagaggagttgaagcttccggagctctcaagaagcttattgtcgacggaatcggaagcagccgaatcaggagagagtaggacgttgagattaagatcaagcattataattatggatatagtatattagaagaaagtggtggtgagagagagatcatgggtgaatgggatcaagtactattactactgggtcgtctgccattgttgaataagaaagaaggaaaatatgaagatcgggttcagaagtactgaatcaatgagtgaatgagtgagacagtgagtgagtgagtcagtcgggtttagaagagactgtacggacaaggcctggtcagatagcttattaaaaattgtaaaggggaatcttaattatatatataaatatat

SEQ ID NO: 322477 - DNA, 509 bp, Cannabis indica
aattataaatcaactataaataacttataaaacaaccgaaaaatatatccaacaatttacagaagtccatatttttgtaaataaaaaagttcaaacattaaaaataaaaatttgttagcgtatttttattatttttttcaaattttttctacattatgtaaaaatttcgtaaactttttcgtgtagtgattgagatttgagaaagtgctctatccaaatatatatgtatatgggtgcacttttaatgaatattacttactcatgggtaatattaggaaattttgaatttttatgcttaattttcctatttaataaaaaaatgtttatttttatattatatacgttggggtttttccatccactaaaaaaaataataaaaaagaaagcttttcggcaaaaagaaagataaaaagaaaagttgaatttgactcaaatattttttatataaatatagaaaaaaaaaatattttcttttatatatatatattttaaattaagtagctaaatta

SEQ ID NO: 322478 - DNA, 779 bp, Cannabis indica
gataactaatcagattgtaaagagttttatttagggcataaaacccaacatctatactatatcctaatgctttcctcaaccatctcaattttttatctttgaccatagagccatcctactgaagtcagatgccctgccctttaaaggcaatcaacccccaaagaacaggtgcttccttttttaaaatatctggctcactgagcctaattaggatgaggttatattcaaagcttggaatcactctaagagtatcgattcccccatccaacaccttgcttccatccaggattcttgtgttgaccacttgtctaaatggaagcataagtctttcttggggttcccaaagaaaattgcccaagcccataagaatcttgaacaagctagttactctctcgatcatttcgaggcttctttcctcaaaattataaaactccaatctcaattggatagcctttttgccaaggaagaaacctactggaagcaacgttctagagttaattggctccaggctggagacaagaacactcactttttccatagatttgcttctaataggagaaatactaatcgaagtaatcacctttttcttgacaatggtttaaaagtggataatgcaagaggagcgctagaagaaatctttagagcaggggccagcggggaagaagtaaaggcaggaggagcctcaggagtgtgaaccccagcgagctggtccaaaatggcatccatggagatacctgctacaacaaaagaaagcaagtgttagaacatccgtgggaaac

SEQ ID NO: 322479 - DNA, 1063 bp, Cannabis indica
aagtaccatgagaaagcttgcttgaagattggggtggtaatgttaacatcaatggtgggatttcgttttctttgttaacaaaacaaacttgattcggacgataatcccatgtgaaagataggcttgaatgtttggtgggggtctttttttttttgactccttatttccttcaatcaaatattatttataaggagtaatattagaaaaataattttaatcacattaaaattactactagataatgtttcaagacacgagtatttaattttaaattatattataataattaaataatgttataaatacataagttaaaataaaaaagttgctataatctacatgttgaaatatattaaggctactatatatgataaaatactaacatcactttgtatttattattattttgacacaaaccaatccaccttttaatggtaaaaaatctctaacttttaactaaatttattttaataatatcagctcaaagaaaaatttattgtaactaattttttttttaaaaaaattattgaattaattaaaattaaataataaatttattaaagagtaaggtaagaactccaaattatatctatttatttatgtataataaagtcgaattaaaatattaattttatataattcatatcatatcgtaaagataaatttaaataaaataatattaatatttacatatttataaaacaaacagtactaacaagattccttaaatttaagggaatattcttttatttttaaagtatattctgttaaaccaacaaaaataattagataactagtatttatataaaatattgttcagtaaaaaaaattgcgtactatatatacacaactagtaaataatctgcgttcgcaacgaatgtttaaatttttttaaattatatatgaaataaattataatttttatttaatgaaaattaagtaataaattaatattttttcatataattttacttagatgtacaaacgggccgaccagattcgaatctattaaaggagtttttacaccacatactgaaaattataatttttttacttttttatt

SEQ ID NO: 322480 - DNA, 670 bp, Cannabis indica
tggagatctcagatttattatatcttatagttattctgttgtggaggaatttatttaattctattttttaaaagtttgtttcagtacaaaatccgcgcaaatgatataaaattttattttacaccttttgtgtcggctcttgagagacgcgagattcttaaatgtgtcagttcccaagcaacacaacaactgcccatctttatgtcagtagaatatacattggctctatcagccgacacaatagacgtgtatgtcgttgaaaatcgacgcatataggtcattttcttgtagtgaaaaataaactttatatttatttaatgtagagtatgtgatatcaagtattgtttaatgttttagtattataaatatgcttattgcggtacatgttttgagtttatttatttttttaaaaaaaaaaataaagtcaaataaaactatagtgatcgctggagttgtcactcgtgccggaaaactcaccggagtttgctgtcggcaccgaaaaagtcgtcgaaattgctgccggtgctagaaaagtcgtcggagttgctaccgaagccgaaaaagttgtcagaattagcattgtcgcaggaaagatatttactggtgacaatgccaattcgatgattattctagagtttgatgtcgatgtacgaaaagtcacctaaagtag

SEQ ID NO: 322481 - DNA, 1430 bp, Cannabis indica
aagtttttcaagtaattgattgaggtcacctatgaacgatgcaaattcaaaggtagcagttgtaaatgagatttaactcataaaaacaacactaagctacatgcaaagctgaatgcctaacagctcgcattttataggaatgtattaaaatgacgcactaagatgccttgaaaaaaatacttaatgtaatgtgtgaataggagccttaactgttcatacgagcaatcaaaaatatacaaaacaattcacaaggtgaattattaaaagtatgtttaagtttgcttaaatcacattataattccttacgcgaagaagaactgataaactgctagcaaagcatagcaagtaacaacttctcgcgtacatcatagattattaaccacttaagcaaggtaaaaggaaagcacgatcagtggaaatctttaaagtattttaaatttgatcaaagtataattgtttaaattctgagtaaaaatgcaagtaagaaaatatattaaattcaaatgcaaaaatacgaggcaataaataaaagataaaataaaaagaaaagttggtcgtccaacaatgcaaatttgtctttacattaaaaatgcaacaaggggaaaaccgttgtctcggccatttggccattttcctaaatatatataaaaaaaacagcttaaaaactgagcctacattgtaggagacttagttggatcttcttgttccacttcaacctcttcttcctcgcccaattcttctatcctagtcttctctcaaaaggcaagtatggcatcagcattgtcgcctagaaagctgaaatccaaatcagggttggccaaccagtttgatagatggtcctcctgccgatgttgttgaccctgtctttggtttcagcctccatctctttcagttttttctcatgatcagcttggagggacttgagagcatccttgagtttcttgacctttttttggtcgactagacgctgcttttctgcctcttcctttgtgtgagaaacctcagtcgtggagtcgttcaactttttggatattatccctatgctccctagtcttgcaaagctcaatcttgagcattttagcccgcttagacaatcggtgatgagtaacataggaaaggagacatgcctgcaaggagaaggaaaatcaaagttggtaaaaatgataaaatgaggaatagagagaaccagtagacagggaaattaacctgatgcaaaagctcgtaactcctttcagcaagatccatagaactgcctcgcgtgagaagattccagaccccaaaatcaggatgttacgcctgttgagttttgtgccctaaataaaacccatttcaatataatcggatttactaattaataaagatcagaaactgcattttatattgcatggttcacatgatttattttatgattatatttaatgtataaattc

SEQ ID NO: 322482 - DNA, 922 bp, Cannabis indica
ttattttaaccccatatctaattttgtattatgaacaatcaataggctttcttcaatcaaaagacccacttcactcactatggagccccaagtcttcaactttctggagacacaaaagaaaaaagcctcattcggaccaaatggtgaagttcatacgcgaattgcagaccgatttggaaatggtttacgttggacatttgtgtctttcatgggaattccttcaatggcaatacgaaaaggctttcgagatatgggaagcagatccttacgtgtggcgccaatacaatgaagttgccaatgaatttcaacagtttcaggttctcttacacaggtttgtagagaatgaaccttttcaaggtccaagagttgagaattatgtcaagaatagatgtgttatgaaaaatcttcttcaagtacctgtcataagaggtgagagtacttactataagttttcatttgaacttgtgttagaatgatattattatagctttagcttaattggggtatgtttaaacattatgcagaagactcaaaagaaagaaaaagagcaagaagtaaaggaaaagatagtgatgcaattacaagtgacatggtattagagattttggaagaatcaataagaaccatttggagattcataaaggctgataagtttactcacaatttggttccgaaaaatcgtagaggaggaactcaagtagagcttcatgaccctgcagattctgatcttttagtaactgttcaaacagagctccaaaaggtaattttggttttactttttgttaattgtttggctatgagaatgaaaagtgaaaagttcaatttgttatagggatattttcgtaaatatttaaaaaaaaaaagtcgaaaaaaattaaaaaaatatggttgtacgaaatttattttatgttgtaatcttgtt

SEQ ID NO: 322483 - DNA, 1226 bp, Cannabis indica
aaaaattcctaaaataaataagtatgtaaaaaaatcagcgtttttatataaaatatataattacacacatgatcattatagataatgttcgctgaaatagataataactcaaccatactaattatgttatgagcaaaagcccaattaatcatattatgtgctgcaaaattacgaagtctggagataaaagaaaaatacctaaaaataaattagagagactattgcattgatgcatatagactatagttactaatacttcaaatacaataagtccccttcaaagctttaataattgtcttagaattgctctcaattatcataaaatagagtttcaaagaaactatcgtattaagggctagaagacaagccacaacttcgacaataaaaggaccaaaaaagttgagcctatcgatagcaatccaaaaaattatttccaagtgatctctacctaatgctacgccacacattgccttatttctcactccaacgtcataatttatcttaatccaattagtatattgtactactttgtatttatagtatattttatattactaaaattactatgatctagacatatgaaaagtaaagtgacttttttttaaaaaaaaatagcacataataatgttgggtattatatttgttccttttatttatgtttatgcaattatagagacaaatttacttttctttaagaaagaggctaattagtacaaatgttcaattatgtagctataatgtggtttaaagaaaatcacattaacattgaaggacaattcaaaatagaagtgacacatttcaagaattcatgtcacaactaaacgaactcaatacaaattattataagttggtaataatggtacatcgcaattgaatcaaacacaatatatttttttttagtaaagttaaaggttaactagctatgtcaaacacaatttgtcttctttatattcatgtaattattaaattagttaatttattacttacttctcataaaaaaaatctaaattagaaaaaaaaaaattctttacaagattataacataacttaaaatttgataattacatgattttaagaattttgtttatcgtattaatattttatgataaataattttatttattttaatttttataattttttagggcctattttatttttacactttaaaacagttatctttttgtatttttacaaaattctacataaaaattcctattgcaact

SEQ ID NO: 322484 - DNA, 1151 bp, Cannabis indica
ggtcgcgactactgatgcttcaggaaccgaattttccaattttttccaagtttgtcccagttttttgccatttgactgaattcgaactttaacaccccgggaacctgaaataatgaaaatcaagcgtaaaactgctccaaaagacaccaatagacgagataatgctaactttaaagacccgaaatataggttaattataacctaacaggtcacgcctgacagaaaaagtgttcagaggagccgttagacaaaacaaggtattcagaataggtgtgtgcactaccatgctctgacacaggggacaagatatgatcttgtgccagctggtaaacaggtcgagagagacgtccagtttccacttcgtagtaggcttctgacattccttgagctcacgacatccatcttagactctttagataacttccaggtatcttcctatatatagacttaatggatttagttttctccgagtctcggaaggttgagaaggctttcaggtcttggacatttgctttatcttgtggcgaggtgctaagcctttcctggacctaggcctcgtctaggttagttaagtcttctctcgacgtccacaattagagagacttaagagataattacttggataattatcttcaatcttttgccacgtgtctctactccgaaaatacggataacaataaaaatatatatttggttatctaaattatgataactctacattttatatttattttcttataatccttactcattttatattttctcaaatttaataagattatcttaatgatttaatttttcttgtttgccatatttagagtcatgtgtttttgttttgttttctaattattaacatttttatcattttcctctctctttttttaatctctcgcattttttttcttctatttcttttttttaaaaaaaaaatcaattttttttcattttttttactatttattttttttaaaagtattttgtacattattttaccatcttttcttctccggtacttctttttattgaattttacttgttaattttttttttaatatatataatagtgtaaaaaattatacaagcgtatatatatactagcaaaaactacgtgcgatgcacgtatactaaattttatgctagttttttttcta

SEQ ID NO: 322485 - DNA, 725 bp, Cannabis indica
ttttaaaaaaaatatatgtaatatatgtatttttataatttctattatttaatttattatatttggccattttcttattttttttaaaaaaaagaggacatttactaacttagttttcaaaattatgaccattttgcatcttagccctatataatactcttgtttcctttatgtggcccatgttattttcctttatcacatatatagaagaaattacactacataccttttttaatttaatacttttaatttttaccctctttttcaaaatttattgtatttatctcttttttcaatcattctaccaattttacccctatcacttgacgataattttcattcttctctaatcaaaattttggcccaattttctcataaacatacacatgtatctataaagaacacaaattttttatgtttggaattatgtcttaattatgtgagtgtgtgagaataatttcgatataatactcataaaaagatgtatatttgaattaaattttatatgaagaaaaatttggttaatgtataaaagaagtggatattcttcaacttctcccacatatatacacatatgagtttgtcaagggaaatttgaaaaactatactttaaaaaccttaatattttattcttaaaccagtacatttcaagctaaaaaatatatgacacttttataaaaaaccccaaaataaccctcacataacaacaccccaactctctctct

SEQ ID NO: 322486 - DNA, 1384 bp, Cannabis indica
ttttttacttttaataagtttataatacataagtaataataaaaattattatcgtaataatataaattcaatattaatattctacttaaagttgttccaaaatattaatattttgttcaaaaaaatatattaaatatatataataattatacgaattggtttggtttgaaccgataccgaaatttctaaaactgtgaccgaaccagaaaatttaaaacggtccagattggtcaaatattttacaccgaattcatttggtctggtctcaaatggtttggtccggattagttggggtttggaaccacggattatggattatatgaacacccttattttctgtaagtccgttggtccccgagttaactgatccgttaaacccaaataaaatgccacatgccaattttttattgatctaaatattaattttaattaaaattaaaataaataataaattaatttccttttttgaaaaaagaaaagcaaataaattattttaaacttaagtaattaatttatttttatttattttttcttttcaattttttcattctcatgacccttgctcttcttttccccccttgtcttttccattctcaaccagttttcaccatttccactcaccgttctatctctcttgaaccccaatctgaccagccccataccatcgcatcaccccaaaattcaagtcttcgtcctcaggttctcctggacttttccttcaacccagcgacgccatcatcacatccctttgtgcttcggttctcttagatccattcgagctacactacctcaagattaatcgtcgtcttttgtttgtacaatgccctttcgtccccatgcttccctttcataccccgttcttcttgctgctcaaatttttttttttttagcaaaataggtttctagcgaggggtctaaaaatgcttcatcgtcgaagcctcaccctgaaatggctccgatttgggtatcttcgaagtctgacaagccaatctttaattttgaatcgatggttgtgaaaggcggagaataagagaagatgctgagcaaagagcttgcaaacaaataaaaaataaaggtggcagtttagcatattaagatgggcagtgaggttgttccttggcctctccatcaatggaatttccatggccatggacgagtttatctacgaagaagaagaataaggcgagaaaaagcaaataaaaaagaaaaagaataaaaaatgttattatttttattcatttattgggtaaatactattttggaccctctgttttacaaaagttatcaattggaccctgtgttttgttaaatgacaaaatggaccctgtattttttaaaatagtacaaataggaccctgaattgattttttgtcaaaataaagtt

SEQ ID NO: 322487 - DNA, 1147 bp, Cannabis indica
atttacacactttattgcttgttgtagtgcttaaaataaggagtattcgatggagtatttgggctgttgaagtgagcgaaattaaaacttttaaagtacaattctcatctcctatgctgtgatttattctcgatctcagatgaaatctatgaaccatgaaattattttttatgcaattgtttatttatttggtcacatgggcaattgaaattgggaaatctcaattgttttatcacaacaaccaaagggttgcctctttcgtatctgtcgaggtacagaaaagtatatttaaggtttgaactttcttatctctcaatgtatttttgtatttttggattatagagacgacgagattatgcctatgatgtttcacatatgtcgttgtgttcttggcttggcctgtcacagattcttactcatcagatttctcataaaatatcaagttatttttgtatatgatgtattatcacagcaacgaaagggttgcctcttcgtactcccttttttttatataatttttttatagatttattgtatattgggtttgtttattcttctcttataatttctttctttttgttgttgttttggtgagagaagaggtatctagacagcttctgcaaccctgattttgttgttgaagtggtgtctctcttctttgatgatactgaaaagcttcttcatgatctcagtgtaaggattcaaagcttccacctccttttctttttcttcttattattagagttgttattatttttcatttatttattttctatttattctctattgctaactttgaaatttgaatagtaccttgaaaagagttgatgccatttcacatcatataatgttttcttcttttttttcagaatctataaataaaactagcatactcgtattgatattttatttcataaatattaattatgaggatctttcattgcaattttgactaaacaaaataatgaccttttcagtttttagttattttttgtatataggatccattccattggctcctagctaaattaattaatcttttacaattctttttattataatgtgtatcattttttataggtttaagaatggctttttgatttttttttcttagcctgttaatctgctaattttcaatcgtttgatc

SEQ ID NO: 322488 - DNA, 636 bp, Cannabis indica
ttaatttaaatgataagattagaaaaacattagtttttgatattttatcttattcgatatttatattaattgaaaatttattatttttgttaaaataacatgaaattttgaaaagttggttaatttatttttgaatagatattttagagttttctaactataaaatttttaaatttaagatattttattttatttagtttttaaataaaagtactagaaaacaaaattgcgttcatataattctttttaaaaaaactaattgatatttaatataataaaattgtttattttttcatttatttttcaatcataactttaaaaaataagctatatgtataattaattaataaaaatttgtaaaaataatttaatcaaaaaataaattaattataatctttacatcattgggaaaaaaaaataataactgaaatatcatttataggtagttaagtattttaaggataaaatacattgaagggtgtaactgtaaatttgtccctactctatgtagatcatctataaaggatcgttatttatttggattgtaacaatggataattcatagcgtatctctatcgtgaaaacatatagagagctaactatatagtgtaattccgaatctatagtggcgcaagg

SEQ ID NO: 322489 - DNA, 734 bp, Cannabis indica
gatctcctctagacttgccttgagaaaacccagttcaaagtaggtgtgcaactgtacaaacttgatgtggtgataccaatattgaagaagatctttagtgatgtctatcacccatgtagtatgcatctctttcattgctttacatataaggaaataacacatgctcttgaatgcctttgaatacccgcaacgactaccaatatctccatatttgtgaagcaaatttttgaaaacaagaactaattctaaaggtatgaaataaccttcaatgtcagcaatttttagtgctagatcactaggctttattttcatactcctcttcttatagatcttaccaaactcattaaaaatatatgacatgaactcagtttcagtaaaactagagaacgttagaatctcatcaattttttcatcttcagtctccaattgagtggtcatttcactctcttctttttcctcatcccatgtaaaataagcttttaacacgaacaattcatattcacttaattgaagtattaaatctttcatgctcaaaagagatgtgccatgctctatctctccccatccaccataatttgtttcctcacaaaagtcatatcccaaggcttttagctccacatcttcaaggtccccctttagtacatctataatctaaacaaaatcaagtaatacacattattatagaaagttactagtatgagtactatcatattttttttccaaagattttggtt

SEQ ID NO: 322490 - DNA, 1870 bp, Cannabis indica
ctttctatatattgttatagcacttcaaacaaagtgaggcctaaaaagatagtccaatatatgaatgatatcttgatttttatgcttaaagcaaattaattaacttattatttgttaatgggccaaacctaatcttgaaaagtttggttggtgtattgacatttttgatagggaaagagcttcaatcctcattaccaggatgaccaaaaaaaggcatatagcactatagtcaatagtcatcaaatcacttttctttatacttcatttgagtttgaaaataaatataagtagttgaatgaatttaaaaacccagaaattgtattattatggctctttttcaaattaatttgacttaatttatcatgtttataaaataaaacattagataagaaaaacaaaataaacaaggaaatgaatgaattataagatttgagatggggatattttgtgcaatattaatcttcatattgtattccttgagcctattatcagcctaactagattatattacttacgatttatgatcaaacttgtagtgccttataatttttctatctcaattaaaaataaaatcttaccatttgatctctaaacaaaaacatgaattcttcttaatcattttcacagcaagatcaataatacaaaaatttatctttactagaaaaaagaaaaaaaaaaaacttattgtaaaatgagaataaaaatttaacagaatattggtctacgaatgatttttttttctttttatctttttgaagtagacaggggttttctgataactagtactgcttttaaatggttataattaattaaaaaaaataacaaaaaagaaatatattatagctttttattaatactcaggagaggacgtatttatcatcattagtaaactactttagtcccacattgtcctatgtaattgggtgagagttataagagggtcataaaagaaaatgatttttctcggcttttggctaaccagctgcgctgaatattattcatcttcaaaagaaatactaaaattatgataactctcccaattttaaaaataaattaatgatctaaaaattatgtttgaaattttttaaaatttatatttgtatgatacgttgttgaaattattttttttccaaattacctttagatattgtcctagtaaaaatatgatatttttctctatgcttattttgttttgagtgatatttagtaccgctgaaaagataatttgatgatgtacattttctttgaagaaacagtcagctaattctgatttattctatgtcaaaaagtagcttcattatagtattatactgtcgtagataagtcgtcttttgccagttcttggtaaaagcatcttcagtatatttgcaataactcttctatttttcatccgtttttgaatattgatatactgtttgaaagattattacgttgtctataatatttatgaagaaatatttcattaattcaaaatatttttgccttaaaagtagagttttcatcctgtatctcgaaatctcattttatcttttttcaaaaaaattatttcagtaaaatagtatatctcttccaatataactctgattttaataatctttgtatcattggaaaggttttttaattatataaaaactttgtgaatagtaatctttctaatttagacgttctataattcaaatttgggattaaagtttctgtataggaaggataacaaacacactaaggcgtttggttgggaggaatgaaaatataagaataggaatgggaatgggaataggaataggaatggaatggaataaattaaatggataaaaaaattgataaaaaatattaattttttttctgttacattggaatggtcattccttcc

SEQ ID NO: 322491 - DNA, 1059 bp, Cannabis indica
gaatttaccctagctagtattacacagttacttccaaacgcacccttaatgattacaaactaattgacttatacaaataaagactctctcttaaatttgtcgtaattgttgtaagttccataatatttatattcatttgaacctagtaaaattttcataaatataaatattaagatatatatactttatattaaaaaaattaatttatttatttacataaatagaatattttgatttaaaaatattttcacaccaaaacaagaaacaaaatatattttgaaaataccacaaacaattaattttgccaatttatcaaatatgagagtaagtgattttacaataaaaaagtatacagtggtattttgatagatcttctatctatttttgacattcacataagagttttgtagtttattttttgtattgtatatgttttagttatttaaactcacctgtaaattttttaaataatttacagtgtaaaatataaaagttaaaatattttgttgcatgactgtcttttcttatacgcttggtaagcgacgttttaactttatttttaatactgtaaattattcagaattttaaaaaaaaattacgagtagtcctaaataacttgaacttatataattattagaaaacaaaaaaaaaaggaagaagaagaagactaagaaacttttctacataagaagtacccattttttttttcaaagtttcttaactattatgtttccttctttattgtgttaaaatatttatgtttttctctttttggaaaatataagtaccaaaagttttaagtttgtaagtgtcataaatctaatatttatttttagcagcataaatactcaatgtttgttaaaccgtaatttttctctaatctcatcagtacagattctgttattgtcttaaacagaccacatataaagcccaaatttctagatcattggatcttagacaaaatatgcagtatcaattacttccaaaaatattcttttaacaaagggattatttcacaaatacacaaaaacaataaaaaaaaaatacaaaaatatgatt

SEQ ID NO: 322492 - DNA, 800 bp, Cannabis indica
gttacctgattaaatcgaccaatttcattaggcgggttactattttctttttcttaattgagcgggtgagtgatgtacacccctacttctaggggcggccctgagttaacatgggctataggcaaaaaaaaatttttaggtccttactataaagataaatagtatttttgaaaattattaaaaaaaaatgtatattttttaacattattttttttatgccctgcctacttcttacacatttccaattaaaatttgtgctaaattttattaaaattaggaactattagtgtctaacacttacatgtcattcatgtgattaactatcaatacttcctaaaagttattacattaaacggtatagattctgatatttaggtggacctataacaagggtactaggcaccactagtgacatttagtatttttctaaaaaatgaatatgtactatttataattgcgctttaatcagggtcggcccaaacattttggggccttgtgcaaaaaattaaaattagaccttttatatataaaaaaaaattgcttattaagacctctattgctagttttttacttcttttctttttcaaatatatgtttctaaatttttaaatataaattttttaatgtatttacaataataaaaaaacatttcctataaaaaaaattagcctttacaaatgaggagccttgtgcaatggcccaagctgcccaaagcttggaccggccctagcttcaatgtacgagatataaaataagtaaataaataattaattatattaatagtcatttgatattttatt

SEQ ID NO: 322493 - DNA, 564 bp, Cannabis indica
aagcccaaaccaaaacaggggagctcaaagaacaggtttagccaatcccaaaggcttttccagtacaccggtgccatctgcgaaagaaactccggcaacccaaaatgtggaaccggaggaggaaatcccacaagttgttttcaacagaatgattgtaaggattttggtgtcggtgggggttccgatggcgaccggtttgggtttgttgaagatttttgaaatagggaaggagcaggggtttctgattgtaccggtttgggtagcgttgttgactacatttttgacttttggggtttcttcttttgggattgcttatggagctttgtctaccagttgggatgcagagagtaaaggctctctgcttggctttgaagaagcgcagaagaattgggtcgatatgtggagggaagaagatgagagcactcaatgatattgtatttgaatctatacaataatacaaatctttacaaaagaaaattacattaggtagttttttttacatatagtgtaatggatgtgtgctaatgaaaatgaatccctaaaagagcatttcagtgaattttt

SEQ ID NO: 322494 - DNA, 778 bp, Cannabis indica
tagtaacttatatgatgaacttggtattttaaaaaaaatattagaattgtggaaacaaaatattactattagtgatgatcaattattttataaaaataattaaaagggtaaatattcatattaatataatagaatagtaacttatatgattatacatttatgagagtagcatagaatagtaacttatacgatgaacttgatatttttttaaaaaaaatatatattgaaattgtggaaacaaaatattactattagtgatgatcaattagttattttataaaaataattagaaaggtaaatgttcatattaatataatatgttaattattttatcacatgatctgaccatctctatttttaatataaataattaattattttatcacaagtgatcatttctattattaatatatatatattgatagaactaataaacattacatctgaatagattaattaattaaaaattaaaattagttcagatttatatatatatatatatatatatgcatatatcttaacttttatatattaaaaaaaaatataatatattttatataccatttattcagtataaagattaattagcttaaaaagaaaaatagttaaagattgcgcgaagcgcgaattacagattcattcccaagttataatataaatggatggtaggcattttattcaacttccaatcgcccttatgactctatttttatttatacaattttgttcaaatttaaaatgtaacaccctaactaactcaggcgtattacgtgatttt

SEQ ID NO: 322495 - DNA, 1725 bp, Cannabis indica
tctttcgaagactcttatcgaccatgggtacaccatgttcgagtttgggggcatggaggaggccatgaagagtcttcgtgacttggaggcacaaaaaagagctatccgggaggaagcccagcagaaagcggcccttacagaacggagccaccaggaggcgttgagggctaaggatgaggcattaaatgccaaggataaggcgttgaaggccacaacaaggcgggagctacgggattctaaggacgtagtgcaagaattgacagccaagttgaagtctttggaagagctgcaccaagcagatttgcaaacgacagccaacctaactgttgaagtgaaggggcttcgtgaattcaaagagcatgctcagaaggaggtggccaaggtgaagagagatgccctcctggccccagtcacctgtccacactgcaagaagcacttcaatgatggagtcttcatggcctggcaatccaatggtcagaatcttaacctcggcttttatcccaagcctgaagaggttcttgttcgcttctgggagaagaagaagaggctagatgcagtgttggaggagcgcaggggtcctcgtcttcctcctcgggatgattaaatcatttgtttatctttgttatctttattatcattttttctttttgttacatatcctgtcttcccctcacttttaagataatttctttctttttcttaaggggagacttttatggcccgtccccatgccttttctttttaaagttttttctctttgttcaaacaatctacattatgttcgaatatatttagtttttaacttccttaaatttgatctgtttacatttgtccgtgtgatatgccttagtacccccaagtgacatgaaaattagttttttagtcacttagtcttacaaaattaaattagaggtcgcatatatttgttcggtacaaatttcttttacagaaaataaactttgctttttgactattggtaatactttcggaggtgatcagcattccaagccctaggcaccatggttctgtccattctttttagcttgtaggtctcagagccgatcttatcctgaacttcatatggtccttcccaatttggcccaagtagccccactccgggttcttgagtggctgggaagactcttcttaagactagatcaccaatagtaaatttcctgtctttgactttggagttgaagtgtttagccatcttcttttgataaactggcatccgtacttaagactcatctcggagcttgtcaatttgatccagtgcttcttgtaataaagtcttgtttgttacccgatcgtatgtcgttctcctgtgggatgggaacagggattccacctggaccatagcctcacaatggtacgccattgagaatgccgagtgcccggttgtggttcttggagtggtccggtaggcccataatacttttggcaattcttcaggcgagttgttcttgcaggccagcatcttcttctttagggtgacctttaggattttattgacgacttctgcttgtccatttgtttgtggccttgccaccgcggagaaacttttaatgactctgtgctggttgtagaagttggtgaattcttcgcagtcaaactgctttccattgcctgagactatcttatgaggcaagctgtatcgacacactatgtttttgatgacaaagtctaatgcttttttggcagttatggtcttcataggctcgacct

SEQ ID NO: 322496 - DNA, 1058 bp, Cannabis indica
ataacttccaagtgtccgcatctaagtgaacaagcggattctcttctagagttattgcttctattaagaagtttgccaatgcttggcccttgatggatgttcgagggtgatatgttatgtcaaactgccctagttcgattgaccattttaccacttctgtacattctgagtgcttccagaaatatggggtccacctaaaatagtcgctacatgaccatctaaagttgttaatacagctctaggagggtatcgatttccaggattgggagctacagctactgtccctgctggagcattttgtgccccctgaagggcttgtgcatttggagcttgtattctaggaagttgtgggtggcctatccctgaggaggatttatggctccttactgtttgggcatgaaaagttgtccatgtgcaactgcgctgtcctagatagataactgggattctcacccaattggttaacggtccatttcataccaacccttctattcatctttcaagtaatcacactcattggtggtgtgaccaatatcaacgttatattcgaactttttgttcggatctctttgggttttctacccttgtatattagcggagcttcctgtagtgtaccatgttacaagtttccatgtatacattattccgagtatctatgagacttgtgtacttggtgtaccttgattcttgggttttgcccttcttcgcagactcactttgattgggacccttcgtactccttttactccttaataggttatattggactctagaatttccagtttttagtttgtttgtccagtagcggctggctggttgtacaactggttgtatggaagtacttggtccatatatcgtaggagtagtaaaagcaattggcgaaaggtaaatggatggagttgccagaaaaaaaaaatataatagcatccaccaaaaaagtcttatcatttaatatataaaatcaaacaaagagcataaatcagttccctattagatgaccatacttcttccctttaccagccttcaaagacttggtttgcttctcatcctcactgtca

SEQ ID NO: 322497 - DNA, 632 bp, Cannabis indica
tttcttcaaatcaactaatttactctaagaattatgcttgatctgattgacaaacagtaaataacaacctcattatgaagaaaaacactaaaagtattggtaccttgtatttttttttgtcagattcttccaagttatttctaggtaagctttgactcccctctctttgtgttgttatcaaattatttgcacaatatgattcgaattattgttcttgagatttatgtgtttttgaattaatggaggtagaatatctgttttcctctttttttttctggtttaccttttgatttttagatttgtcagggttaatcattttgttgttcagatctactttgtggtcttgttattacacagcttgggcatttttttagagttgaaatcatgcctcaattgagaaggaaaatggaggagagaatgctctggtgtggttgggaacgaaagaggaagaagatgcgattgttagtccgtatttttttttaaaaaagaaaacctttaaattttcttttttgtttaatttacaaagctaataatataaaatttgggcctaagatacctattatagaaaaaagggggttttttcatttttacacttcaaaactgttttttttttgcatttttacgaaatttta

SEQ ID NO: 322498 - DNA, 762 bp, Cannabis indica
aaataataattatacgtgcattgcacaattacatagagataacaacagattcttataaataaattcacagagaatataatttccaaatcataacctaatcactcgatctattctaatctttaaaacaaaacaatacccaaattcatttaatgaataaatataaatattcaataaattagaaaactaagttgcactttccagaatatctaatttttataatttttttatattgttattgctttataataaatgagtgttataatatttataaaaactgagaattataatataaaatatagcattatattgtaaaaattagttaattatagaaattatatttttttctaaaaaaataagttttgcaataataaatatgagatattttttttatttatccacatttatggtttatagtttctttatttactttataattcatctatatagtaaattttaattaatatacaaccaatattataataaatataattaatttaaaccaacaataaaaattaattataaaaatataaatcaatatatgccataataataattgttttgcttgaaatacctcgcattaagaacttatgataaattttatatgtataagggaaggatgttttctcactggatgaatcgttctacaattaatatggactgttcgatattgtgtgtgattgatcttgtcacgactcgagccttaggccgtggcagatatataatatccataatttgggtggtcaaaggtcacactttgaccct

SEQ ID NO: 322499 - DNA, 1106 bp, Cannabis indica
ctcataaaataagattaaccttgccaatccaatactggacaatgttgaaatcttattttgatagaataaaaggttgctaaaataatgtccattttagaagagctcactactctttttaacaggtgatatttttgcatccagcccaatacgtgacactgtacataatttggttaaaaactttggaaaatttaagatatacttatttttagtatttttcccatatctttcatatttgattatgtgtttatgatttttcgaatatatgcgattagaatttatattgaacatagtattattttatgttattgattatgtagtaccaatttcaattcttcattgttggtctaacatagcttgtttttttatttggacaatccctaatagattgtcatccgttagacaatatgtatagtgttagatctcgtaagataagtattttgtaaatacgaaatcttgtcgactcatccccaataaatgacaacttagataagggtttacaataccaaaacaatgaagtattttttgaatcaaaattattctttagatttcctctacaacctttttcatttaaaaaatgctataatcatacataattagactagttggattatgatcattagcttatgatgttgctctattctcctccaagaaaattagtgatgcagatgaacatattccagatattctatccaaaaactaatgattatcctcaatttttaaaaattgaatctccttcatacagtgctacaaaaatatcgagtgaatataagcttaaggttatagttctaaaatcgatatcaagctttttgcaagctgaacttagagttataatagtgtattagtggcgatccaaactagaataataactcagtttttagattactaaacactaagtttaactttcacaagttttattatcaatttcaatggatcaaactaggtgttaatgtataaaattgagttgatattctgtgatcgagcatctacttaaactattcaacaaactctttatggtaactagacctagaaagtcactaaaagatcttacaaactgatgggagtggagaaatatttgatatgcagttcaaagatcatttaaatgaact

SEQ ID NO: 322500 - DNA, 546 bp, Cannabis indica
ccaaaaacccctaccccgattctttctcggtctctctcgcactcactctcctctctcgtctaactatctgtttgacgaaaaagggcagtggccacaaggccccatctccgatcgtcaatcattgaagacgttaggcgatgaaccccgcccttcctctctcggtattggtattttttttcagatctatttttttttttttgtttaattgttgtgggaagaattacaagcatggaataagagggaaaaaaaactttccgaggaaattgataaatctaaaaagatactagctatattgtcagctgcccaaccaccaagtgcttgggttaaaattaagaggaaggagaaaaagcttaatggatagctcgacaaagatgagaaatattggcgacaatggagccaggcaatgtggttacaatggggagaccaaaatacaaagtacttctatcataaagttgttgggttttatgccctaaataaaactcatttcaatataatcagacttacttattaatatagatcagaaataacatttaatgttgcatggtt

SEQ ID NO: 322501 - DNA, 699 bp, Cannabis indica
atacctggaactgtgactgaacctagtattacgcctccaattgcagctataaggcaagttatgagaagatgaatagtgagtttccctttgtgtacttcttgttctgttctcatgttgttcaaaccagcttcaccacccatcttcagcttttggctgcttctttcttctaaacccataatatctgagtttatcatctctttcatttggataatgtataataatgtaaatgtaaatagaatgtgacttcattagtttatgataacagctatatttatatacttacatattacatgtgtgtcatccaagtttgaccagagaagaaaagtacgtgtggggacaagagaaatgtcaaatgtctatgtatgtgcctctaacaatctaataaacacggttttccggcaaattgtaggtattttaaataggggtggcaaaacgggtttcgacacggcacacgaacacgatacgaattttatgagttagggtcgagaaaatttgacacgggtcgaaaacaactcgatacgacttgacacaaaatgaaaacaggtcaaacacgacataagccgcttaacacaaatgtgacacgttttgacacgatttttttaaatataataaaataaaaattaataacaataatataattatataaaaatatatatttagtgatttaatgttaaacttaaaaaattttaaatttaattt

SEQ ID NO: 322502 - DNA, 983 bp, Cannabis indica
tttcgtaaaataaaaaccgtaaccgactggcggttataaaattttaaaaaccgaccataaccgaccgattttcacccctaccgggtgcttaaaatgaacttactctgattatgattatgatacctcaaatatatctatggtatgtctagttgttgtcccaatgtaagttttgatccatttgcactaagatggtcccgaaaactgaaaccctagttgggaacgtcaacttgggcactaggtgaaaatcctaggtgcccaagttggcttccaagttgcaggttcgtgtcatttcagctctcagggcttagattaggttgctccatgtcttcatggtataaaatactaaaagatagtgagttggattcaagttattgaagtccaaacttccatctcagagctctaaaagtcaacatgggcgcagggctagagtcccctccacggttgattgctatgactcatgtctactcaaatttgtgacgccatccttcttgccacgtgtcaaacattgatgttcatctcaaaagagaaagtttccaagttaatattttccccccaaattaactttactcgtattaaacattgatctttacgtcactaaaaaaaattcattatatttctacatctaaaaaaaaaaagtcaactttatatattaatttgaaaatgtaaatattaatgttatttttattactagtattttattctattgatatttatacattaccaaaagcacctaaaatatttgtttaaggttgttccaaaaaagaacatttttaagggggttagagttggtccaaagctttaaaaaaaatatagggaaatttacacccactactattttttccccatttattacatttttactgttgcacggaaattgcaacatttatactgtcttttttttttttttggtcagtttactgcctttaaaactttagctttttttttttttttttattttaattcaatttaatcattatatcaat

SEQ ID NO: 322503 - DNA, 640 bp, Cannabis indica
aaaaaaaaaaactaaactaacctaatacatgaataattataataaaaaattgacaatttctaaatagcaatcatgatttatattatattaatcactaactattaatataaatttaaaatctaaattttcttctcccaaaagaaaaatctcctaaaaaatattctaaataaaatcttaagaatataaagaacctaagtaataaaaaacaaaagtgattaatcaaactattttttttatcaattattataataactgagagatcttccgttatgaaaaattagtaaaaattaaaatttgatataatttattacttagttatcattaaataaaaaatataattcattttggatataaaatttttttttttaaaaaaaatctatcgcgaagcaccgaataaaatatttgttgtaatggattaaaaagaaatattatacttgtagaaatttttagcgcataacaccatctctaatggaagatctaaaatttatgctaaatttggcacaaaaaatgagtttgtactatatttagcccactatttataattgtgacccaatgcaccagatgtaaaataaaaaaaaaacaattaattatattgatggtcatttcatattttattgagaatatacaaaatttattattt

SEQ ID NO: 322504 - DNA, 1948 bp, Cannabis indica
cgcggacctagcccgcctataccagggccaaccctgcccgtaaccatatcacatttgtattggatcttatgaaactaatttttttttggaccttattataatagtagataagactatgtgtatttataaaaatagattttttttttaaagttttcttaagaatatgtgtattttcttcaaaaaaaaaaaaaaaaaatctttcctttggcccatgtgtggactaactcaccttaacttaagactgatcctgatatcactttatagtagtgttatatacaccatgagtactctttaatatttgtcatatttgtaaagtcagtcgtgaattgtaattcacaataattatttaattttcaatgattattatgacaataaaattatagagattttagttacactcttcaattgtcatatcactttttgtaataaataagtgcaattatactaaataattactaaaataaatcatttgaactattaatcattttatcaaacaagacattataaatttatatgtaattactaattattatttgtgtaattactaactattactaatacaaataagattaacaatcctctttatcccctttacttcccgttttctctaatatttctattcatcatactcttccaccttctcaccaaacatagcctaaatattaaagggaaaatttataatacttcccgaatgggaggttctaatagaccatctatctagtttgatatttaagaaagttttttagtgttttttttttttatttattttatgattgtgtttgttgtatttatataaggttatttataaattttaagaaaattttaaataatttgcaatattaaaaatatattttaaatatttgttgcacacacacgactgttttttcttatacgcgtggtaaataactgtttgaactttatttttaatattataaactatacataatttttttaaaaatttacaagtgatatactaagggtgcgtttagaaagctacgatataattgtatttatgtataattagaggtgattatacaatttgacatatttgtctgaccttataaaattgtgtaataggtaattaagggttccaattacattcttcaattaattgagtgtaattgtactttataattacttaaaaaaattcatattaaacattaattactaaaaaatattattttttagtataattactaagtattttacgaaataatatattaaaaatttatatataattattagagtgtgtaattacccaattattcaaaaacaacctaaatataactaaaaaattactaaggtgtgcctagaataggttaggtagttagagggaaaaaaaacaaaagatgggcaagtaagagaaatatagagatgaaaagggttagaaagcaaataaaataaaatataaaaataataaaagaaaaagaaaaagaaaaagaagcacaggcgtgaaaagacctctctcagattaaaaaccctttcgtttgcttctagcattggcttatttctctctctgtctctctctctcactttctcatcagattatagagagagaaagcaaagctaaggctcagctgatacatatatagatatagaatatgggtatttggggtttaggcttttaaagctttaaattttcagtttaatggcatactagtaaagagtaaagtttgggtttttattctagtctattcttctttgaagaagaaaaaatggccttatttgatgaggttcaagacctacaaaaccctccaatggttcttgataccttgttctgtgaggaagaaggttttgaagatgagtttgaggaagaagaagaagaagaagaagagagtgagaactgtgataatgggtctgagaaaaagcaacaatctttccctttggttttgctagaaaatgatttattttgggaaagtgatgaactttcttctttgataactaaaga

SEQ ID NO: 322505 - DNA, 839 bp, Cannabis indica
atatgatcatgattattttctacagtgtagacaaccagtgacaaacctaacttagaggttatgggggttgtagccctcaccgaaaaaaattacataaaataattaaatatttttattataatttaacaattatatatcaaaattataaaatagcccccaaaataattttttataacaattaaactcttttaaattaattaaatttattaggattaattgtattttttcaattaagtaagcacatatatattatataataattaagcctccatatactaaaatttttaggtccatcactataatcatgattgtccataagttcaggatttaatatgaaccatgtaatttatattatattaattaagataaattttatttaaggcataaaactccaaccaaagaagagtacatatatttattatattagattgatataaattacttaatttttgatgactaattcataaaaactaatttaatcactacactatcttataattagaaactacaacgtgataaataaataaataaataataataataatttaaaattacaactaaaaagtttttatttttattattccgtcaaaatagaaaatattaactctttttgctcgtataataaaaataaaatcatacaaatacatgctttaataaagaaatattattataatagaacattaattgacaaaataaatattaaaagctaattaggatttttatccccaaactttaacatgcatcaaattatgtcctctgaacttttttgaccattaaaaattccttatgaactatcgagattgttagatttaagggtttttgtttaatttcattcaatt

SEQ ID NO: 322506 - DNA, 1107 bp, Cannabis indica
agcccctcaactattttgagagatcgttaatgtctttctctctcatcatatatattattaaagagtttttttccaaaaaaaaaaattaataaaaaaaaaacacataatacataattcattttaacagcataaaacaagtttattatatgattacttttttactataataaataattattacttaaataaaaaaatataatcttatattctcattctaataaatttataataaaaactaaaaagtaaacttatcaaaaaataaataaacacaacccaaaaaattatgaaaattaaatatagataatcaaaaataataataaaacaacattataattgatttagagaaattctatgttccatttcctaaaattaagtgtaccaaacattccttttgtatttttaatatccacatagttttaatctttttttttttttacgacaatgtacattgtagttttttaaaacatcttgtaaattttcaataaattcagaataacttaacatactaaaaataaggttcaaacatgcctattttaatcattttttaaaaaattaattttgtattatttattatttattattagtagtattgaaaatccaaaaatatttataagaacatttaagtttttcttaaaattttatgtttacttaaacaaaatagattcaaacttcttcatatttacaaaatcatcatatccatgtattgcttatcgaatttctttacttaagtataaaaaaacaaagatacaagttgtaacgtcctgatttctcgatcacacttgctagtctgtttaaaacatttataataaagacaataaactaatttattgaaaatatccaaagcatgaaatctcattatttaatcatttataaatttttaaacattaacttttacaaaagtaatcgagtcataatcttaaacaaaatattttttaaccaaaatattgtgacaatcccctaacatgtaatccatgtctcgagctcgccatcctcactgtttagctttgcctaactttacatgcacacagagtactcgtgagctaacgcccagtaagaagagctatgtaggacataaccctcctaactagttacttgacataagttact

SEQ ID NO: 322507 - DNA, 1000 bp, Cannabis indica
atacttgtgagtagatctaagttcctggtaaaataacttccaacagttggcagatcaggaggaattctccatcaaatgtgagaaactctagcaaaactggaggccaaaattgaattaggggaagtggctcgcgatgacaatattcttgatgaccatgctcctcaggaaaacaaaccaaagaccctagaacttctgatcccacaggggacagataaaagggtgttataaaggaaccaataaaaaagattgtccccactactccaaggaacaacatgaatactgccaaccaacctctgcgaaaaaataaggtggttaatgctccagggaaaaatttcctaattgatccacgaggtagagttccgcagaatgataggcatggtacccaagtataaaaatatattattcagcgatagagtaggtgaggttcaacccattccagaagataatttctctacagcgaacctctagaagcacttaaatgcaaaaagaacaagctagaggtgagaaggctaggcctcatggaaacaatcttagaaatcacatcaatgacaaagtctgtgagcttgaattccaagatgataacactaagcatttggaagatcaaatagctaagttgactaagttcacaaaatgacttgcccaaaaataaagtggggtcgtatctgactcaaaagtagaagtcgtatctaacttagaagaataagatttggaaccttgcgtgagaagaataatagaagcacccttgctggaacactttacaatgcctcagatggagctatatgagggcgggatggatcccagggcccacctgtctaaatatatctgattgatgcaagtagaaaaggcaagtgatgacgtaaaggggtcgtttggtatgcaagtttcattccatgggaataggtttaacattgcttggagagtgatgaagggaatgataaacctaggaaagtaatattaccgtgtttggttgacattagaatggaatgtgacaatttttttt

SEQ ID NO: 322508 - DNA, 1093 bp, Cannabis indica
ctctctctctctctctcatttctaattgatattgcagctcttttgcttccccacataggttgcatcattcgtgaaccttttctgttttacctcaaaccactccattaacaactttcgctatggttctctttcaaaatagtctaaggatatatttgtagcattatttttggaatgataaatctataactaatctctccatcttctatacttgcttgtcttttttgaaggaatatggagaaacttgatttggaaacatgtatattttattagtagagagaattgaaatttgtgttctcacctcatcacttttcccacagttttttttttttgttcttactgttacaacaacatgggttttgttcacccatttgctgttgttgttgttgttttctttcaaatgctctttatattctttgatttcctttggattgtgttcaacttgatcatcattggtaagatttaaaggggttaatgtaatgttgatattgtgtttgcttgatctaaaatctagaagaaatactcattattctatttattttgttttgtgtttgatattgattttgaagaatactttttcttgtatgtgaatccattacacctatgttttcttggtggtcaatatcttacaattgatttaatttgtattgcacttaattttgtctttattattattattattattattattattattattattatatataaactctacatatagccaactatattaatctaacagccaactacattaggcctcccttggcctttttttgtcctcacactgtatacccaatgaagaaaatgtgcaattctgttggaaattattttaccaggatcttaaatctactcacaagtatgttgattaacaccctaaatatgaacttctaaaatgattatgaaataaacacatataaagtatgagaaacctaacattgggtgcagcggaatattatgtctccttcagttcagatctctaacccttgtatcctttctgtcgcagtgtattatcaagatctgaacctggatctctttctctccttctttaatgctgaaactccttcttgttgaatatctttcttcacgatcttcc

SEQ ID NO: 322509 - DNA, 549 bp, Cannabis indica
ttgtgctaaatatagtacaattttcgtcgcatatcgcagcgtgattttcaagcattatgtgtttaaagaaaagctccctggataaggtattgaagatggtgtcctccacttattatacctgagatttttgagtaaagaagattcaatacaatgttttgtgatggaatagatcaaggttgatacagcatcttgtttcacttcattggtgtcattttttccagttattggacgttagatagtaattgcataaccttttgagatgcaatgtgtatcctacaattatggttggagcaatacattgatctgaaaaacttgcttaaaccatagttatttgttttagaatcttcagtatcttatttccaatgatagatagcatttgtttaatactgattttgtgaagtttggtttgactcttgtttggtaacttttgggaacttccatcttgaatgaacgaagttcaagaaggccttcaggccatttaacatgcattatagtctaaaaaaaattatttttttaattacccaatattttttattaaaaatatattgt

SEQ ID NO: 322510 - DNA, 988 bp, Cannabis indica
tttattttttttgtattattttattattattttaatggacctctttttctataaatagagagctccattagctcaattttcacattctggaaagtctctataaggtcagagcatctctctctaaaaatctgatctctttccttagtcaattctcttataattcttgtgagaaataaaaatttaaagtaaacgtatgtaatgattgcatatttagacatgaaaattagcagtttgttagtactttaattattatttttatggttatatgtgcattattataaaataagtcctattgtcagaattagacattagtgatataatttctcaattacagaaattttattgaattcttggtatgccatgcatgttaattatgaattttaatatttttattttatgtttggtaacagtagaaatttgatggtttggcaattagggtcactttgatatggtttaataccttatatttagcgggacaagatgtatggatagttagaatattggggttaaacaaggtatttgattatgatcattttacccctagattttaagattacttaaaaaaataaatatcatccgagaattaatataattgttgtacaacaccgcgcgaagcacagacaataatattgatatgattacatatatagttgttttacataaccataaccatatggttaggactactggtatacaaattcttatatggatagacttttaaactgttctccaacttatcagattggactagagggtgttcacgttgcgagtgatgcggtttttgaccatttttattatagaacgtgttctttttatatttatgtctcaatattttttgaaattgatccccactttttttattaaaaaaaagttataacagtgacttttccgacaattttttccacaacggtaacttttctggtaactttttcggcgctgacgacttttctggcgccaatgacttttctggcgaaacttattattacaa

SEQ ID NO: 322511 - DNA, 2074 bp, Cannabis indica
aaaataaaaaaagaaaaaaaatacttattaccctccatatactctacctgcttatcaactgcatcccttttttattattaattcattcatatatttataaaatatttataaaatatctttctctaatatattaacaacttctcattttaatttctcttttttgctgttgagaattgagatcacctcatatataatattgccagctgtactggtttctgccacatgcaatgcaactctataaatatactaacatatattcacttgtgtttcttataatatataaatttaaggccatttaaattttgagattttatttttagaaatatattaaaaaaaataataaaaaaaaagagtgtcatgtgacttaaattcacacaattatgtatgaactctaagcacgaacttaattcaataatacttagggcggcactgattatcaaactaataatagtaagtgaaaaagtattgaaaacccaatttaattattttttttggaaaaaaaaagtactatgaaaggttttaaattatcattattttttcagtgatctgtaatatgagaatcaaaacctccctaactaatagataaaaatggaagtgtattttgagaaataataaaataatttttcaataattagcattaataatattggtagttctttctttggctttgttggaaataatgtatcatattattatttattttgttgataataaactaattttagtacaaaattagagtaaaataaaaattaatgttttgaaataggaagacagctctagtggacctctttaggtgaaaggccaataacacatatgcctaactggcatgacaccatcatgattcgatggcaatctttttttttatttatttttatttagaatttattacacattacaataaataaataaaatatagagtaaattatctatagtgtcccagaatttcagaataataaaaatcctaggaatttttaatttttttaatatatgggttcaaatttaataaataataattttgaagtggtttggtaagattatttcagtttcattctctactaaattagatataaatatatttatttattttatttttctataaggtagatagaactgtcatgacattgttatatatatggatacttgttaatatagaaaaccaaatatagatataactacataactatataaatatacatacatatattgttcaacaatgcaataaactaacaatttttggttgccaactctgaaaaggccaaaggcttaaaaaccaaaggaaaagtgaagaagaacaatttgttgttatgttaccaaattaatatgatttgagaaaatgaaagaaaataagataattaatatatattgtgacaatctaacttattcatttaatcatgacccttcttgtattgttactaattactattgtaattttggattgtgatcaataatagaatattaaatattgttttagaaatagtcatcctatatttatctaaatttcttgcataattaaagttgttgattttaatttattacattgatatgtactttatacatattgagaaattgatggaagagtatgtgccaccatttcaaactgtttttacattgtatccacttgtctcaactctatcccttttacaaacaacatcatttattggtgacaatatatatgatagtaacatctattttcataataataataataataatagaaaaaatttagtgagagcatcacttttaaggtgacaatataacttaattttttttatatgacgaaatacaatatagttacaattggcattggtattatgttaatttttttaagaaattcttgagtaatttaaattgtgacagtcagtagtcctgtgatccgtaaagagaaatactgggtaagctgtgcaatcccacacctcctgggggaggtcaagtgggatgattctgagactgtgtaggtataggactacacagttgaagatggcttaaatggattgattggcacctatatcaataaggtacatcttttttttcggtagcccatcacgaacgaactccacggttaaacgtgcttgac

SEQ ID NO: 322512 - DNA, 1382 bp, Cannabis indica
ttttagaaataatcgctcatagttatacttaataaatgtcacaaaattttacttcctacgacgtttatttaggtacaataaatcctttataaaaaaaccgtagttaaagacatgtgagtgtctcttttctttacttaacttttttatatttagcatgagaattaagcttatacgttggtacttaaaaaaaaaaaaaaaaaaagcttatatattggtagatgtaactgaagcataaacttaaaagaacaaaataaacaaagttcataagggaatataacatactaagttcaaataatgacaaatctcatatcaagatactaaacataccattaatattaaatttttggacaattatattaattgacggtactcttattgcagcaattaaatattgacaataaatctggtcaaacaattagtctatttttgaattgtacatattgtttgtatgaaataactttataattgttatatatttatcaccacatgtatgtgtgcaattaaattaagtatcaactttttttttggattgatcaatatttatatgaataacacacatatagacacactacaagaaaacctacttttgctggcgcaaaaaatcctgccgataaaagtaaactaaatgcgtcggcaaaattttgctggcgcaattatacaccggcaaaagaggtctgcgaagcttggtcggtaaaggagtttttaccggcaaaaaattgcaccggcacaacttaaatgccgacataaacagatactcttattcgctttgaacctgctttgatatagtttagtcggcgcattaatgcaccggtaaaaggttcacccctaaacaagatgtattgaactcataattcattagagactttttatgaatgtcaactaagtatcgtaagtaaattgctcccggttgttcaatcatttgataatcagagtcattctttgataaatgatcactatgagtcaaactcaatagaatttgatcaatccttttttctgtcgttaaggcggagaactatcctcaccttcctccagcttatcaccggcagtctgttcagggttccaaactcaatggtggcaactaaacacgagggttgcgctcgttgcgggacttaacccaacaccttacggcacgagcagacgacaaccatgcaccacttgtgtctgtgttcccgaaggcagattggcgcaaatagttttaccggcgcacctattgtgccgacaaaatatttgcgccaatctaagaaaagtcacaaaccttttagtgttatgttttgccgacgcagtaatgcaccggtaaaacaattttttttttaaaaaaataataaattaactacaataattataattgtaataataaattaattatattatattttatatta

SEQ ID NO: 322513 - DNA, 1138 bp, Cannabis indica
aagaagctcaaagatagttataagcccacgaaaatagtgagatattatcataaaaatctgactttaattacctccgaaaatcaagaagacggttgagatagttctgtgttggttgtatctcctaaagcgagaagcaccgaccttttctcctatataaggggtcacccattggctgggaaaaggatctgcaattttgagcacttagagaaaaaacactcttttattatttgcattcaagagcctgtttttgacttttgtaattctgattaataaaatacaaggggagtaggctattaccgacatctggggtcaaacctctttagattttggtgtctttctttacatttattgtaaattttagtgtcattaattacattcactgttactttttttgtttacatatcatttattacaacttcgcattggctggctaaaaatttaatcaatattttggtgctttcattgagagttttgaccaaaatctttatcgaaaaaaattgtgttaacccgaagatctcaagaacgatttgatgaggagatggataatgcccaacaagttccatcagcaagcaatctccctggaaacaatggagagtgacccccgcgtcttggtaatggtggtgcaaccaccaccatcaccactgcctaaactactgctggtcaaggaacaactggccaaattactatcgtcgggcagataactgctgggcgtaccaccaacgccaccactgttggaggcagtgctactgatggcgccatcggaaggggtaatactaaaaactttatcccacctaatgatggcacaggccaaactcaaactggtcgaggccctggcgtctttaggccacgaaatgaatcccatgtggatatcgaacgaattgacccagagatggatcagctgcgagacgcaataggctgaatgcaaggccaatttcaaactgtacaccaggagtaaactcaaactcgagcgactttaactaaaagtctcgctaaccaaaggagagagttccaatcttggttggaagatcatgctcgagaaatgaggaggcaccaagatgaccaagatcgtcacactcaagaagctgccgacttaattcgaagcttcttcaaccaaaacactcaagggttgtgtactgac

SEQ ID NO: 322514 - DNA, 1172 bp, Cannabis indica
gccccacaagattataatccatattataattatctcggtcgaaatcaaaaaataatctttcacattattgaattgtttttgtctctcgattaccgaaacaagtaggagtatatcagtatatcacttttaaagatgtgcattgaaaatttatttttattaccatgaaaataatttatagtattcatatttaaatttacacacaataaattaaaatgtgcttttacaatgcactctctaaataaaagagttacccgtgtaataaacagtttgaactttattttcggtgtgttaaatttatccgaatatttttaaaattttgtaggatgtcttaaataagtataatgtatcctactataaaagaaaagtctaaaatttcgaaataagtagaagtacatcggtgtaccaattttaaaaaaacacattgtaatttaataaatacaattaataatataaacatatacaaaattaattatatatataaaaaaaaagtatgccgtgtgaatcacacacgacaattaagtgtaacgttttagctatgttggagggacaattccacggcatcaccaaatatgaagcctccttggtgatgctctaagtgctccaacgtagctccatataacacaccattttgttgtgtgctacagtgcacggcaactgtaacacacacggcatcccactttctttttttttattattttattatatatgatatatattatttttttttataattattttagaagtataccgatacactcttatgtcttttggcattggaaaaaaaattaattttttttattcacagttgtgtatattttaattattaaagatattttgtaaaattttgagaaattcaaaaaaaaattatatgccaaaaacatagttaaaacagtttattatacacgtaactcttttatacgcgtgggtgataaattgtttgaatactattttttatattgtattttattaaaaaaataatatgataattaaaaatattattttcagtgtaatttttagagcatcaccaacaaggtttcaaatttggtgatgctgtgcaattaatcctccaacgtaactgcaaatattacattaaattgccgtgtgtgctacattgcacgacatatatgctgtgtactgttcacacggcatacttctttctttttttttttttt

SEQ ID NO: 322515 - DNA, 1094 bp, Cannabis indica
ttgatttctttctctgagcgtgatcccgtggactaggagtgtttaaaagaacactgataccgcgtactaatctcttgtataaagtgattttattttctgtaattatttctactggttctggtttgattttgcaaaactattttctgcagtaatagaattacattcttctgttgtagactattacaggtaaatattcattatagttctataattattattgacatttgcaaaaacttaatttttcaatctcttttcgagcataaaactaccccaaaacttataataagctccaaaatacttatttaagccataaacaacaaataccaaccaaaaacaacagttataaccctctgaaaccaattttatcatcaaagacatagtttgagcttaaaagctcaaaccttgatctttctcaacaatatccatgaaaactagcatgtaacaacataataatctaagaaataaccccagaatacatttttcaatacctccaaatcaaatagcaactcaaaacctaaaattgcataagaacttaactttaactacaagaagatttcaagaaaaaagggagcttacctcaataataggctatcacacgcttaagttaagctgacaaacttcttaatttgattagagcttggatgaagaaaattggttttggttcaggttcggttagggctgaactaggagataataaacgagaggtttttctcttgatttttcttattttttagtttaatgaaaaactaagagcttaattaaaacttatccacttaaaatctaatttattttactaagaaaactctaaaaattctattttcttatctaataaagtaatttagggtaagaagtctaaaatacccttacttctagcttaagtaatccttaaagcttagggtaaaatggtcaaaaccataaccctaaaaactcccgacatccaaatatctaactatcttgtcacgttaattctaatatacattgtatctaagtgactcaaattggccaaattgtcgtattccactcttaccgagtacaaaacatgaaaaatataaaatttctgttataaaataatataaaataatataaagtagatg

SEQ ID NO: 322516 - DNA, 1898 bp, Cannabis indica
aggactactcataattataaaacatcattttggagattttattgttttaattagccaatataagatgatgagattataattatatcatatataataattaatgagttaagttattattaattaattatatatatgtgtatttattcttcactcttttttttttttggagagaaagtttttccttcatatatagaaagtggaaaaaattagtaaagtgatgtacatattaacaacttgtgatgagtattaagtagtgtgtatataataagatatattgttctggtttttaagtgtgtcattttacaaaattgataatgggttagtaataaactttgtctaaatattaatgaagtgttatttaacaataaattaattaatgcaaatcattaagggtctaaaagagtggaagaaaagtgggattttttcttcatattttaagttgtaaaattggattatattttatggactactgttcatctctttcagtgtatcttgatttcaatcttattaatttattattactggtagaaatattgaaaaagagtaattaataattaactctgaattctgtcttttcctttgttcaaattcaaatattgaaagtgatgtctaagtaagttcaaattcaaataattaataattaagtttagttttcttcttattttcaaaacataagttgtctttttcttcccataatgtagcatgttgttccaattctctttttttcttatttgttaaatattcaattccttttttaaattcttaaataatatcattgcttagccaataatgtagcacaacttgtttttagcattgataactttattgaagagatatatgtagcacaatttaaataaagggaattgtcttgtatactgtattttttatttttacgtttttttaagtatttttttttttttataacaattattttcattttgaggttatattgttttattttataatagttgtttctattttgaaattatgttgtttctatttatataaataaataaaaaattaattataaagtataaataaaaaatctaatttaataaggattatattatggaggcataaataatgtaacccaacaaaaagaagtattgtttttgggtaatcatataattataatcattttattcaatcatattttaccccaccaactttaatattcaaagtacaattttataagataacttgtaagaataaaaaagaaaattttttacacccagttttatttgggtaaatatgtagcatgaaaatggaatgagtaaattatagagaaattactttatatattatttttttaattttttttttcaaaattaatagtttggatttctaaagtggttgcagcgttagttgtaataagagtttttatacaactttttgttgcgatttaggttgcagcgctagttgcaataggagtttctatgcagaattccgtaaaaatgtaaaaagaaaaaactgttttaaattgtaaaaataaaaaagcccctaacttattttcatggatgtataataatagtgaaaagacaatttataattagctaaaactacattgtgggtcccgaattccaacccaagccagtgtattataatttgaattagtattatgtggtccacttctcatctagacattgcaagtaggggtgggcatccgatccaatccaatctttttttcctcatccgatccaatccaattagtaattggatttggaaaatcatcatccgatccaatccaattagacctcaaaatccaatccaatccaatccaattactaattggattggatcggttttttaattagatatccaattacacatctaaattttaatattaacttaaaaatataaagaaaaatacgtaaaaaactaagtatcactttttattt

SEQ ID NO: 322517 - DNA, 562 bp, Cannabis indica
tcataaaattctaaccgtttctggtacagctctaaatattttcaatatctatgtttatatttcttccatattaatattattttgcattgttattttattacattttatttgaggccttgtttcttgtcactacaagttttttttttaaaaaatttaattttcaaaatatcaattataagtgtgcatatcagatgtcgacactacaccattcagtcgatgaaatcactcccaccaccgttagatggaaaatcaaaatgacagtttaacataaatttccaccacaaacaagtatgaattcgccagtccgatatcaaaagctatttttaactaatccaaaggtaaccaaattaattttttacaccatagtattatttgcacagccttgtactacttttaaatttaatatttatctcatacaaaatcttattgcatgtcttattaataaacattacacaaggaatgagagtcgatgcaatgatttttggtgaagatattgagctttagaagacactttgcatgtgttacactcttactacattagtgatgctcgtgtcaacaaaat

SEQ ID NO: 322518 - DNA, 811 bp, Cannabis indica
tggtgtattgaaattaggatcgtcaaaggttggctttttaaggatgggttttgagattttatgagaaagcttgttaaggtgtttgagatactgatctctggtagcagcactagcactgttactgcttctactactgttagaggtaaccgaagaagaatcacctgaagattgacagcttttattatccatcttataatactactacttattattattattattactattatgattggatttttacaagcaaaccaaccaaccaaccaagaacagagaaatcaatctctctagatctctcttcctctttttcttttataaatgattttgtattttggggataatctctctattctattctccttttccgtcctgtgacagtcggcgagtagggacacggagatgagtcaatatatttatactatagtttaagacacgttacacaccaacgcctgacgtgtcaccttttcttctccaaccctacaaataaatttaagaataattatcttttttaccccctgtacttatgacactatactattatgccccttaatctattcagcttgttacaaatagtccttgtataattttatatgcatacatttagtccttctgtttattttgtttaaaaataccgtttgtattgatgatgtggtattataacaaaggatagagtagtaatttcatctctttttagagggaaaattgactatgaggtggcataataactgacaatgaaagatgattaaaaaataatttcataaccttttaaaaaaatttaataaaagtaattttattaaaataattccaatcg

SEQ ID NO: 322519 - DNA, 897 bp, Cannabis indica
ctaacggtggttctttccttagacatagctatggtttggtggccagcgattccagactttgtttgagtccttttgactcattagtttttttggcttttgccttctaatgagaatatctcattttccttacaaaaataaataaataaaataaaataagaagaagaaaaaagaaagttggccttccaataattcagtcctgattacaattgattgaatcatcttcgtattatgttttgtgttggatacaaatagtataaattgtaaattttaatataattttataaaagtaatatgtaatatatttaaaatggtaaaagtaatatattttaaacaaaataatagtcccttttttatataaaaaaaaaaaataaaacagcaaacaatagagagagatcacatgtccaatccagtcctctaaaattaaagttgatcacttgttgtccaaataaatatgagattatacattatagtccaataatatgttaaataataattaaaaaaaaaaagattacaccatcattaaaaatgaaaggcaaactgaagtagactagatatgaattttaaaattaaataaaatctcacacatagaaaaatatccgcaataaaagttcttttattggtggaactattgtggatagaaagtatcctatatccaatttatatctatatttatatttatattaaaatatatataaaaaaatggtcaattaataattatgtaatcccacaattgaatttgagggattggaaacctcaaataattttggtctgtagaattgatggagaattctattttttggtatcttacagtttgaattggcttatctataaagtaggtagcagtgacggacccagaatttttgatctctgagggcttaattgttataaaaatattta

SEQ ID NO: 322520 - DNA, 685 bp, Cannabis indica
tccatttgagtttctagagttttaatagaggctctagtctccatcatcaattggagcaataagttagcttagatatttaagcctccactagaaattagttgttcgaagggatgttgagcttgctgggactggtttcttcgttggtggaaaccttgttgttgtgatggctgtccttgatagttttgacgactccctccttagttgtacccataattattattttgtgaatagttaccaatggcttgagcttgatccattagcaaactattcacatccacttggccagtatcataggaatgaggccccccacaaagctcacaagtaacatgagcttgcttcacctgaacagtcatcaactttttcaaagcctccacttgggctgttaacttagttatagcatccacctcatgtattcccacaagtactttatttgattagcttctttcggtgggccattgttggttattcatggccatttcttctagaagttcataagcctcatttgatctttttctcataaaagctccactagctgcaggataattgttctagtattaccaattagcccgttgtagaagttgtgcaccaacattcacttttcaatcccatgatgtggacattttcaaatgagatccttgaacctctcccaagtctcatagagagattcattgtccagttgacaaaa

SEQ ID NO: 322521 - DNA, 938 bp, Cannabis indica
gatgagtaagtggtaaatgtgtaataaaaacaactttgtaagtaaaaatgtagtaataggcgtgtgtgagtaattttgtaataaattgtgcaaaatggatttttcatgtaaaaatttctaataaatatatgtttttcatatcctaaaatgttcacattaaaaaataaattataatagcatttttcttaagttcaatcgaacaattaggtgatcacgaatgattttttaagttagaaaaaagagagaaaagtatagaagttgtgatgacttgtgagagaggaaaaaaaaaataaaaaataaatacttagagtatatgtttttttgcttcactatacattaacatgtaatatagagtaattattttttagctaattaggatttttgcccctaaagtttgacatgtactaaattatgccctctgaacttttaaggtcgttaaaaatatcccttaaactattgagatttttgaatttaaggacttttatctaattttatagtttttaaaattatcacatgtcatttacataataatattttaaagtttgcaacaagtatttctgaatgcattgaaattgacaagaataaggtctaatgttgcaacaagtaaaatcttcattacacaaaatctaacttgagttttttaataacaaaatatgctcgtttattttgttatgccttaataatttaatttattttacagttattttcaaaaaaacaatttttataaatatttattaattcattgataatgtactcttgaaatatgtatcggtatttttcaaatgaacgttttttttttcaagttattgtcttcttgcaaaattattaattattatgtgttttaaaagattttgtaattttaaaattatatattttcactaattttaatgaataagttttttataaaaaaatttataaataaatgtgtgataattctt

SEQ ID NO: 322522 - DNA, 905 bp, Cannabis indica
aaaaagcgtttatatcataaattcaaatcaagttagacctcacggtcattacaaaatagattttccggaatggaagagaccgggagagacccaaaaacctaatgggtaaaggtccatctagccacattatgtgcggcaaagttacaagttctactaacataagaaaaacaacaactactaaaggagggagaagacttagtacaaaatgagatatagttctccattgcccaacgagatcccttcccattgatagcgtcgacaaccactctcgagtcattctccacaataacatacttggagccgatatccaaagctactgatacagctaagcagcaagccgcagcttctccacaaagcgcatccaagaaattctcccgagctgtctgaactctaatcactctaccaagatgattccttactaatcactctaatcactctaaccactccaacaaattaaattcttaatatttattgtttactaattaattttatttaaataaaaatttagtaaattttttattttttcttaaatcccaaaaattataggccctaaacacgagtctaatgtgactatacctaagactgaccctacaaccaacaatacctcagagattatcaaagttctctctaaaacaaaatttagctaatgtataggtcactgtatttcctttacacaaaatttacaagaatcaacattacataacgaaataaaatattataccatcttcactaatcactatcgccccaacccttatgaatttcttggatcacattagaacaattgctttccaaacaaataacattgataccattataatagcactatttttatttcatacaataatatatcctttcatacattttgtgtttgataacacttttttaattagttttttattttttaa

SEQ ID NO: 322523 - DNA, 962 bp, Cannabis indica
gtgtttgtaaccggggggaagcgccatatagactatgtcattttgatcgccacggaggaaagcattgttaatgttcatttgatataatttccaattattaatggcagcaagagcaaggagaacttttaaagtattaaactttgctacgggagaaattttttttagataatctatcccaaattgttaggagtaccctttagctactaagcgagctttaaatctttcaatttcaccttggctattgtattttattttatatacccatttgcagccaatgaaatagtggtcagcaggaagagagacaactgtccaagttttattggctataagtgcaacagtttctgtatctatagtttttacccatacggaaaataagcacttaaaattgcagcacgaaaactaggagaaaatttgtcataagagatgaaatttgaaatgggatgtgaggtagaaaactcacaaatgtagtcttggagatgaggtggacggatgattgtccttccagattttttggtgacgttggggccacttaaaggggcggaagtagccgctggtggtggtggtatgactatagggtgaagtggttggaatggccaattgttcgggcatcgatgaagggtgtaaattctcaggtgctgtagctttggacggagcctgtgaaagacaactaggtgaatcgttaatgttagaaaaaaagcatcaatattgtcattagaacatgtatttttaagatgaaaaatatgttcatgaaaatgacacctctatagtgaaatatttgatgagtttcaaggtcaagtaaagtataagctttcataccaaccaggtatccaatgaatgcacaaacctgagatctcgggaaaaaattgtgccttgagctatgcaaggtggaagcataggcaaggtaaccaaaggtacgaagatgatcataagagggtaacctgttatacaacaactcaaaagaa

SEQ ID NO: 322524 - DNA, 568 bp, Cannabis indica
ttgtggatatctctgtacaagttaaatacacacatattcggacctctcacacaagtcatcttaaattatgatcaataatatcactcaaaaagtaatatttaattaatttgggactatatattcttatcatcagttaatataaaagcaagatgacaattttaagtgaaattaaaaactgacttacaaagtggtattcccatcaaattcttaagttcaactaataataaggtaagttaatttgcatcacgcacgcgtggtgatcacgtgaatcatgctgtttctctcaccccgtcttcctcaaaagtgggtactcttttaagtacattatggcactatttattatcaaaagttgctacttttttttttctttttttccattaattaaatttatcttcaaatattttatgagtattgtatttaaattattctcacactcacataattaagacataatttcaaacataataaatttatgttctttgtagatgagtgtataagtttgtgggaaaattaagataaaattttgattaaaaaagaataaaaattattgtgaagtgatagggataaa

SEQ ID NO: 322525 - DNA, 2059 bp, Cannabis indica
ctgttcaaaagaagcctaattttgttttcttgtgtgaaattttttccaaaactgatgttgtggttcggattaaacacaagctcggatttgagggagcttattatgtggaagctcacggtcacaaagggggacttgctctcctttggagagttaatgatgatgttcattttctggggtgttcaagtaaccacattgatgtagttgttcgtgctcctaactgcattccttggcgtctgactggtatttatggggaaccaaaccgaagctttcggttcaaaacttggcaactcattgaaactttagccgcttcttctcaacttccgtggtgtattattggcgatctcaacaacattggtgaccaatcagagaagcgagggggtagactttatccacattctcttattcttggatttcaaagtgtacttggtagatgcaatcttgtcgacttaaagcttcatggtcatccttacacttgggagagaggcaaaggcacgactaactgggttgaaatcaggttggataaagcacttgtgtctcagcttgggcttgattctttcccacaagttgttttaaccaattgtgatgtttcttcttccgatcatacgcccatattttttcagcctaagccgactgctgtaaccaattttgtgtatcattttaagtttgaaaatgcatggacacgtgagcctctctatagcccaattgttcaatcttgttgggaggacttttcacatgtttcatttcaggaaaaaataaagcaatgcagcctcttgttagctgattagggaaggagtctcacatgcaattttaagcagaaaatcaaaaaaagcaaggccaatctttcttctctaaaagcttgtataaggtgctatatcactgatttacacaatgatatgcttttgcaaccgattggtgatgatgaggttcggcttgctctctttcaaatgcatcctgataaagcaccagggcctgatggcatgggacctggttactttcagaaacactggcatattgtgggttcagatgttatttctcttgtgagagatttttttgaaataggctcttttcccgaaagcctcaatgacactaatttggttcttattcctaagaagaagactccaattaccatgggtgatctccgtcccattgccttgtgtaatgttgcatacaaaattgctgcaaaggtgcttgccaatagaatgaaacctctggttgatcaggtaatctcccctactcagagtgcctttattctcgaacgccttatttctgataatataatgatagcttttgaagttatgcattacttgaaatgtaaagttcatggaaagaaagctatatggcacttaaacttgatatgagcaaagcctatgatcgagtagaatggggttatctaagggaagttatgcttcaaatgggcttcaatcttcgatgggttaatctgataatgtcttgtgtgaccagtgttcgctattctattattcatggtggtcatgttatgggacccattcttcccacttacggtatacgataaggcgatcctttatccacttacttgttcatcatctgtgttgaaggtttctctgctctcatttttaagttcaaaaatgacagattgttgcaaggctgtcgtgtgctaacggtgctcccaccatctcccatatgttgtttgctgatgacagctatctcttttgccaagcaaattcaggtgcagcacgcagtgtcatgtctcttctttgccgctttgaaaccgcttctggtcaacaggtcaatctcacaaagtcttccatcttcttcagtccaaatgttcaacaagatgttcgacaccaaatatgctcacttctcggtatggatgaagcctctgacaacagcttttatttgggcctaccaaacattattggaagaaataaaaaatcaatccttggtttttgaagaataaagtgatcaacagaatcaatagttggactggaaaattattatctggcgctggtaaagaaattctgttgaagacggttgtccaatcccttcttacttatgccatgagtgtgttccttcttccttt

SEQ ID NO: 322526 - DNA, 1176 bp, Cannabis indica
aacatacttgtgagtagatctaagatcctggtaaaataaattccaacacaactctggatattgatccactgtgtgagttttctttacatgtagaaaatgtgttggcttggtaaaacgatcaactatgacccagatcgaatcatacaaacccgtggtcctaggtaatccaaccatatagtccatagtaacatcttctcacttctattcaggaaaagtcaaatattacaacaaacctgcatatctctgatgttcagccttaatctactgacaagtgaagcatctagatacataatccaccacatcttttttccaaccaacagtatgggttcgaatcccggtacatctttgtggtacctagatgtaatgaataaacagtggtgtgagcttcatctaagatctcttttctgagctcaccattgctcgaaacacaaacccgagccttataaaatagcattccattatttgatactcaaatatctttagctcgaccagctaaaacttcttcctgaggcttaaccaactcagggtcttccatttgggcacttttgatcctttctaacaaatcagattgaagcatcaaattactaagtttttcaaccacaaactcattacccgctttaacaatgtcagttgccaattgaggagaaatcatcttgttgctaaaaacctgcccgggaccattcctactcaaggtatctgctaccacattggccttcccgacgtgataaagaatttcacaatcatagtccttgactagctttaaccattgtctttacctcatgttcaaatctttttgagtaaaaaagtatttgagactcttgtggtcaatgtagatctcgcatttctctccacagagataatgccaccatatcttcaaagcaaagactactgcagcaagttctaggtcatgtgctgagcaacgttactcatactccttcaactagtgagaggcgtaagctatgaccctatcaacttacatcaaaacaactccaaatcttgtctaaagacatcacaataaatcataaactttttctagtctaatggcaaagccaatactacctgtaattaaccgcgggctcaactaggggtgttcactaagtatccgatccaatccaatccgcacgatccaatccaatccaatccgcaaaatgcggatatccgcacttgcgcggattg

SEQ ID NO: 322527 - DNA, 1705 bp, Cannabis indica
tctggacttaacagatttttgtacacattaaaccataaacatgaaaactacatgtaaacataaatgatttctaatcttctattgataacaaatcagattagattgaaatgggttttatttagggcataaaatcccaacacttttaacttgtcaaattttatccaagaaaaatatttttgttcatattccaataatctagtgactatgtaactagacatatagtcatcaccatataccgaatcaccgagtatctcaaatctgattgcactattgtattcgtagacccaaataaatagcgaataccaactctcgtcccaatccgaatactattgagaatatttatgaaaatgtcactcccgtacaaactaagtatcagcatgccaccagcatgcacaacaacatgcgccacaacttgaccaccacttggccaacttgtgggcatcacctagcttgtaacgtgttatcttggcgcgcatgttacaccttgcatagtcaaagacaagcatgaccaagaggatttaatacaagtcgcgtatatatcagaatatgtgagacgactaggtggacctcccctgcaattagtaaagaacgattcattacataaagaggttcgaatgactgattgtattcgatgactcgtcagcgacccacatgtcccatgttgtcaacacaagaggtgtccatttatgcaatcttaggtgaatgcagacatccaaacgatatgtccatgagccacctagagaatacaaaatgcaccaaaagcttgcaagcttgtgcgagaatacgaatagacaactctcgctcagctagttacatactttgacacacttaatacaaagacggattaaactgttcttcatttattctccaaacgtgtattctgatttaatactgttatttattgtaaacgattctaaaattgatcagttatgtaaatcctaaaggtcatttgctttcgatataaaagagtgattcgaattaaataaactaagctgaaatttttgtaacagtggactaagcagaccaagttttgactaaaccattgtgttcttgttattttttgctttttgttctatttgttagtagtcaatcctttgagtactcactactctaagtgagtactcagcaagttttatctgagtattcttaatagcattaaatatttacacgaattttattgttgtttaaattctttcgataacaatgtaaaataataatttttaaatttggataaaaattggttataaattacctgtatagatatacataacataaaataataataaaaaattacaacttattcattcaacaaaaatataaaaaaatatccacaagtaattaattaatgtaacttccaatcatggaggactctgtcgtctgaaaattttattactcaagatgattaagatatttaagtggactcctctatgattacaatagattacttctcttttttattagtatgtacacctccacctaccaagccctattttttttttctttgaaaggtcccaaaaaaaaacgctatttataattccttaaaataatacaattgctacttattttaataaaagataaaaaaaatgtaaaataaataaagaaataaccattttgatgagcgtttacttttggtacatatagtaacaaacaattataaactttgaaattctgatttttttttttttactttttagaaaaataattt

SEQ ID NO: 322528 - DNA, 771 bp, Cannabis indica
ggatctgatggtaaaatctaacatccaatatatgattagatcggatctggataagcctaaaaatattagaagtgatccaatgaacacccctagcactatgggtaccctttaatatttttctagtttaattggtgtgaaacgtgttggttggtgcaagtaagtgtagttaggactttaatttatttttgttttattttattctgttatgaaaatgttatttgaataatataagatacaattagttattaaagttgacatgtacaatgacagatgtatagcaggtggtggtcttgatttgtacagtaggagatagaattgtattcctacacattatttttggcgtactttgtgtaataaatgtacatataatttcacgtacttagaacgttatttagtgtaatgaagtatatgaggttattttagtacatttaattttttctaacctatctaaaatgcatgagacatgcaagtgtaaattttttgggtttacttgttcttgtatttttttttattaaaaacctgtttttagaaatgatttactattgttattgttatggtgagatttctttcacctagaaactcgagacaagactcctatttaaaggacacgtatattcagatttccaatgaaagctgaattgtccatgagagactccttgaagtttgaacctcgccgggataaagccagcgagattttgcgagtacgaccaaagtcggatcgcgtaactataattcgcgttatgaaggatgagagaatggatccaactcgca

SEQ ID NO: 322529 - DNA, 1429 bp, Cannabis indica
aaaaaaagttagtggcatgcatatacacaagtttggcttttatagctctggaatcctctattacgggtttttcctttctctctggactctccagtttcctcatcttagtgatgattaggtgtagccgtcgattttcccttctttctcctttgattttttgtcttttctggctaattaatcaaaggcatttaatgcatcccagtaaatctaacaaaatctatcttcatttaataaacctacagtctcttcttaacccttatttgttcctcctcgacatttcttctcaacaaaccgtcactgggggaactcaggggatttgggtgatgattatttctgctatcgagggatcatgccagactacatttaatggagggatggattgggtatcttctaccctttctccgatgtttctcttctgcaggtatcttgttctcctatatatagactactactttttgcttaaagttttcaatttttccctggggattatttgctctgtttgtcattctcttgtttcttgtctaagtctgttcttaagtgttatggcgagttccagtcgtagttctcctcgtcatcttgccttgaatgatgaggaggcccttattcatgattttgatggggtttctttgggtagtggtccttcgtctgagtctttctgtttagttgtcaacattctcactcaaaaaactctcaaatttgactggttagataaagctatgagggaggcttggactttacgttatcctgttaatttttctgaataccattctgggcttttcatggctcattttggttgtgatggtgataggtgtagggttgttgaaggccagccttggcattttgatcactgccttatggtctttgctaatccagagggccttgaccttttccaatcggagcaacttcgatttgtccctttctggatgcaaattcattacattcctttcggttttcgcacccctgctcttgctaagtttgttgctgatgatgttggagatctgattgagatccataaacaaaacctacttgaaatctcgggtcctttcccttgaatccagatcctgatcgatgtctctaagcctattagaaggggaatgcaggtttttttccgaagtttgggtagaactaagtggcttctgttcaaatatgaggggcttcaaaattattgctatttctgtggagggcttgatcataatttctcgaagtgtgcctttttccttcagagttgtgatgagggatgtgttccacctgttctcccttacaaggagaatattagagcacctctgaaatcacatttcaagagagatccttttgagctagctaattctatcccttttgaggaaatgaaccttcgatccttgaggccgaatcaagatcttcaagatcctgtcaaccaatttctttccccagttacttcatctcaacctcc

SEQ ID NO: 322530 - DNA, 396 bp, Cannabis indica
cactaacacctttgataatcacttctctcaaatcaattatgacatatgacttataacatatataactcgcctgtaagggtggcaaaacagctctccacgccacgtagattttaaggttaacccttaaaatttatttgcaaaatctctaaaattatgatacctttaagcaatttatagtttccatctaaaattagttgttaagtgtcatgttatattgtctacttaaaccgtgtatgcgtgtcacaattttatttgaccacataaatatatatattttttggaactctataggtacctattcattaaatattaagtcattatccacgtgcaattttcttattggtatatttaaattaattttttaaaaatttaatgacttggatcaatcaggaattg

SEQ ID NO: 322531 - DNA, 782 bp, Cannabis indica
tggcttgctcagaattaaaaaaacagtatgcacagtaaaattgtaataattacagtgtgacagtaaaaaagaaataaaatggaaaaaatgagtatagggtgtaaatttccctaatcatatgtaaacatgttataagcacaattaatactaggctttgtattaacttattggtcccatcatatttatatcattaattataattcgtgcatacatgtttttgtttaagtaacttaattagacttatatttaacattttagtatataaaccactacaacattaatattttattctataatctatattaaaaaatcaatgtcaataaaagaatagtgaaaaccgttgatatttctaagaacagaaaattgattattgttccctaatacacttccaggcttccagcacacaaaagccaagtagtattgttattaataatataaatcattactaattatttttacataataacaacaaatgattttaagatgttttcataattacctgaaaaagataaaacaaaattataaaaatactgatgcacgaaatattaaatatttttacaaaatcatgttattgtttttaccttgtttttcaggttgttttattggtttcaaaaaaaaaatatatataattaaaaaaatcataaaaatttaatcaaaatacataaaaaaaaaataattttgaccctataaatatattaaagcaattattttacaaatacacaagaataataaaaaaaatttaacaaaaatacaattgtgtgaaattttaaatatttttataa

SEQ ID NO: 322532 - DNA, 1048 bp, Cannabis indica
agcagcaggttacaaatatactctgatacttacgcaattaatgagttattccataaaaagatattgcaccgattcacatttcctttactttgacacgtgtcctccaaccgaatttcgagtataacatcttatgtatttttaaaatatatatatgagttacgtattattgtattaaattttcttaaatattcacaaaattattatatatcacaatgttcttataagttattcatatatgtggcattgtcacactaatgctacatatgtaatttagaattgtcaagtattccgatattccacaagaaataatattggtattatcttaggtgagattattttaaaaaattactaataccgagccagaatcaagatataatgtatacattaaatcataaaataaaaaaaatagaaaaatacctctttaagtctatcaaaattccttgttatgttttcatataatgaaaaactttcaccatagtcttctaagtcaaattcttaacacacatattagtgtggtactaataatgatcacagtgtctaatttagtatcttactcaattaattgtaattttggtttaaatattttaagatatttattttttaaaacaataattaatattatttaaataaatatcctaacatattttgatatagatatttgttcaaatttaatatctaataaatatctttaactagataagagaatatctcaacggtaaaaaatatctataaccatagtttaaatttaaatttaaataaaataaatatctaaacttgaaactaaattcaaacttaaactaagtgtgactgactattatagttggtgcgtatcatgtacaagcacagtgactaatgctaatgctgggattggtgcccttaaagtgtaattctataatagaattactaaatatttaaataaaaagaaattattcacgcataattatattttacttacatacaatttatttagaaaagatcttttgttgttcaatgtaatcttaagttaagtatatacatgagattaaccacttgaggctagttcaagtgg

SEQ ID NO: 322533 - DNA, 1095 bp, Cannabis indica
gttgtacaataaattggtgcgttttttttttttttaaaaaaaaaaagataaattagaagttatttggctatatttttagtttttagaatagtatttttaaaagtgataataataaatagttttttgtcattttaaaaatataatagtatttaagttttttaaaactattcttagattttttttttcattaaaaataatcaatattctacagtctacaccatatctacaacatgagctcatcccacctcagatcaaatcccagacccgaatccaaaccccgaactcggacccggaacccaaacctaggacccagaccccaaacctcggactcggaccctacgacttgaaccttaaacctggactcatattctaaaagatcactaggtatggggtttagggtctagggtccgaggtttggagtccgaggtatgcattcgtgttcggtatctaggtccagggtccaccacgagcccgcgttcgggttagggtctgtgttcaggttcggagtttggggtacgcatccacatccgcgtttgagagcggggtcggagttagggttcaggtctggtatcgagtccaaggtccaggtctagttcgattctaggtccgggatctaggtatgtgagcaaaaatataaaaaagaatatgttagacaaaaaaattgtttttgaaaatagaaaacaacattttgatgtttctctgttttcttattttttaaaactcaattttcaaaaaactggttttaaaaaatttggccaaacgcctcctattagtttttaaaagctattttatacttttaaaaattgaaaacaatttttaaattataaagacaaacaagcccttaatgtttgttactttttattttttggatgaattagtatacttactaatataactaagaaataaactgcgcttcgcgtgcgattgtgttttgtttagtgataattacatcaattttaaatatatatttataattaaataccgttttcaagatttcatccacataaagtcataaacttaattatgaatttagcattgagatgagaaggcatagtgatttgaaagaaaagtatgtaagagatgaattatgattta

SEQ ID NO: 322534 - DNA, 1303 bp, Cannabis indica
cgcttaaatcgtactgcaccacacttattttcgtggtgtgatttttgtagttttaagatcttatggtgcggttacggtttgagaaattataaaaatcgtatatgtggtttggttttaaaaaaaaaaaattaataactcacactacccgtaccgtgaacatttttagtctcaattacactcattctcaaacaagacataattaccacattatatcaaaacacggcttgtattttaaaatagtgtaattactatgttgtaattatattacactacattatttaccataaaaatatatattttagttgagcttattattattattcaaaatataattaaggttattatttttactaaggttattatatgattatttttattattatgagcttattattattattttctttagaaaaaaaaaatacaacttatgaataaatggttaaaatttaacaaagtacaaaattctttattgcattcatcatggcttttttaatagttggttcttttaatattatatcaaaatagcatatgaagttgaaaaaggtcatattatatatatagatgctcccatgataagaacatgaaactattttatgaaattattcgatttcctattctttttattaaattattattttccttaattgtactttaaagattagatgaataaattataagtaccaattattattctaattctctagtaccatattagtagtgatattgtgtgcctagcttcaagaccaaaaaaatatgtttgtagaaaaagtcctcttatttcttcatatcatatatcttaattaggggcccacacactaaatgaggaattgacgtagtttagaattttaattttcatctctacttattctctattaacaatagagcggagaatcccctaatgaaatcgaggatgggacgaaaaatccctaataaaaaataaatttataattatatttttaaattattcaataaattaattattatcgaaaacgcaatttaaaattcataaaaaaaaatattaatacactcaaaaaaataaaacataaattataaaatataaaatattaagagaaatataaaataaaatattaaacagatccaggaagtgtcatccacctttatgctctgattaacattcgagaataaaaaataatttttctccctcacctgtttcccatttagacggaaaatttccgtcctgaatccgtgctagaccttttcctatttgagaaatatacatccctaatcttaataatatgagtaatttgtggcaaaacccccccaactatcaatttacttgcaa

SEQ ID NO: 322535 - DNA, 854 bp, Cannabis indica
atattgcatattgaaattagagaaaagtaaaatcaaattcacattatttatatcttaacatgaaagctaagttaacttaagcatgcttgtcacccacattaccgtttttgtcttaatttttgtcttatgtaattagtgtagtggtagttaaaagtgattattgttattttgagaattaaatttggttatgtaatatacactcgtattatttttattgactattttggaaagtaaaaaaaaatgtggaaattgtttgaaaattagtagctttcttttgatcaaccctttttaaaacaaaacattctctataattaggtcaaattattattattattttataaatataaagtcaaacaacattaatcaaacttagcaagattaacacactgaaaatttggaaagtttcaaatgtaagaaacatgcgcgttgttttttttttttttatcaactaccaagtttataggtcaaccacaaatcaaagttcaaatcatttaaatttttaattagctcgtttcatcatcagtacaaataatcaaaatatttctttcttttgctcttttctgataatttcaaagttgaaataagaattaatttgcattatagttatgactcatttgatttgtactctttttgaaaataaaataccaaagcttattacctttttttttttttgatgaatttttatttattttacttctattttggtttcacttaactctcaatactcaaatttgggtagtaaaaccgctaatactcgtattttattagcaatttaacatttctgtccattttaagtgttcagtgccatgttggacgggacacagtgtacacgtggcacaattttattggtccac

SEQ ID NO: 322536 - DNA, 619 bp, Cannabis indica
cacttcaacgcttacgggcttgcatgccatacatataagcacgcttccatatcgagccccttctagcctcacaccctcacgtgcaagccccttgcggccttaagtgtgagtgcctcacacccttacatgtgagccccttgcaacctcccgtgcgagcccccttgcaccctcacgtgcgagcccttgcaacctcgtgtgcaagtgcctcgcacccttaggtgcaagcctctcgtggcctcctatgtgaacgtctcacaccctcaaggcctctcgtgctagccccttgtagccttgtgtgcgagcgcctcctagattctcgtacgaggccctcgcactcttgcatacgagtccctcgcacccttgcgtgtgagcacctcgcatccttatgtgtgagcacctcgtggcctttcgtgtgaaccttcattgtacactttgcacacaaattagtacttacgtgacaagcctagaattcgcttggatgccccaccacttgcataaaggctcaatggctcgcacaaatgctacacgactcaccaaaatgctccccgacttgcctaacggctcatgttcttgtgcaatgtcacatgggcttgcataatagctcatggggtcgcacaat

SEQ ID NO: 322537 - DNA, 1237 bp, Cannabis indica
aaacccacaacaaaaaaaaaaattaaagtttttgatcaaacctttctgacgagaaagggatcaaaccatcataagttcatgatttaaaacctgtctgacgagaaaggaaaatcaaaagttataagtgagatataactcataactcgcgtgcgaagctaaatattaacagctcgcacaatataggaaagtgttaaatgagacatcaaggtgtcttggtaaaagtacttaaacctaatgtatggataaataatattactattcatatgagcaatcaaaaatgtacaaagtgataaaatcattaaaagtatatttttaagtttgtttaagacagattataactgttattgcgaggtagataataaactacccccgcacatagtagattactaactacttagataagaaaattatgagcaatggaaagactaagagtactctgtatttgatcaaaatataattatttacattgtgaatgaaaatgcaagcaaacatataaatatattaagttcgagcgtaaaagtacaaagcatttaagataaggaaaaaactaagttggtcagccaactttacaaacttatatttacaaaaatgctacaaggggcaaacattaggccattttattaaacaatgtctaccgtggggcccacatttgtgttttgtggcctagaatttgacggtccagcttgcaaggggttttgggtgtaagtcattggaggaacttcctgcacatgttgatttcctggtgggatatatgtctcttttcctctgttgggatccctattgaagggaattcccacttctaggtgatgtccggttcattaattaaattgtctgatcaactccatggttttgcgcgaccgatcatcaattggctcctgttgagcccttaaactttttgcctgtctatccatccactcctcgaaaagcctcttttactgtgcgaaagcttcatttacgactactcgggtatctgcctaatcatgatgaagagtgttagtgtgattttgaatttgagatgttgcttccctcaaattacacaattcggcatcatcatcaatagttacccaaggttcgccaactggcggcccttcgacatctgggttggtctgtctaatagcatgagtactggtagttctagttgttggaaatattttaccaggatctagatttactaccaagtatgtttcaataacatcctaatatgaattctaaaacaatgaaataaacacataagagt

SEQ ID NO: 322538 - DNA, 1388 bp, Cannabis indica
attaattcaaaaatatatttctagaagagaaaagtattaattttttgggaacatgtgagaattaaaaataatttgttgggaatacaatgaaaaagaggtgggaaatttgacaatttattcttaatgtgggtttaggtactcttaatatatcactttacaaaatattctctaaatacactttaattttacttaatcccaaaatacccctcccattcaaattcacctaattctcacactctctccatctgaatctctcttcctccctctcactcaccacaacaacatccatcaccattaaccaccacatccaccaccatccacaacatccaaatacaatcgaactgcccctatctacccctcttttagctttcttcatttcaaacccatgagccgtctcaaatcccactcagcactaaaaccctgcaccctaaaattttaaaagggcttggtattttagcgagagagtccacgtacattggaagacccgagaatctaaaagctcaatcaaaagtttaagagaatttttttgattttatgttaaagttgtgtgtttaggtttgatttctgagtttttttgagtttattttacaatttatcgatgtttctcaacatattagcgacgtctattgatatcatcaaccttaggttaggaaaccgagcatagttagctatgtttctcaacatattagcgacttttgtcaataccattaactttaggctaagaagttgttatagttagcgatgttagtcgacatagtttgcaacatctcatgatattaactatgattgaattggaagttgaaactcttagcgacatgtagcaatatgttgtcgacatcatttacaaatttgatgttattttggttgtttgctctgccttgttgtagttagcgacatgtgatgacacgtttgtcgacatgttgtgacatatgccttggggattttttttttacaattatgtgtatgttttagcaattactatcgatatatatgtggcgattttgttcgtgatatgttgcaatttattttgcgacgtttagcaacacgtttttatgtgttttaatatgttctttttttttgtcttaaagtttacagatggctcctgaacactatttctaaaactatcgacacatatcacaaacagtgttgatagacattacaaaaattgtaagtggaaagcaaatattttcaattatcaaaaaagtcatccctaacctccagcacacaccaatgttaactagatatcgataatggcatcgctaacatcgctaaaactaaaaaaaaaatagaatacacagaatccgaccgttcgagttccaagaacgaaacaataaaaatgaaaagaataatgtgtagatctattcatatcaacctaaatacaactaaat

SEQ ID NO: 322539 - DNA, 1162 bp, Cannabis indica
aaaaagagacatcaaagttataaaaaattagtaagtattgctattttttaaggtatcttaatttatttgtttgtttttttttttttacttattattagttatgatgattttatgtgtagttcggtcaaattaaagataaatttatagaaatttggtgagatgttcaataataatttgtacaagagagatggtgtctatttattcatagtaacttttactaccattaaaaaaaattagaggtaattatttatttagattctatcattcaatatttgaatatacaataatatatgtttgtgtatgataatttatatttactctaaatagatgaaattaacttctctactacaagtgcaatcaaattctacataaatcttgctttcaaaaattctacataaatcttcaaatagattatgtagtatcattaatccaaaaagtttttaccaactccaaaagagtggaagtaaagttttaatgctaacttttgaaaaagatatgttcgttgacaagatgactattcaaaaattattagaggttgattggagtgatgacaatggatgaaatacgatgttgaatgatacagtgatgacagaaggtaaaaacgataacaacaatgggtgaaatatggtgagacaacgggtgtcaaattcgaacactccaattcgataatgataataggtgagatacaataattacgtatgagatacgatacatgagacaacgtgggacaacgagtgagatatggtgttaaatgatcggatataaaaataatgtattatatttatagggaactttctaattttttctacaccaccctattttttatttttataattaataatagttttttaataaaataatttaaaattctgtaaatatatatacaataataatatagattttattagcttttcaataatcttccgaataattttactttatgaagttttattttttaataaataaaattattattaacaatatataattagatgctaaaattaaggggttttttatttttacacttcaaaacagttatttttttgcatttttatagaattctacatggaaacccctatagcaactaacagagcaacttaaatcgcaactaaaatttgtatagcaactgacatagaaatcgccggagaaactaccggagaaa

SEQ ID NO: 322540 - DNA, 1741 bp, Cannabis indica
tcttaaggactcagtctttgatagagcctagaacgacaaacatttgaagtattatttaccaaatacccgcatgtatattatatacattttttcaaaattatctaagtataggaggattatttatgtatatatgctgccttcctttttcttgaattgtactattgattatccaatgaatcattaaattttgaaatttttcattgttttcacagttgtatacttagaaattttgaaaaattccatttataatgtgaatatcgaaatgtccatacatcgccacaccaagttgtgaaagatggtcacataaataaaatagcaactaagtgaatacgcatttaaaagcaccaagttgcaattataaatgcatgaaaatgcacaagtataaaaatacttagaagttttgaaacaaaagaatatccttgaaggatatgttgttcatacaaactgacatcaaaatatgaacagatttatcttaaaaaccaagtacaaaattcgagtacccatgtatcgctaaaaaaaagagagtttggataaaaaggaaataaattaagtatcaagggtgttgagatcttctgcgaccttggcagtactatctgcgactttggcagtgttcgcaacttcggcctcttcaaggaaaaggttcccgcttagtcctagagtactcaagtaggagacatggtgcagaaagtattagccatctcaactgtctctggggcaaaaatagcaaagtcgaaatctagcagcttggtcagggttgtgtaaatataatcaataatagcctgatcgtaagccttctttgcattttcttttttggcctcaagattgcgagtaaggttagcattcttttcctttaactctttttgccttctcctttgccttatctttatcttttccaagatcctcgacctctttgtctttggcaacagtgtccaacttttccttcttcaagccttcttgatgagccgcattttgcttcttcataagatcaaagtctttaagacccatgatagaagcccgcaagtacacagtcatgaactgtgaggcaagtttgatagaatgagacataaggtcctcgaaaggtgccccctcgacttttgtgacaaaatcgtctcttagaaaattttcctacagattcatgaaattgcaaactttggtcgcagggtccatcatgactttttccctttgtgctgggcgaccttttggtgtttctttgataggtcaaccctggggtagtagcgactttgctcttcctcttttgaggtgtcacagcagaaggagttgcaatattaacctttgatttacagataagggatagagcttgcttcaagaaagtcatatctgcgaaaagatatgaagaagtaaacattgaagaaattaacgaaagtaaaaagacattatcagtagggaaagcaaaaatcgttaaacgtgtcacataatacttgtcttggaatctacttggaaagacgtctgtctattatttcttttgtttcttagaaggttccttgtatatcatttcttgctgaagtttagtgttagttggaataactttgtgttctcgcagttttgcagaagtacacagtagacaccaaccgtgatcctgaactagaagactgctcagaacatcaccaatttccacacgatctttgtccaacacaaatcgagttagcctacctgcgagcgtagataagtgttagcatttagtgaaagacgaaaaaagataatggtaagtattgaagtctat

SEQ ID NO: 322541 - DNA, 934 bp, Cannabis indica
tgtcagaacacacctaaaaaaggaaaaaacaagcatactatataataatatagtccataagcacacaattaatttaaattcatagttttacccttcatgggtcaaaattactaaaatgcccctggctcaccaatggggtcttaacatatcataaatcattataattcacatataataaattatataaacatataattccataattatacacagttaactagttagggtttgctaatccattctcttaatcttagggtattacaccatctctggtcaagtgccttccgccttttgtgccaccaaacctcgaaacttcaaggtgtgggcctagaaaggaaaagaaagtgtactcggtgagtttaacctcttgggctcactactgtgaagaagaaataagcgacctccactggaagaataagaggctagaaaccattgtggctggtatgcaaaaagtgttgaatgacatactcaaagacaaaatccatgcctcgcatttccatcataaaagccaccaagtggggaacaagatctcaactgcatattctagcaaaggtgattccatgtcatccactcataacatcccaagagatgagcatgaaaggagcctgtcgcgagacaagagcccaacgggctagttgaggcaactcgagcctacccaccatgagaagatttcattgagggaaacaccccataacctaaaggaagagacttcaccaaagaggtctcatactagcgggaaccacgcctatgtctcccacccaagagtaaggtaagcgaaaggccttatccatcaattttagtgataagttacacactaatcggacaagtggagtacctctcataggcccaatgaaaaccacacagaagacctaagttccattcgttaactgtcaagagaggatgagcgaaaagatgaaggagttggaggtaaaaa

SEQ ID NO: 322542 - DNA, 1054 bp, Cannabis indica
aaagagttttatttagggcataaaacctaacaatactacgattagacctatgcacctgtggccaaatttaatacactaaaaatttttcttgcactagttgcaatgtataattgggatgttcatcaaattgacatcaacagcgcctttttacatggcgatctacatgaagaggtgtatatgaaaatctccctaggatacaaggccccacccaacactgtttgcaagctcaacaagagtatatatggccttaaacaagcatctagacagtggtacaaaaaattaagtaccacactaaaaaatgaaggcttccatcaatctctctcagataattctttgttcaacaaaagaacaccaacattaatgcttgttgtcctaatatatgtcgatgacattattgtggctagcaacaatgaacttgccatcaaacacttcaaaaaaaaatttagacaagaaatttacacttaaagatataggctcccttcggttcttccttggctagaaattggcagaacaaaacacgacatatccatctcctaaagacctttcactttgtaactacttgctgacacagattaccttggagcaaaacctgcttcaactccaatggaacctaatcttaagctaagtaaggataaaggaaaaccacttccggatcctacaacttatagaagcctcatcagtaaactcatttacctcactataacaaggccgaacatctcttatgtcgtcaatcatctaagccaattcctcatatgtccaagagtacctcaccaacaagcaactcatcgtgtgcttcaatatctcaaacatacttcaggacaaggcttattctttccatctaacactactccacatgttttggcatgtgctgaaaccagcctatcaccatcaaatgttcaattatcattcttcgcagatgcagactggggaacatgccaagacacacgccgatccatatttgtctattgcgtgttccttggcaaagcccttgtctcttagaaataaaaaaacagcaagttgtttctcgttcctcagctgaagccgagtatcgtgc

SEQ ID NO: 322543 - DNA, 997 bp, Cannabis indica
gttcgagatgcctcaagttgtgttgttgtggcaatgtccaagcccaatgaaatggaagctaaagtttgtttacaacgggagtttcctctagctctctataaaagttattgttaacagacaatcatggttattatttctcatgttaggtagaaaatgccaagcaaaaatttgtattttaattgaatagagaataagggaaagaataaagggtaaataagtaagttacttattctaatactttcgccttcaagatgggatgtacatatttctaaagactcatcttggacaaaagagagtgaaactatgtaggaaataaagacttggttaaaatatctagtaaattatcttgagagttgacatggatgagtttgatgtggttggtgtggacacgctcggacgatatgatagtcgatatcgacgtgctttgtctgttcatggaagtactaagttgcactatgagaatagctgcctagttatcacagaacaagagaacatgtgttggatgcgagatactaaagtctttgaggagagttaaaatctacaaaatgtgacatgttgtattggccattgctcgatattttgcttcagccgaagatcgagaagttgtggtatgttttttggatttcaatgaaacaaacgattggcccaagaatatacaatagcatcaaatagaacaacatgtgtcgggacatgtacctctgccaagatacaaaaaaaactttgagttgagttgtataaaatcccgataaacctaatagtaaataattagggtttatatttatattttgagttaaacaggtaataagtgagattatgatcatactaatctagttcaacataaattttaaatttgctataagtgagtaaataagcgtaatttacaaattacggaaatttatatagtctgtgtgaatgtaatatgtatatgtggaataaaaatattttaaagttcggtgaccctggagacccgattggaggcaaaaaatgtcacaacgat

SEQ ID NO: 322544 - DNA, 750 bp, Cannabis indica
ttaccgtcgccgcctctcttaccagcagaagtttcgagataccctctgccgctggtaaatatctttcttctctttttctttttctgttttatttttttgtttgcctctctttcgctctctcctttctgcaacgttcatggcggacaattattgaagttcgttgtggatttcgactttcatggtgtagggtttgttttaagctccttggatttgattttgttttaggtctatttctgggtttttttaactgttaggaagattgtgttttggcatattattttgggttaaaatttaggttagtatacccattattatgtaattaattttaatagtagtgtttgttgaatcacttgttgaattgttgagctctccatataagttatgaacgttttttttttttatttgagcttattaaaattttttattttagatttttttttctgtagttgtatcactgtctactattttttgatgagtggattaagaatttgattagttattctatatagcattaatattcataaaatttacttttttaagttttatattattaaaataaaatctagtaccatttttttaaaagaaaatctggtacaatataaccaatctatactttttttaacctaaaattgattaaaataaaaacaataacagtcaattaaaaaaaataataatttaaaaaatatgaattaagaagaattgaatattattttttaaaaaaaaaaattaatatagtggcatttttgtgtg

SEQ ID NO: 322545 - DNA, 810 bp, Cannabis indica
agcactgtagcgtgccttagcattagggcgttacaaagacccacaaccctccctctcttactggttctctctggtgcgtggccaacgacccacgaccaccaccttcaaacggacagacaaagaatatgtggtttcttcgcatttcttgtttattatttggtaaaaaattgagttttagtgaaatttgtattttttgtgatttttttgtatatggtacgataatggtccaataatgtgtatgatagtagtgtaatctggaggttaggggtgaatgtacgatagtggtccaatagttgcttaaaatttatgccatgataaatgtatgatatggtccgatggtggtacgatgggtgataaatgtatgatatggtctgatggtggtctgatagttacttaaaatttatgccatgataaaagtatgatatggtcggattgtggtacgataggtgcttaaaatttatgccatccctatcgtaccactatcattccctatcgaaccttcatctctaatctccagattacactactatcacccaccatcagactactatcgtatcgcatcgtaccatatacaaaaaaaaaatcaataaaaaaaaataaattccaccaaaactcgactttttaacagaaaaaaaagcaaaacaacacaaagaaaatgtagatctaaacaatgttgggttttgtgccctaaataaaacccatttcaatataatcatgattatatgttcaaaagtttaattctcataatttttcaattcgctcgatttaaactggcatgataatcaacgttaaaggtatacttacaccttg

SEQ ID NO: 322546 - DNA, 1404 bp, Cannabis indica
accaaacgacacctaaatttatgattctatgtggcaaaccgatattttttttttcaagattaaaatcagaatgaaaattcaagaagcttaagtagacagatagaaattaatcaaaatgagaagatagggaagagaatcctgttgatatgtttacccaattgttaatgcctaattgctatcccatttcctgttgtgaatgacaaattatacaaattaacctagctcttttcagatcttctaaatgctaaatcacatgctctctaattaatctttcaattagaatcacatgaaatcagcattaagcaataatccaaatagtcacataggtcatgcaaatactttcgtttcacataaacctagattatccaaattttagcagtctcaattctcactttttagattttgaattgagatcatagaacatgtaaaaggtgatcaagcttaaacatagaaataacacaaataagaataatttcacaaacagaataaaagaaatggcaattaacattaactagggaaaactttaaaaaacattcatcatcttccttaattgggagtttagttcattttcaaatccataaccatttcaaaaacagaattcaacataaggaaaataaaaaggaaagaagaaagaaattgttggtgtaatgaacctgagtcgccactttactcctcccgccgctcttgactgcgttgtaggtctaaaaatcgcttcttccctttcttcttttcgtagttttctttttattcttcatttcaggattcaaaagacaaatttgggctcaatctgcacggaatctctccacggccatggcttcccttaccgcggcgaatgctaacttggctgcggcgtggagtagctcgccgcggctactaacccaagctcgaaagtagcctctctaccaaaccttggccgcggccgtaaataaatccgctacggccagaagtgaaccaaatcctgatttttcaatttttcttggctcaacttgtcttttattgtacttttgaaacctcgaacgtccacagctatgggaacctgaaaacatagaaaacaagtgtaattctgtcctaaaacatcaaaaaacgactctatttgtgactcgaaacatatgctaaaaatagcctaacagtgaactactataaatttcatgtgtctctcttatatatacttaacttataatttattctcaccagtctagtgagcgggtgtggcccagagatatgtttctagatttttgcctcaatattttagtgttttctttaagagccacagctcaaggaatcacttagagcatatccaatggagagcaataagtgtggtgtattgtcatttctagagcatttttctaaaaattaactctaatggtgatgtaaaatttgtgctaaatttgactcaagttaaaa

SEQ ID NO: 322547 - DNA, 1047 bp, Cannabis indica
aattaaaataaacatttctatatattttatcactatgttagttatctttgttcgttatgtcatttatatacaccatccgcataaaatttatgtataatgaatatatatttgttattgctaataatgtaaaaataactcgattaaaaaaaaccgatcccacagactaaatatatatatatcataatattttgtttataataaatgataatattattggtatttaaatttatttattaattaaaaaatgctattcaaattatgaaattaatataatgaaaggtaataattcaatatcctaccaatttttaaggtatcaatattacactcctcaaagtagttatatgactaagggaataacattccaaggctaacccctcaatacaaacaagggaatgtttcacattatcattcccttgttagtattaacccattctaaacagtcccttaaagaaatattgttttgtttagagaaaatataaatttcatatctaaatattcccaacaatatacaccacaaagtcttcaaaataattgtttttagccttatcatcatgacaaactctaacacatgaatcaaatgattgtatgacatatatagaagttcatagtaacatcagaatatactactagaaaattggttctattagacaatttggataaaataagtgacaatgaaaaatgtcgcgacgattttttttgtaattgtgcaaaaccattgccaatactgagcagtataagaaactgtttgaaatagttgcctatactctttaaaaaaattacagatcttaaatcatatctcaccgtcggaactaaatctacaccaccaaaataaattctcaccatatttcaattcaatatagtaaatatatatttttcattacaaatatattaacttttgcacccatccaatgacattgaaggcaaatctcgataattattctccgaagtactgaactatgtcgtgttgggttttgtgccctaaatgaaaccccttacaatctgattagttatcaatttagaattttgaagtggtttatgttaacatgt

SEQ ID NO: 322548 - DNA, 662 bp, Cannabis indica
aaaaagttttaatagttatattaaatattaaatatgtaaccgacactaaaaatacagtttgtagtaatgtatgtatgatggttactatggggtttatacacttgtgcaagtttgacaattaagttagttagacaatgcactatccaggtttaaggaagttcctgcgctatttgttgatgtctgcatcgtaaatttataggtgattttaatcactacgtcaaaaaaattgttagttaaattttattatgtttatcggttcaggtacacttgtattggtttatatataaagactagttgttattcattagctagagaggctgagttgagagtgttcactattgtaaagggtctgagttttgtataattcatgtcccttgagtgagccattacactaggagcatgactccatttagttcaagaaacattacattgattgcaacagaattaaatgtctccttctactgagatctctaacccttgttcctttctatcgcaaagtattatcaagatatgagcctgattctccttcaagtttcacagtcttacacactatgattgagtactagacttgatatgtgtgagcatgtactttatcactatgagactcgaaaattaaagagaaagatagagagaaggattcaaaatagagagagagagagaga

SEQ ID NO: 322549 - DNA, 930 bp, Cannabis indica
ccgagtctaggtgtcaatttgggtttaggtgtgggtctaggtctgggtctcgactctcagtcccaatttgggtcccgagttccaggtcccgattcgagtctaggtcctggtgttggtctaggtctcggttccagttccggtctgggtttgggtcaagttctggtcccaagcccgggtcttggtcccggtccatgtttggttccagctccatttctagttttgattctaggtcttggtttgggtccgaatcccgatcaaggtccgagtcctactccaagtctgggtctaggtccgggtttgggtccgggtctgtgtccaggtttgggttctggtccaaagtctgtgtccaggtccaggtctgggttcaggtatgggtccaggtcccgagttccaatcccgatatgggtctgggtcttggttagagttagggtttaagggtataggatttagggtttagggtttagtgttttttagggtttagtgtttagggttcagggttttaggtttagtgtttaaggatttaagggttaaggtttaggatttagggttagtgtaaagagtttaggatttattattagggttttgggtttaggggtctgcttcaaattcatgtttcagttctaattttgggtcacgcggtacgtgttcaggtccaggtctgggtcctagatccaaacaccaactatgggttgggtccaagccctaagtccagatctggatctcagtctgagtcctagttcggttctagttggtgtctctggtcttaatttgggtcataagtttaggtctggtgcagagtcgggtctcgggtccctgtcccggttccatggcccaagtctcggtctcagttctggggctctggtcccagtttcgattcccaatccatgctgtgatgaaacccgacaccaaatatggcagtctctaagaatt

SEQ ID NO: 322550 - DNA, 793 bp, Cannabis indica
ttttttttaacaaaaacgtattcattaaaattagtgaaaatataaaattttgaaatatctaagcttttaaaatttaaaaatattaattaaacaataattacttaaattatttttaagagaaacaatataataaaattaaatattcctcttaaattattagtaaatttatatcattaatttagaaaactaatatttgtattaaattagtggttaaactattatttaacattaagtaattttttattattcaaatatttttattttactattgtaattatttattaaatataaatatgataaattattttattatatatttatgatatatattattttattttatagtttaattatttttattattcttttttatattttggtgggaattatttattgttttatatatttttattttaaattaagttttttttttaaaataaaataaataaaatagtctagtctattattaaaccaaacacaaaattacattcagcacaatataatcttgcccacttcagtccaatccaattaaactcttttcagtctaatcctaagttccaaatgggcgcatactttttaagcttaatttttgataataaatgataaaattaatttttttagcgaaacacctgttaattattaaaaaagtaatttacagtaaactcccttttattttatcatacacttagggttcatttgatacgtcgtattgtattgtattaatgttatttaatacaatactatatttggtattgacttgtattaataggtcgtgtaaagttataatatattt

SEQ ID NO: 322551 - DNA, 517 bp, Cannabis indica
ttccattagttcatgctctcttactatatatggaccaagacaataaaacagtttgtataaaatatgatcttgagaaaatggagaaattgactataactaaaataagtaattgttgtattctagtataacatatatttttaaaatttcttctagatattattattatttagtttttatatttttgaaagaatgagtaattaattgaaagttttgattttttattttatttaattattaataataactaaccaacgaagggaagaaggagacatgaaaaaagtaggaattcaaattcaaaactacccttaaaaggtatgtaaaatcataaattgtaacaaaaaagtaatgacaatgaaatcattttacattgatatgaatatttatttttaaagaatgcacaataaataatgtttaatatttacttaaaatttactaatcaatagcaaattatatatgaagatttagtttttaaaaagtaaactagttatacaaagtgaaaatttggtttgtcattaat

SEQ ID NO: 322552 - DNA, 717 bp, Cannabis indica
tattggggatcccttgaagagatcattgacagcagcttcactaactccttgggaggtgaaaagggagttgaaaaaatgaaggaattgggcagttatagtggcttgatcatgagatatagatccatcaggtagggtaatgaggcgaatggaattgttccttttacgagtggaggcacggtggtggaagaatttggtgtttttgtctccagcacgcagccaatcaactctggaacgctgtttccagtatatttcgtccttgaagagaagaccatccaatctggattgaagggaggctatgtgggagagggaagtggaagtgtggtgggacgcattcaacagggcatcaagttgagcttgagtctgagagatttggagcttgattgggtgctgagatttactccaattcctaatagtggcaacacagtttgattgtttgtcgagaaagagcttcaagggagattaaacagagttcctagagttagtccaggaagaaataagaaggttcaaaaacgatggatctttcagccaatgattttcaaaatgaaaacgattagatctttgagcagcaaaatgagggtcttgaagcatgatcttcaagactctatgatccgaaccatagaaccccagatggaaaagagtagcatgtggaaaaatgtcacgccaaagctggtttgaggtacaccaatccagacgctcaaggatagaactatgcttcca

SEQ ID NO: 322553 - DNA, 2473 bp, Cannabis indica
acacaaaacaaacaaactagatgaagaagcatggagaagaatttccaacaccaactgtacagccatcggttcgatcacttctttatacaaatatgataacccccagcacatccattgattatgatgtacatttccctcctttcaagaggttcaaaaaaactgaagagcaaggtaccacctcacatcaattaaaatacaaaatcctacaactaggaatgttgatagagcactgcaaaaggtctccacgacagaagaagtattgaattggcaaacaaaaatatgattgcccaaaacaatgtcttaaaatgggtagaaagacaaattgctcgcacaaagacgatggtcaaagaaaaatcacaagacacggtcatcgagaagttgacaaataagatttaacaaacgcatgaagaactcatgaccatcataaaattatattccgcttcgttgtaagtattcttggcaaaaaaaaaaagaataaaaaagctaaaaattcagtatgaatctctgaagaaaaaaataaaaaaataaataaaaacaatttttttaaagagaatcatattttatgggctctcaatcgaaatgattgtttcctttgagttttattaaacatgttaaatgatataaatactcatatcggtaattatatattagtttaccgaaataataataaaaaataaagataggtttagaagggttaacccaataaaatcaacaaaattattaggcgggttaaacttttttttaattaagcggattacaattagatatttataactcaatatttattttgggttggtaaaaatatactataacctgaccaaactgactgatataataacatatttttgggttgaatagagaactctagtgatctagctaagttgagaattttagtgcttcaccaaagatgggttgacttgtgtgtgtgtgtgtgagactttctagagagagaggggcaagaaagagagagggaaacatttagatgagattggttttattatttgagtggtataattggaactaaataaacacactaacattttctctttgatattttgtgtgatgtatacttagggaccatgcttcacatttaagcacggtaactcaaatctccctttacaaacttgtaaaagctcgttacaaacttataatccctatttttttttaatgataatagatacgttaattaaatagctaaatcaactactgcaagagactgcaaagcaaagggaatacagtcagactagaaacaacagttacaagcaagacaatgagcaactttatttgtaggtcgtaaaacagagcaaatgacaacattattaagagtagataacaagtcataacaagttcttgcaatcactaataattaaaccaaatgtagaaggcatcagagaggattctgaattgcttgaacgaccatcgatctatcaatttcaaccaccacattagaccaatttttcttctttatccagcttaaagcttccttcaaacttatggcctcaacaatgacatgttgaacacacccaagattatgcatagcaaaagcttcaagtaagagaccattcgatcctcgagcaacaagaccagccccataagagttctcaactttgaaaatagtcccatcaacattaatcttgatcttattagtatctggttttgtccatcgctcaccactattatttgcattttggacaaacaaaagtagatcaaattttttagattgagcaaacttccattgatcaagaataaagcgagctaatgagacaattaccgacactgaaactatttttgagtgctaaagaatatcattgcgactcttccaaaatgaccaaacaacaatggccacttcctcaactagattcgactgacctcgagaaaaaatgttctggaatcagctggtaaactccacaagaaagagacctccacgatccaaacttgaacgattctaacaagactcagcatacggacaagacaataacacatgataaatttattccatagcctgatgacaaaataaacaatcaagatcaacaaacacatgcttggagtgaagtttttgtcgagtaaggagacatccagtaagggccttccatgaaaaatgatgaacattgggtggaactttaagctttcgaaggtgtttctaggaatcttcttccatagacacatgctaattaccattttgttcctaaagaatattttaagcactttttacagagtaaagtccaaaaatttcttttgaccaaaacgaattatcactctcgatatcaatttgcaatggaatcccaaaaatcaagtaacgatctttctcctcaaacaaatcaccaaaaacctcctcatcccattccttgcaatcaatcttcattaagtaatgtactgtaaaatcaaccataccaggtagggctgtacatcggtcggtttgggcggtttatcctatatattttctaacccaatctaaagttcgggttgctaaaat

SEQ ID NO: 322554 - DNA, 1250 bp, Cannabis indica
agtaaagtgaaggttctctcattatctaagatcaaactcactttcagctaaaaaatattaaaaaaaatcagctcaagagatctcaaacttcagttctctttcattatttgaagatcatcacccagatatttgttctttttatttttatcttcgtgttcttataattcttttctatgcatgttgattgtctgtaacttttctatgcgtgttcttatatttcattttttgttggaaatgagtgtctaaatttgtccatgatttttgattttagggtactaaacttccttttaagaaacaaggtacctttccaatagatctttattttctctatgtaatttgcactatgttggattttagttttttttttcttctgggtcttgtggaaactatcaactaattttgaaagctaaatgaaatgaagactcgagatttaaaatctttctaagtttttgaactagtgtaaaaccctaacatctttcttagtcgtggccaataacaagacatttgtttggcttggacaaaataaaatggccttagttctttctgctattctttaatttactttaaaagtaaatactgtactttattgctttgacattttaagtggatgtaatatttaaaatataattttaaggtagaaatttgcatgtaaatattaataattatgattatgagactaattgtgctcaattgaatattataattaagtagaatttaaaatctataaaatttatgaagtttgattattttaaattttaaattatttataacaaaattgaaataaatattccaattaatattattctttctctcagaacaagaaattaccataatactggtactcctaacaaaatttttggtaaactaatattttcatgcatggtctatatttacccaataatatttatattatttatgtatgatatatattcactcactaacctaatagattaattatgtatgaaaactaatatcaaattacaaatgtatccctacctagcacatataaaattataaaaataattattaaatgttgatgtcaacccaaccggttagtataataggttagtagtgtccttcatttattttttgttggtttaaaatagtaagtgtcagacaaaagaaaaattaaaaataacatgtgtcaactttttagactgtactatagttactggcgtaatatataaagggaaatttgattttctatacttagaaaatcaaaaaaaattttccctaaaccaaaaatttaa

SEQ ID NO: 322555 - DNA, 1685 bp, Cannabis indica
ttatgttatactaggtaacaaaaccgtgctttgcgcggctttataatttttttcattatgatttgtaaaaaatgtatactgaattaatagtatatcatatataatatattctcaaaattatatattttttaaaagaaatatattgcaatgataaatatcatatatactgaataattaaaagaataatttcatgaattattgtaataatttttttggagaaatttgctgcatgaatactttatgatttcgctgtcatgcacttaaataataagatcataaattataatataataaattgtttataataataataagacttaaacatatatgttataaattaaaatataattatctatatatctataatacttttgttaagcattattataattaatgctaaatactatgatgtggcaaactaacaatttaggattctaatctatctaatttgtaagtttttatgattttatttcattattaaaataataataataaaaaaaataaaaccatattttcagtatagattttcttttttatttcttaaagaggtttattgatttccctcattttatttaatttgcaaattaaataaaatagtaacaataattaataatgaagacaaactcttcatctgctaggctaaacatattgttgtattaaataaaaaaattgtaactcatacgaaataagttacaatggtatttattattcttattaataaaataaaatttattatcagtagtattttttttataataatttaaaaaatatatatatatatatgataattttacattttatttttagaagttcaaaagacatagagtaatccaatctatatataggtttagatttaatgaaagtttcaaatcaaggattcattaatcaattcatttctttattattggaatttccgttcttatataaagagtacaatacaatatatgtactatttatcatatagttgatttgttttagtcttgagattgaagtttcacactaaatattttattgttggatttttaattttttttgtttagtcttgagattaaagtttcacactaaatattttattgttggatttttaatttttttttgtttattttgcagataatatgctcttaatccaattatgaacatcacactcaaataaaatattatgagttggactcgaatttttatgttgtaagttttactaaccaaaagtttttagtgagataaattatgagctaaatatgaaagattttggtatttgacaatgaattagtgctattatattctatattagatgttttgacctgtcaaaactccctaatccctacaatgcactaaaaagattacaaaatgaaaaaaaaaaaatcaattttgaatgtataaagttactttttcttgtggattaacaaattatgtgattcaaaatttctcatgcagtaaatttggattagtacatgagccacatgctaaaatcttccaatgcacgtgttactaagtctatcaagtaatatgttgaactttcagttaacaccaagaaataagttatttatatatgagtagtttaattttttaatatatatatttatatatgtgtgtaatttcttaatagatcatttgtactaagtcattttctcctttaattaatattcaatatttttttaatttgtagtttaatctaatttttcatatta

SEQ ID NO: 322556 - DNA, 1201 bp, Cannabis indica
ttcatgtttgctaaagttgtatacgtcaatttatatgtcatggttgcttgaaaatgagtcaagaacaaatccatgaatgtctcccacgttgagatgactacttcaggcaattagctgaagcattcgtgcgcatgattctctaaagtcgcggtaaggatacgacacttagccaattgaggtacatgatcaaattccataatagtgttaaatttatcaagataatttataggattgacgatacctttatatttaagcgactcaaaaagtctgaaacctttggggagtctggcttgtcgcacttcttcggtgaagggtgatgttccatgcaacttatagatggcctttctctactgctcaatcatccttagcactcgcagaacaatctcttgatcaacccctcctgacagcaggggattattagcaggtgcaatttggtttcccggtggtggagcaaccagtgctatattcgcgggtactaccacatcgttgggcacaactggtgcaagtggtgggttaacgtccttttctgcattgtttgtatttgtaggggggataccttgattggccaaaaggggatcacaagtttcctcctctatattgtgattcctcgggatctgggaacatgcgcgaaacacttcgttgaaggcgatcttgcaggtcgcctctctgcacatggtaccttcctcctagccttgtgaacaccgttcctaacttggtgtaaacactgggggagcgactattagtcctcgaggaaaaggaatgagattcgacattgtttacctcaatttgtggttgtccatgactacgcaggttgcatcgttaggatctttctcttcctgaggtctttccacccttcgctaggctattggtttgtgttaggaacaacatgacctctaccgcgtacggggtcacaaataggttgattcaggtcgagtctagcgtggttattctcacttgaacgttccatgcaattacgagttgtgttagaaagtgttcattatgactcctactatcattagttacctgattatcaatgcaacatcggtttaggactcttaatggatgtcgagcttgcatttggtctttccctgcgatctttgcttgtaatgctagcatctattcctatatagctgtgtactgcaaggtttttagttagatgattccttcagaggcgacgacgggcgtgattggtggaaactgt

SEQ ID NO: 322557 - DNA, 727 bp, Cannabis indica
cttcttcttcttcttctcgctgccagaaacaaagctttcaaatgttagttcaagtcgatgatctagccaaagtatcatcaacatatccacaaaatctgttcaatctacttgagagttgtaataccattgaaaaacttaaatagattcataataagatcctccttaatgactttacctaaaaattttccttaatgttaaactactatttcactgtttttaaaagtgttgggaagccaagcaccgctctttgaaaccaaagaattagaggacatggtcgaagtaaaacccttagaaaatcagttgaattatataatcgaatggtggggattgaagctaagccaaatgcgtattcttttttcttaatgcatgtgagaagttagaaatatatggagaagaggaatatattcactggaaagttttcttaaatggttactgctaatatgaggtcaaagggagatgatgatgatgatggcgacggtaggttgaagggaaagggagaagtggaggacttgggtttttggggctgaaagcgatggtgtggggctagtgagattggggttcaagagagataggattgtgagtgggaaaggcagaattgatggccgaagtttctggccatggtggctatggaggtttaggcatagaaggaagaagatgaaggggagagagaagagaaagggtagggctgagaaagtcttagaagaagaagagaaagggtcgtggctat

SEQ ID NO: 322558 - DNA, 749 bp, Cannabis indica
ttttatttaacctaaaaaaaactttactattttttttcaaaacctaaaaacacctaaaaaaattaaatatctctctctctaaccccatcattctaagcacttcccccttctttgccaaaaaaaaaagtcctcctcccttctttctaactctgcccctacagacactaaggacgtccactcagcagtccaccgccacccctccttatgctctctcacattgtggattaacagagaagtgttttttttccttaattttttgttaaataattgtaaacgtatagtatattttcggtagatttatgtagttgtttgtagtattttggttttgatataatttttgctaaaatcgcaagatctcattttttttgagtattttgtgtgtttgtatttttctcgatacgttctcgatgggttcttaacgtgaatgtctcaaggtcaggaaagacctttcttgacggcttgtcgataagttctcaacaggttctcgactcggatgtcccaaggtcaggaaagaggcttttcgataggttatcgaaaggttcttgactcgaatgtcccaaggtcagggaaggcctttctcgaaggcttttcgatagtttctcgatagtttgtcgaaatggcgaatgattttgcatttcccaccattcttgacatgtgttttagcaaaaaaaaaaccattcttgacgtgttatttttgcgttcttgattgtttgttgatggttttttgatggtgtgtatagttgtgtttt

SEQ ID NO: 322559 - DNA, 779 bp, Cannabis indica
ctcgattcagtttcttggtcctccttctcaattcgagattcagacgcaagaagtaaggcttcgatctcacccacagtgtagccttcaacacgtgtgttggtggagatgatgaaagtatcatagtcactaggaagccctttgaatatagcagcaatatggtcacggtcagagaggacttcacgaacagaagttagaagatcaacgtgctgcttcactttaaggagataatcgttgagattcattgtgcccttctttaatttctggagtttagttcggaattcgagaatcttggacgaaactttcagtgtgaagtgttgctccaaagctttccagatctgcctagctgaattgtaaccaaccattcgggttaggaggctctctgtcatggaggagaggagccaagaaaccagaagttgatcttggacttcccaatccaagaattctggattaaatctttgagcaatacgatcggtgtcactgagatattggggtggagggggtatatcttgaatgaacttttgcagccgattgccacgaatggcagctaagatttgttgcttccataaaaggaagttgtgatcgttaagcttgattgaaactgtgtgattgaagtagatagggctggtttcatcttgagatctggtgcgatttctcggatttgcagctgtgaattgattcccttgagttgcaggttgatgatttgagttaccaggatcgacagaagccatgttcgccgttaatggcggaaatggctctgataccatgtgagaggtattcaa

SEQ ID NO: 322560 - DNA, 581 bp, Cannabis indica
tgcaattgtactagctagcctgcgttaataagagatgtggtcttctatcactctcttgcgtctcctttgtttctttgctttctgtgttagttcacttctttttttgttatcatctgttgagttttgagtgcttgtttgatcctcctggcatgtttttgcttttgtcttccttctaaggtctttttcgttttcttccgtccctccttgttttccttgtgcttcgttctcttgggttttggtgtcctactttctttcttttgtttttttctctctgtgagattatcttttgttttgtcacctttgtggggtgcgttcgtgggatttgtggggtggtgtgttgtgttttggtgggtcgtgggggttggtaactgttggtgctaagtggttttgtcctttgctgtctgttatggcgattagggctgtacagaaattttcgtaaaccgcccaacccgaataacccgactaaaccaaaccgacaaaaccgaaaaaaaatacaaaccgacataacttgacaaaattctaaaccgcccaatctgtaaattgggcgggttgaattttgacccaaaccgcccaatgaaccc

SEQ ID NO: 322561 - DNA, 946 bp, Cannabis indica
tttttttttcttttcttttttctagtttttgggtatttattttaaagtgttatatatatacaactacccaccattcccacgatcactactattcacttctctctctaatttctttccaaaagtctaatctttttcaagtttgagagggtgatttttctagggtttcaaagaaaaatggccaagatataaaatgctcaaccctccaagaggcttactcgaggttcagcctctgcttctccagtcacgccacctgctcctgtggtaggaacccctgggtcgtcgtctactctaacgaaaactgccaagaagtcaaaatcccaatctcaaaaatcgacttacaatctcaattctcctccgatcattgcttctctgattgcaaccccaactcctacgcttagtgatcacgatgaatcccattcacctgatcactctttatctaagtcttcttcttcgaatggtgctccaaatttcgagaaagctattgtgcccttgcctacggtgagctcacgaaccaggtccaaggtgtccacaccaaagtggttctgcccaaaagagcctccaaaggaaagaaagtggtgccttcatcctcaaagggcaaacacctcaaagagaatcctccttacgtttcatcatcggattctgaaccaaaagaagagaccgaagatgatcaagaattagagggtgtgtctgattctagtgaagaatttgttcccaaagaacaaccctctattcatgattttaagtctaaaagtgaagtgcctaatgttgatcctatcaatgcagaaccagttgttgtccctgctgcagtgccaaagaaggacaaaggagaacaacccattgttactgcaagccctattttgcctcaaaaaacgaagaggccctctggtattactcttgaaaacttcaagccccattctcattatttttgttacaatgataatgatag

SEQ ID NO: 322562 - DNA, 638 bp, Cannabis indica
ccaatagatgattggcctccttgctttgattgatcaatttgtgctccagtaaaattggcactagcagaatttattaaatttgaggagcattttgattagaaaatcttccatgtaattggtgtccaggtgaatgcttatgtagcctatagcatttgaacattgtatgactactagttttacagtgtgtgcaaaacattattgatctgtgtggttgtacatagtgttaaaaatatgggccgaactttttgacacagcatgaaaacgacacgagctcagaaggcacgaggacgactaggcacgaaaaagtacaggcttgagcacgacatggcacaaaatatatgtccttaagcacgacacgacatgagaagcacgaaagacacaaaacataagtacgaatagactagctcgaaaagcaagacatgcgataagcccaaaaggcaagacacgcaataagcccaaaaaacacatctagacatattaaaaatcttataatttatcaataacaataataatatataaatttatcaattataaataaaaaaaataataataaaatataaatataatgttgaatattataattttataattaaaactattaaaatatgaaaatttagattacatattaatttatttat

SEQ ID NO: 322563 - DNA, 441 bp, Cannabis indica
agggcacaaaacccaacactcaattactaaggctggccatcacccactaaggcttgccaagacatgcaaagaccaggccaactcttgacaaagctagcaagaacatgacatgccagatcctggcatgaacatggccggctagacctcaatctacatgtattgtatggccaaccagcctacaacctacaggtgcatggcagataagcttttccctagcaggatattgatgcgcaaccctcatccatggacagcaagccaagatgcgagttaggccttgacagcccacgaaagcaccacaaaaattttagcaacttccttatttataagggataatatagttatttattatgagtaatttgcggcataaatacctaagttttatgcctagtagcagataaatacctaagtcgtatttttagcagtaaaaataccttccgtcac

SEQ ID NO: 322564 - DNA, 1054 bp, Cannabis indica
agttttcaaatgtagggttattttacatctcatcttttccctaacaagttattcaattaaattatatgagatctaatacttaattgtagcaatagcgatatgacaacaaagagagtgctaagccccatgaccttttataaatatattggatacttatataatttgattgttattattagaaaattttacataatgaattaaaaatttgaaaaaaaaaaaatacttcaacatagaaaaaaaattattcttactctttaattttttttatttataaaaatatcttttcaataaaataataaactattttttggttgttttgtagtttatttatacttttattatagtttgcataacttagaagaatgtttttcttatttttttaattgtcagttatcgtgaagttaatttctcgttatttttttgtcactttttgctgaacaaagtatatttttaaaattttaaaatattaatagcgtgtttttgtaattaaaaatattaagttgaaaaattgtaaataaagtataaaaaaaatatttttaaaaattctcattctcattattattattgtaggaggaagttttaatggttacataaaatatcatcatggttacatttatttttagtcactggatcactattgaatggtcgtgattaatttagaaattaaaataaataaataaataaataacttgtaacctgatactttattttcttataaaatctgaattaaaattaattatatttaaaattaaattactaataatcataaattatttttttgcaatctgttactaaataagaatcttttagaaattaattgttttcacttaaattgttgaaatattgtaatgaaacttcttataatttaaaattattacactcataaacttaattaatagaaaatagtaagaatgatctctaattaaatataattctacacggaaccttactatcaatactttaagtgccaaataagtgtgtcagtccgtgattggttcaagtgatttaattttttttaaaaaaataaaataaaaaattaaaatataatagcaat

SEQ ID NO: 322565 - DNA, 804 bp, Cannabis indica
tatatcaagggctcgtttggaacgccgtattaggtcgtattgtattgtattgtattatattgaattgtattttatgcaatatttttatgtaaaactatatgtggtattaacttttatggacacctaaatatataatattttagtataaattaaagtttaacatagtattatataaaaatatgatatataatccaattcaatataatacaatacaatacaatacgacctaatacggcgttccaaacgagccctaaatgtatatatttatacaaggaaaatataatctaaaaagaaagtaaattaatttctttttatatacaatatttttttgtcttttttgaattttattatttatttattttaatttattgttaacaacataataatttattttattttgttgttggttatatgtgaaaataatttatattttaatgaatattaaataatttatgttaaaaaagtaactaacataaaataatcgatcgaatctacactattgtagattggatttaagctcttgtatagattggattggatctaaaatataaaatctacactaactatgagtaaaatagtgcagattaaatcacataaacacgcctacttaaatccaacaatcttaatacttcagaaagaaattttaataacttgaaataattcaatacatgtcaaaggtcgagggtgggtaatttgtgtgtgtctaacattacactgtaaattagtaaaaattttaagataaatactattttggactttgtgttttgcaaaagttatagattggatcctctattttgttaaatg

SEQ ID NO: 322566 - DNA, 789 bp, Cannabis indica
aataaaccatcagtatccactcctctggacctaagatcccaaagaaatttaacccaattccacatgcgagcaccaaaatccacaacaggcataatcccccaaggggaggatctccagaggtgagatgccaaatcgcaaaagagaaacaagtgttccatggtttcatctcccttcccacaaatggggcaggaggtctcgtcaataaccattctcttagagaggagtgccctaatcggaagcgcatccgagagaatgctccaccatagtactttatggcactccaagatctttgaattccacagcttgttccataaagacggagcaacactacacaaaggggcccgacccaaggcttggatgagataagctgacttaggtgagaaaaaaccattagattccttagtccagacccaactatccctaccttggccgtttggtttaccgaccctcaagatattttgtttccctgtcaaagagatcattaagcttccggatgtcccaattcccatcaggagcaattaaatctgccgccagatcgggcattccttgggggttgttcttgggtctagggtaaaactcagacccatgtataatccaggggtcatcccagatccttgtatccctcccattggtaataagtttgcacgcccctttctttaacatctctttagaacgcaccacattcctccagaacaaggaatctaagctcttgactgtacagtcaaaaaattgtctaccccgaaggtatttagctcttagcaccttgctgctggaatttattttaccagg

SEQ ID NO: 322567 - DNA, 708 bp, Cannabis indica
cagcgatgatctcccatccaatttggttatatattacatggttattttcattaaccacatatagtcagtcacacacatcataactcaaaactatatttggtcttgattacattacaataatattaatgcccagtaaatgctactaacagtaagcaaattaagtcaaattacagaattagttattagagtgtttattaggtaactgacttcttgcattctgtatcatccaagtttgtatgtagcacaatctgcattagagaacactcccaggttaagacagaagcccgtcgattcgaaataccaagtatgtgagaaatcatttagaaatacagtgatattaagtcatcataagtgtttatatgtgacagtaaaacctcgaagtgaattcaatagtcatccaattagaatttaacagttatatctaattggggcttcaaatttgctaagaattaacagttggtagtcacaaaccttgcagatttcggggccagagggagaaacaaatacagtacaggagatgtttcttccaatgaatctgccatataatatacgtacacataaaactgtccatcagaaaatataaaatataaattaaattgaaaaacaaaaaggaaggaaaagaagaagggaaatcaaagttacctagatttttttgcgattcatatatatatttgggatgtgagcaataattggccagtcctcccctgt

SEQ ID NO: 322568 - DNA, 1547 bp, Cannabis indica
aaattttatgattctttaatattttacccagttagaattttcaactccgcaccagtttgtataaatttcttaaatggtaagagtaatacaaatttcattccttagtgttaacttcacataaattatcaattcatgacctaaaagtcacaaaatacataaatttggatacacatagaaaagatgtatgttacaagtaatcaatgattaacaaaatataaatttggatcctcctctaaagatgattcttgatggccttggtagtatgcataccagtaccaaacttcaccctacttgactttcccaaagcacactactcacagaattctaagtttggcactatattctttccaagtagcccctatttgtcaagaattccaagccttttaagacttacatggcccagctttctataccatagcaatgttgagttaatcatgctctttgaagccacatatgaaaaattgttggtagtatttccgtgaagtacaaagactccattaatcatgacacccttcatcagtaccattaagccttttaacaccttcaaagttcctacttccatcttgacctagcatcccgctatattcagcatagcgacgaagattaggttcctctttttttgaggaacatgcctcacatttgtagttcatgagtattttcacatgttaattgtaacttcacagatcaaatcccaataattggacatgctctattgatccaagtcttacagatccaccatcaatttccttatactcgagaaattgatctctatttggacaaatgtgaaaagagcaccttgaatctttgacccattcaacactgagtatttcttggagacaaccattacattagcactctcatacccttcaaagtcactgccctcagaaaccatgtcagcctttccatatctctagttaaaatctagattctttaattgaggataatctctcttgagatgagttttcttctgatagatgtaacacatgttcttgtactgagaactaggattgaatttacctctcaattttccatgagatttcatttttatctctctgtttgttcttcccggtacaatcaatacccttcaccaagatttcttcctttagttctaattttctcttcaatttctttaatagcaaggcactttgaaactcgtctaatgttaaagattctctttcatatatcatggtgtccacgaagtgttcatagaactccaatggaagagaattttgcctggtcttcatcttcgatctttatgccactgttctcaagatcaagaattatcttgttgaaatcatccaaatgatctttaaccgatttaccatacaacatcttaaaagcatatagtttttgtttcaagaacaacatgtttgcaagtgatcgagtcatgtataaactctccaaccttgtccataacccaaaacctgttgattccttcgaacctctctcaagattttgtctctaagattgagaatgatagcactatgtgctttgtcaagaatctctaccttttctttatcagttttgtccttgatcttctcagctcc

SEQ ID NO: 322569 - DNA, 1178 bp, Cannabis indica
tactctataaatacacactaaattcttcatgcaaagggctagaatttcttaactcataagcttgagaagagaatagagtctttatattcattgtaatcctttaggcttttctaacctatctcataataatacagacacgtgaactaaggctcattaacgctccaatctcgtaaaaattctgagtgttccattcattttttatacttttaatcgtattttctttagctataatattacatatttattttttgaaaatctctgtaaacagcagcaataagaaaatagcgtgcaaacaacatagtttcttaaacaacgtaaaaacaacaatttgtatttttgacaaaaaaatatcaaattcttaaaaatattaaaaatattatagatctgtatttttataatatataggttttatttttttcgggtaattatgaaaatatcccataaagaaaatccaattgggctcaattcttattataggatcctaatgattatttatgtatttattaattattaatgatatttaataaattaaatgtatatatatatttttttttgtaaaaaataatagtaatattgtaattaaaaatgtgtattgaaatcattcattaatattaaatcacaatattctaaataaaaattatgaacttaatgatgtaccaatttttaatgtctcaattttcaaaatattccacacaactttcatcacacaaatagtgaagcattttttttgtaaaaatattgtaatattgcattgcatcacaaatttatcactctatttctatttgagatcttcttactagttatacctaggatcgattttaggggtaggctcgtgcctagggcctcctgccttaggggcccgaattatttatttatttataaaaagaatgtaataattatacacatttttttcttcctaaacgtaataattatatatttatttatactattctaaacattaaatagtattggcgtaacggttagagatacacattttcctatggggatgggccctgtgaggactcgcctctaatgagacgggaatttcccatctaaatggggaacgagactgggatgaagattatattcaggctcagccctgggcataggcgggctaggcatgtgcctagggcccacctagcctagaggcccaaaaaaattttctccttttaaaatta

SEQ ID NO: 322570 - DNA, 4108 bp, Cannabis indica
tattgaggattaatggaatgttcttaatagggccaaggttgaatatcatcataaatacttatggagttatttagcgaattggtgttgtcgctatcttcgaggaaggtttgttgaagatttttgtgtgcccctagttgggaatatgtggtggtagcttgtgaccttgaaggattactcgcttcttgagtaggttgttgtctttctcagtgagagttctccccttttttcttaacatcgacccctatattccttggaacatgaggtggtcgtgtagatgagtcatgaccgccatgtgtggcacaattttgattacccaatgcatgatttgcatcattgttggcatgaactcccatgtaacctctaagagggttgttatattccatatttcattgggatgcacgcataggaggaaaattatgtggatatggtcctctttgattcctcatggggtcatatgtggaacaactacccatgggacgtcatctctttctctttgaattagagggttatcttctttcttctctgtccacgcccatgtctctaaggagtggccttggagacaaattttgtttatcatgtgggccatctccatgcaatggtgcatgagtggcatgagtgtgttgggcacgtactccaatgttaggtattgacaaatcggtattgccaagagtattgttgccttggtttgcttggttatgggtacctccatggtgggccagagcaccatggccatctttattcaacgctacatgggttatatgtgcatgtttggcacataccacaatgtttggcaaagcttggtggtcccctctcattggtggattagtacttttagggacatcatggagttggatccctaggtgtgccatggttgcaggctcttttgatgggcgaactcttattctgctagggggagaaggctctcttggtggaggagtttagtccccacacctttgcgattgctcttggagttctttgttgtggcataagctttctgccaactcgacacgtagggcctcattttcttggagcgcatcatgcaacagtcatggatctgattggtgggcgctctctagattatgatgaagaactttcacattcttggacctatccctcatcttctggcataggcaacatgggaagcttttctcagtgcctataagttccccctccatgtggttgtggagggacaaaggttccttcactaaggggttgattaacttccccccttaagacttcaacatcttcttcaaaatttgtcctcctggtactcaacaccattgttgtgagaaaggtaaattaatgagttttccaaagtgaaaatagttaaactttcaccacaatgctctcaatgaaagccccaaactattttgagagcgctctctaatcctctcaatgaaagcaccaaagtgttgacgcgattcttggtcaacttatctaaaaagatcgtaaaagtatagaggattgcgatgaattaaatttgaccaataaaactgcaataaattaaattgacactagggatttatagtagttcactccccatgttgcgatggtaatagggctatgtctatttttatctttattgattagatccaacacactagagctatgttatcaagagtgtgtggataaaggtacaacaaaggatttctaggtaaaatcttaatcgagatttatgaatataagactcatgggagacttgatactcataaatttgatctaaattagtggttgtaggttcttgggaataataaactaataaagtgtaaagaaaggtgtgtatcaatggtgttttgaggtctggtgtcgactgagtatggtggactcaatggaaaagatgaagaaatcagtgtggttttcttggctaccgccaaataagtttcaaggagaaggttttgaagagagggttcaaataagaagaagaatctaaaggtaggtccaaaaaagagagagccctatttcagcctctaacttatctttatataggttgtatggtttgttagtgatcccccacatgtcggggtatctcacttgtataccactcttttaaatgaatgaaatattacaagaaaataaatatctataaaaatctccttgtttctaggtaaaaatcccacaaacattgggaaagttgttattttcggttgaggatgcaccaatttgaaatggagtgatgacatgtcacctcttggctggaaatgcatgatattggtgataagtactaaaaacatgtgttttagagtgtcagtgcttgcatacaatgacacatgggcggtgacagtgttctccaacaaccctcacttaaccacattactcaatttctgagtaaaatgaaccactatgtgttgtaggtcactttcggatctgataacttcggaattgggctatgattgtgacacttagatccgtcttgaaatcatctttttaatgcatgttgaaccatgttatttggataaaaattgtgagagttatgcccatattactggaggtagtttattcagtcttgtaccagatgcgagcaatgacatggccaaatggcagtggtcgaccatgcatgttctcgaacccctcatgatgtgttttgacttttttttatggtgagttgtattttgagggtctcgagacccaaaaacctcatttcaacatctcaaaccctaacgagaggccactaccaccagttggagccgaacattgaaagtggtcggccatggcttgtgggaagccatgggtggtgtttctcacttatatttgatacatgaatgttgaaaataaaacttggacaatgaaatttctttccttgtgtagtagccgaccattgcaactccattgtggcagtacccatcaaaattgatgggctgatgggcactgccattccttatggcagtggtcggataagggcttcataaagccttgggtaacttttctcacttgtattttatacatagatgttgaaaatataacttggccaatgaaacccatttccttatgtaagggtcgaccactgccattcccttgtggtagtgcccatcaaaattgaagagcactgccatttttttatggcagcggtcggccaagtggtttgtataccacttggtggcttctttcacttagttttgacatattattgttgacaatgcattgttgacaaaaaatctcgcttcccctcttcatggccgaccactgccatttccttgtgccagtgtccatgttgaagaactgccatttccatatggcagtggtctgccagggttaaccatatgtaggaaatgatctctctcacttgtttttctttccttagtgttgagagaacacatttgaataattttcccttcataatttgtaaggagcaaccattgccattcccttgtagcagtacccatcaaaattgaagagcactgccatttccttgtggcggtgcccatcaaaattgatgggcacttctatttccatatggcagtgggcgcatatgtttattttcttaagggtttgatgccatattgacattatgcatgaactcaagtcatatttatgcctaaatgagtcaagtccttgttggtttccttgggggattgaggtttctagggtgaaaacgcccacacaggcccatgaaccctattttgggcacacttgggtttgtgagtcccgacaccaaatgcttgggtgatctttttgagtcctctaaaagtgacatggggccctcaagaaggatgtcttaactcatttggcctttgtaagtgttggtcaaagtcacagaattgactttagcgtcttcaaggcaatcttggcatgttggcccttgtataagagtagccatttaatttatttttttcgcaaaaattgtgtataagatatatgtttctcgaatatgttatgtcataatctcactcccacacattctctacttgcttgataaagtgtaagtatgttaacatgatttaaagttgcctcgttaaaaattttgtcaagaaaacccagtgagacaaaaactgagctaagaaaaaaagagtgcgatataaatatttcatatttgtaactatttacaaggttcctcgttaaaaaccttgccaggaaaatccactgagacaaaacctgaactaagggaaaaaga

SEQ ID NO: 322571 - DNA, 1912 bp, Cannabis indica
gtgaaccatgcaacatagaacgatttttgatattttataaattagtaaatctgattatattgaaatgggttttatttagggcacaaaacccaacaatagcatacaacgagaatacaattaggggttgatcctcatgcagttattgttatttacgatacaaaaaagcttttggagttttgttttagatgtggtgttattggtcatgaggtgagtatgtgtaagaagcctccaggggctttcgtggaggggcgtgagaacctactgtataagaattggatgaaggctttgggttccattaatttgttcaataataatccccgtggggttggtaaggtcgacggggaggtgcatggtttgtttggctacggtggtccgtctagttatagaagtctgatcggttcaaattctagtgctggtcggggaggggatgtgagagttaatgtgccagctgttttgccaaagtctaaggaggttttttaggtaaagaagttcttacgggtaacaagattggtgggatttatggtattttggaatttttttcctattaattcaaaattcaaaatttcttttccaaaaggtaagtcaatctttgatgaggtggagtgtgatgtggtgcgtgggactattcacatgactactaataaagtagtatgtagaatagggaagcacaaaagtttatagataaacgaaatgaggaggtttgtttagtgcacagtacgttatttttggccaaaatgacttcttcttcagttggcgttatgtccatgggcgaacgatgactctatgggggtggataatggtttggtaacagggaagatgataaaggttgacacatcgtataacataaggatttgagggtgatggtgactcctgtaatgggatgcttggaccgatcaaggtgttctctattagttcttcgaatggcgatcttggcaaagtttgaaaatggatgtcccaagctcgtgaaaagagcggtgtctcagtaggggagtttattggtgatgattcaaaatagagagatggcaagccagttgagatgacaaaagatttgaaactacgtaaaattttgggtgatgatgagtgcatggtcccatcggcgaaggttgcagagcaacctcgctgctccccataaaagtcttagcttggaacacctagggcttgggaaatcttggtgtgttaaataatttatgggggctcattgcgagctctcaccccactgtggtgtttttaatggagactcaagtttttggtacttaggcgacttgtattcgacatcgagtgagtttttctaatggggttcatgtggatagttgtcgtcgtagaggtggcctaatgttatggtgggactgttgggatttaatgccctaaataaaactcatttcaatataatctaatttgttatcaacaaaatattagaagtcatttaagttaacatgattattttcatattaatatacaatttttaataaattcggaacatatagttattcacaattacagttatatcatcacagtggagggtaattgtgattatatgctttgaagtttaagtctcatggttcatcagggcataggatttttattgacgtgataataagcgataaagtttacttacaccttggataagtattatgtcctttctagggcataggtaaagtatgctagtatcggatgtatgaagtatacattggattggactgatattgaagttggataagatattataaacttactattgcttctttctaactcaatatcactttgttgatcttagatcaaaagatcttaatcctaagatggttaggttctagcgtatgtgtgttatttgtgttctttgagttgttcgttaaagttgaccaattggatcagcccaatacttacatcttggaagcatggtagtacaattgagtgg

SEQ ID NO: 322572 - DNA, 891 bp, Cannabis indica
ctcccttggtctgaagtcactttttggctggccaacttgtgtacagatcctggccggtctataggctcaccctggttggcctataggcttctcttggctagctagggatgttggtacaactcccgagggcttgcttcactccattcagttattgtttgacggttttgctatatcttgcatggaggccctgttctgctactggcagggttgtactctacctgtactctgtttttggcttacgtggacatgccacgtcaggtggacaaaatttggaataacaaatatctattgaataagttcattttcaagcaaaataattatgttaattccattaagaattggaagaactcttttgataaattttaatactagaactaacaccattaataatacttttaatgcttattactctaaacttcctctttcttataatgataagtgaaattttatttttataattaccaagtgaaattatcaaataatttaaataatgtggaactgtagtaaaattgtttaaacaaaatttaactatgttctatcagatacaaaatctaacagaaaagaaatatactgtaaaaagtaaaattgtagaaaataaaatgacacaatattttatatgtccaccgggccacgcccaaagaataaaatttattagatgaatctcaagagattataaaaccaaattgacttatacaaatacagactctctctttgaatttatcgcaactgttgtaatctattcttcaaatcaaatttttgacgtgtcgagaccttgaactcccttcaaatagtagcacttgcacacttcgtcttaaaagtgactcacttgcaatctttctcccgaagagtgtctataatttgcactttttctcccaaaaagtgtctcacaaa

SEQ ID NO: 322573 - DNA, 1072 bp, Cannabis indica
aaaaatggaacaaaatggtgaaaaagggcccaaaataggttgtgcacgcgcctcctctttttttttttttgctgtgtcgtacgacgtgtcatttttggtaaacgacatgtcgtttggagaaaaacgacatgccacatggtccaaacgatccgtcgtttttctcggatgggggctgaactatagtgtgcaaacgacacgtcgtttggctcgacagaggcaaacgacatgtcatttcgtgtcatccctttcaccctaaaaactcacatgcgggtctgcaatctggatcggcgcgactcgattcgtgaccaggtctgatagaccccctccggccaccaaatctgacattgtttgaggggttttgttccattttcaaccctctatcacaatccaatacccatttaattcaaaaaaacaaaaataatgaccaaggtactatgcacccgaaatgggtttttctccattaatgaactcaacaaaaaattacaatctcataataaagaaaatacagtaaccgtccaaaaacaagaaaaaacccattctcaacaaaaaaatttaatctcatatcatccattaacatattaatccgatttttttttttttgaataagtgggttaagtacaaaaatattaagctctaaaattaatagctttggctctagataccaattgttaaaagaataatcaagctagagcattgtattcactacaatcaaataataatctaataatgctcttaaatttatccaagatccaaacatttatttagagcaataatagttaagaaaatatacttcccatattgcttatcccttcatattgagccattgttgaatatccaagtccaaaatacactaaaaatatgctagagagtgaagagtaataaagagacaattgtggagcaaatccacttagtgtctaaccatctaccttaacacacactatgcatccttaatatatatatatatatatttatatttcacatacccatctaattctaaagggttatgtttattgggttaataaagattaatagatggtggactataactcaatgggccaattatagtcatatg

SEQ ID NO: 322574 - DNA, 1280 bp, Cannabis indica
ttaattataattattaattaatattttgtaatttattactaaataggatcttttagtattttttttttttttgcccttaaattatcaaatctttataatttaaaattatacacatataatttcataattaaaattttattacacttataaccttaatttaaaattcttacactggattatttagtttgtttttatttaaattggttggacgtattttcccgaaaaaaaaggttaagctcttccctcgtttttttttttagataagtagtcatttatttaaaaaatcaaaccatagtcaaaaaataaattcaagctccccaagaaaataaagcaacctcaaactcgaaaagaaaaactcctcccttcttgcttcgacttattttatacaaaattgaaggaccctttcacctgaagacccttcgctagtaatcctctatatttattaagttttcagaaaaatctgagagcaatttctaatttcaaagaaacaaaaatcaaacatcaaaagcagagaaacctatcttcatcgctctcttatccccatcactttctttgattctcgttgttgtcttcgatttctcaacaacacaataaatttcagtagtcttattagtcatggctggtgaggtactacaactctcactctatgtatcataatagctttgatttcttttgattttttaatgtcaatctttctcttaattaacgttaattttttgttaattttattttgcaataatggcaatagtggtctagaagtatctctactcttaagttttatctcttgctttgaattgattattgaaacttgaaatttatgtcgatactataacgagagaaaagttctgatttctttcatctctcgctttgaattgattctgaagctttaaaatttcagggagatgtgcttgaattgttgctagaaaggtaagtatgtacgtgcaacaataatgcttaccatctttctataaatttatgagatttatgtatattattaactctagtttgtgctaatgatttgaacaacgtactattatttaattaacattgaataagaaaaagttgttaatagaattaaatgtaaaattttgcacagagatttaaaagtattttaagactgaagaacaaaacggtgtagtattgtaagcaaaattattattctagtccaatagtatttaaacatataccacttaggcttcaacttgaggcatcatacttttttttatgaaattgaggcctcatacttagtttttttagttgtaagaaaataattaaatatc

SEQ ID NO: 322575 - DNA, 944 bp, Cannabis indica
atttagttgcattttaaattattggatgaaatatcattcatccaataaaggaaacaattttcattctattcctttttccactattttgctagaatgactatttcattttaaaaatgaatgaaatatcattctaatataacaagagataaaatttaatgttttttattaattttttgtattcattttaaattttattgcattccattccattcctattcctattcctattcccatttgcatttctattcctatatcttcatttctcacaaccaaataccaccttagtggtttactctatatatctttaatcaaaatccaagtataatacttcagatatatcaaaatccaagtatcactacttcagatttttaattgagagataacaagtatagttgtacgctagagttttgtggaatgcttcttgttagtgataaaggtatatcgatggctatttgtctggagtgtggctaacgatttcttcttcatatatcttgaacatgaaaatccttgtggcgctaagaacattttttgttggataacataatttaagttgatatgatctatacaaaatgttatttatgtttaaaattaattatatctaattataataaataataatagtatataattaaacaaattgagaagtactactgataaatacatgatgaagataggacattttataaagtaatgagaaagcaaccatatttaggatagtactaatcatagaagtcgtagtcataattatgagtgataacaatgcgacacatttgccactaaagaaaaagaggataaatcatttttttggataacaattgagtacgtcacataaaattatgcgcgctttgaattcaattgtactactaatcacagaattcaatgtattattcaagacaccttttaatattacggataatttcacaaatgcacaaaaacaacaaaaa

SEQ ID NO: 322576 - DNA, 910 bp, Cannabis indica
gggcataaaacccaacagaggtgtccaagatcgatggtttcctcgaggattattatattgtcaaagacattaataccgaccaccttcctctctagctgatcccctcataatgtcgtcctccttttaccttgggattaaggtcaagagcctaggcagctcttcaaatgtcagagtcggctcagaatatctcccttctagctaccacaaccaattttcttaagtacatactttagccatccgaagaggttcaagaatacaaacatgcagttgaggagattatcaccgagtagggggctccaaaaaataagaaaactcctaaggggtatcaggtgcagactgaccatcctatcaagatcagagatgaccctaaggtagttattcgtcctactgcccctgtaatagggaagggtaaggccatagtagtggaagattatggggattcatctgacgaggatgtcctctcttttcttgttagcgagggtgctccccccgaagtgcagggtagctattgctttacttatctttatttattcttacttgttcaaatatttaacaagtattttcttctgtgcggccctgtcagagaatatgaaatgtgcactcataaagagcatcggtgacgcatccaaccaaaaaccaccaactaaacgatcaagggtagaagttgctcttcctacaagcattgctccgagctctaagacaccccaagtagaagttaggaggagctcgacagttgtcattgtagatgttcctaagtcccttcctccggcaaagaagactttgaagaatcaacctccaatcactttgaccaaaagatttaaaagggccagtactaaatggcccatctaaaagctaaataccactccacccacctgttgggttttgtgcaataaataaaacccatttcaat

SEQ ID NO: 322577 - DNA, 1506 bp, Cannabis indica
accagtggcggttcgaagtggtccgggcaataagattgatggtaagctaacgccatttcctggggctgaagaaggaagtgttgactttgaagtttgtctttcgccggctacaattcaattacttaattgttaattgttaagattgaggcacatgcggcttacaacaccataaaagtgtggtagtaaaataagtgaggcttcttttcaaaaaataaaatataagaaaaataagtgaggggtaatgttaaatttaaatttcaccagtagtaaaatttaagtgagagctgaattgtcttcatgtaataaaatttagcggcaatgcacacataaatataacgcacatttatgtgaaaattgtttccacatatcattactaagtggtaggctaaaatatagttcatttaaacaaaagtgtactttaacagtgtgtcaaaaagtgatctaaatttgacacaatatttattacaatgtaaaatttatttcacaataaatgtactattttttcatttatatttatggcatttgtattattttattactataattaactataacattacattgtaaagtatttttattattttttattatcttaaatattaaaataataataaaattgataatataattattagtttattttttttaataaagatattaattagatattaaattttacatcaaacttttgtaagtgtgcattgaaatataatgctaaaatttaatgtaaatctaccataaaattattttttgtgccaaatataacacaatttttacatctctcattaaagatggtctaataatactcacggttctcaccgtgcaaaaatgtaaaattactaacttatatttatgaacacataaaatttattttttaataaaaaataatttttttaacttttatataatttaagataatgtttagcaatgaaattggtatcttgggtgataaagaatcaatcttttttatatgtgaaccataaaataaatctaggattgcttgaatacctcaattgatttgtttgatatagtattttccaaaatcatgggcatttatatactgttcatgtgttagttttacactaatttaattttataattgcataaacaagtttctaattttaggtttagacgaggaaagctctccagtgtgtgtctataattgatttgtttttcttgatttgtcctttacagatccagttagagttctcttgatcttctctctcgattattgttttttttttcaataattgataatagaggtgctaaaacggcaagtgtatatattaatactaattaaagacttgggtgcattagattattattcattctgttgtaaagtggcctagaaactaagccttagtgaatgtacttaggattttctaactgctttaccggttttatggttaagttagttatgttggtttatctataaatagactcaactaactcttattagcaaggtgtgattcatttttcaaatttacagaaacaagagagagagag

SEQ ID NO: 322578 - DNA, 281 bp, Cannabis indica
tgttctagttcgaggtcttgacacgcaataagtgccaacaaaattttaatcgacctatgcttaacaactggagaaaatatctcattataattgactccttctatcttagagaatccctaacttcaccgtcttccagcatcggtattatattccaagtttggttcttcttcgaggagtgcatctctttcgatatagctccattccatttcttaatcatttacaaacgttttaactgtttaacttttacatcaaaagaaagtcgtctaacgacagttacaaaa

SEQ ID NO: 322579 - DNA, 877 bp, Cannabis indica
ctctgaatgtatgcacaactaatgtatgagatatcatggaatatggatattgcaggaacatgtatgagaaagcaaagcataatgccaaattacaatcaatcttaaagggtttttatagaccaggcaacgaacatctactctaaactcgtatcaataaagtttgtttgaatgattgtaagagcccctacaaaaatattatagcaaaaataaaagtccaacaaactaaaatacacactatagattaataaatctaaattgatttgataaagcagaatataaaaatttatctcatcaacaagatctccgaattttcattaaaatttttgggatagacaacaaatctttaatattaaatctttaacaatatcacaacatcaaactttttcataactaacaaaatttaacttaaacaaaataaagccgaacaataacaatatatataaaataacttttaattatacaaatatataataatacatgaatggttatgattaatttaataaaatatatttatacaaaaatatattattaatcaaaagaatcaataaaatgttttaatagtaaataaaataattaacgagaataaacataattaatataattaatatgattctataaaattgtaaaaaatatagtttttggtatgtaacttatatggctttagacattaaattaaaaagatataaataataataaagcgtggattatatagagcgttctatatagctgagagcgtaattctaagttctatgcgtggattcaacgaagaattaataagtcagtgaatttaagaaataaattcttgatctgcttattggaagctcggatatatagccccatggtccccacactagttgagacaatactacttgtaaga

SEQ ID NO: 322580 - DNA, 528 bp, Cannabis indica
taaccattaatatccaagggaaccggtgtatatccctagacccattttcgtcacaaacagattcccatagcactctaagtttatcttcccacttaagcatgcccttaagatggaattttgtctcactacactcatgttggcttgataaacaatgaaatcaccactagacatcaaaagaatctttcttttgcgtgaacaatctaaaatagcttggtatttagacaagaaatccataccaaaatcacatcaaattgccccataggcaacactaataagtttccagacaacttgtgtctctcgaacataatacaaactgacctacaaatggtggatacttcaccgtgtcctcccatatgtacacttaaatgcaacacagggctaaaattttccaaagacaaacccagcacactagcaaacatcaatgatataaaagaatacaatgcaccagtatcaaacaacacatgagccaagattgtgagataagaaccatatcatcaacaactccctagtctacactgctctgtatat

SEQ ID NO: 322581 - DNA, 993 bp, Cannabis indica
tacgcaatcataaaaaaaaaataagaagtatttctgaatgttaaaatagatagatagtctactataatgaccatttaagagagtctactacaaaattttcttacaattaacaaaaatatttgggatataaatatctaaaatttaagtttgtaacagatataaatttagaatttttgtaaaattaattgtttagttttgacaatattaaaacaaaagttctaaggatcatttttttttttatatttaagttataattataatgaatatttacatataaaaaaaactactatataaggttagaatagtaattttctttggcattatccctaaattataagtgataatattctttttgtgaatcacaagtgacacttcgatttttgactctacttttttaattaattttttagtggctctgttagaaatttttgtttttactctgataccatattagaattgtgagattcatgagtaggtatgcacacgggacggagaattggcggggagtgctcttctcgtccccattcccgttaaaaattttaattcccatttccgctaaggattttaatccccatccacccttatttcatatcgagaatggggcggggaggggcgggaaattccctaatagaaaaataaaatttataaaaaaatttttaatataaaaaatattaaaatacataaaattaaaatattatacattaattattattcactaaacttattattatccaaaacacaacttaaaattcataaaaaaatactaatatactaaaaatacaaacataaattataaaatattactataaacataagataaaatactaaacggatccctatcggagtggggagtgtgatccccgtccccgccctgtttaacaatccgggacaaaagttatctccctccctgcccagttctacatttagacgagaaatttccgccccattaggggcgggtcctcgcggggccatccccgtgtggaaaatgtgcat

SEQ ID NO: 322582 - DNA, 2343 bp, Cannabis indica
accatctgtcatgtaattctattttctcaaagagatttattcttccttttttgcagttctaaatatactgtatttgtatcaattgatcggagtaaaatcataaaaaaattgtaaatgtttgaaaattattaatcattattggttattgatcttgaatatagattattgaaatgttttgaaagttattaatgctattggttattaatcttgaatacatgttattaaaagagtttgaaagttaataattgttattagttatagatcttgaacatatatttttgataaacttaataagaaagggtggaagtttaatttttataaaataatagaacaaaaataaaaatatcatggttacaataaacatataatcattaggtagtcaccaaatatatataaaaaatatatatttatataaaactacaaattagtatccaatttgggttaacactagtccactaccaagtagagagaatgagtttaatgttggattataagtgatgacaatcttttaacctcatgtagtatttttgtgttaagaaacgttagtattaattgtagagtataattgtattattttatttaatttaataaatttaatcatatataataataaatttattgtttgggtacattacttttaaaaatttctacaatacaccttaaaaaagatatatttatacacatttatctgttttggtatccaaaattattttttagtcaatttttttttctcatggtcatgtatgttgtagttatttaagatatcctgcaaaattttaagaaattcaaaaaaaaattacacaccaaaaatagggtttaaatagtatgttacacccgtgacttttattttatacgcatataaaatatattatttgaacactggtttctatattgtaaattatttcaaattttttaaaattttgtagaatattttaaataactataacatacacgaatataaaaaattagattaattttttttctaaatactaaaacaagtagaaggtacataaatacatctatctttttaaaggagtgcatcgtagaattaccccaaactttttactcatattattatttgttctacaagtatatatatgtaaagggaaaacttacaaaaaaaaaatactagaatttgggttaacttttacaaaaatactatcatacagaatttcttttcaaaaatactgttataaaacaatagtataacacaaaacagaacaactagaaataacagtggaacaactaaaaaataaccgtagaacaacagtgaaaacttaatacaatacacaatatttttgaaaaaaaaaaaaattcgcctcacagtgtaaaagtaaaaaaattaaaaatttcagtatgtagtgtaattattgctatctaaagttcactttcaacttgtactcaaataaaaaaacaaaaagtccactttcaacctataaaatggactcacgcaatcattcccaaatgctactgggctaagcctataggcccaaaagctagtgatcaaaaaaggccatgatagactcaaatgtcaaactaaaacaattgggccaagtgaaactagcttctcccactaaccgtatgtatttactatttaggaagtttttcaattctataccttatttaacttttaataacaaaaatgcttttaacaaatttatttataaaaatatcagtgccacctcaataaaaatagagaattttaaaataattcttatcgaaggtaagaaaataaatggaaactcccttcttgaaagttttcaattttcatggattttagaaaaagcaaccttttcggttaagttacatataataataataataaaattattttcaataatatggaaaaaattattaaggttatgataaataaggtataaaaagtaaatgtcactaaatatgacattatttaaccaatcaaattaaaaatatggttaaaaaaaaccttataaaacattaagaaaagaatttgaatttaaaattcataaaaaataaaaatttaattgaattattatacaaaaatattaaaatttcctttatatttattttaaaaaaataaaaataaaacaaatgaaactacagtgatcgccggagttttcactcgtgccggaaaagtcaccggagtttgctgccggcattgaaaaagtcatcggagtagctgtcggtgccgaaaaagtcgtcggagttaccgctggcactagaaaaattgtcagaattagcattgtcgccgaaaaaatcacaggaaaaatcaccaagaaattggtttcttgatgaagaaatcggtttcttgatgatttttttggtgattttaccgacgatcatgccaattccgacgactattct

SEQ ID NO: 322583 - DNA, 509 bp, Cannabis indica
taaccgatccaatccgcattattgcggattggattggattggatttaaactattatgcggacggattggatccaaaatatgaaatccgtacttagtgcggattgaatgttgttgaccaaaaaagtgtgaattggatcggatgaacacccctattcaatctaatacaatcattttcacaatttattttgctgttaatgaaaagataattgatgacaatccattaatttttaattataaaaataaaagtagaatttttatttttataaattttattttttaaaaataaaaatgtgttttgtaactatttttgtttttcaattttaaaatcaaaaaacaaaaggggaaatttgtaaaatttatttttattttttgtgattttattttaagtctggtctggatctggggctaggtttgggactaggttgggtgctaggttcagcaccagggccagggccgagtttgagtctgggtccgatactgatcggagtccaaaacattaattaaaaaaa

SEQ ID NO: 322584 - DNA, 1209 bp, Cannabis indica
tgcactaatgaatcatgggacattattttttgaagcatataatcacaattaccttccattgtattgacatcactataattgtaaataactatatgttctgaatttaacagaaattgtatatattaaactgttaacgcagatttttgttaaccaaatttgagtctgaatagtgataaacttgcacaaaaagaaagaacacgaaggtttttttacgtggctttgcagttaaaattctacattgttcacgagtcaatcttattagctttctgatactgtttttgggcctttcttctcttgtgaatttttcatcacatattttagtctaacttgcctctatttataattacatagtcaggaagttaattacagagttgactgtaatctttacaacaattatcacctgaaatcgtggggtttgattacatatcacgtaatataaatgcggttaatatttgaatattacttagctgtgattagtccgcttttattgggtcaagataatcatgtattaaacacattttaaatcataacgttctggtatgtctcgacaggaacccaataccaatgaccttgatagcgagctggagcttttcccctatctctccgaggttgataatgtacgcctcgtcgcttcttcgcttgaaggtacaacatttcattttgaccatcccagttcttattacaaggagtacttcagcagttaacgtcatctgaatgtcagcttctgctcgagagaactgactcatcaagactaccgatctcactaaaaaatatctgaagttgattggtgaaagtactaggagcgtgccttcctatagtgagataagcacctcgctattagtttcttgggttcactcgaccgttgtacttagtttgtatactgtatattatacgctaagtgttttcacagctattatgcatcacttacgtgtatccaggtgtaacgaggttgatgtctcgccttgtgcgtctaatgccatatggtttctcattaatacatgaggtaacagtttgtatatctttatctcccataagacctcatagtttgcaagttgaaaatatactatgtcaacgcccacatttattgagttattccattaaatgtaatcaccgttacacgcattgatccatattctacttaatttgacacgtgtcctccaatgaaatggtagtaaaattttgggtataagatgttggaattattttacc

SEQ ID NO: 322585 - DNA, 1404 bp, Cannabis indica
tgaaagttttttcttcttaaatttttagataataaacaacctcattcttcttgaaaagacattcaagaatttaaattttcatttaacaaagatatatatgaaaccaatgaatatctaatatgattttatccaaaataggagttgatgttttattccaaaaaagtcaaatccaaacaaatattgttgtcatttagtgtaaattaattttcaattaaatacaaatagttactgtggcaaattttatcaattcaattgataataaacaaaaaaaaaaaaaatggatttggatagaatttgccctacttcttgttgtcctacaaatatagtcatgacttttagctttaggttttggtccacatatactaaattattaataattttttaaaaataaataataaaaattcgtatataaaaattatcattaacttaattttagtcacagcaaatagtatgcaaatagtattcttatggctagaaacacatttggtgataataaattgtgatttatatgactaatattgttagccacaaaattgtaaacaataacataaaaatgaagatttatacttagttataattttttccactttttatcataaattttgttgtgactattttttacaatgttaggtatgtaatcttaattaagtaatactattaagaatagcatcttttgagttaaagatgataaataaaaaatttattacctcgtgataaagttaaaaagtactcgtgcttaataacaatgctcttattattcagttacaccaataacattatatcttagactgtttttcttttttttactttttcttttcttaaaaatttttatttttatgatttttttggcaaagtttaccaaaatattttgtgagaaaaattcaaaataaaaataaaaactatagaagaaaaaagataatttaagataactaattaccttataatgttagtccattttttttttcttataaaataattttgaaaaagaaaaactatatcttttacaaaaattgtaaaaatctataaaatatgaaaaaaaaaaattaattttctttattattttttttacggtaccaattcttggtgtaggtggttggtaagacccacacttactcacttatctaatacttttttaaatttttgttgcttagtttgttttgacataggtaggcaagatcacacgaaatatcttggaaattgtaactattttttaagataaaataatgtttttttttaaaattaactagaaagggtcaggtacatccccatcctattatctgttgggctaattaagatttttgattcctgaactttgacatgtaccaaattatgtcccctgaacttttaaggtcgttaaaaatgtcccttgaactattgagattgttaaatttaaggacttttgtc

SEQ ID NO: 322586 - DNA, 802 bp, Cannabis indica
ctaatctctcatcttgattaatcgtcgtatattcttttttattttctgagttatttacttttaaattacaaaattattattttaccaaatagaatcataagtatagtttagtagtacttaatccaattccctgtggttcgacctcacttgcgtgagatactacttgattgcgtatacttgcgtagtaaccataaaattcgtaacaataaatgatttcaatattgaattcttgatcgatcattcacatagttattaaattatgaagttttttttaatggattttttttttgtggctttggtttgcaatttttattttgagttgttactttatttagtaacaattttgtctttaatttgtagatactatcagtagtttgaaaaacgcaatttttggtactagattcttgttcgatcttatgttatttatgaatgaatttttttttttcatttaatagagatttttttggtgagaataaattcgattagtaatttgattttttatagtcacagataagtaaaagtttccatttggttgagttacacatgttgatccaagaattcaatccaataaaatgtgttatagtgagatttttctcacctagaaactcgagaccggactcctattaaaaagacacgtgtactcactttcctcgaggaaagctgagatgtcgatgaatatgaccgagtctaatcgcattcgtatgactcacgttatgtaggaccaaggaacggttctaaactcgcatacatcaggatatatatatgcgagtatcaccgtaatcctcctgcaaaaacatagaga

SEQ ID NO: 322587 - DNA, 797 bp, Cannabis indica
agagagagagagagacttctgtgaaattgtaaaaggaagatctagacctagacatagaccagaccctcactcagacccgtgcttggtcccaaatccagactcaggaccctgacctgaacctcagagtcagaccccaacccaaacacggacactgaaccctgacactacctggactataacctagaatctagacccaaacttggacccgtctagggccatagacctgaacccaaacctagccccgacccaagacccagaccctagggtttggaccatagaccccaaactcagaacttagatgaacttggacccaaaccctagactcagacctcagatggacctcaaacccaatctcgaaccttgacccaaaccctagaccttagacctaaacttggatttagacttggaccccaaatcctgtaacgtccccacttcaagcctctattgggcccttacacccatggaatcatgactcttatacacgaatacgtcactctggatgcttcatggaacgataactgaccctaccgactaacacaagtgtttctagtgtgttttgtcctcactcacacgcttcttgggaaaacttcccaagaggtcacccatcctgaaattaccctaggtcaagcatgtttaactatggagttcttttgtgatgggctaccaaaatccaggatgcaccttgttgatataggtagtaccaatcaatccattttaagccctcttcaactgtgcagtcccatacctacacaatcttagaatcatcccacttgaccttccccaggcggtgtgagatt

SEQ ID NO: 322588 - DNA, 1021 bp, Cannabis indica
aattattattgagattatttcacaaatatacaaaaaataataaaaaagaattataaaaatacgattgtatagaattttaaatattttttataattttatttattgaaaatataattttttttttgatgtatttttttagtgaaaacggttagaattttgtgtatatatacgaataatcttcactctttcatttagttatatatgtttagatcatcgaccgggggtatgaagtaaaataaagtacacgactaaatgaaaaataatttttctcaaaaaaaaaaaattaaaataattaaataagtttatatgtttaccaaaaaaatatatgatatgaaaaattattatgaaatgaaatatcggtagaatattgaattttagtgggttataagaaaaaaaaatataaatttaggtccttaattagaaaaatagggtatttttaaaattaataaaatagttatatgtatttttttaaaaaaaaagattttttttaggtcccttaaaatagatgggttccaaatacaaacctataatccacctatgcttagggcaatatttaatatttatactataaattaattaaattaaataataattattacataccctttttgttacattatgagaaatagcgtatgtttttttttggaaagtcatggatttgggtgtgaaaagaagtaattacacaatttaatacatttatttaattatgtaattaaactttaattgtttcgtagagataattgaagagttctagttacactctttaattatcataattttttatgaaaattaagtgtaattattaaaaaaaaaatattttaaatatgagcattgctattaggcaccagtggtgcttagtatcttctcgacatatcgcgttgcaattagctagtgatattctttaaaaactattatattaaattatatgggacccgatacttagttggaccaataacgatattgacacgtaacagggtgttaggcatcactaataccctttaacatttctctttaaatatta

SEQ ID NO: 322589 - DNA, 1910 bp, Cannabis indica
actaaaacctagatgaacactctatctcctcgtaaagatgaaattatgaaaaatgaaattagaagaggtaaaaatatttgactgctctctaatcctatttatagaacataaaaaccttagagacaaccacaaacacatttctacagctgtacaaaacttttctaaattaaatcttgatttgcagcgacaaaatagcactcttcagtggcagaccaggcggaatcgggaaactttccaaataagtctaagatcacaatttagactttaattcatgccgtataaagattatatgatctgctatattcataccaaaaccaaaaaaaaaaaaataaaaaactagcaaaaggaaaagtcaattctttaaaaaataaaccaattaagcaaactttccataaagagaattccttcccttatatgaaaactttcctaaagaaaaaggttagttgtgaaaccaaacatacacaagaaaatactatttaattcacaataaattaaataatattttgatacttaaattgtcaaaaaaatgactttacagaatatgataaaaggattatgttactgtaaaagttatatttcaaggtattattgagagcactcccaatatagtctctactttattctttaaaatacatcaccaaaacttcactttatctattttacaccatatttttacattataccatacaataacttctctattttttctttatattatttatataatattaatttatatttattttattaattaaagtaaatcaaaaatttgaaaaaaaataataataataataataaaatctatagtaagatagaaatagataaaaatataagagagagggcaaaataatattaaaatattaggccttgtttggctagcttctatagttcttttttagcttttaaaattaaaaaaagtctttctaagagtgtttggataaaaaataaaaagtttttttattaatttaaaagtctttttggaagaagttaggagtcttagcttcttccaaaacaaaacaaaaaaatatgttgtccctaaattggtgtgtcttttctgtctccaccaattattttaggacacatcatctaaacctattttacatgtattaatttagtttagagtttattaaggaattattatatattaaataattataaatgatgtgtactaaagtagttagtgagatagagggcacacctggggacaacaaatttcatttccacccaaaattttttttgagaaactatttttaaaattaaaataattcacatgattcctaatttactcacaaataatcttttttaatgatatccaactttgaaaagtacttttcattaaaaaaaagatacatcttcaatacttatttaaacggtaaaaataaatcaaagtttatacttattttataattctagctataagtaaaagtaaaaacttagccaaacaagatctaaatgaagaagtattatactcttctctacatgtagctatgcttttattttattttatttttatttttaatataaagaaattgatggagtaggtattcaaacccttctttatattatttttattttttgataagtacaagccatttagagatcctgtttgggagtgctctaataagttgtatatattataaaggacacaattttatactttaaaaatttcaagaaataaaattactgttaattatttaaaattttatttatgctaatgaataaggaataatattttttttttagctaaagcgaaatataataatgttaggtggtttttgattgggaagaatgaaaatataggaatgtgaatgaaaatgagaatggaatggaataaaatttaaaatttataaaaaaaattgataaaaaaattatttaatttttcttcattatgcattggaatggtctttcct

SEQ ID NO: 322590 - DNA, 1082 bp, Cannabis indica
aaagttcaagtgggcatgatttggtacatgtagaaagttacggaaaaaaaaatcctaattaacaattttttttaattttataaacataataatattatatatattcaacttaaagtaataatttaaataaaaaatataaaccatattttttatttgttaaaaaatttaaaagatttttttttcattttacatattttgataaaaattgaataatatacaaatatgtattgtattaaagactaattttgtcaatcacacatagtaaataaataatattaaacccacatataaaaatatataatacaagagagaaacaatagtgaaaaatatataacttataaatttaatattcacaatagtctcatataattaaaagtttatatacaaaaaaatatccttaaggagtattattattctaatagaaattttatattaataagttaatatagttttaattacccacaaaaagaataatgtaacctatagtagaagaaatagcctataatataaaaattatattaatattttaaggaaaaaaaatatatagaaaataattaagggattattttttatatatttatataaatatattaataaatagagatatattctttaaagaaaaatataactaatcggacgatattaaatttatcaattataaatataaataataaataatactaattttgagacaaactaaagacaaataataaaaatttatatataacctaaaattataaactcactatgatttccaaaccatgtgagatttttttaaaagaactaaaagtttaaattttttaagaaaatagaaaatgaaatgaaaaaattagaaaaatttacaaattaaaaaacatagattattagaagggaagaatgtcacatgacctccttatgattctcttttatagatttatatagatatagatagatagattattttagctattatgaaaagtattattcttatttaaagcactataatattttaatcacactacaagaaaggggaccttttatcccacttttttagttaacaaaaataaaaaaaatgggataaaagatatattgagactttttat

SEQ ID NO: 322591 - DNA, 865 bp, Cannabis indica
aaataattttctgtttttaaaaataaaaaacagttttttagttatgatgtcaaacatgcactgtgtttttttttttaaaatagttgattccgagcccaaaaaaaaaatatatataattagttaaaaaaattatcatgttatatattatatgtaatgttttcttagatgtacatatcattactcaaataataatcgttatgaggttgctaagtgtaaaatagtactcctgaactaaagtggcctaaccttattagattagcgagctagatttatgttcggatatgaaactgtagtatgaatttactggaaggttgaattactatcttgcttgattgatattaaactttgaaattgtacacgtcaaaaaatattgtcccacatagattaataacagtcattactcaaaaaatacaaataacactatcatataaaatatatgttaataacaataataaaaaaaaactctaagctcgatggaccataaatataatgctatgtttagtaggatcagatggaaatttaaagggaagggatagataaatggaattagtctccctccgaatcctctattttcaatctttctaatggcacgtttactatacagtaatcagaatcggaataaattaatggagaaatgtaatggaataaatgaaaataatcggaatcaatatttgtaatatgttgtttactaaaaatttttagaaatgaaatagttgtgatttatcttgtttactttattaggaaacgtaatcggaatgcttaaattgactaaattgcccttttgagttaaattatattatatggtagttattttgcaagacatattttaaaggacaaaattgtcattatatatttaatattaaaa

SEQ ID NO: 322592 - DNA, 1646 bp, Cannabis indica
attatgtttatttttctttttttacaaaaattatatttatgttttaaaaactaaggtgacatttggttggaggtaatggaatgaaatggaaagaaaacaatttttattctatttttttgtttgattacatattaaactattaaaatgtcattccactattccattttaaaattaaaaaatatatatatatcattctaatgcatggtgataatttttttatgttttttaaattttatttaatttcattcctaaatatattcttatttctttttcctatgattttattaaagtgatatgttatttatagtttataccataacgatgaaaatattaaataaaataataacataaaaatattgtaattaaaggaaatttataattaattattatcataaagaaaacaattaataaaaaaaaatttgggaatgattactagaatttgatacactatttatggtctatataacgatgaaaatattaaataaaataataatatcaaaatattgtaatatgaaaggaaatttataattaattattatcattaagaaaataactaataaaagattttttggattttaaaaaaaataaaagattttttgggaataattactggaatgatttagagtcatattcttatacttaactatattttcggactttttttttgaatttatacagaagaggaatgtttattcaatcaataataaggcaatttgtttaggaggaaataatatgagatttattattcatgattttgaatgtacaaaaatgagaaattaaagcttatatataattagtgtaaaaattaaagaaatgatcctgattatattattttcaaaaaaaggcaatcgtgatttgcttttactttgtttgaaaaagtagaaaggagacataaatgtgaaaagattccgttggccttggggctaatgcccaccattatcgctctctgttccctaaccttacttactattctctctttccacctttaattgtcagtatcccatctctctcatctcgttccaagagaaaatctatccttgggatttcgtggtccgtccccataaattttccatattaattttcagtctatttctatggtccactccaacaacttttctactagggtttcttttatatatcttctagtatttacccttttctctatataagcactcttccacctctaccctcttcatctctctctactcatttatgcctatcgatctcaatatattttcataaaagatctctttctctctatctctctttggttgatactacagctaatattttgtttttctaattttcattaatcttacacatggagctcctttcggttcaaactaagggaggagtgaaaggcactgacacggctgctggttcatggatgcctctgggctgcgcaggataagtcaagcttgtgcgcagcttaagggtttgcatgactcaggagacgtgtttgccttctccattaaaccttacttggattgaagggagctcctgtactctacagcttttattaattaaactctctcattcatatttatatgtatatatactattattactattagtactaatgaacttattttagtcttgattttttttcatacgtttttgtgggttttgttttgttttcttttttt

SEQ ID NO: 322593 - DNA, 721 bp, Cannabis indica
tgaattcagaatgcatgttatatttcatatttggaatttcatatttttgcatgttttgtgcccagcaacattggaacgcggtgtttggctattagaatcacatcttagtatttttagtatagcggggtaatatagttagacattgagaatatcggggatagtcgggattttagaattgaccaaaatacccctaagtgattttatgactttttggctaagtgaggggcaaagtggtctttttgccctaagttcctttgtcttttagtgagtagtaattaattctttttaatctgattttttttattaattctattgctgaaactaattaaataaagataagctttattttcattttactaaaattaaaagaaaaacacaaaattacttttctccctctccaagctctctctctttcgaacccctctagagcccagggtttgatttttcttcaccaattctagtgattttccaacaagctttaagtgatttcaagctcaagtgagttcctagcactactctttttaatttcttgggttttaagttaaggaattatccatgatttgagtatttaagtgttgtaattgctgttagtgttcgaagtggttttatgaagttaaattaagattattcatgttgttttgaggtagatttaagggttgtagtgttagttgagcaagctttgagttttagaactcaagcttggctctttaatggtgaattt

SEQ ID NO: 322594 - DNA, 658 bp, Cannabis indica
agtataccatataaattttccattaatatttgtatcactaaattttttaattaaagatttataccacttttttacctaaaataaattttatttacaaaaatcactatctaatttgaataataacattcattaatttttaatattaaatgaaatacaatttttctcgtcactcgtacaatttacatgtgaattattgtaatctttttatgaacatgctatttttgagtccaaacgattaatagtgttgcaaagaaaaaaaaacttaaaaagtggcatatttacccacaaactcgttggttgggtattgtttctctgaaaaagtttgttggaatggtatggcctgaagcctgaggccgtcagggtagggtgggctggagaacgcattcaaagtcaggcatccgacgcatgcagctacgaggttgacaacaagtgtgggaattaatggtaggtatgtagttagtttggttgggcgtgacagtttcatgacttcaaaaattcaattacactctttagtttgggtaagatacacatctgtattgataatttgaggaaattacactctataccctttttatattgtcctcttttacttttaccttcttttttaaaatctatcatttttacctctttttttaaacattgtaccaattttgcccct

SEQ ID NO: 322595 - DNA, 557 bp, Cannabis indica
aattcaacaataacagtataaataattattaaaatagctataaataattttccataactaaacatgattaactgctaatttccaaattaaactaagcggtctttacaatgatgaaatccagaagacactgttcgagatggggagcggcaaggctcctggtccagatggaatgtcggctcttttctacaaacactattgggaggttgtagggaatgacttctgtgaagctattcaggatttctttatctcatgtcgtatgcataagggatttaatgacacgaatatagtccttattcctaagattcagaacccaaagagaacaaaccattttagacccatatccctccgcaatgttacttataaagtcatttcaaagatcctcgcgaataaacttaagcctatcctgcctagattgatttgcccaacccaagcggcttttttatgcctggtagaagcattcaagataataatgtcatagttaaaaaaatcatccatacctttagtcgcaagaagggcagagaaggttccttttgttggatattattttaccaggatct

SEQ ID NO: 322596 - DNA, 1141 bp, Cannabis indica
agatatattgtctacaacattatggtatgcaaaaatctcgtgagacactatggaagagctaattctaagcctaattgcatgattaagctggacttaaaaaaggtatatgatacaatagaatgagagtttattgaagtactacaagattttacgtttgtaataatttgtataaagactcttaggtttgacctaatgatatattttgaagctaaaagagatttgcggcaagaagatccaatgtcctctcttctctttattcttggcatagagtacttattgagaatcatggtcagagttcgggtgagaaaatatttcaagtatcatgagagatgcagaagccttaaacttattcatttatattttgcagatatatggtgtgcttctgttttgtcatggtaatttcaaatccatatacaggctattattgttagggtttatgccttgaaaaacttgtaaagatatttttgattataaataagagttgaatattttgatatatggatgaatgttaatttattaatatttaatattgaataatttatacataaatatcgaaaaaaattttattcatacataaagctgtgacttgtattatagggagaatcaagattatttaaccataaataaaatagtcaacaacatattaaagtttaggaatctttaatcaaagttgctagtgcggttcactgatacctgttatttggtgcaagtaatctcgattcagattactaatgtagcataacatctaagtgaaggtgttgtgtatataataaatattatatattgcaatgtccgatatgtaattaaaccatctttatcaaatatgttgtttattatagatacctaattcatatcataataatgattaatggtagatcgaccaaaatcctaagtaatcacgaatttttattcatgttgtttacacacataaatgctaaatctattaactattaatcactaacaatatgggctataacacaacaaaaaataaagaattatttaaaaaaaaataaaaaaacaacaaaaaattataaaatatggttgtacggaattttaaatattttttacggcttttaagattttatttacataaaatacggtcttttgatgtatttttatattgtactcttgttattttatt

SEQ ID NO: 322597 - DNA, 770 bp, Cannabis indica
agagctgcatatttgattaaaatgtatatatatagaagtctttgccctgaattttctactatttattggcaagtcaaagtgtggaatcgattgtctataccaaagtataaattcatcttcttgcttgtggtgttagataaattgtggttgaagtctagatttttttaaatacaatgcttgcgatgatgagtgacaaaacatttatatcgacatgcttacttgattgacattttttttgtttaaaggattgctggacaacttaaatattatcatcaattaattatattatctttggtttctagactttgcttggttttaattaacaaataatacagctatatattattatattattacctaacaaaaacgtgaaccatgcaaaatattaattattgttattagtacgttacgtggctatatagccagtatgtatggttggatctcatcaatattatatatccaataattatttgaacattaattaataaataaatgaagattattatttacatttctgaatttatcatcctataatagttaagcaagtcaagaacatagtaacaaaattaatatactaaacactattagctagttcactattatagaaaaattatgaagaattgtgaggataatagtgatcttcatgatggtgcaggggacctatagtcgttgggggaaattgaaggtttgttgtggaggactacagtgtgaaggtccgataattggtgagagtcgaaaatgtgtgcctattcctggttgtaggcccgacg

SEQ ID NO: 322598 - DNA, 702 bp, Cannabis indica
ctcctttagccttcacggagggtccttccttcgtgatatgtttgtcctcaaggacagtctcaaaaaccatcccttgttgggacacttaagcaggaaccacaacttgggttccttctacgagcacttctccttcaaggccaacaggcgcaccttcaattgcttccacaatgcctaggtgaaaatcctggttcaagtccatctctatgaacacaaacatgaagagaagccaaaatttttgaagcaatcagctaataacccagaataaaaacttaccagagttgcattccaatcgataaacccctgtgatgtatatacatgcatacacctatgagccctaaatggccaaaaaaaactactcagacagttctagcctccctttcaatgcaaggagattctcagatagattcatcccaaggctaaaaaaaatttcatacaacttacttaactattcaacatgtaaatagtcctaaccctagcttgaatgagaaatttgtatcctagacaagaaataataaaaagttcaaccaggagttcaagtacttacgtgttgagtgaagagaagatgggaactattgtagaatattaccaggggccttcaaacccagtcgattaaacgatcacaattggtctagagtcgaaacctttgtctggtatggggttcattctgtaacaccctaactaacataggcgtattacgtgatt

SEQ ID NO: 322599 - DNA, 1083 bp, Cannabis indica
aaatataccccttaaaaatctataaacaaaaaatacttacatgttctaataatggcaattttatcaaattaaagcattctgattacttttcctagttatgtaaacaaaataatacgattctgcttttccttccggacagtttagtaaacatcataataaaatattgtttccgattattttctattttaaaccgatacatttctctcattcattattctgattccaattgcagtttagaaaatgcgccataagtttaatactctataaaaatataatacttacaaatttattgcaactaaatatttaaaataaataaaagtacaatattacttactcataaaagaacaataataagattagatcgatttttaattcgattttgaggttgacattcaataaccaatccaatctaattagagtctaacttctaatatccaaaccaattcaattgttaatagagatccaattttttgtaattggattttattggatcagttcggttaagttaaattggattggatcttatccacccatatttactagctagtgattgatattatagatatacttacctaatatactgatctattggaattttatgaactacaagaaaattggactaattcggacccccaatctcagggagcccgtgtgtgaccgttgagattgactctaaaattaaaatgaaaaagtttgaagacactaatctcggcggtacacttgtagcctgtcatattacagttatttcccactaaaaatggacaaatctcgatgggcccattatggactgccgagatagctcccgtccaaccccttactatgtacattaaggtgaaacatcccactaattaatgttgacagtcctagatgagtctgtcgacatagccccactacaaaaaataacaaaatcattataatttaaaaaaaaaaaaaagacaagcccagcccatgagtaattgaaaccctaccgttatctcttttccttcctcactcactcgttatctcactatctctcctctctctctctttcttgaggacaaaggacgagcactgttagtgtaatgaccgctctagtaatgtgga

SEQ ID NO: 322600 - DNA, 1356 bp, Cannabis indica
cttgctcaagcaagtatgccacttaaatattggtgtgatgcctttctttacagccgtgtatctcattaacagactgcctacaccagtgttaggcaatatgtcaccaactgagattttattctccaaaaaacctgactacaagcatctaaaaacctttggtgtagcttgctacccgtgtcttagaccctaccagtcacacaagtttcagtaccactctaccaaatgtgtaaatttagggtatagtgagaactttaagggatataaatgtctaagtgttactggcagggtttacatctcaagaaatgtaattttcaatgagagtgaattcccttttaaacacggctttctcaacactttcaacacagaaaaaccagtaagtgtccagcttccttcgtggtctgtgtctctaaatgtccccacaaccaatcactctcagccatcctcacaccacaacactcctacccaagttgatagagcacctgactttaattctaatgaggcattttcaggtaatattaattctcaacagaatgatcatattgaccatgacagcagctatgctctcgaaggcattgcaattcagaatgaacactctgtaactcgaaatcaagatcaggaatctgataatcagcaaagcacagatcaaaatgttgaaattcccactgctcctctaattcctacacatcctatggtaacaagggccaaggctggaattttcaagcctaaagtttacatgggaaaagctgctgctgtgcatacaaacaaactgcccagttctcttgctgaagcattagctcatcatggctggaactgtgcaatgggagaagaagtgtatgcattgaaaaagaacaaaacctgggttcttgttccaaggctgcctgaaatgaacattgtgggaaacaagtgggtctacagaatcaagttaaatcctgatggttcacaccaaaggttcaaagctagactcgttgctaaggggttcagtcaaaggcctggtatagattatggggagactttcagcccagttgtaaaggcttgcacagttagaattatattgacaatggctgttgcaaaatcctgggaagttagacaacttgacataaataatgcttttctaaatggaagtctaacagaggatgtatttatggtgcagccagctggttttgaagacaaagactatccaaatcatgtttgcaaattatccaagtctttatacggcctaagacaagccccaagggcttggtttgacaagctaaagcaaactttgcttgagtggaaattcattaactccagagccgactcttctctcttcttttataaaaatgctactgacattgtgtttgttctcatctatgtaga

SEQ ID NO: 322601 - DNA, 1533 bp, Cannabis indica
aaatggagttgttgagaggaagaatcaaactttgcaagagatgacaagagtgatgttaaatagcaagaagctgacaaaacatttgtgggcagaggctataaacacagctttctatacaataatctgagtgtttattcgtccagatacttctaaaacatcttataaaatctgaaaaggtaagcatcttatgcaaaaggggacaaaggattcatactctctttagaatttcttcttctctaaggaaaacctaagagggagcactataacaagaatctagggttctttaacttgtaagacctcattgtaatacatcaaagccttttggccaaatacatagactcgtggactaggtttaattaatacttgaaccacgtaaaaatcttaatgtccattacttatttacttatttaatttcttaagctctcacttaatcaatttctaaaattctcagtaaacacatagtaataatttaacacgagttgctatcatattgcatctaaattaggcattttgattaatgggttccaagaatgatatataaataatgaatatttgcatcatgagtatttaaaattttgagtttataaacgatatatatataataatttttttagcagtataagtacttaatgttagtaaaattcttattttcttctagttctattagttcagacttcgttagtgtcttaaatttataactagacttaatttttgaattttttaaaagaagacttaaaagtaactaatattacacgtttctgtccagacccaataaattagaatctaggtcttatatttgtcctgtttaagccactaatataatctctaatggtgaaattgaatgaaaattacagttttactaaggcatatttgcgatgaaaccccttaacatttataattgttacatatatgacctcaattacaaaaagtagcgataaaagtacattattttacgattttgttgcggacgtaccttttttgactattaagtgtcaacttaaaaacatgtggagatatattattagatcacgtatatcgccacgtgtttctgagttggcacctaacgggcttagtaggcacttaataactaaaaaaaatatacaactgcaataaaatcttaagatgtagtacttttgtcgtattttcttttattagagtcatacgtgtaacaattacaaataatagttttgccgcaaataacatttttattaacagtgagtacatttattgtaaggctaattagtaatttttccccccgaactttaacatgtactaaatcctgccccctgaactttttttgctgttaaaaattccccttgaactattgagattgttagatttaaggacttttgtctaattttagtaaaaaaattctaacatggatgaaggttcaggaggcatgatttagtacatatcaaagtttaaggggacatgatttggtagatatcaaagtttaaggagcataatttagtacataaacaatcattgaaatagtaaaattggatgaaattagacaaaagtccttaaatttaa

SEQ ID NO: 322602 - DNA, 666 bp, Cannabis indica
tcttgttaaatatttaaattaaattttaatttaattctaaaaaaaaaagaatttttatctattaataacctgttattacaaataaaaaattataatcattatagttacaataaaaatataattattgagtagtcacatcatatatatatatgaaagacatcaattttgttcctactagtagagatgtctttatttttagaatttagagaaattaaaactcattttttaatatggttgtgtatattataattataacaggaattctatctgtttttgaaaatttagaataatttatattgttgaaaacaaagatgaaacatttaactatatgtgtgtacaaaatctttaaaccttatttttgatattgtaaattatttaaaatttaaaaaaaaaatattaagagatacctactataattataatataaatcgttatacaaaaaattaaattataatttcttgaaatgccaaacacataaatattcctatcgataatgataattttttgagaagaatgaccaataagaataaagagatgcagagaaaatagagagattagggtttcattcaattgtaaagtcaaaagtaaagtaatataattaataagaaagccttatatagacacctaacataatagactaaaataattctaaataattatttaaca

SEQ ID NO: 322603 - DNA, 1250 bp, Cannabis indica
atcagtatattctttttaaggaagtacattgtagaatcacctaaaagaatatataaaattattctttatactacattatacttcgaaattttaagtagcacatgtaatcctttcaaaagaataacgtagatgactttatattttttaataaaaatataaaactatgattgcaaaaactggttagtgatcaaatttgatatgattctaccaaaattattgaattttttttaataaaagacaaccaaattaatagagtaatggcgatacaaacaaaagtaatatggtaacaaagataagttattagtaatataatatgttaaaataaaaattgtagttatagatatacaaaacaattgcaaagtacattttcttccaaaattatattaaaagaaaagaaatagtcttaagaagattccatcggatcctatattgtgaaattatagaacttttgccattcacctttcttttgatttggaaggattaaaaattataagacccatgtgctatttcttttcatccaccatcctcattagtatcaaatattttgagttgtctttcgaaacataaaacttttacaagcatgttcgtattgaatgaatggcatgtgctgggaaaaagaatgggcaaagtttaatttggggatatgccttagctaaaaacaaagaaggaaatattgtgaaaagtagaaaatatatatttattttggagtgttgggcccacttttgatatatacacgtctctttctcgaatcggcttcaagtcagcgagcgtcacttcacgccgcaccgattagtctctacatatgtcgttttttgtttgccaaagacgtcaaacatcgaggacatgtggcatcatttcttacgttcactattaattcacaaaactcaaactttgcattttgttttttcttgccggacaatcacacaagaatcaagtatgagaatatgaagttagccacaaaagaaagagaaaagtatgacaatgtcgtgtgtctttttcttaggggagagtgactcgaaacaattatttagtgtacggtgaaggaccccttccatgaagtccaatgtgctgtgatgttgtctctctaataatttgtcgaaaacttttgtaatccacattaataatatgatctttgaaacatactaaaatagtgaaacacacttataattacaagatatgacacatgggcatcatgaaaagaaaaattaaataaataatacccaagatctatttgtatataacatagaaca

SEQ ID NO: 322604 - DNA, 2792 bp, Cannabis indica
attttcaagtaataagtctgccacattagtaatgttggtgttgaggctcccaattggtttcgggcaaaaacctttacgatgcgaatccagggcccagatcttagtattctcaccatttgtaaccagcttacaggcaccttttttcaagatagaatttgccttaatgacacttttccaaaaccaggaatcagaatttttatacttacaattcagaaagtcttcccctcttaggtatttgttaaaactctgcaacacaacgattgacttccagttagcatattccaaccccatttggcaagaaaggcctgatcatttctttggttttccggaatcctaggccaccacgcgatttagggagacacagtttatcccacgcccggagatgaataccatgatttcctttctcaaaaccccaccaaaaatctctaaccaaaccatcaatcttgttaaccatacgcgtggataattttgtcgtttgcatggcatacattggtaaagacaggcccacagattttataagagtagctcgccctgctttagacaacgttttcgccttccatccctgaagcttagtcgtgaggttatccaggataaaattgaaatcagcatctttctgtctagatcggaagagaggcagccccaaatatttaatacatccttcaggggattcaattcccagggcttccttaattccttctcgcacactcaccggggtattcttactaaagaaaatggacgttttaagcttatttacctgttgacccgaccaagagcagaaattctcaagacatctccagaatccattgacctcagataagttagctcgacctacaagaatcaggtcatccgcaaagaagatatgggacagagtcgggccacccctacttaatttaatgccctgaatagtgccctgatcaagggcaacatggaacagtcttgataaaacttcagcagcccagatgaacaaataaggagagagggggtcaccttgacgaatcccgcaagtagggttaatactacccaccgggcccccattgagacaaatatttagcgaagtggtagagatgcactgcgagatccaccgacgaaacttctggggaattccattgcaatccaaaacatgatcagtgaatttctataagaaatagaggattactacgctaataattatactttggtaaagtaaaatcgtaaaaagtaaataagacaccaggatttatagtaatttatctctcatgtcatgatagtaatagagttacgtctacttatttttttaattatttttctataacacaccagagttatgttctcaaaagtgtgtggacgttatacaaaaagaatttctagacgaaatctatgttgcttatgaacagaggctcatgggagaccaactatgcataaactcaataataatggtggtgatgatcaatgttcttaggaacaatgaaaaacataagtcaaggataaagaatggtcctttatccttagtagaatcgtgtatatgtgtgatgaagctttatcaatagtgacttggcactactaaaaaaatgatctttaacctctatttttaactcaatttatcttcggtttttaaataatacactactgaagttatttcaggccaaaccgtaagttttgaaaaagtaccgaaagtcgtaaatgggacctgttaagggatgaacgttttacacatctttccaaaaacaacttcttgcgacatatcgtctggaatggaaaatgcactcctattttcgaaatcgcgtaacgctgatcgacattcctctttgacatgttcaggcgacatgtcaccactcattaggcgatatgttgcctagtgattttccaagacacatatttaatgtgttttgtaactcttcttcatgctatgctgatcgacattccttgtttgcatgttcacgcgacatatcgctattcattgggcgacatgttacctagtgattttccagaacacatttaatgtgttttgtgactcttcttcatgctaagtcctccaaaaatatttcagcactcaatttaattatataaatgaattgtgaacatttataacaaccatattatcacaattatcaatcccataatacctttgggtaataattcatatatttacacaattaatcacatatggttcataagttacaaattctatttcaataaccctttatattactttttagtccatgattaaactatatttatcaccatatatcatatatattaacaatacattaatatatatacatgtcacatacactattttaatttatattatattatattaaataatataacattaaatacataaatattttcctaatatatatttaaatgccaaaattaatatttttatcaaaaaaatattcacttatttatttaaaataatatatgattttattaaattttatttaacattaataattaatattaataaaaaaacaatttgaaaatttaaacttttgtataatattgtattcttttttattttttaaacaatataatattgtattctttatttagtcatatgcaccctcaaacataaatagtatcaataattatataatctaatccaaccaaatccaattcaatattattatttatttaaaaacgttttacttattaaatattattttttcaaattatacatcaattttggaaaaagtatttatactttatttaatctttacaccaccaaacatgaaataatactaatacagtagaacctctattcaagaatacacttgggaccagaaaataatattctaattgagaggtta

SEQ ID NO: 322605 - DNA, 1967 bp, Cannabis indica
tgtatgactttgtgttcgggtgttgatgatgttcttttaatttgttaagcgatctgctaataaggttgcgcatgctattgcgcgatcttctctgttgaggctgattgtacttactctgggaatgcattacccatagattttgcatcttaagtttgaatgatatgatttaataaaatatcataattattcaaaaaaaaaaaattataactttaaattacaatatcataatcacaaatttttttatatgtaattatgtatataacttcgaatggcatcaaagatacacgattttttattcaaattttatggaatttgcttggcattaatttggatattggaaaacacacttataatatataatttcaaattaagttttttatttaatataaatcgtgctcatatgattttttattatttaatgtcgcttttgtttgtttggactgagatgtattttaatttacaataattaagctttaaaaattatgttagtaattaaaattaggggttttttcactttacacttcaaaacaatttttttttttcatttctacggaattctacatagaaacccttattgcaacaactaacctaaattataacaaaaaatcgtatagctagaaacccctattgcaactagcgctgcaaaaccactttagaaactcaaaccgtaaatttgaaaacaaaaaaaagttaaaaaaataatatttgagataattctccttaaaattatgttagcctttgaaaacaccgttaaaagaatcaatcactaaaggattcattgataactgacctcggccaattaacaaaacataatttgcaagagtatcaactactatattaatagttctaagacaataattaaaaattataacagaaaaattagaatatatatctctaatattatcaagaaataacctaagactactaaaatattgagtttatggactgaactttgaccattcaattcaacctgaatattgtgaatgctaaaagatatgcactaagagacgggtattgcggattgcgattattagtttctttaggcgcgtgttaattaattattttagattattaggcatatgatttaaccgtgttaattaattagcaaattcaagaaaattaataaaaagaaaatattaaaaatataattctgcatacagtgatataacttggataactaattttttgataggatgatttaattatatatatattataaggagggatttaatcatatattaaatatcagtgaatttttttactattaattaaggaaaaatcttttaattacccatgcataattttttcataatattttgtgataatttaaatttatctaagaggagtaactctcaatctcctattacaaccttttaattagtcaatctccaatgtccaaaaacacatgatagaatatttctttttttaaaaaaaattcatggcggtgttcattatagttacaacaccatcttcacatctatgtaaacttttaaaaaatttcgcatagtttgtagtgctaaaaatatatttgaagttttttgaatatgtatagtaaattagaatatcgagaattttatttttcaatagtgtaaattattcgaaatcaaaaattatgatattgtaactataataaatattgttataaaaataaattttaaaaaatactacaacatataatttttagtgtaaaaatagactaactaaggattgtcataatgtaataagactccttattataaacaaacatacatacaaaaagcattatgtattacaaaaatttacaaaaatgctcttatatatatatatatatatatttgtttggtttatatcttaaaactcactttcatgtattgtaaagtctcattttcatgtttatccattgaatatgtactatactagaaatgtagatagttaccaaccattccaaaaacttaatatctaatttatatatttatagactagaaaaa

SEQ ID NO: 322606 - DNA, 730 bp, Cannabis indica
agtggttaaaatgtagatgagttagtaaaagataaaatattaaattttgcttctttactaacatattactatatgaattatgtacaatgtaagtgttaaagaattgtcaaaatatcataccctgaccctcttaataatatgagattgacttttcaaagatgtatacatatcttgctatgttacactttacacttcattagtatcaatgtaaattatgtaattatatattgttgtaaagggcaaaaatggttataatagtaagatattttattttatatttttcaattatatttttttaaaaaacctcatcaaagcaacatgaaagcaaactaatctccaataagaaatataaagtttgtattaattatatttgacaaaaaaaaaataataataagtttgtgatatatttacatcaattttaacattgtactctaatttataattgtaaaatttgatgcacaatttttagaagaaaactttattattataatgttggattaaaatttttaatgtgagcttatatatatttgtgtgtatttttatataaagtttgactcaaataaattgatcattttagtaattgtaggtcattgagtattaaagtattataagctaaatgtataaatactttaagaaatatttctaatttcttaaggggctaaattagaaatattaaaattaataaactattaggttgtataatatgttagacttttatttgggcttacat

SEQ ID NO: 322607 - DNA, 665 bp, Cannabis indica
gtaccccactaggacaaagcacattgagctagatgtacatttgttcgagcaaagttttagggaagaacctaaaaattcactatgtcccatccaatgatcagattgtcgattgcctcacaaaaggtttgttccattcacgattctagtatctcgttgacaagctctgggtgacttcttcaccctttcacttgaggggtggtgtcacgagtaggggtgagcaaaaaattcaagaaactgaccaaatcaagtacaccgccgtctgaacaccgaaaaaaactgaaaaactaaaaaaatcgccttcggttaaaaatgccttaacacgatcgattttagtgtcaatagaaaaccgaccgaacatatatatgatacaatatacatatataatataattatttttatacatatttaatatacaattttattaaactagttttacttcttatctcttttattaaagtcttaattattcattgctttattttattataatttgatgtatttacgtattatatacacacattcataaaataattcgagttttttaatataactcattaccatattagtagcacaaataatttgagcaaatttaaaagagtttattttacattatttatttaactaagaaagttttcttcttaaattatatgatatttaatacaata

SEQ ID NO: 322608 - DNA, 685 bp, Cannabis indica
gatggcatctaagctaataatggttttttagtcaccgcccactatatacatgacaaccccatctcatctaactgtatatcttttatattatatatatcattgatctttgatctttgctttgttggataattattatacacaacacaagatttgtttactctttctctttctagttcatttggcttgatcccaaaggaaaacagtaactccataataatatctcagtttatgcttaactggcctattataaaaaaaaaaaaagttccaaccttgaagaaatttatgaaatcaatatggaggagacaaaaaagaaaatagtaaatgcaaatggttgcattatggcgagttgaccaactaatacctttgttaatccatagtaagtatccactcagcactgaatttcgggcttgaatttataaaaaccaacatgattacaaagtaagaattaattacaccaaatagtgcttttttttttgtactcattactgaagagccttttaagcataatcttttggacataatagggtttatttggacataattcattctcatgataaacaatgctttttcagaagataatgtcatgctattttcttttgaaacttttttctttttgagaaattcaattggtatttttttacactttgaatagataaatttacacagtattattttggtaaatttt

SEQ ID NO: 322609 - DNA, 633 bp, Cannabis indica
aagtccttaaatctaacaatttcaatagttcaggtggcatttttaacgaccttaaaagttcagggggtatgatttggttacatgtcaaagtttaggaggcaaaaatcataattagccttaataaaatattagacctcacgattgttacagaaaatattcataggaatagtaactacatcaagacacccaaagtggttatgggtaaaagcccatttggctatgttgtgagctataaagttacaggttctagcagtaatacaaaataaacaagtaataaaggaagaaacgattcttttacgaaatacagagtagttttcattttatcatctagggtgtaagccgttgagagtgttgatcactaccttaaaatcattttctaccaggataaacttatgccctttgtccttgacaacctcaagagccaaacaaactgctgcagcttcaccacagagagcataaaaaaagtgcagcttagccgtatacacccaaaccaccttacttaggtagtctctagctgttgggttttatgccctaaataaaactcatttcaatataatcagatttacttattagtatagatcagaaataacatttaatgttgcatggttcacatgatttatttcatgattatat

SEQ ID NO: 322610 - DNA, 900 bp, Cannabis indica
taatctacaaaaaaaaaacaattgattaaacgaaatacatattatgatttataaaccttttcttactttatcatggatatgtcccacgatgttcttcgaaccgtgcacccttaatataggcattttggaccgtgccacttttatttctcttagaaatcacctttaaaaagtaaaaaaagaattcatatatgtaaaatattcaagaaaaataaaagtaaaaagaatcaagaattttgtatacctttttttttctatattccaataatcatagagtacagctcacgatataggattaatatttttataaggatgtttatttgccttttcattgtctatctttcctccactctcaacccaatgagctttcatgctgcatcgccattcacccatatatccttacatattcatattcacgttattgagaatgattgaatcttctattggataaataaatttatcctacaattaagttttaaaaataaattataatgtcaaatatttaaattttaattaacatttcttctcaaaaaatgaaatttaccactaacttttgacgagtgaccaatatatcattcttgtctacatcattccaattaagactagtcgaaggtatgttatctcgcccaaggtatgcaatatagttgttaaacatctttccatatcttctaactgcactactgctagtttcatgaaacttcaacgaaaattgagatagtttctttgatgcaagcttcgtttccacattacccccataataggttccacaaccgtcttcttttcacccgaactcccactctcagttctttcttgttccattctgtatattagtttagcacatttgatataagattaaaatataatacatgttagtttaacaataataaatatagtaaaattttt

SEQ ID NO: 322611 - DNA, 2047 bp, Cannabis indica
cgttctcccaaccatacgctactttaaagtgtagttctatcatttatttatttatttatatgatatacatatggataaacatcagttttagttaatattaaaattaggggcaaacgagtacaaagaagcatattttattgattttttttttaaataaaaatagcatatttatttttcttatagcaagaagcatattttatatttcagcaaaaaaaatatatatatattatggataacaaaaaggtgatgcttcaatttgagagaaccaattctcagacgtatcttcaatattgaaaaaaatatatatatttctctacaacaagaaatattagaaaaaaattaaaaacgaaaacaaaatgtatttagataaaaaaaaaaaaaaaagtctcatctaaactcatgagacttacgatgtgtattagtccactcaagtgccaactgggacgattagagacgacaatagttgtcttgtctttttctttcactttgttttacttatttctttctggtatgtaattagtcttgtttttttaaactactcatatttgtttttatatatatgtactcaatcatgtttcttaacttttttttggctggtaaaattttttcctggattgttaaatttaacgatttttgtataattttagtaaaaaaattctaacatgaataaaaattcaggaggcacaatttagtacatattaaagttttagggacataatttggtacatattaaaatctagggagcatgatttagtatataaacaaacattaaaattgaatgaaattagacaaaagtacttaaatctaacaatctcaatagttcaaggagaatttttaacggccaaaaaagttgagaggtcataatttaatatatgttaaaattcgggaaaaaaattactaattagccttaaatatattacatatatttaaaatataaaataattattttaaaatactaaataacaatagcaaaaacactgataagtataattattgtacaagattttttaaataaaatatatttatttagtagaatatttaaaataaattattaaaattattgtatcagaaaaaaattacactaaattaatataaattttatactaaattagtgtaattatttaaaatggtcttaaaaaatatatttgcttgattattctttaaaaaaaaaaaaaaaaaaaaaatctttattttaaacgaacataagagataatcctacacttatctaaacacttacagttacactaattatatgaaaataaaattactcttttctgaataatcagtgtagatacattaaacatttcaatgtattgctttttcgattactcttttctgaataatatatattaaacgtgtcgcattgttattgggtaccaatgatgtctagcacctttaagatgtgtcgccttgcgattggctagcgatactccctaaaagttattatattaaattatatgggatcggatactaaattagaccaataacaatattgacacgtaagaggtgctggcaccaagagtgacttttagcatttctcaacattaaaactaccctaatacctttattgcatactcttctattacggaaaagtttaaataaaaatattttaattgatacactactcatttttattactatttcaaaaataatcctaacatcaacaaattactataactattactgttactattactattattattattattattattattattattattattattattattattattattacaactcgttagtcgtcatttttattgggtatttgattaaactgaacaaaatgccactttataacataacatattgttagaaaaatttactaacaaattttatagatttcaattttaaatatttagatgtcgtttggtaatacttttgttttctaattttttaatcacaaattgaaagtaaaatttttctttttaaaatttttgtatttcaaaaacaaaaatacgttttgtaaccacttttgttttttaattttaaaaacagaaagaaaaaatgtgttctgtaaagttcattttta

SEQ ID NO: 322612 - DNA, 667 bp, Cannabis indica
tcaagattaagtgaagtccttccagaattagtacaccataaacaaggtgcctttatccagaatagactcctttcacataatattttaatattctaggacttacccaaaggctataccaggaagagtatctcggctcggtgtctaatgatgatagatcttaggaaagcttatgatactgttgacttggactttgtggctaatctgttaaaaggtctttgctttccctccagatttatcaactggatcttggtttgcctcagaggtatttcttactccttgatgctcaatggtggcgttcatggctcatttatgggcgaaaatggtcttagacaaggagaccctatttctcctttacttttgttctggtgatggaataccttactaggcttcttttacaggcctccagtgaaaggttttgggtttcacccctcatgtaagtccttgaaccttgtcaatctttgcttcactgatgatcttgttttcttttgcaaaggtaacccttcttttttggacattatctaaaaatctttcgaggattttggttgctctactagcttagcggctaacttatcaaagtcatctatttactttggtggtgttgacatgagatgtaagaagcagatgttagattcctctaagttgactgaaggttcttttccgctgaaat

SEQ ID NO: 322613 - DNA, 2457 bp, Cannabis indica
cttaaatagaatttatacattatatataatcatgtgaaccatgcaacataaaattttatttctgatatttattaataagtaaatttgattatattgaaatgggttttatttagggcacaaaaccaaacagagatgaacctatttagtgctgccattctcccagttaaagcctgaacttcttttgattttgttggtgagggcatctcgattaagttcttaattttttctgggttggcttcaattcctctcgcatttactatgaagctgagaaattttcccgaggaaaccccaaaagaacatttctttggattatgcttcatattatactttctaagtatatcaaagcattccctgagatcctttgtgtgatctttactctttattgactttaccagcatatcatcgacgtatacttccatatatcgtccgatctggttctcaaacatgccatccaccagacatttatatgtcgctccaacattttttaaactaaatggcatgactttgtaacaataaagtcccatgtttattacaaaacttgtgtgttcttagtcaggaatatgcattttaatctagttatatccagaatatgcatccataaaagtcatcagctcatgtcctgatgttgcatccattaactgatcgatcctgggtagtgggaaacaatctttaggacatgctttattcaagtctaaaaaatcgatacaagtcctccaagtgccatttggtttttggacaagaactggatttgagatccacgagggataaaaggcctcgcgtatgaagtagttagttaacaatttatcaacctcttctttaagtgccccttgtctctcaaaatataacgaccgctatttttgtctttttgcttggtagctggggtcgatgtttaaatgatgaaaaatgatattagagtttatccctatcaaatctgagtggctccaggcaaattgatcctggtttgcgtttaaaaaatcgagtaattgctattttagtttttattcaaattcttcccaatgtatacaaattttgtgggattatttggatctaaaataacctcttccagttcttcaataggtttgagctggttatcgtcttagattctgggatctagatcctcgtcttccttctcgccttcttctgatatgattaccatcaattgaggattggctctcttgttatgaagttctatgcaatagcactctcgagtcaacaattcgtcgcctcagaccacccctactcctgcttgtgttggaaactttaaggacaagtgtttgatcgatcttactgcccctagtccaattaatgcagggagacccatcaatatattgtcagctaatggaagatcaacaactaagaattcttgcatcagattcgttgataatgttggctctcctacagtcaatggaaattcaatgatgccttggctggcgacactatcacctgtgaatccacataagcttaccatgcaagacttcaacttcgcattctctaaccccattttcttcaatgtatacttgtaaaggatgttgactgaactcccattgtccaccaatactctcttcactctcttgttggggagctgaactgttacgacaagaggatcaatatgcgggtatcgcacatgttttgtatcttcctttgagaaggtaatcggaggttcatctaattttgttttttagtagttttagagcaaattccaattatccattctttatttcattaatatatcttttctcagcattattactattcccagcgagatgcggccctcttgaaatgactagtatatcctcgcccttaacagggggaggctgcattctcgggttatttgggttattagggttatttggctggtttggctcgtttccttgatgtcttacatactgtctgtaatatctacgcgagattagactctctatctcatatttcagttttcgacattctttagtagtatgccctatgtctttgtaaaatcagtaatattttgttgagtcacacttatgtctaacatgcctctcatgggttcaggtttgcgaaatacaatcctatttttatttgcgagaaatatgttttcatgagtttcatttaactcggtgtacactgaataaatcgaaacgtacttgtcgtgctttttctatttctttttatttttagataattctttcgaatcatcttttcttttcgtgtttgaaccactaggattatcttctttagttgagattgtactcgttgttgctgtactcgtgctgggtttaccttccgagctagtttttaatgcttcatctcatttctagcctcttctttgcaaacaaatacttgcgctctttcattaaattcattaatgttcctcattgggcgaccctgtagatcatcccacaattcgcatccagcagtggataagtccattgtgatccccgcctaaagtgcagtgagttgaatactgtcattcaagtt

SEQ ID NO: 322614 - DNA, 785 bp, Cannabis indica
actaaatttgtgcgttcaaaacattaatgaaaattttaaaattaaaaggaaagtcaaaagtatctaattgataaaaagctacaaaagaggaaagaataaatgagaaaaataaaatatctgtaataaataaaaatttaaagtaaaaataaaataaaaaaatttaattataattagagttaaaataaaaacgttttaaaataaatagtagcaaaactaaaaatagtatacaataatatagaaaaagaatactgtgaaaatatattttttaaagatatctgaacattacttttaaatatttaataaaatttcataacatattccaccattaaagcctatcttcacgcgtaaatcaataccataatttcggacaggtcgggatatatctgaaacttcattgtggtttgatagacatcgacgccgtggataaggggtggtggttagaagagaggcaccggcggcagccgcaacccattactaaaagattcctaaaaaaaaaataaaaaacgattacaaaaactcaacaagatacagaagaaaacttagcaatatcaaagaaattgcaaaaagaatttgaaaacaaaattacattttcttatcaaaataaacatataaaaaatgaatgggataaaaggaaactgaagaacctggatctagataaaactagagaaactaatcgtacctagcaatctatggaggatcctgttgggttttgtgccctaaataaaactcatttcaatataatcagatttattagttaataaagatcagaaataacattttatgtt

SEQ ID NO: 322615 - DNA, 778 bp, Cannabis indica
aatcggaagacgtgcttccagtgtggcatggttgggtatttttagaaggacttccttagatagagagagaagaatagaagcaagaagcaaagctcatacatgctccggtgtttgctattactcaagctgatgctacagccagcccttctgtggtaacatgtcagcttcttgtcaatgactcatattttacagtactatttgaatctagggctacacattcaaatgggtcggccttatgatttcattgatatagggtttggaaccctgctgcttgatagagaattggttctctccaaaagttggattaggtctatcccaattaggattgaaaatatggaattgagtgttgacctagtagagttggaactaacagagtttgataatatactttggatgaattttctctctaagtattcagatatcattgactgtaaatggaagatggcagctttccagccggagggcaaagatctatttgtttatgttggatctgtttaaggttatcaaatcctgattatctcaattttaaaggctaaggatttattacacaatggatgtgtaggatttttagcggttgtcattgactctagcagacctgaaacattttggcctgaggatgtcagagttgtaagagtttttcttgatgtatttcctagaaaaattttgggattaccgtcacacgagagatagattttataattgatctagcacctgggatagaacctgtttctaaggcaccatatgggatggcttcagtagaacttaaggagctaaaaat

SEQ ID NO: 322616 - DNA, 574 bp, Cannabis indica
ttagaatataatttgtttgattccaagtatatttttcgatagaagttctacggtagttactaaaatacatatattattttaaaatatatttttttattttatctctcattcacgccagatttagcatatttttctataaaaattactctaatattattaccttcgtgtcgcccaccatgttcgaagtaccactttttaattaaattttattactatacatattatctcaaaaaattggttagtaataaagtaacttatttttaataaataaataaataatatcacatgattattacttattttaaacaataatattcataaaattaatttaagatgttgactaaaatacatgtggcaaagatcactccatagacaacccctattggaaatgcccttagagctatcatggggtgtgaaataaatggtcaaataagtggtggaattaggaatgcacattttttttccacaaggatgggaccttcggagaccggcccctaatggggcagaaattcctcgtttaaatggggaacatagtggggacgaagattatttttgtccccaaatgttaaatggg

SEQ ID NO: 322617 - DNA, 716 bp, Cannabis indica
aaaaaataaaagaaaaatactataaattgtcttataattttataataatagtattaagtgtacttatataaatatgtcgattgataagaatgtacatataagcagttaattatgaaaaatagatagtactttaaatttattaataaaagtttttaatattaaaagttaaacttaaacaagtaataataattgaaaggctttagtagaaaaaaactcatatattttttattttaaagaaaagaaaaaagaaacaaaaaaagatcatgtgggatatgaaatcagagggctgagaaaatagttggtatagtaatagaagtacaggatagaaaagaaaaagagaagagagtgtgtgtccacgtggcagaaggagaagagtatggggtttggtttggtttggtctacttaggtttaatgaatatattgtcgggtggaggatattacgtggcatttttaagccttatccatattgggttgtgttggtgggtcccaactacctctaccctttctccataaataacaataataatattttattatttctattttctttatcagcttaagccgagccgagccatgttatccatcacaattatttactttttttcgagataatgaacattgccattggtaagtagatgagagtgaggactcgtttgtcacaacttttataaaagctcaaagttattttttgaaaaaattatgataaaaatgtgttt

SEQ ID NO: 322618 - DNA, 705 bp, Cannabis indica
tactttcatggatctctctttatattgtttcatttgtaatctagtccttgcaccctcacaataagggttagctcgaccacctgcgcataaagacagacaactcctagttgtttagtcattacatccacattccaagtgatatactctttccaccttaaattaaatttagctttcctagcaatcttaccagccatttcatcaaaggcaaaactttgcccatcagtccagcttaatgtcattctccatcactgcactgccgggatcaactatacaagttcttcaaccttcccacttagatattctcttacttcatagtgtgaatttactcccagtcttgtggtagtggaagattcatactcacactgccaactctgagcctggtaagctcgcaattatccttactatatcgcctcaggtacaccttttagtacactcgcgaccgttcctttttgtggttaaaatctttcccactagaattaatgctaataagtattactgcacatgcataaacatatttaacaattttatatcaaaatacatcatgcttctatagtaactcacacatttgagataagcaagcaattcaaaaaattgacaaatagtctagtaatcaactaatatttagcacttctaaagtcatgagtcgaacgagtcttttgtcagccaatgtacatatcgagccagtcttcaggatctttaaacctt

SEQ ID NO: 322619 - DNA, 599 bp, Cannabis indica
cttttcccttttcattttccgcaaacatatatttacttttcttttgtcattaatattttgattatgggagagtggccaccataaatttagactatgatataccctcattcacctatcaattgtatataatcttaaatttagaactagttcatcacctggacaaatttatttatatatatatataattgtatataatcatgctgaaaaagaaaacaaaaaaaaaatacaatttgtattgaaaaaaaattacacaacaacaggaacagatcgaaacgttgccgtacacaataaaaacttatattaagaaacaagtcgaatgtggaattgtataattggtcttgggccaagcctcccgtgtaatggagtaaacacaagttcacccacttttccaattcaccttctatacaaaatacctctcacaactaaatatctcctctctcttctcactttattctctctcttcctctcctccctcttttcctatcgaagattagatacactctcaccacctagatcacatccattttttattggctaattagtaattttttcctctgaactttgacatgtagtaaatcgtgcccttgaacttttttggc

SEQ ID NO: 322620 - DNA, 524 bp, Cannabis indica
ttttttttttttggttttgaaatacgatcttataatcttattctcgctgagattaattataaaattaatctccattttaattagcttaattaatactgtatatatacattaattaattaatttaatttgtacacatatgcatatatacgtgataattaacattcaatcctaaacatatatgccacaacaaatattttgccagcacactcaaagaaagaagaatatcagagatatgaaatggataagtgcatcgatctgatgattttaatcatgaatctagctattatcttttctaatatttaattatacatatatctatatattataaatataatgaggaattcaaacatatatatttttaaatttttcttagaaaagaacatatatttttatatccttttcttaagaaaatattactaaatgtatataactaaaactagtatatagatatatatatatagtatattgttacgtgttgatgcacgtatgttatgttttaatattaagtattatattatgagttc

SEQ ID NO: 322621 - DNA, 1853 bp, Cannabis indica
ttgaattaacatcctaaatatgaaatctctaaaacaatgaaataaacacataagtgtttaagaaaaccttatattggttgcactcgaataatatgactcctttcgttcaagatctctagcccatgattcctttctgtaccagagcattatcaagatctctagtcatttaatttttctgcaaccaatgtaaggtttctcataccttttatgtgtttattttcatcgttttagatatccatagttaagatgttaaaaaatatacttgttcgcaaatctagatcctcgtaaaagatattccaacaattcgttccttaatatataaatgttgagaaatgctataagacaccagtagtgcctagcacctttctatttattaatattgctatctgtccaactaagtttcagatcccacatagtataatataataacttttaaggagtatcgctagccaattgtaaggtaacatgtttagaggttttaggcactactggtgcaaaataacatatatgttgactaagatttttggtaaccaataattagagttgtgtgaagtaatgaatgagttttttttctactagtcactgtatttatgagagtatttattatagaaaattttctgaccgatctccttatatatacatcaatgcagtatttatagactcattatggttgtaaaaagaaacaatcgtcgtgtttgtttgaacgagactttgtacaatttcccaaatctaattaatcttagatcatgattatctactttgatgatgtatttaggttgtctacaggtgtttgattggatttggctcatctttagttatgacttgacaactcatttattagccatcgattgatgtatggggtctcgtgaaattagagaataatgggtctaaacccttaagcacgtttgttcagcgtaaggggatggattttcttccccatgccatattaaatgtgtaaacaatcttcttcttcaagacttttactctcacaattcttagaactctaagccagacaaaattccaaatagcctagattttcttttactattttgtcatcattgccaagctcaatcataccgaggaattgcaacagaatctacagctactcaattttcctctatttgtaagttactagtcacaagcatttcttctttttcttatttcattgttgtaacttcatttatcgatatttttatcctaatttttgtcctcctgaagtgtgacttcatttcattgttattacaaaatcaatggcatgtggcagcactactcaccaataggaaagccgagttaacacatgaaaaaacagagaccccgacactcaaacgggtatcagtaacagaccagctcccactaaggagttggtcggccacccttgtgactacaccatggccggctagcttggcctccgcagggtcgtgactggccaggaggttctctgcacagttacctgtgcacttcaacacgtcaacaacaagtcatgggctgcgaattgggccctaaaagcccaacaaaatggatgaataatagctagattcaagggcaatttagtcttttgtaaagatctaacaaactatgaaagtatttagggattttaactgtaatctagggttttaggcctcctatataaaggcgttaacctttgcctaaaaatctaagttgcatttaagccggaaacctgcctccaagctctaagcgtttgacaaactctctcttcctcacttcctcactcacacacctacactatcataatctaaacactttagtttttcaattattgattcataccttgtattcctaagagtgctacaaaatatcccatctatattcatctagatagtattaccctcggt

SEQ ID NO: 322622 - DNA, 895 bp, Cannabis indica
ggctcaaagggaaggtgaacgccctggagacagcccgtcttgagattttttatgacttttggaaggctaaccctcaggcaaattttgattacctgggcgaggccaaagacatgtatctcgagtactgtgcttcccaagtggcttatggagagtccgaggcaaccacttcagggccaagtggccaatgacatgtatctcgagtactgtgctttgcaagtggccaaagacatgtatctcaagtactgtgcttcccaagatgcatgtgacctcagggaaattcttatttgaatttccctcattcctaactgttggactgtttggctcagtacacaaggacacacatgctctgcaaggttgcatggcgtggaaggcaacctctaacatcgtagatgaaaaagcctggtcattgggtttgtagcctaacacacgtgggctgagctcccacagatcaaaggcgtatcccgaactagtacatcacaacttgagaagatccatactctttgtgcgagcacagggtttcgtttttccgtaatggagtgaggcacttagtcacaggtacctttcacgtggccaaccctcagggagacttctttcacggagacctttcccacgaggttagtggctttatcctttcggagcactaatagtggcacttaggcaacttaatgactccttagtcttttttaactaatatccacatgtcatgcttgcagaattacgaataacacttaccgttcctattatttgggtatagtcagatatgctacacttgatttggacataaagacaatgcattgattgaaatgcacttctagttttatgtttgtgcaagtgaaagtttgttggtattttatgctctaaataaaacctacttcaatataatcttatttgttat

SEQ ID NO: 322623 - DNA, 1658 bp, Cannabis indica
tatttaaaattatttacttatcagattttttttaattaataaaagatccttcactattttattttaatttctaaaatctactattatatttatttaaagtttttagtgaattgtgcatgtgggagctggttaaaaaatgctctatatctcttaattagggtttacccctgttctttttcttcttccccctttttagggtttttggtgcttgggcgtcgctggccagatctggctagtggcgcctggggtacctaggctccacgttgtagcaggttgaaggcagagggtcttccgttaggtagttgtggtgagtggtgacgatgacagtttggcctccttttctctccttgaggtcagctcttcaatggctgagtttcaggtgactggccgccgaccaaggtggatggacgtctcctttgaggtgtctcacgtctgaggtctttaatcgtgggtaggcccaatctcatggattggtggaagcgatgaagatgggtctctctaggctatctcctttttgtttttggcgatggcgagttgcggtggcccttcttaggtgagagcttgggctttggagcgttgtttttcttccttttttcctcagatctcagtgtcccatgggttttttttttcaggcatcttggctccggtacgcaatggcttgtggttagctttcggagtgttgttgatatagaggggggactcgggtttttcctaaagggatgtgcttcccttgtcctagcactctcaccattcaaaaccccattggatggcaaggtttcagcttttttcgtcggaagatggcatcgttcctttgcctttggtctgcttgtcttaggtcttcgtgcgacctcctttgtgctaggggaaagtcttttgaaactgttttacgttatgtttttatttggtttgtttattttattttgtttagttttgtcggtgctgagtaccttatgtcctttgtggcattgtctttaggccttttttggagggttcgtcccttttgatgctcctgcgagagccatgagcttactcctccttttgttcggtgtggtttggccaacatttaagttatctccaagcgagatttgtgtaatttctttgctgggcttgtagggctttggccaacatttaagttatctcccaccttgaatgaagttctcctttcaaaaaaaaaaagtctactattatatttcagataattttgaattttttgtaattatagatttaaagggtatttttataaagtaagagaaaaatatccacacgttacacccttctctctacattaggaatggcaatttgggccattttcgcgagtcgggtcgggcccccggcccgacggggcgactttggcccgattatctaaggtttttatcgggctctaggctcggcctggcccgatacatattatttcgggtcgggatcggcccatcccgattttagatattaaataaaactaaatccctaaaaaattcattcccaatttcttcagttttaaacttcgactcttctatgttctctcccattttctttctctctaacgacggctgactcccatctccgacgacagttgacagacacgacgacatcctctgacttacttacccaagtaacaactgtaacaatggctttctaggttttttcatatgttgtgtttt

SEQ ID NO: 322624 - DNA, 1180 bp, Cannabis indica
gtcgaacgcgctcgaaatgttcaatcctagctggtaatgagaaaaaagaaaagaagaaagaaaaggaaaaagaaaagaaaaaagaaaaagttcctgatgaaaatgaattttaggaacaacaattatagttaaaactcaaattctagcacatatggtaagttgtcctaactcatgttgagtgacatgagttcaatcattataactttcatttgatgattttatatcacttaattttttactattttttttttgaagagttttatctccactttatcattcttaataggggtgttcatccaattcattttgcactaaatgccgatttcatatttttggattcaatgtataagaaatattattgatgtcttatcacacgtcttattttattgtatataacaattataaaattttatttcaaaaaattgtcccataacaacaagtttaattaatatactatttatgaagataaccgacatgtagggaacataataacggttctagtttatagtcataatttttcctggttgttccatgtggatcaaaccaactaccacaagcttggttacttctagttatcacaaatttggttattgctagttgctaatattttttataggaagttttccctttaagcttgatacgatactctgttgtgatctaacaactgtagtttccttatttgtgtgttggaatataaaagaaattggaagggccttctgagaatgcatggttttgtctctccagtctcgtggtactggacatgtattccaggtacaaattaatgaaggcggaaggctttacgagtgcaaaaccaagatatgttcattgaatgacatatccaggtgggattggcccacttctcctttgctgagggtcccactaataggtctgcggtactgacctggagtccatgtgtccaatagaaaaaacgcgaataacagttacaatttggttcgcacgtcatcaaggccaaaatttgggataacaactatattgtgcagttattatattttattgtatacaaaaattataaatttttttaaaaaaagtgtataagagtttcccataataataagtttaattaatatactattataaaaatttaaaatagtttactttgtcaatatatatatttatactgatcaagcatatatcgattcttcaatataagcacccaaca

SEQ ID NO: 322625 - DNA, 952 bp, Cannabis indica
attaaattaatctcttttaaatgaatcagaattgtgtgtcaacttctaataagtacaacctaatcaacacccatttggcctagtattcaagatttgataatacatttgtaggcacaataaaagtaattctattctttatattttagtttgctttagaattgaatcagtagtcctataatgcattgactccagtagaaattctctagatgtgaaacatcatagcagcattggcattccaaaacctgctcatacgcttagcaacttcagtaaatatctagacctcatatatgctgctttggagccttcgtcattaagttcacaaattttcttacaaataatatggaatgtgacattatttcttaaacccccaacaaaatattccgctaattagttagttatttattaactaacttaacagtcaacaataacagcatacatattgggttcgttggcctaggggactgctgatcttaattatagagagagagagctaggattgaaaaattgtattgagtaacattaagttaataagtattgagggattacaccatgaaagattcattgtgattatttctcggtagctcgtgagattgatgcatgtctcttattctcatctaataaaaattggtggccactacaaggattagcacttttgcaggcgcaatttagcgtctgcaaaagtccaatacagcgcctgcaaaagtattgcagacgaattttcgcgcgtcctccagcgtccacatttgcgcgtctggaaaaatccgcgcggacgggagttggagcgcgtacggaaagttaaaaactctttgcaggcgcattaatagcgcctaaaaatattattagaaataaatttatttttttttaaattacttttgtaggcgcttttagtgcgcccacaaaaagctaataatacttttgtggacgcatttaaagcgcctgcaaaagtatttta

SEQ ID NO: 322626 - DNA, 605 bp, Cannabis indica
acaatggtacgatgagagtggtataaattgaagtaactttacttacaatcatttttttaggacttgttcagtttgtattggctttatcattacttgaacaaaatttagttatcacatttcatttatgtttacgacatatgtgataaacaattttcttaggccaaaaggttcagtaagctttatttaaaaatggaggatcaatctgttaaaagaagaatgcaggattatcctttttcgtacttccatgggtgagattttgaatgtttcaatttgttttttgtcaaacaatttttttttctttttttctaaaaaagaccacgtttcttccattttaacataattatatacattttttattttgtaaaaaaaataccacattaataatactgcagattgatatatttattttttcaatatatattaagtgctttaatttatgttattcaatttgaaatcaaaatggggtgaatttgttatgattaaaacaacggattttttttaatacttatctgccaattttgtatgattattttttgtttattttctttaaagttttttacacagcaaagaaattattatagatccattattatttttacaaataa

SEQ ID NO: 322627 - DNA, 838 bp, Cannabis indica
gaagaaaccttaacttgtgggcccatggacacacccatattagaatcaagtcttcttctttttgaatcaatgattgtagtaattgtggaatcaaaaaaattcccattattattgacatttaaagtcaaatcttcttcattgacccccatgacattttccccatattgatgcctctcattcaacaaattattattaataccatatccaagaatcttgccagccgatcccactgattgctccagaatcataggagtcaagttagctcctcgttcaccgcttccaccgtgggaaacatggctcgactcaccccttgcagccacccctgatcggagccactgtgccccaaaggtagaatgtcttctctgcatcgacgcccgcagctccaagctataaggcttctcttgtaaatgcaatggtttcaagaaaagcctaggacataacttctctgcatggcctatttttccacatatgaaacaaaatattggaagcttctcacatttaaaattaacccagtaccaagaggaatcatcattgctcactttcattcttctctttattggtttgtcgacattgacccgaactcgaactctgaggaaatctctccaaacacccacaaaattattaggatccgactctatgaatgtaccaataaaattcccgagcgccgtaacaacactaagggtcatattacccgattgtagattgtggagttgaacccacatatccatatgattgatctccaccagccgtgggttgtcaccctccttcaatcttgtaaatatgagaggtttgcgatcatatgtccaagggctcccgtctataactctttgtatgtcga

SEQ ID NO: 322628 - DNA, 866 bp, Cannabis indica
taaatattaaatatataatataatgcatatttgacattaattatattgcacatgaagtggtgggttttaaatttcaaatttgatattacattaaataataatatatatgggattttcgaaaattatttaatatttcaaaatgcatagaaaaagtgagaaattattatggtgaattttttcgataatataacaaggagtaagattcttgtaaatagtattaatataatataatacatatatgatattaattagaatagatatgcatggtgaattttgaatttcaaatttgacataatattaaataataaaatatatgaaaatttcgaaaattatttaatatttgaacatgcataggaaaatggaaagattaaagatttacttttctcaataattcagcaagaagtaagattcaaatacttgttgtgccctatggttttgccgaaattgtagtgtcataattaattttttttaatatttattattgttatttagtaacattcaatgttttgtttgtcattttcaaataggggccgaaattaatgcaaaatagtaatacattactgattatgaaattatataaaggatggaagaaatagtaccactgccacctccacttctagtatcgcagaagcttctattgatttatggttgtttaaattttggtaaagagtaagatgatagagatggtgaacatggcatggagaagaactcttgatgatactcttggagtactactttactataaagatattgttgtattgtatttttatcaatttcttcttgttctcctgatatttataggaaatacaagattttattttgaagtatggtgtgaaaatagatagatatattatgaaataacaatc

SEQ ID NO: 322629 - DNA, 1056 bp, Cannabis indica
catgtttaggatgttaaaaacatacttattagtaaatctaggtcctggtaaaatatattctaatagcctcaccttctcactctttgcttttacatactttacatctaaacgccttctatggtccatggtgtaccaactgtcatcggagtactgctcctctgctccactgtcctagtttactgaatcactagagtggtctttcgttcctttgggtttggtacttttgtaccagctccctttgcattatagggcctttcttggctgaaggacttccaagcctagaggcgttggctgtcttctgcgcctgagaaggcctgttggcctgattcatattttttcaaaaaggttcaggggcacaagaggtcttagggtcacctactttttccttcttgtcctctacatgagtagaggttctagcgttagcggggttttctttcgtatttacttcaaagtactccaccaaagggtcatcatcagttttatcatcatctagatccccgaactttcttcgaaggcggtccaacatttttttccattttttgagaaaatttttcctaacgagctagctttttctgagtttcgaacaattctttagaaactctcgttacctcaaggtcgtgctcacaaaggttgccatctttgtaaaatccatctttcacgtaatcgtcttcatcatattcttcttcttcatggttctcagcatccttgtcgttgccaatatggtcatgctagttgtctaggtccccctctagatcattcacatttgacgtatccccgccaagtgctctagcaagtgggggtttacctcttccatggtcgtctcgagaacaccttgaagagacttttttagaactgtcttttgtgtgaggaccatggcagtaacaatggtttacgtctttcttcgactctcaatgaaaaaatgtttactaagattttctgaaactaaatattaagagctacagaaatgatcatttgaaggaattaaaagaagaagattttttacgtcattcaactgttaataaaccttagtccacaagtcagtctattagtctctaa

SEQ ID NO: 322630 - DNA, 995 bp, Cannabis indica
agaaagttcatatttagggttaatcaacatacttgtgagtagatctaagatcctggtaaaataatttccaacaaatcttattgaacaatgttggatcaacaccattgttaagaacatccaaaacagattcagtgaatgatgtgccagtaagttgtaaagaacaagactgatatgccatccaaactaaggcttttatcactactcattgatttcatagcattaaaaatcttctttgcagtgtagggtgttgaaatggccaattgagattctacagaaatcgtggttggaattattgccaatatagcatcaatagagtgttggtaaagaccttggcttctgaatattctttgaaaataagtagtgataaaatcaataaggtcaggaacgctagtttgcgtgttgccatttgagtctttaagtttcttgatgtgattggtgttatgtctagcattagcacgttggtagaaaaattttgtatttgaatctcctaattgtaaccacaatatttttgatcgttgataccaataatcttctttttgtgccaatacatcgtctagaatagattcagagttcttgagagcatcaaaatggtcttggtcaattcttggggaatttcgaagagctgctacatgctcatgagattccttaatttttctcttcaggatttccaaatttggaatggtgccatgactagagttggttcaaacttataccttaaaaaattgggataagtaagtgctaataacaacctcttattataattgtttagtcaagttttacatccgaaatcatatgccgaaatatttttttcataatagtatttgttatagttacaatatcattcctgtaaatttttgaaaattttcaaatagtttacagttgcaaaaacaaagttcctaatatttcaatttaccacgcatgttcaaacacttcaaacctatttttggcactacaaactattcaaaaatttttaaaaatctacagggatgatgttg

SEQ ID NO: 322631 - DNA, 2188 bp, Cannabis indica
aaacatgtccaagttaaattgacacaggggaatgggtgatggactcacgaaattactttggcttggggggccatgagtcatgacctctccacatattcagctatcaatactttcatttaatctgatatggagtattgatcaatagttttgttgactgttcaaatcaacactttctttaattaataacctttgattaccatatgagcattactcttaggcacaagtgtctaacacattctccacagttggaccaataagacatatatagaagagtgcttgacactacaggtaccttttagtatttctcttaccatatatgtatttttttgtcttagaattaatacataaaattgacttctttggtaggctcacccatcagtggtgagggagcaaagaaatctgtggtggagaatggagattactcgatcatgaaaaatccttagtacatttaatatatttgggaccaaaaaatttatattctaattgagagattataactaaatagagttacattaaaaaaaaattaaaataccaaaaaatatcaatgtaacaataataacaataaacatcattaatactatatcataattgaattattttagagtaaatataatatttatacatgtattacaatttgaaataaaattattaattttacgtaaataaagttacaaaatatatgtatatattttattaagatataattactcttatatagaggtatactttgttaatatacaagacttataaaaatgtatattaattaattacagtttagaagttattcttatttataactggctcaaattgagacttgattttttttataacattagaaattattcttgaatagagtatttttagatagaagttctactgtatgtagtacaactatgtagtctgaagaactctatagttcatttcttttgcttagtggagtactctcttcaatcttttattacaatcttttaattggcatttgtacttgaaaatatacgtgacataattttttttaaaatattttttacaacaatatttgttatacttataacattattcctatagatttttaaatagtttacagtccttaaaatacaaaccgaaaaaaatacaactaaaatataaactggctaatctgttaattggcgaattaaaaataaatccagcttgtctaattaacccgatcaaccggattatggtttttttgtagtttttaatttaacatatatacataataaaaaaaaatgaaaagaaaagagcaatccctatcggactaagttagaaacccatcttccattcgcctctaccgcaatcaacatcaacccatccccggcatagcagcgggtaggacaccatattagggaggaggtggcttttttttctcggccaagaaccaagtcgacagttccatcgaagatccaaccgtctacggctccacccaagacccaacgtcgatggctcgtgacagtgtgactgtgacattattcttctctttctcagcatcgacgtttgtatggtggtgttaagcaaaaatttcacatttagaatattaaaaataaatgcaaaatacaatttcacctatgccaaatttatagcataagagtttattaatttaagttcgacccatccaaaattataagaataatctcttaattacaatccttttgtttaaaggaaacaccatttgattccaattacgatgatattaaactttgaggtaaattcaaggggaatttagaattgcagttgaactcaatcaatttaattaaccgagctgtctacgtaccttctttgtgaaggatcaagccacttgtagttcagaaaacagtattttagaatttgaatataaggattctggtagatgactactttcatgaatcctttgttatttaaaaatttggaaaaatccctaggtgtatgaccttttatggaattttaagatttatgttttatatcattttgtagtatcagcgactgcacttagtcttagcaactaagttgcctacgtatcctcttatagaaatcaagtcaaacgtagttttaatgaggtgttttgataattatgaggtgaattaaatcactttgagatcttgaggtaaatgacctcatttaatatttttgaggtaaatgacctcatttaaaatttttaaggtgaatgacctcatttcggatttgatgaggtgactga

SEQ ID NO: 322632 - DNA, 1525 bp, Cannabis indica
agttactcatcaaggaactagtgctatgaaagagactaaattcaaatttattccactcaatatgagaacattaagatgaaagcagatgaaactattgctaacatgtatacttgttttaccataattactaatggtttaaactctcttggcaagatattcactcaaaaagatatggtgatcaaacttttgacaagtctcaccaaagcttattaaggaaaggtggttaccatccaagaagccaaggatctcttaacacttcccttaaaagaactaattggttcactcatgaaccatgaaattttcatgagtgctcaagaagaagataaagttgagaagaaaaagaagactattgcattcaagtcttcctcctcccatgccattagtgaagatgatgaggatagcttgtgtaatgacatgaagaacttggcacacttctcaaagaactacaaaaagttcatgaaatttaagaagaactttggaaaaaagccacaaagagggagtgactcaaaagaaactttgaatgcaagaagcccagatatgaaaatggattgtccaatgagaaagaataaagaatacaaagaagggcaatgttggcggattggctcaatagtgatgaggaggactctaaaaacgaggagaataatgaggaagctaatatgtgcatgatgacacttgatgatggggtaagtatttctagctaaagtgactgtgatagtgaaaatgataatgataacatatatattgcatatgattaattttttaattcctttaaggaactatttgacgatttttgtaaatatcttgctataaaccaaactcttcgagagaagaccaacatgctactaaaacaaattgaaattttgaaattaaatgaaaagaaacttttagctgaatctcaatgtgctacatgctcctctataagaaagaaatttttgattacatgctaatgtaaaaagcctaaagaataacatatatatatttacaagaggaaaagaaggttatgaactcatgctagaaagtcaatcatgtggttctgtaaaaaaattgcattagctatgatcctagtaggaaacaaatttttttgagaaatttctttgtaaaatcatctagtcaacctcactttacatacacatattgtaaccaagatagtcatactattttatattgtcatgtaaagaaatatccatatctaggtaagaataaatgggtatcaaagggttctagtactaacaagaaaggacctaaagttattgggtaccaaaagttaacaagcatgtttgattttgtaagaaccgacaaaaaagaacaaaattctatggttcttggatactggatgttgaaagcacttgaccagtgatccctcaagatttttaagctttaaaagtaatgaaagtagatttgtcacttttggagataattcaaaaggataaattttgggcatttgtgatattagtaatgtatattctccttgtattaaaaatatgtttcttgctgacaaccttaaacataacttgcttagtattag

SEQ ID NO: 322633 - DNA, 1228 bp, Cannabis indica
ttttgggtacaatacatataaaaagatgtatgtttcaattaaatataaattaaaggtagatttagttaattaataaataaaagaggtatttttcaatttacccctatttaattagataaatcattcaaaccctaccttgctctgcacttcatcagttccacgcctctaccttcccaacttcattacctagcttcagcgactggcgtttggcaactggcgacccgtacatctggcaaagttattcgtctcgcctgaaagttgtcactatgagccactaccattgatgtcgttgtcttcctccaagccaacaatttacagtgttgagcaatggagctggaattaggtgcataatcccagccattattctcaccttcgttcaatctaagctacaggtttttatagataaaaaaaatattattattttattttatttttaagattaacaatctctgctgttgtcggttgaaatttggacaacaccaatattcgtgcaagtatttaatgaaattaagaacactcgaataaaacttgtgagtactcaaacaattggctactaacaaacaaaataaaaatcagaaaataacaagaacacaaagaaattatagtagttcaatcaaagcttggtcttcttagtccactgttgcaaagattttagattcatttatttgattggatcactcctttatatagaaagcaagtgacatttaggatttacacaactcatcgatttttagaactgttttacaataaatgacagtattaaatcaaaataaacgttaaagaataaatgaagaataatttaatcagttcttgtattaagtatggcaacgtatgcaacttgctaagagcgagttgcctattcatattctcgcacaagcttgcaggcttttagtgcgttttgtattttctaggtggcttatgggcctatcgtttggatgtctgcattcacttttgattgcatagacaggcatctcgtgtgttgacaacgtggaacgtgcgagtccctaatgattatcgaatgcaatcagtcattcggaccaatctctatgtaaagaagtgacctttactagtcacaggggaggttaacctagtcgtcgcacatatttggatacatacgcaacttggattaaaatctctcggtcctgcttgtgtctttgactatgcaagacatagtgtagtaccctagaattaaggaatggattagcaaaaccctaattagataattatg

SEQ ID NO: 322634 - DNA, 846 bp, Cannabis indica
attttttttaaatttttattggttcaatttacttccctatagcatagggtaagaacacatgtacctactatagatttaccctataatcaatatcagcaaggaaggtagctaaataatatcctgattttcactttataagtcctgagtaagttatgacttaaagaaaaattaactaaattaaatttgaggttattcctttgttcacttttacaaaataaaaatctactttaacaaagattagaatgactgaattattatttttttttttttttgcaaaatacaatatttaattttttttacggcctttcacaaatttttgtattattttagtgtataaatattacttccattatatgtatttatattttatatacaatatttatatataatcagtacgtatccacgaggtgttcactcattttttaaaataataaaataagaattttattttgagttttgatcaatattttaaaatttattcgttttttaagaatatatttggtattttataattattataatcaatacaaaattaagtgtattgaaacatgcttttaaattgaatatttaaaaagacaaatgataaactttaaaattaaattttttatttccactaaagatagtaaaggtagaatgttatatataaaacaaacctatagttttattttcttaaatatggaaagaagattccacaaaatcttttagaagaattatgaattatagaacttcattctcttatggttggccattgactatttgactgtgattagtcaacacaatgaaagtttcaaggaatatgagcttgcacggtgtgccatgcccacaatcaatgtcaaaaatgcattt

SEQ ID NO: 322635 - DNA, 942 bp, Cannabis indica
tcaatccactcttaataacacatattatttacatttgcattttttttttttgggaaagatctttcaactgatgaaaagatcgtcttaggccttattagattttgggatcaaactaataataaaatattaattaaatcaaactttgttgtgcacatttttttttttggccgagtacaaattttacacctgtttggagttggtctaacattttgaaatcaaattaaaaaatgactttgaggagaatttgggttaaaaaattatttattatttttttaaaaaatgaaaatctttttgcgaaaaaactaattttgggaaaacaaaagctataaacattagtaagtaacgagaattaatggaaagcgaattatttccggtcttttacaaaaattattaatttgattttattttttgttaaataacaaaatagatcttatattttcaaaaatagtaaaaaaataaaactctgaactcaatttttaataattttatttttcaatataactaactttaagacaatttctaacacgaacaaatacagaaaatgtgaccagatttgtcataatatctttagatcggattattattaagttttattttgacaaaaaattaatttagggtcttatttgtacaattttaaaaaatacaaagctcattttatcatttaataaaatagaggatccaattagtagtttttacaaaatataaggtccaaaatagtatattatatttatattttataattattaaaagttattatatgcctatatatttttggagttctttaatttaaacttttataattgactttttatttatttataaaaatagaaacaacataatctcgaaataaaacagtataacctcaaaatgaaaataatttttataaaatgtaaacaatataatctcaaaattcaaacagttgctataaaaataaaaataaaa

SEQ ID NO: 322636 - DNA, 664 bp, Cannabis indica
ttttagagcaagaggtcagcagtgttttcttaatattttttatttttaaatttttaccataaaatagtctttttaaaataaaagaagaaaaggtaatacttttgaaaaattttgtcaaaaaaatgaaaactcttctttattgtattttgttgtttttgaatttgtattctccgtctctctcttttttcttttagtgtgtgaatatataagttcttgtattattttaaggctaattgattaattaggatgcttgcttttttgagctttaatatgtatcaaattatattttttgaactttttataccgttaaaaattcccattgaatcatttaaatttttaaattcaataatttttgtccaattttactaacagaagcctgacatggatgaaagtttgggagagatgatttaatatataaacaattattgtattagtaaaattgaacgtaattcggcagattctttaaattttacaatctcaatagttcagttataaagccaattacatgtgtaaagtccttttttggcaagttagttgacaaaataatttttcccttttatggtaagattgttgtgcattcatcttcgatttcttaccttataaattcggattgtagttgcccttttccttgtttggaaagttgcactttcagctgaactttcct

SEQ ID NO: 322637 - DNA, 620 bp, Cannabis indica
tatatataactagtttggtgaaatgctaaaaagcttgacttgtgttagcctaagaaattattaatttagtaagggaaatagagagaatattaaaccaaacaagatctaattttcttttgttgttgttgtgtttaattaattactcaggatttgagaatcatatagatctacaaatcttggaaaggatcataatatcattttattagattcttcttagcttttgcagcctcatctttctcactaaattctctaatctaccatatattattaatcataaggtacgtgaatcatgatgagaaagtgctttgctcttggtaacttacccgaaaaagagagagaaaaaaaaacatgccaaattgtatgttagagaacttgtatatcgacatttgtcccattaatatatacacaagctaagctaataatcatatataatggtggtggcggctgccaatagtacttcccaagtaaaaggacgtacaagtactactatatctacgataggatagtttaaactgatttagtgaagaatcagtacaataacttcgattattataatccaaaaaatccttttcatataatataattttacaacacactggcatacgattcctaaataaact

SEQ ID NO: 322638 - DNA, 2392 bp, Cannabis indica
gttgttgttttgatattatttaaatgttattttcatgttacttttatgtagttttcttgttgttttcatgttgtttctatgaaaaaccgtaaaaatgtaaaaaaaaattctttaaacgtaaaaatgtaatttttttacaaaaacagaaaaaaatatcttatgtgattatcatcttttcttttatataaatatggaattttttaatgacatttaggaaaatatggacaattaatgaaataattttaaaagctgaaaaaaaaaatcttaggaatttccatttttaaattttattcacccaaaatatccaaaagagagtaatcaactccaattctctatccctaaaacaaaaaaaaaaaaaaaaaaaaaaaaaaaaaaacctaccaaattctctactctctgattattttttcattctcctcattatttttggttgcgattataattttctttaaatttctttgttgtgattgtcattttcttcttcttcttcataactataattttaatttctcttattattttcactattgactttgattacattcttgacttaattaacatattatttgcaaaaaaaaaaataaataacaaggaattttaattttagatatttattttggttctcatgataatctagtaccttcagctgagtgacttgagttttgactgcaatttataacaaaaaaaaccctcatatcttgaaaagacacctggtagttcaattttaagcttttattttgcttctaaaaataagctagtacatatacctaagtgttttgagctgtgtctgtaattgttaaaccaaaaaaacactcatatcttgaaaaaagtcacctagtagttcaattttaggcatttattttgcttctgaaagtaaccttggtactttcacttttgaatatggctaagtgtgttgagttgtgactgcaattttcgaccaaaaaatcatcatatcttcaaaaagtcacttggtagttacattttagacttttattttgcttccgaaaataacctggcactttcactgaatatggttgagtgtgtttagttttgactgcaatttttaaccaaaaaaaattatcatatccttaaaaattcatctggtagtttagttttaggcttttattcagcttttgaaagtaacttggtactttcacttttgaatatgtgtgagtatgttgtgttgtgactgcaatttttagtaagtttagtgtgttgagttgtcactgcattgtttaatgaagaaccatcttatttaaatcacttgataaacaaattttagtcttttatttttcttatgaaagtaacctggtaccttcacatttgaataagactgaattaagttgtgactgcattttttgatgaaaaaccctcttaccgagaagttctgtgattggtcaggctaacgtattaacaaactgaaaacctccattttctttagcaaaaataccaacgatgggatgaaatgtggtattaagcaggttcttgggctcaacacggtagagggtaacattaactacttggggctcccattgttttggaaccgtaataaagtgcagatttaacttcattctggataaccttgtctcaaaaatgcatggatggaagttgaaatcattgtctaaagctggtcgtgctactttgataaaattggtggggctttctttaccagtctatgctatgcaaactacgaagttatccaagaaacttccagctaaaatcgatggcatggttagagatttttagtgggactgcgagcaaggcaatcatggtatctacctaaaggcttaggattagttatgtcttcctaagtctcgtggtgggattggattcaggagaactttggaaatgaatcaggcctttcttgctaaatggggttgggctctccttactgaggaccaatctttgtgttgcaaggttttaagtgcttagtatctaaaaggtatacctttcttgaagtgttcgtccaagagctcgaattcgtggttctggaagaatgttgtgaagtcgaaagaaattcttatgaaaggagcctgcatgtaaactcatatcggatggacatgatatgaacatttgggaagattcgtgggttattcatggtctggacttctatcctcatcctatcaacgagtgtcctgagggattggagaaagtagcagatttactgacatacaatgtcaattgggatgttgccaaactccaaaacctatttgacctggagactgttgggttttgtgtcctaaataaaatccatttcaatataatcagatttactaattactaaagatcagacatcattttatgttgcatggttcacatgatttattttatgattatatatgtttaatatacaaattctattaagtccagaatatatatatatatatttgtt

SEQ ID NO: 322639 - DNA, 759 bp, Cannabis indica
ttttttttaatattgcaattaaaatttaaacacatcacacatatctaaaaatatatttccattgtcatatatttttcactcaatccacatatctaaataaatatctttctattattgttttattttttttaaaaaaaataataaaaaaaaaaagtatttatgtttctcacagaatcactattacaacgatgttacctattgtagttaccaaaaaattatctttctaatttctattattatttttaaaaaataataaaaaaaaactgtatgatattcctaaaaaagttaaaaatattctaaaattaaaagtattatggtgaaattaaaattataattaatacttttttttgaatattattatgtcttctttttataaatagcatttaaattataaataatagaaaatatcttctctctcctggtgcatacccacaggcgaagaacctctgaaatactcacaggcgagttgaacctgctgcgaccaacgacaacaacctgctgctgcgagtcgagaaccttccaccgatcacgtcggccgacggccgatcatgggcaccgtctgagattggttcagttcagtcactgttgctatatttttaagcgctacgcaagtatacgcaatcaagtagtaaatctcacacaggtgaggtcgatcccacagggaattggattaagtactactaaattatacttatgattctattcggtaaatcaaaagcaattacggtttaaaaacagtaaaatttgaaagaaattcag

SEQ ID NO: 322640 - DNA, 524 bp, Cannabis indica
ctaataaacaagagatgttacacatgactatatatctaatttggagggaactaaaacaatgtcacatctcaatacaagtctcaaagtataattaacaaaatgattagtaccaaattgactaaataacaaaataaagatcataatttgatttgcatcttcaaattccaaatagcccaccctaccataccaaattcttcaaattctactatagctcgatataacttatttgcatcttgaagttgtcttagtacttgattatgtttaaaattggtaacatgttaattcttttcgaaaaatcaaagaaaggcaaagagaataaaaatatatatgatcttgaacacaatttaaacaaatatgtaaagaaattaatacactacttataaattagcattctcagttgaaactaactcaagtgaccatataaaaataaaaagtactcggatatataaaaagtattcatcgaatatcaaatatgtaactcaaaaatataatataaaacactttaataataaattaaaaaaaaa

SEQ ID NO: 322641 - DNA, 1125 bp, Cannabis indica
aatgaagagttgttggagcttgtagaaactggcttaatttattgacagcataggcaacgtctgctctagtgttgcagaggtactttaaagctcatatggtacttctataaaatgtaatgttgtatatcggttccccatctttttgctaacataggcttgccagcagtcattagagtggtcagggtttgatattctgcatgttgactcttcaaaagatatcctctatgtatatagtcttagttggatacaaaccagtgccatctctatggacctctatgcctagaaagtagtgtagaggccctagatcttttagtgtgaactctttgttcaatgttgagatgaattatgtcaatttgtttgagttattgatggtgacaattatatcatcaacataatacgacacaaagatgacatatttgtgcatattccagaaaaaggcatcacaccagtattttaggcatcacaccagtatccaaggcatcacaacagttgtagaagaggcatcacaccagtattttaggagcatactagcttgagctagtagtatcaatcccatttcaacaatgtgtcgacgctttctttcagcttgaccattttgtgatgaggtgtgagggcatgagtgttgaaattatattccttgttccttaactaaggttgtgaaaggttgatactcaccttcccaatcagttctaagacacttaactttcctttcaaacttgttctcaacaagagccttaaattcaaggaaggcataaagtgcattagatttgaattttaagggatataacctggtaaatctagtaaagtcatcaatgaaacgcacataatatctatgattggtgttagattagattgggacagggcccacgagtcagtgtttatgagatctaaaggagcagtggcatgagattgagacaatttaaagggaagagcatgagccttgccaaattgacaggcatcacagaaagattcactactacaaaataggcttatcccaatggttaataaaagggtcaattatgaaaactgttggaaaaggtaaggagaggtttttcctaacagtttagaactaaagcaaaaaagctgttgggaaaaccaatgccaacggtggagaaccgtgggcaa

SEQ ID NO: 322642 - DNA, 1405 bp, Cannabis indica
aaatttaatagtagtatatatcgcaggaaaccttcatagtgcactcctaaaaatggtgcaccgttgcacattctactatttcacaattagaagagctttttagtccatttttttcgtggtgtgtatgttgtagttagttaaaaatatcctataaaattttgataaaatttaaaataatttaatgtataaaaagtgatatttaaacagtctataatgcacacttttagagtttgtccttactcttgtatctttaatatattgataaaatatattttataatatccattacaattaagatataaaaattaaattatataaatttttacaattatttataaaaaaaaaaaaactaatcaaaatataaataaaatagaacaaagagagctaggcacctgcaaatgcacgtgcgctaacctcttctaatattaaaatttttacaaaattttgttatatttcaaatttaaatttgaataaagtttaattttaataaattagatgcgcttaaaaagttgtttaagaaagtctaaagctttgtacaagaaaatacttttgagctagttcggtacgtcatattgtattattttattgttggattatattgtattgtattagtattatttaataaaatactatgttattgacttgtattagttgtgtaaagttataatatagtttcaataaacttgatcctaaagctgactacaggtcgggtacgggttcgggtctaggtccaatccgattcttgggtcgggtcccggtctagggtccagtttagattcgggatccagggtccaaaacgagtctgggttccggtcccaggtccggtcttgggtgtgatttcgggtgcgggtctgggtttggggtctgagtttgggtcccaagtctcgggtctgggtttgggtacaggtcctatgtccgggtccgagttcgagtctgggtctggtgttcggtctgggtccggttcgggtcccgggttcagtcccaagtcaagatctatgcctgggtcttcgattcgggggtctagggttcgggtcaattccgtgtccaatccctggttcggtccaaagttcggggtccagattttggtcctgggttcagtcatggtgcgggtcgggtctcagatctaggtccagtcctaggtcctagtcccaagtcttggtctcaggtcctggtcccgggaccggtccaaggttcagtccgggtccaggttggatcttgggtttgggtctaggttcatgtttgggtctagatccaggttctttgtaaatattaaaatataatctaatattgaccatttgttatatattaaataatacaacatacattgtatttaatttttttttcataataattaatacaatacattgctttatctaaacatagtgttatatattatttaatacaa

SEQ ID NO: 322643 - DNA, 2618 bp, Cannabis indica
tgttaataaaacatacttggtagtaaatctagatcctggtaaaaatatttccaccattttcttccacctttctttttctttttatatcctgccccctattctgatactttggcctctctgacttgacctattctgataggtggccctgttggcaaagagggctactaaggaggctagtgtgctagtgatggagctggagcaagtcaaagcggccaactgtgacctgcgtgccgccaatgagacccttcgagctgagcttactaaggccaggttttagattagggatttgcagtaggagaaccagcaattggaggaggagaatattcatcaagcccgtctcatactaagtgttatactcgaaattcgactggtgcttcaaaaggtgacacgtgttagtctcagagaatatgaaccagcaaatgtaatggcaatcgtattattaaatattaaatggaataactcattaaatacggaattaatagagtatatttgtaactcgctgactgcacggtcttaagcgagataaggatgtgcaaactattggttcgcgtattgacgagaaatcatttcatatccgaaggcataatcccaaggagggcatgtataacgcatagcaagacatccatatcgctataggaaggcatactcctggtaagcttcagcttgctcccagggttattgttgttattgagaactcccaagaaatgattgtccggtctgcaaggccttatggtcaaagagcagttcttaagtttgctcaatacactggtgatcatgccattgctggaatatatgtaagcaaagccattcatccatccacaaggcaagacgtctaagcgatatacactctatagcgtgtcctaatccacgttagcattgacttccttcaacacggtttaaatcacagctgtgtgattttcaaataataactgtatttatttacgtggagcatacttcaagcccacaatttcagggaatattgttatgggatttgaaattaaatgtaattaactaccaacctgtattactataaataggggccgattataaagaaaaaggggcggaaaatccttgaaagaaaaaagaatacaatgtttgtgaaagaaccctagttctgtatcagaaaaatatgaataagattgactcgtggactatgcagagttaactgcaaaaccatgtaagaacctggtgttatttctgtttctattattttttcttatatctcttatagtttctgtgccaaatctactatgaaaataggctcataatcgttaacgaaaatccatgttaacagtttggcgctttcattgagagcctacgtgataaaagctcagaaaaatccctcctgaccaaagaaggaattgtctcccctggctaataatgggaaaaatgacaacacccatcctgaagaaactaatcgtcgtcctggaaaagagcccatgggctcaggaggccacccacttcaagagctacacgctctacacgatcaacacgttctagaagaacccaacgtgacagtgatcagaacccagaaactgggaatgaggaaaccaataatgaagttgatggttatgtacctcgggctgaggatgcctacgaccccaccaggtacgtgtcgttggttgaacatgaaaatcgtcaactctggcaacgtttggaagaagcaaacaaatgaaatactgagttaaaaagggaggcagtcgcagccaggatgaatcaagaaaacaacacacaaaaccaacctgatcctaaagtgagaaggtcgcgaggcagacctcagggctcacgagacaggaggcaggagacgactcaggaagacccccaaaatgctcaagaagaacaacctggggaaactaggaatgttcctgaacgtgagcaaccaaatgaccaagcacgtcatcaagaagtgcctcgaagacccaagcacctcatcaagaagtgcctcgaagacctcggggatgcctaacccaagggaatgaagacaatgatttaccggagccttctcctaaaaacgagaatagaaggcaacccaggactagggaacaggaaatccctcatgataacgagagaaatattgggactcaacctaggacaagtgggttaccaccaagtcgtcgctaacgtccttctcgcactaatagggaaagggcgtatacaaaccccaacaagggacatgtatcaagttgttcccaaaggagaaggcgcatacgtgacgaggccagttctagctcgggacgtatgagatctcgagattacagtcgatctacgcgaggaggggataaaactcgtcacagtggtgatggagaaagttcgggcacaactaggactgaaagttactcaaaaacgaggttagtaagtaactatgatccacagcggccgaaccttcttaatcaattgaatcaaaagaagcttgatttacgtcaacaactcaattaaaagcaagatgatcctatccaattgtgaatcattgagttggaggaaaaattcaggagatacgaagatagggaatatgggaaactgcccggttatgactcggacgaagaacctgagcctttccatccagccattatgagtgttgaatttccctagggatttaaaaaccctcacgtcttgtcata

SEQ ID NO: 322644 - DNA, 945 bp, Cannabis indica
aaataaaaataaaaatgaactttacagaacacacttttgttttctgtttttaaaattgaaaaacaaaagtggtcacagactgcatttttgtttttcaaaaataaaatttttaaaacaataaacaaaagtgtgttctataaatttcattttatttttatttgttgattttatataagtcgggttcgagtttgggtccgaggctgagaccggagcctagttcgggttcgatacggcgttggggttggggtttggattcagagtccaggtccagcaccgaggtcaaaatatagggtccgaatatgggttcgagtccggttaggggtctgggttcaggtctaggttcagggtcctggtctgggatccaggtcggggtcaaggtccgggtccggtttggggttcggggactgggtctgggtccgggtccggtttggggttcggggactgggtctgggtccgggtccagtctagggtttagggtttaggaactgggtccgagttcagttcaaggtccgcttttggtccgtgtatgggtccaggtccgagtttgggtttgggcccgggttcggttccaagtctgggtccaattttgggtccaagatcggggtctgcctttgggttcgggttccaaggtctaggctgggaacgcagtccaaaatattcattaagaaaaaaaaattgtttaaaattttgaaagtgatttttttttgttttcaaaatttttaaaattttgattctcaattacaaaattgaaaagtgaaatagttttatagaacatgattttagaaaatattttcacttttctaatataaaaaataaaaaaatggttaaaaaagtgttactaaacacactcttaatatgactcgaactcagacctcaaccctagacccagaccaggacctagactgtaaagcccgcttagttaatttggaaattagcagttgttta

SEQ ID NO: 322645 - DNA, 867 bp, Cannabis indica
tttttaccattttagaaaatatatagatactgcttcctagactaaagataacataaaaaaaatgggggatgttcttctaagtcttactaattaatcactataaaaaatactatctatagtaataattttttagtcataacatatgaattattatatataattaagactaattatgatttttgctccctgaactttgacatgtatcaaatcatgctctctgaacttttaaagtcgctaaaaatgccccctgaactattgagactgttggatttaaggacttttgtctaattttagtaaaaaaagtctaacatgggtgaaagttcaagggacattctaatgacatgatttggtagatatcaaagtctgggagaatggtttagtacatatataaacaatcattgaaatagtaatattgaacgaaattagataaaagtccttaaatccaacaatctcaatagttaaatgacatttttaataaccttaaaaattcaggagacatgacttggtacatgtgaaagtttagggaataaaaatcctaattagcctataattaaatatccttgtgactaaaaagatctttttaagtgaatattgtgatgctttctacctttggtcatcaatttcttatgcccttcctgttgttgtagtctccattatttgtaattactttcctttttcctatcgttgtctaattagattattacagtgttgaccatttgttgaacacgtgtgttttattgggtttaatttgttgttgaagtttgaatgagtccatatttttctcaaaatgataataataataattaagactaatatatatctttatatattaaaagtgtctatctaacggcatttcttggtttaaca

SEQ ID NO: 322646 - DNA, 919 bp, Cannabis indica
ccacatttctggtctatacgaccttcgttttcaccttcgcactagctcagtcctctattcttccacaacctcaatctctcacttccttcatccccaacaacacccacacccaggtaattctctcacactaactcaaagctactcagttcttttctctttgtaattaaaaacaaaattatcatatttattgtagaatcaagggacctgctcattcacggtatcaatcaaaacgagctgttcttcaccgaaatacactcgcgatgaaatcagcctttcattcggcgatgcatatggaaatcaggtaaaatattttaatttgaaatacgaaattggattgggcgattgattaattgattgcttaattttggcgatgaaattgaaaaaggtttatgctcctcggctagacgatccacgatcgaagacattcgagcgttgctcaactgatacatttgagatatcagggccttgtacttatcagatctgttatctctacctttaccggagtggttacgatggttggaaaccagagacggtcaaactctacggttatcacgtcaaagccgtttccttctattacaatactttcatccctaacggcgtttggtacggctttaacttgtgtaacgccgtctctggtttagcttcctccgcttaattaagctttggttaattaaattaaattaaattaccaaatattatgttatgttattgtttgtaagttttgtttggtacttattttcgtagaaatttcgcctttaattttcaaatgaataatgaatgtgagttaataactgagcaaagaaatgaatgtgagttgatacaatatatattttatatatgtgtcttatagtgtttaatgatgttgatataataataataataataataagggtaaataccattttagattctgtgtttt

SEQ ID NO: 322647 - DNA, 744 bp, Cannabis indica
aataaatataaaattagaggtaaatttgattaattgatcaataaaatgggcatttttcaacttaccccctcaatttaattacacattccaataggtaaaagaaaaatatcacaaaactttctcattcactttatttttattttatttttttaatttcccttatccaaacaactctcctctcctctccttaataagagccaagaaattaaataaataaatatatatataaagtgttttaagagaaaaaataaaaagaaaaagtgcacaacttttcacccccttttctttttagctggcagaaaaaaatagaaattttatttaatgaattaatttattaaaaaaagaaaaaatattattgcagtttgacgtttaaggctcttcattaccactttcttccatcgtctactaaggataattcggtcatttcaataaaattacaataaatatttatttatttaaattaattaaaattaattattagataaaataatttattgtttaagtttaaatagctaaatttagttttcgtttaattttttacggtaataatacttttatatatttaaatttctatcattacttgactgttaaatgttaagtgattatctattttcttatcggtatatttaactttgattttaacagttagataactacgaaaattataaaaatataatttaattatgggatatttttatttttacactttaaaacagtttttttttatatttttacgaaatttta

SEQ ID NO: 322648 - DNA, 1116 bp, Cannabis indica
gtagtgatggctaaaggaaaaaagatgatgcaactcattcattgagtaaaaatttgagccaccttcacttaccctattcgaaaccttctctctctcttcctctcttcaaaatcgaagccacatagtgaaaagagtgagtgcccacacacatcaattggtactcaatcatagtgtgtaaggctgtgaagaattcagtttcaagagaaggagattcgaactcaaatcttggtgataccctgctacagaaaggatacaagggttagagatctgagtggaagaagacattatattccgctgcaaccactgtaaggttcctgaaactttatatgtgtttatttcatatcgttttagaagttcatgtttaggatgttaataacatacttgttagtaaatctagatcctggtaaaataattccaacagtcatatgttcactcacttcggggagcgaccgagccacgaagtggtgtagcatgtctttgtctcgcctggcctctgggcacaacaccagagttggggcaagggccctaacttgttcagatctgcccttgacttgctcggatccagtcttagcttgctaagatccgtccaaactccccccaagaaattttggatttagagaccttcaggattgaagggtccacagcaagctactcctcagagagatcaatgaccttgtcaattggcatcttctccttggacggagtctcactacccttagactcattggccggaggagacaaacctgagctaccctccactcccttctttagagcctcaatcatcttctaagccatttctgctcaaacaaaataatacagtcagaagaagacataaaatatgtgaaggcataaaaatcagggaaaataaatgtaagttgaagtactctgcacgttggcaggtgtgttctcccgaacgattatggatggagtgtcatcgtccgaagagtcttcctactcctccaggatagcttttccctttccttcgacagggactaatggccgagcaggcacgccaggttccctaatccagatagcatgctgtatgggcccttgctcgatcgagagagtcttcttcttcttgcgtggcctctcttgctctgaatattcttgagcctc

SEQ ID NO: 322649 - DNA, 598 bp, Cannabis indica
agtataacttatatcatatcatatgcttcatataacatataatgaaccatttcagaaccatacaaacataattaacaataaaaaatcaatgttttgagcaataatagaataacataatactcattaaatagatcaaagaggaaagccatataccagcgtaaaatttttctagttataaactattgaggctcatgggtagcaaaactagcagttgctctcatggatggtgttgaccctgaaaagtgatcaactgacaacggtgtcgtataaatctgatgcttgccacatgttacacaataagaacaataaattaaatgagacaaggatttttatagagcttttgcccccttagttagtgggtaatgacctactcctcttttagttgtattgatacctagagataatactattcaaattactatataagcatacaaaacacgaatcaagttggcagatctctgataaaagagaggaatatccttagaagggtgtgagagatgaatagacagagagcccttgggggcttgtagcagagagagagaaagagagactagggttcttaacgtagagtaattaaataagaaaattatatttatgt

SEQ ID NO: 322650 - DNA, 951 bp, Cannabis indica
ttatttagggcataaagcccaacacttttatcctgacaacttttgtcttgaaatttttggtcttaacaactacagatagagagttttttgaggggagggggaggtcctggacgattgataaacaattaattttctttgtgaagccttatgaattgggtgtgttatccgtgtttttgacaagtaacacgtggaatctaagtcagcatctaggcccaccagtgggtcacaaagaagacaatttgggccaagcccaagttatataggaccttctaagaacgtaccttagcttcgtggttaaatgatcttctgccagtgacagctcgtattcggaagtagctccagtattgtgatgccgaagagttggacaacatgttcctaaaagactagtcgtctggttttcctttttattcttgcacacaaataaggaaataaatgctctctaaatcttgacaaaagatcgtatcaagctaaaagggaaaacttcctaaacaaagatcaagcaattaatttacgattaattgcccacaattataggacacggttttgactaattcagctgtatctaatctgcctagtcagaagatcacttccttcgtgggctgaacttcacaagacaactcaagttatgtaattcaatgtaaactccctagtagagggaaaatgaaaactaagtataattctctaaatactatggaaaacttgagaacttatgctcattgtatttccaaggtttttctaagttacataataacattgactcgtggattaaggctcgttaacgccccaatcacgtaaaaatatttgtgttattcttactctttctcttttactcgataaatattttggttactttcattgagagttgaaggaagcagtgataccatctagaggttgcgttagtaatcatggcactcacccgtaacaagtttctggtcttcacttcactgatcc

SEQ ID NO: 322651 - DNA, 2225 bp, Cannabis indica
catggcacttaactgtaatttttggacggaggtgtacagagcaaaatggaatgggagtttaggtagttttgccgccaaaatttcagtttttgtggttaactgttacaaaccgtaaagttcatgtggtttagccgctactatccctttttttaatatattcattacagttttattttaattatgtggcttatagaacaaatataaattatataaaatttaaatctcaattattcgagtatctatttattttagagttatttacgctcaacctccttaaactttggagtttgggacaatcaaccccctagactgaaatgattagggttgaactctgcaatttacaaaattattttgctttgtacccctttcattggtctggctccgttatttgccagatggctcctccatgacaccaagttaacattgtcatgtcatatgccaccctccatgtccaatctgggactaattaattttcattactcattatgattaagatgaaaaattaagaaaaataaataaataaaaataaaaaaattgaaaataaataaacaaaaacaaagagaaaatagggtcgaagagagaaaaagaaatcaggtgccattattgtgcgaagaaagaagaaaatggtgatggttcgaaggaggagttacgattgtgaggagcctaaaattctaaaaattttacctcatggacaagtttgaaaccaggaaaaagatttgcaaagtgccctctaggtcacgtgagtcctcttcttctctttcttttttcctttttctttcctggttttttcttcattgtactttgcgaatgtttcttggctgacagcggtgggtgtgagttttaggaaaggatcgatcctcctatgtgtgattgtgccaatgttatgattcctgacatgttgagaaagattcatcaattggaacaagaaatattaataatttctaggttagaaataggagaagtaaatgagcagccttaccttacaaagtttcccaaaagtgagagcttctatgataccactcctagtgtttgagttcctcgatgttcaagctgccatgaaaatcgtagaagtgccttttgtagaaatattgtcatctgtattgtcattacttttgtattgttttagttcaaaaaatgaactttgttcaatactttaattttgttttttagtaggatctttaacaggtgttcctattaatttgacatataatacttgatattttgaaataaaaatggttattttgacaagtttagatcttccattaccggcataaaatattgactcagaaatctagactaaatttctaagccacacccgctcgctagattggcgagaatgaaaaagaagttaagtaattaagagagacacaacatagttatgctagttcactccctatatcgggatagtaatggagctacgtctacttcgagtttttatttctcatgagatggtaattacagtaatagactaagtgtaagaacctccaaattctagagagagaagctcaaatctggtgagtagttttctaaatgtgaaaaatgagcttatggagttctccttttataggtgaaggatgcccacaaaaataggaaaataaatacaaataagatgtttttgacagttgatgatgatctaacggtaaaaattagctcttggtgatgatggccatcttttaaagatcagcgagtcctattgcgagtaacctagagcttattgtcgtaactcccttcgggtgaattttgatgatgataattttagaactacgtctgtagtgtaagaattttcttcaaaatgtaagttgaattgcatcaattggatcaaaaattgagtgaattatgactgttttattgaaggaagttcatgacccagtgcccaggttgacatccagtgaccaaattgacatcctagcgaccaggttgacatatgacgtcaaccaagacactgggtaagtgtaaaaacatcaaaaggaagcactttaatatgcctaataagtaatattttgacatcacttagcccatttatgtgttctagcgaagctagtcatcagttcttagagatgttgctattatgggaaaatggtagactcaaaactcttcatttccgggtgagctggaaatgtgaaatgcaaagttatgtatttaatttctttgacttcatatatcattgtaattgtgaaaaactagatggacagaaaaaacaacatcagattcggataagcagaacc

SEQ ID NO: 322652 - DNA, 1203 bp, Cannabis indica
  modified_base (33)..(33): a, c, t, g, unknown or other
ggtccttcccaattatcatcaaatacgccatgngtcagaattgctggattaggcataactttgacgcaataccagatctcctactcacaggctcctttctttaactttttgagttgaaatagcgagttgtgcactgttgataggctgcatttttcaaatgagcctgatcgcacttttcttcttaggaaattgagttggatcaactgattttctatattactttcgatattgaaaacatctcttcttaacgacccggctctaacctcgactggttccatggcttcacatccatacgagagtgagaagggggtttcaccagtcgttgaatgaggtgttgtatgaccacaaaacttgcagaagctcttctggccacacacctttcgtttcttcaagcttaccttctatagtatgcttgatgattttattgactgcctctatttgtccattactctaatgatacgcgaccgctgagaaagctttttgaatccccaaatcatcgcagagtttatgcatttctttacaataattttttttccattatcagagattaatttgtaaggaatgccaaacctacaactaatagcacgatagacaaactcgcctaactttgaagctgttattgttgtaagagcctcagcttcggtccactttgtgaaattgtctacagcgaccacaacatattttactcctccttttcctttcagtaattcaccaattaaatctatatcccagatcacaaatggccaaggactagtgatagagtttaattagctccgtgggctgttaacataggccacaattcgttggcacttgtcacacttcttagcaaagctggttgcatttgcttgcaaggttggcttgtaatatccttgccgcataattttcaaagcaagggaattacctcctgtgtgattgccataaattcgaccatgcacttctcggagtatattgttatcccaatttcggtactctgacatgggatcacatattagtgacacgtggaattgacttcacgtatctgctcaaaagagatatgccaaaccgaacactgcacatatctacacggacaaaaccttcctggcagagcagtggacggtccgaacagcatgccaacacttagcaactttaacacttgcatcgtgaatcacagaagcaatccctataactttgggatcatatcgcagagatatggcaagttgtcca

SEQ ID NO: 322653 - DNA, 969 bp, Cannabis indica
atagccatcatcttgaggggaatgttgtggatattgtcccacatagaagaaatggtagagaatagagccatatataagaacatgggctactccactcatagccaattgattttgagatggaaccccataattctaaacaattaatgaaatttgggggagaagattttggaggaatagataaagaaggtaacaacatatgctctgttcatgattttaactttcaagaatgaagctcatcttgtcgtgtgttgcccctaatgctctgtttcaagaatgaagctcatctaacgaaaactattgaaaattagatgtcaatattgataattaactactacatgataaactttataaaagagtaatttgagtttagagctacaaatttaaaataagatcatagttattagtcttaaaaactaaaatagtttcgtaaagcggtaccaaacaacacaaagattaaattgtttagaaattagaagtaataaaagttcatgagaaatactattgaatgcaaaagaatgtgaccctcaccaaccagtaagtcagaattaacaatatgcatattctggacagaatcttgacagctcccaacaccatgcttagtttcgtggtttacctacacaaatagagtaactattgaactacaaaagcccactaaataagctaaaactaacccaacttacttatcataacaataagtatcaaacatattatataaataataacatcaaggagcctttatgacaatcaggtttgagtgctacaacctctagggtaattctaaaactattataaatctcaatcacaatgtcctagggccaccagcaaccactcccgtggccaagagcaccacccaccccgaccaaaactccattgatgttagcggtgtgctactgatatgtcaagcaaagactttcatctaaaacttttttcagatgctgattgggcctcttgcagtgacactagaaggtc

SEQ ID NO: 322654 - DNA, 844 bp, Cannabis indica
ttcaaaattaaaacaaaaatgtgagcaaagacttaaagatcaaattaaaaaggcatatgacagctgcctccctttataatatgtattgggttgataatggtaccaatccaagtaacaatgatccattcaaaacattgataaaaacaaacaaaaaaaatcctaccaaattaaattaaaataaatttgttatatgagaatataagatatgaccatgaaacacattagtgaacattttttaattttttacttttggagttgaggtgattcttttaaatgcttttcaatctttctcttctctcagtacctactactctttttcttgtctttgctgaagctttaacagggcaagggtaggtttttttaaaagtaagcatggaatcactcatacaccatttacggcattcccttaatcaattagggctatccattttctactcttttttctttgagtacaaaattaaagcaaaacaaaggcagtcttcaaggatccatattctattatattatttttaatataataatatgtagattaaaatgtggtaatatataatattatgtgaataatatatattaagtgtatggtaaataaatgtgtaacctataatttaacctacacttttgtaacctacatagtaacttggagaggagttacaatttgttgtcatttgtaactcttgtgttgatcacacattattagtgtaataaaagggttgttacacaatttggtttaaggatttcaaaattatgatgatatagttgttacaaaatgtaatactcatttatgggagagaaatgaggtggtattttgaatcctaagagtgatcatctaaacactatataaagg

SEQ ID NO: 322655 - DNA, 599 bp, Cannabis indica
ttagatggaatttgctgaatgatatcagaatgagtgaggagctcgaggaccgagtgttggaattattttaccaggatctagatttactaacaagtatgttatatattatcagaatgaggcaactagtcgtcacaaagatcaagttgccaaagacaacgctcctatatttggagaggatgactcaaaagagaacagttctaatgatgatcttcaagagagaccaaaagatgatcctcaagacacaccgaaggatgatcgtcaggataagattattgaaggtggtgctggagaaaaggactctcctcatgagtcagatctcatggtcgccatggccaaaaaatttcaattaactgaaaccaggctatcccgtcaagaccagttcaacgagatattgcttaggaagatgacaagaatggaggtggtgatgaaagccttgaccaaagggaaccctaatgtgcaaacacctccaacaattgatgctcctggaagagttaatctaaaagatcttggaacctcaaatcctcgcaaggataaagggaaaaagatagttggtgaaactttgaaaagactccttcaactaaacaacaaaagaagtctaa

SEQ ID NO: 322656 - DNA, 1200 bp, Cannabis indica
atattcagaaagtctgtttgaaagtactgaattcatttcatatacttgatatgcattgcttttgaccaagtatttattgtgtttctgtaagggtcttcgatcacttactaaagaatgccatgcagtgaagctattctcaaagcatatgaaggttgaagaacaggtagtcttcaatttcttggttcatcgtttcgttgatggcttattactatatcttattcatgaatctgcttttgatgagctagagcagagagttggttgtaaggtattagaaatagaaggttgtgaatcgtgattagtgtaaccatataaattaaagtgtgaatgtttagatgatgtctagcagggggatggtactgggattagtcaagagttagttgggatatttgggttctgttgtgtgaacattgtgataggatctttaatttacattgatttggaattggttatgaatctattttaaagtatctagatgtttctaatagggaaccgatctgcttgctaaggatatatggttatgaaaatagatctgagctacatgcagactgtagctcaaatcaatgaatcattatctaactctaaagttgttttaatgcacaagcttttttagaacatctggaaagccaaatcatgagaaccaatatgtcacctagttatagtttatatattgtagttgatgggttaccataagtacacaactaaatttactctagtttttggtatcattagcattagaaatgtttttgaatttaatgattgtgtattttggataacatatttgtaatttttagtaactttgatttgagtatgtaacccttggccccacgtcctactttgctatctttcttatttctggttttttgttttctttttctttttccatttaatttttctcttttgtaagatttcaagtttttaatgttgtttttaccctaaactgaggactacttgcttctttaatttggaagatgatggcacaatacaaacaaaataccaaagcacaacaatgctgaattttttatttgcacgtcagcctgatccaatgttggtgaaatgtaattttatatatatgtagttttttttttatctgaactaaagttttttgttattatatcccacttgatttttttttcttcatcttaagccttggcttagttccttatgaattttgaaggtgatgacaaacaatcaaattatcaa

SEQ ID NO: 322657 - DNA, 1169 bp, Cannabis indica
aaaatatgctacaattattttagtatattataaattatattgatgtcatcaataagtttatcgattctgtataatattattaatcctagtcgacatggtcccaattttacgctttgatgtccactattgattctgcatagcacatacctataaatatttaagcaaacatagaaataaagtgttagcctcaagctcccctctaatatgtatattataaacacaaattaatacataatgacacttaattgtagatacaaaatcaataataaagtgattttttttttaaaaaaaaaaaaacacaagtgaaaaataattttctcatatatatatataaaaaaaagaaatataaaaaataataagatttagggatatgttaatatcacttggtctcaattttacgttttgatgtcaactattgatccttcataccaccagtcctatatataaggatttaagcaaacataaaaaaagagtgttagcctcaaggtcttgctctaatatgtatattataaacacaaatcaatttataatgaacttgttgccccagagaacttgttcacatttggaaagccttatgtctaagtattggtggagttcgagtagaaggaagggtgtgagctggtttagttggaggaaactatgcaaacataagaactctggtgggatggattttcggagtctgcgtgattacaatctatctctgttgggtaagcaaggttggcggttgcttctgttacaggattcccttgtgggtcgaatatataaggctcgatattttcctaactgttcattcttggaggccgggttgggtggcaatccgagctttatatggcgcagtgtccttgagtcacaagcgctgctcatggacggcgcccgtaggagaataggaaccgattcatctactgcggtgcttaaaacacattggcttttgtctgagaccaatccgtgtgtggtatctactcatccggcactggccaattgtaaagtgtcccaactcatgaagccagatagtagacaatgagacttgtaacttattcaggacttgtttgatccccgtgatgttgagctcatcaaacaggtgcctttgagtgttaatcttgcgagtgatagttggttttggatgaggatccaactggttttttcactgtcaaaagtgttgggttttatgc

SEQ ID NO: 322658 - DNA, 784 bp, Cannabis indica
aaagaattcttccttttaaattacatattttttttacttgattttataaatacacatttactttaaataaaggttcaaaaatatatttttttttaatctactaaatttaaaagtcccctaatccaaatttataggttggtattcatacatctccaataaaaacttgccaaataagcaattcacttcataaaaatactctctaaaatctaactattggagatgttgttagataccatttaacatatctcaaaaggaaaatagccaaaaaccaaaatagtgaatagtaagtctactgaatatgaatggtttttgaagactacttagtgaggctgttggataaggattggcagtgttgaaaggcaagaatcacagcacagcatggcatagcacaagagtctaaaaatctttggaaaggtacaaaaaaatttaagaatctgaattatgtgaaatagtgtttaccaatcacagaatctagaagattgggaaaacaaataacccacttaagtctcaccccccaataaagatccacaaaccgttataattaatgccacaaacatccacttcccaacattttaatgtcaaatcatctttgcttttttcagtatttaattttttaattttttcatatgacctttttcactagattctcttcatcatcatcttcttctttttcttcacaactttattgtatatttgtatgtgtatctatctatatgtcaatccaaatccaatctaattattatatgtcaatctaaatggaaaatttgattttatatacttaaaa

SEQ ID NO: 322659 - DNA, 643 bp, Cannabis indica
ttgttacattagaatggtcattcgttttttttaaaatggaatagccattctaccaaaatagtggaaagagcattccattggaatgccattccaatactttaaaatgcaaccaaacaaaggaatggaatgaaaattatttcctttccattccattccatttcattacctccaaccaaacgccacctaagtgtgtaggtttatgcttaaaagataattttgtaatggactaagatcttggagccaatttttttgtaatgttttcatcattttttcgaaaagtttatgaaattcaaaatgatagatctcgttcccagtttttcaaaacatgctaaatcgtcttatttgtagtttggatgcaaagttatacatgttttatcgagcaaggtcaaagaagtcatgttctaagcatgtcgcttgatcataggcgacatgtcacccaacttcaaaaaaaaatgcaaattttgcacgtgcagataaaaaaagatacgggaacccccgattaactaggttcaggcaacatgtctctttgacttaggcaacatatcgccacaattacgaaatggagtaatctttgcatgtgttggataataaagattgatgtaacgccctaatctataggaacaccacgtgtgtgattttataa

SEQ ID NO: 322660 - DNA, 752 bp, Cannabis indica
ttatggagtatattattatatattattcaataaaaaaaaaaaaaccaagtgggctttcatttccttactttatttacatttgttagataaaattacaaaggaaaatttgcatttcgggtctgcattttttcttctttttaagtacttttgttttgttttcttataaaatgacatagaaaaagcttcttatttgatgcaaaaaaagaagaaaatttccaactcatatttatatttggtcaggacacgtgcttatttaaacacacaaaaagctcaatgtttataattgattaatattactaaaaatagtaaatgcaattttattttttattactgcattatcatattttgagaaatgtgttcacctttatttccttttttttcccaaaggtcataatatattatgaatgatgtgccagacataataatttaaacgagtaaccttaattgacaagttataccacctcttattattaatataaatatatgtttattcatataattatactatacattaaaaaataataaagaaaaaagatttggaattcgaagtaaaatttcatgtttgcctgtttctattttttctctttgatctccaactcaaaccccattttgcctcgataatgaaaaataatacggatgctctcttttttatgtctagttcaaccttgatcctatccaattttgataaagtaccaagtaattttttttttttgccatgcactctatttaggtggcatttagttagaggtaat

SEQ ID NO: 322661 - DNA, 894 bp, Cannabis indica
tggctcttatacacgagtacgtcactttggctgcttcatggactaatgactggccctacaggccaacacgaatattacagcgtgctttgtcctcactcgcatgctttctgggaacacttctcaggaggtcacccatcccaaacttacccaggccaagcaggcttaaccgtggagttctttcgtgatgggctatcgaaaaacaagatacatcttgttgatataggtagtaccaatcaatccatttaagccctcttcagctgtgtagtcccatacctgcacagtctctaaatcatcccacttgaccttccccaggcgatgtgggattgtacagcttacccggcattttcccttatggatcacgggactactgactgtcacaatttaggacatatggtacaatgataattagaaataactcttttgatgcgtatctgatttagtaccgtaaaaccaacacttggtccattacattaacatatatatacttaaaaaaatatatatattttagtgttggttagtgccaatttataactgatgtaaacatcttttgcagttgttataaactactgctagcatgtatctgtgtaaaaccaatggtaaagctccccgctaattttttttgatagttcttggctttgactgccgtggtgatcgttagaaaaagttaattttgtagtagtgaaacttatatttttttcatatcgtgtcaaactcaatgtaatttttttgtgtcatgtcatgttttgctcgtgttaggttcgtgtcgtgccaaaaaattcagcacggtaagtgtggtttatctatatagcattgtcactctaagacatggtatatcatcatttgtggaatttatcatatcaagtcctacatattttaattttaatttattttaaa

SEQ ID NO: 322662 - DNA, 2503 bp, Cannabis indica
tgaatgaaaacttcaaagactaaataaaaaaaatggaaagaagatgaagaagaagaacttaacaagaaataaaataaaaaacgtatatgttaatagagaatgatagagagaatttgatgaagaagaaagtggaaaaaaaaagttatcaaaaaatttaaaaaacgaaaatcgaaaaagaagatgaagagaggagagagaatatcaataattttaaaaaaacaaataaaaaacctattataactacaaataaaaaaaaaacaaaacctagtaataaaggattttgataagtttttttcattattattttcaaaaaaaaaattagtcacaaacatgatatcaaccatcacatcataacttttaaactattttttttactacaaagatttgtaaccaaaacaaaagaatgcaaaggaaactggttacaaaagatcttcaagaagaggtacacaggttgttccaaacaatctcttcatccgttacaagagcagccccagccagattgtgagcgagagtattgtccaatttgggaagatagtgaactgatgcgcctggaaaaaatgacaaagagaaaacaatacttgcaatatatcctgaaagagtcaaacgatcaaaggactttttctgaatactgagaaccagattatggcagtcggagacaataatgccgagaggaaaacgaactgtctgacaccaaagcaaagcacgttgtagagcttttacttctgcaaaaattggggggagacctgaggaagatgaggctgaaaaaccagcaatgacttgccctgtggaatcagtaactatggcaccgtaacatgcttgttggagctcgagcaaagagccgcatccacattaagttaaaacataccacaaggaggctgcaaattggtactgccagattgagtgagggtggacggagtgttgatcttcgattgagcatccctgtactcctgcaagtaatttaaaactgatgtttccacatctaagtcagtgtagttgttatcagtaaaaatggtcttgttccttctattctaaattgcccataaaaaacccaggaagatggagaagttatccttgtcaaaatgttcaaagccacgcagcaaaaattctttaatatcatatttattattagtaaaataaaaggaagagaaagaagagttcttccaaaacttacctgctctggaataagtaattagggagtgagtgttagagtctaaatgtgttaagcaaatcgaacaataaggataagaaatggacttgcgatgaaaaaggttaagattggaaggaaggagatggttaaaggctttccagacgaaatgcttaataatagggggtatgttagaggacgaaacagatgtccaccaagatttaaaggcagcaggattagaggaactaggagcagaggaatgagaattggctaaatggtatgcagaattgacagtgaagcaacctaagggtgatgtttccaaataaggaaatcgctgttagaaggatcaattggaacaccgagaatggaattgatgatattatcatcaaagtattgatgaagtttgcttgtgtcccagtgtctatcctcagtaatgaaaaaagagagtggagagagggggagataagccagctttgaaaggaatactatcccagtcaggaagccatttggggtcaatgattttaacagaagttccattcccaattttctagatgaggcccttaatgagaagttccctaccccaaagaatactacgccaatagaaggaaggagagtggccaattgcagcattgagaaaatcattgtgtttaaagtatttagcttttaaaagcaagacaaccaatggattagggctagtgaagattctccaggcttgcttagctaacatggcctgattgtgatggacaatgttacgacaacccaaacccccaaagaatttagacttacacaaatggtcccaacttttccagtgaatccgttgcttattaccaattgaaccccactagaagtttgacataagtctacagaaatatttacagacagagacaggaatccaaaaacatgacatggcataagatggaatggcctgaattaccgatttgagaagaatctccttaccagctttagagaaaaggttttggttccacacatataatttggagctggctttttgaaggagaaaaaggaacgatgattttttggagcgtgaaaaacattgagggacacctaaatatttatcgataaaaggcttattatccatatacaaggactttagaaaaaaaaaagatcgagaatcagagttagtattgggagagaaaaggatggaggatttttggaggttgaccgattgacccgtagccttatgataaatgagcagaatgtctttgatttcattacaagaagaatcagagacgtaactctagtgaaaagcaggctgtcatcagcaagcagaagatgggatatgggaggggcagacctacaaatggtaataccatgaaaaaggtgttggaattattttac

SEQ ID NO: 322663 - DNA, 617 bp, Cannabis indica
ggtcagtcatcaatccaggaagcagccagagtggcgtactcgtgtataagagccattcattccgtgggtggaagggcccaatggaggcttgaagcggggacgttacaaaataattctaaataactataacgtatacgtcaatgaaaaaaataactactcatacataaccgaatagatagaaaatatgtcgaaatagcaaggttatactatagacttattccatacacaatacatttaacaacatatttaaattttagaatttagtaaaactaatttaattaatattttgaattgaatattattttcaatataaagctttttagaaatgtgtaaagtaatataattttattgttaaaaaactagtaataatatttgtgtaaatttacaacaaaaatataattggaaacacttaattatgaaaaagtgcaataatatttggtagtttgaatatggttttgaagattaataatcatgttcttttggctttctttttggagttagtcttaatagattttagattcgattttttggattttcactctgttagtcttactttacatgctagtgttagacttttatttgtataaactaaacatacatgattatgaataaagtgc

SEQ ID NO: 322664 - DNA, 505 bp, Cannabis indica
aaaaaaaaagaaaaaaaaggaaaggattcttcgctgtaccgtggtgcctagaattaaataattcctacaatagtggacttgcacgtgaccagcgttagcttagctagctcatgatgaaccctaaacgttgtcgttgcactgtatattttcttttgctaaagttattttacaattcatataattaatgatgatgaataaattaaatagttaaatgttaggtttggtttgattttatataaaagtaaataaataaataattacaaaataataataatattataattaaaaaaatatattaaaggtttatattaatgattaattataaaattgtatttaaaaaaaaaactatttagaatttttgtctcttgatatatgtattaagaaaattttatactgcactctctcacattgatatatctttatcggttttagtatccgaaataatttttaagtcaaattttttctcatggtcatgtaaattatagttatttaagacatcctataa

SEQ ID NO: 322665 - DNA, 863 bp, Cannabis indica
ttcgagattgcaagagccaattccggtctctttctttcacaacgcaagtatactctccaactacttgctgatacggggaatactgatagcaaacctgccaaagcccccatggatccaagactaagactcaatgatcaagacggggacaccctcgacaatccgtctcactatagacaactcattagatgcctcctatacttgacactctcacgacttaacatcacgtttgctgtcaatactcttagccagtttatgtcttgtcctcgaacaacacacttgacaactctacatcatctcctccgctacttaaaaggatcaccaggacaaggaattttgtactctccaacatcctctcttcatctgcgtgggttctctaattcggattgtgcgacttgtccattcactcgtcgatcaactaccggctattacatctttcttggtgattgcctcatatcctaaaagataaagaaacagcccactgtttctaaaagctctgctgaagcagagtatcgtgctttggcttccaccacaagtgaaatcacttggatacagtatttactccaagatcttcacattgatcaacctacaccagcattcatctactgcgacaaccaatcggtaatacacatcgcaaataatccaacatttcacgaacgcacaaaacatatcgaattagactgccacttcattcgtgaaaaaattgccaaatcagccataagcctcattcctattagcagtaaccttcaactcgcagatgcatttaccaagcctcttccctccactatcctcacttcacacttgtccaagatggccattcatgatatctatagtccatcttgagggggggggggtaacaagaatta

SEQ ID NO: 322666 - DNA, 781 bp, Cannabis indica
aaaaaagtaaaaaataccgtccgagtatttttgtaaaaaaaataacaaaatagttagtataccatgtaaattggggtaagttgaaaaatacatcttttattaatcaattaaccaaatttacctctaattttatatttatttgaaacatgcctctttttatatatattgtacccaaaatatcctgacataagagagtcacatggagagtatcttgaagtgacaggggcaaaattggtacaatgtttaaaaaaagaggtaaaaatgatagactttaaaaaagagggtaaaaatgaaagaggacaatatgaaaatggtataaagtgtaatttcctcatgtaaatttccaatttataatgacacatatctaacatttaaatagaaaaatgaaacaaaacttaataaatactaatttttcatataaatgtaaaaattcggagacatttttaataaattgtaattttaagaggcaatagtatggtaatataaggaacaaaaatacttatttagtttttttttttttttttttatgaaatattaattagttttcttgaatacctagttaaatacgtaaatatatatattgttagtataataatttgtgtgttgatggcattaattaggggcgcataaatcgatctaatctaattacatttgatcgtcaaatattgaatatccaaatgtaattatgtcggatataatttttgaatatccaattagatcagatcggatattggatgggatgtccgaatccaatacatccaatatccaatcgaacttatta

SEQ ID NO: 322667 - DNA, 1877 bp, Cannabis indica
agtgacacgtttgaagtgtcactaaaaagtatctttccagtcagcctcattagtgacgcgcggtgaagtgtcactaaatagatttgcagtaactcaacatgagtcactaaaactcatttttctagtagtggatgaggaggagggaggtgtcgcagagttagtacctccctactcagtcggcctgctgggagatgtcaaaattcaagaacccgacgggaaccctccttcgtcggatgttggccttgataatcaggcgccagaggagatgaacttgggaggctctggttacgcttctaacgtgtcattcgacggcttcaatattcaagagatttttcagaacccattcggctcttcgaaaggtccttcacatccatcctacgacccccatgacttggcgtggtcacaatcccaaatgaacaaatgtttgagtgggtataactggtacctgggtgagtttaccccctttgattagacttggttgcgcaactcctcggcggagtgacgccaagaggatgctcttaagtgtaacatatgggttagtatatgctatcattgtctttattttcttcacgtgctgctgttttcacatttttttaactgtgccctttgtttgtaggcatccgtcttgctgaaatacactcccgtccctaaccctctaggggaggaggatctctagcgcctccaacaggctctaagtgatttatagtagtctcgccaccagtgcgaggctcttcaaggggaagtgaattgcctccaagttttgctgaccaacgagcagtcctcagtggccattctcacccagtaactcggggagtctgtctccattcactagaggtgtctctcgcattcgcacgttcgcacaaagaaacttagagccaggattggcaagctgcaacatcgcctcttcactattaaggcaaggaacacgaaagagttagaggacaagattgagcgtctgttatacgcagtttggataaaaaacctcgactacaatatccttggttcatttccagcacagatggttgagtctttcagggctgagtgtggcaatgcggtcgcagcgtgctaaggcaagcgtcgacgcgacgcaggtccctttagcagttggaaccagtaggctttccttcttgtgaccatatctgcaaagacttcaagaactttgttatttttttgtttatggatgaatataaaactcctatttttacgtcatgtatgcatgacatcaagactcaatcttggtcaagcagttcggaccccttggccgagtggttttccgtactttgttgaatgaaacatttgctttgtgttctcttttttgtgatattggccgagtatctcttgggatcgctcgttggccatgcatcactgtggtcagcggattttactttcggggagttttggcactttgaacagcctccctcttattataaattatccttttacttggatgggagggagcttatggcacttgactgcgctacccttttgattaaagaatgtttgcttactcttgagaggcgtccctctcattttggcattatgccatgagtgtccgtgaggacctcttttggcttaattgtgttttgcgcaaaggagcgtgtttcctgtcatcgatcaagggtagctagtccttgatgatttagggatatacactttttactcatctcctttccccccaagtgtacagtgccattcatgggactgtatacttgagttacatgcttatttctaatggaaaggaattaacaactttcgaaataccaatttgatgtaacattcattcattcatataagagattttccgttacatgcatacaagagaaatagaaataaggaaaatgaagaagttattgttggaagttattttaccaggaact

SEQ ID NO: 322668 - DNA, 1735 bp, Cannabis indica
aaaataatttccaacaatcatctcttggattagggatagggcgggaagagtatttctttaatatttcattatcagtctcgatagagtgaaacttacttgaaggatgattcctctcaacacgaggagaagctgaccttggcttcctttccattcttgcctcctttggatgaagagagtgtggacaagctgcttctggttgattggccactggattgttcagaggtttatcaacaactttcaaataatttcccaaattgccttctgtattccttccttgcattctgattactttcgtctgcagttgacttcttacaacggtctcttcttacctcttttcttgtgaaacatcgataggtcactttcctttgtcctggttcatcggagggcttctgcggttccccatcggtgttctccccgtagtcggaatttgattgtgtgaggcctctctgagcagagtcaattgattccttgtgttgaagcaactaattaccgccgactccgttttaatccgcggaccaaaagccggaaccgccgcaccttcaggagggtatgcataggctgtttcccttatgcatgtctttttctcatgtccaagatagccacaattttagcatagttttggaagtttgaagaattgtaactgaatccactcctttcgacctctgtatatatccagaaaaaaaccagggacaatttggtgtttggtggaaatttccacttgaaattttaaaaatcctcttctagctagtgcattctggttcactatgtcgcagcccttgtattctcgaactttagctgcaatggtggggatattattactgttgagataaggggtaggcaaccccgttgccttggcccagaaaatggctttgctcatatccacaatgttccaatctccctgttctggccattcctgtattatgagcaaacgaccattgataatccacggtctattatccagaatcgagacacaatcttcttccttatcaaagaatataccccacagaccgtattttagtgtcttgaatttccaatgtcctgtaagcttccacctctgttccagtatcattttcagacgagaccctggaactccttttccttcaaagaaaaaagccaacacacctgttctagtcaactcgtcattgatttcaaaatcaggttctaaatctagggtcatagattccaagaactccttgagtagctcatcaacttctcctccattagcactagtttccacaggccccttattattctccgttttatcagtatatgtttgcaaacttccttcacttgtctgcatattttcttcattaataccccctgaatctcctctgcaacttcatttaatgcactaccttgtccttccagttgttccattggttcccccataggcaaaaggaactacgcacctaccgctttcagttcacactagaaagaaagagagaaaagaaaaatagagcaccaaccgtcttcaagctgcaataaatgagaccactaatgagaaactagtcaataaaaactagcatccatacagagataccgtatattggaactctccaatcctcccattcagagtttaaaagatagtaataattgggtcaaatggcgttctcttctacttttcaactccaagttaaatcctaaaattcttagaacatgccacgaatcaatacaaatgaaaaaaaaggcaaaagaaagatattgatatatatatatactgttggaaattatttta

SEQ ID NO: 322669 - DNA, 692 bp, Cannabis indica
gtagccttaatatacttcgacacatgtaaattgtgatgcgacttttatttgaacttatgtattcataacattatttaattattgtcacatttaaaaaaaaatatacaacctattataaaacttgtctttcacaaaatattatctagtaaatatataaaggagaaccataaagaggatgtcatgtggcatcttctccttcttataatttatgctttttaatttgtagatatttttattttttttcattttattttctcatttttaataactttatacttttaaatattttaaaaaagtctcatatattttagaaactaaagtctcgcacataattagaaaccatagtgagttatacttctaagttatatatagatttctattatttcactttagtttgtctcaaaattaacatttcatattctgtatttttttaaacttatgaataataaaaaataatcctttaattatttttttatatataaattattttcttatatattaatatggtttttatattataagttataaaaaaaatgacgatttcttttatgctattttgtgagaaaattagtgttacattattctttttgggtgacactactacaaggaaaggccttttatcccggttttaaaggctttttatcccggttttcgctaatatgaaaaccgggatatatgccagtgggataaaa

SEQ ID NO: 322670 - DNA, 1046 bp, Cannabis indica
atctgagaagactataaattaccttagtaaacctgctattgcataggaattaatattaggaataatcatattaagccatattcaataaaaacaattgaaatcgacaccctagtttattaactatcaattttctcgaatcgttgcttccaactatttttcttatacttcattgttttttttcctatcttttatttaatcaaatagaagtaaaagtttaattttaacgtacttaactacactccctgtgggatcgacctcactcctcgtgagttttactacttgaaacgatacgtacacttgcgtgtgcaaaatatcgcaacatatacatgtacaatgacaatccctctactagcttcaataatacgagagctttagccaaatgttctttcaacctttggaaggcttcttcacattcaacgatccattcgaatttttcgcttctgcgtaagatgttgaaatatagaatgcatttatctatagccttagacacaaatttgctgagagcaattacaattaaactttgtacatctttatgtttccttggggaggacatgtctattagagcctgaattgtccctagattgccttcgattcctcggaagctggcgataaaacctaggaattttcttgaagaaactccaaatgtacagttctttgtgtttagcttcatgccatatttctaaatgatcgagaaggcttcttctagattatctttgtgcgccccaacagtcttggacttgactaacatgtcatccacatatactttcatatcttttttcccaaaacatccttcaacatttttgtgaccagccgttgatgggtggtgttacgaaaaatatgatcactacgcaagtatacgcaatcaagtagtaaactcacacaggtgaggtcgaaccacagggaattggactaattactactaaattatactattgattctatctggtaaaagaatactttttatgaattaaataagacaattcagaaaattaaaaataacaaaggaagattaatcaagataagaaaatagggagacgaatcctgtt

SEQ ID NO: 322671 - DNA, 1427 bp, Cannabis indica
aaaaaaaaaaaacaattgagtgtggatgacttttctttctcttacctaaaaagaagaaagtgaggtgggcacgctaagaatgaccacgtgtcatgcagtctaaagtaaagcatgactcagaatgtgaatctaatgaagccaggtgaggcccactaggatccagtccctctcaaaccataggcctcaatttgtgaggatccaatgggccaaaccattaaatgcgtctactaaatgacaatgggcccacatcaagaccacaaaaggccaagtgtatggtagaataatgaccatacaatcagttttcgtttagcttctattaactggagtttctttggaatggaaattgagttccaaggaatcacattttcaactaagttttcattcatgtttccttccaaaaaaaaaaaaaattgttcattcatatacagaacttttgacttattttttactcttgacaaatttatatggaattaaatatttataaatttagatatactatgatatttaagtgatatgttttaatttttttttaagaaaaaacacataacttaaaacattaaaaatgtaccacttaaaaaaaaccattaggaatgtgaaaactaaggaaattttatatgataaaatataagtaataaaagtatgaaagagttatttccttggaaattctaaaattaaaacatttacttacatattactatatatttattcgtttactatatttttcttttgtaatatctgattcttatataataatgtggcaaaagtattaacttctgttataattgtacttaataccaaatctttttggcggcaataatactgaatatttacttagcaccaaataataatatcaaatccttgttaatattaccaggggcggagccagcatgaaaaattagggggggccaaactatattgtaaatttaagtgtcaaaaatttcaatgtttttattaaattcataattaaaattaaaatacagaacgtctttcttgcatatcacgaaaatcatcgataagtgaatctatactaaattttttggcgatttctctttcaatatacacgagcaaacaatcacttaaaaattcatcttccatcttgttgcgaagtgtagtcttcactatattcatagctgaaaaagatcgttctgtggtagctgtagaaactggaagtgtaagaataagagttatcactttatacacaattggaaaaatctctgcttttctagtttttaccaaccactgacataaatcagaaatggttgccaaaactgtaaaatcaggaagttctcgtacatgagcaaaatgttcaaattgcgtccttagttgtaccatctcgtattctgtaaaatcttttgggtaaaatttttgtaccaacttgcaaatatcatcaattctgaatgatgtgtgcatctctctcggatctaaag

SEQ ID NO: 322672 - DNA, 412 bp, Cannabis indica
aaatccgtgagggcttggctcaaagcgaaaaatatcattctgatagagaaatagatggtgttcgacggtcgttacaatataaatatatataatatatattatattcataataagataaaaattccatatataaggattaaatcggttcgttgtaacttgtgttttatcttcttcttgatctcattcaacatttatcaacgttccaaataagttgaaaagcttcacagcaagcttaatttcaagctaagctagctatatataatatatagacatataacatacttcgaaaccctctgggaatatgttaaacatatataagttattttgaattgtttataaatataattgccatgaatcatcatgtatatcatgctacaatacacaatacaattattattgagtcataggatca

SEQ ID NO: 322673 - DNA, 1030 bp, Cannabis indica
tataatatgtataaagttttaatcgtatacaagcagtcttatcgtaagagtacacaccttacatcataataaccacatgatctaaaatcaatggtcataaaaagttccctaccgatagggaacttttactaggtcctaccataatcttgccctatatatgtttatattttaaataagtaatgatacgtatgtgtgtaagtctatatggtggtcccccttaaagtcagaagtcaaatatatgcttttttttaaaatgagattggatagtaattaatataccaacgctaattacgcttactttatttactttatctatatatagggtaattttatgacaagtcttaatgtttttaccctatattacagggaagaaaattgaaattaaaagattgtatatgttataaaataatatagaataatataaagtagataagaagaaaaaaagaagaagatgaaaagagaaagagaaaaagaaaatgaacgagaatttttaagttgtttattctaatcaagcattaatatttcataaatacaatcaagcattaatagtgatatcaatatgatgatttagacattcataaataatatttcataacactgctctttcgatgtccataaaaactctctcattaaaaactttgctaaaaaacttgatcaaaagaaaaggagtgcagtataaactaatttctcctcatttaaacattcatggagatctgttaatcgataaattctaatcttgtgaaatatcttctcaaatattgatgttggtaatgactttgtgaataaatttgtaaaattaacacttaattgaatatgttggacacaaatatacattctcttgaaatgtataaagaagaatttggtgaaatgtgttttaattctatctcgttcaatgtaccctccctttaattgagcgatgcaagtagtattatcttcatagggaactactagtgttgatatttctttattgagtgcaatccttatgttttcccgattatgttatgtcaatgatctcactcccacacattct

SEQ ID NO: 322674 - DNA, 833 bp, Cannabis indica
cgttgacgggagatatcttccatgtgatctcatcacctccattaatgcctgactatagccacattgatacaatcgataataataagaatatatatgtaagtggttataagatcaacgaaaccagtagttaccattccaggcgacaacttgtagcgtttcaggaaggcagacttagacatctccggtaaaccatcgagtaaaccctcctcaatctcaggatgattctctcttttctcagaaagtatatatcctgagacgcattagcaagagcgagtcgtagggttttgagaaaccgaagcagcagcagcacgagcattatcaccgtcatcttctatcccggtaggatttcgggcgagggatttagggggaacagtcttggggtggttctgagaagctaagagggcgttctgggaatggcgttcgaagaaatgttggatgccgaacttggaagattgctgagactgattgttctggttcgattaatttcttggaaggagaagatgatgaagcattggacttcttccttggacgcattgaattgaaaaattcagcttccgatttctgcaacttaagagagagagagagagtggagggagattggggttgtgtgatttcccgccaaacaactacggtcagaacttcagagagaatataaatgaaatattgggcttttccgtatgcactatagcccaactaactgtccatgcccaatactaaatttgggctttggatttgtgacccactacttcggaaaaacggaagggaaacttataaaaatactgtttttttaccaaatgttttcaaaagtactgggacacggcaaactttacatt

SEQ ID NO: 322675 - DNA, 835 bp, Cannabis indica
ggatggattgaatccctggtgaactcgtatatgggcgttgtgcatggctttaagtctttcaaacttaatcccatttattttagtgcactccggtagaggatattgactaaacttccattgttcacaagcacccggtggacatgggcatttgccaactatattgccaatatgagcaaatcgttataaggaaagtggatcccccacacaccttcctcagtgaacgtcacagagtaactctcctctttagagttcttctgcagcctttgttctaagctcatggccattgggggtcgtcttacttccttggcgtatctgtccctccccttgtgagtgtctcctcctacccctggccccgtaaatattgttctaacgtcccttaacgcctctagagcctcgtgtggggttattttcctttgatcttctagtctcctctcctcggggtgcctatcctccctatgatatcctcccaggtagcccatttgtatcaagtcctcaatttccattttgagatgagtgcactcttctatagtgtgcctgatatctctatggaatttgcagaacttattagggtctcttttcaacctatcttttctcattgggggcagttccttgaatggaactcggtgttcatttattaggaagacgtgctctattgagcacgtgagtatggtaccggggctcctcctccctcctaaccttcttgttttggtcactcatgcccctatcaaattcttttttccttcatggttcttcatgcgtgcaggggttagccaatccactagggtcactcttccctattgtgagattctcgcgtctgtcctcaacccagatgtat

SEQ ID NO: 322676 - DNA, 616 bp, Cannabis indica
aaacgtattagttgacagtgatagccttgcatgagtcgtcaacttgttaaaaggaatgttagagtagtgggtgttaaccgaaaatgtgattttcttttgttgtgcgcctttccaatgcttgacataagggacaagccacctgatttctcgagatttttgttcaaacgtgtgccacattgaatggtttccaaacatttgcacgttccacggtgccttttcgactaccatttttgaacaactcttgaaggaatttgactcttcctctttgaatgcatgttagttaaatgttagattaccttctagaaccatatgtttggcttagtcgctagcaaatattatatccagacactttgtctggctctgctcatgggccaggtggtcaatccacctggtcgtattgaatgtccccgtcaagcttaatgagtcaatttaaatatacacatgtcgcttatctaaaaatgcagacaacaaaaataaataaataaaataaaatttataattaacctattttattcttcttcattattactattattttgtggcaaagttcctttgaaattattactattataagggatttttttttttaattttatatttcaaaacagtttttttt

SEQ ID NO: 322677 - DNA, 830 bp, Cannabis indica
tacataacaacttacataaaaaccactgaaacaacccaaactatcaaaaataatatataaattaattccacttatattataaatacgttccttcagttagtttatttattttttaaataatttgttaatttgatcacaaaacatatatatatatatgtatattcatctcaaaatatatatatatatattgctataaaatttttatttaactaactaaatataataatattaaacatacaaatattaactctaaaattatataattctagaatttgtcattagaacacatctatatatatttttttgtatagattattgaattaggtcattactactttttttttttaacaaagaaagtatatatctatatgttatctttcaaaaatccaactcaaaaattcaactttacttggagaatatatataattttggagaagattttcttgagcattgatatcaataaaactacaagtagattattagcttattactttataaaaattcgttgtttatcattgtcaaaatttttttctctaaattaatttatttttattaacaattacttgtgtttgttttattcgtttgttatttttctaaatccgttgacgaaaaaccgcgtttttaatactatatataaaagtataattaatgataaccataaaatacaaattctagggcccaagtcctatatatgtatatgctgaaaagatttaattatgagtcataatcagttgatgtgttgaccaagaagacttcacaatagggaagtattgatcaagtttaatttcaaatttaaatctcataagatttgtaagtatctatagaaagct

SEQ ID NO: 322678 - DNA, 1281 bp, Cannabis indica
agttcgggagggattggttttagaaatttacatgactataacttatctcttttgggcaaacaagcttggcgattattaactaatgaacagtcccttgttggccgaatttataagagtagatatttccctcatggttctttccttactgctgagattggcaacaatcctagcttcatttggaggagtatctatgaaactcaatcgattgttgtagctagagcacgtatacgcattggagctggtttcactgtgtctatctttaatactccttggttacctgatcagactaatccgtgtgtattaagtacacatcctggtcttgtgggggcttcggttaatcaactcatgactgtcgagagggatcaatgggatgtggaaatacttgatgatctatttcagcaacgggatcgtgatctcatcatgaatatccctttaaatgttaatgaagtaaatgatgtatggttttggcaacatgagaattctggcttttactctgtcaagagctgctaccaatggctggaagtttcgaaagggagatggtctgcagatatggaatcgaatctttggcgatctttatggaaaaccaaagtaccgcctaaggttattcactttgcttggaaagcaataactggttgtatccccactctaactcaactctataccaaacatgtacctgtgcaacttgattgtgtctgctgcaacaacgaggaagaatcgatttatcatgtgttggtttcctgcacatttgctctatcggtttggaacttgtctagtgtgcctactggtgttattgtggcgactgattttggtacctgggttgagcaaattttgaacagtggtcaggccgtggtgtttgaagaggctcttatggtgtcatgggctatttggaaagcaaggaatgagttgctttggaataaaaatgttactacaacagttgaagtaataaacacggccagaactgtgctgaaccagtggaagacagcttcttccaacagattctctcctcttcctgctgtcatcaacaacaccagcatcctcagcactaattggacatcacctgctgctggttttttgaaggtaaatgtcgatggtgcactctttgctgcatccaattctttcagtttaagggggtctggcccgtgatgctaatggtcatctcattaaagctttttgtttgcataaatcggggtgtgttcaacccagtttagtggaggctattggtgtcaaagaagctttgagttggataaaaaagaaaggatgggaacatgttattttggaaac

SEQ ID NO: 322679 - DNA, 826 bp, Cannabis indica
aacctctataaaattcatgtgtcttattattgctttattatattttcattacgacatatcgtttatcgcttatcaaaaagactcattgtttgctaaaagcgaagtcaacaccaaaactaattatgctacaatgaatatgtgatgaacgaaagcattaacttaattttattaatggagatttcatagaaggatttgatcttttaagaaaatactatttttttttatatatttttctctgattggaaaaaagagaatacaagaactctagttgatgcttgttgtgagtagtactaaatttactaaatatttttctcaatttttgattatatcagtataactgtaagtagaggttgaacccacgatgactacgtttaatttactattcaataattaacactaaaacttaaaatagaggatttattttaaactcaaaattaatagcataaactaaaaagtgattgaagattgattatacgatattaagagacagttaagagttagtctccactctcaccaatcattcaagatcaataataataaaaattattctagtttcctaattaaactattaacttcgtaaaagacaatgaagcagtcaatattttcaatcactctattacaattaattaaggcgaagtgctcaataattaaatattttaactaaacaataaatttatgaagcatacaatttatttaacttagataaagtattaaattatatggagacaatttaatctagacaataaattaatgatcacaatgttggaatatcttttaccaagatctaaatttactaacaagtatgtttttaacatcctaatatgaa

SEQ ID NO: 322680 - DNA, 667 bp, Cannabis indica
tagtttaaaaatcgcaatgtatgttgtaaaactattttacgtggagcgtgtctagaaccaatggaagaattgaaagaaatatgtatagatgacaaagatcccaccttggttattcgattgggaagaacctacctcctgtagtaaaagagcaaattgtctcgacaatcaaggcaaatagtgatgtgttggcttggagtcatgttgacgtgactggtatttgtcctcatgttatttgccatgcattgtacataaatcccaacgctgaaccagttcagcaaaagcaaagacccttagatccaccaaggacagaagcagtgaaaatagaagtggacatgttgacaaacattgacttccttagggaagctctatatctcgtatggcttgacaatctagttttagttctaaagcctaatgggacctggaggatattcaactatgtctatgtccttctggtgatatgctatacagatggaaaacgacattctaaatgtttttccatctaaagcagtccctaagacacccgtcgaactatggaatggtcgtacacctagtttacgccattataggatttgggggtgccctgctcatgtcttaagaaagaaagaaggcaaactgaaatcgcgaactgaagtttgcatgtttgtaaaaaattctaaagagactaggg

SEQ ID NO: 322681 - DNA, 1145 bp, Cannabis indica
aaaggccaagatttctaattcaatgttcgaacaaaggatgggcaaacaaaaggttacttcttttgttaaaatggtatcaatgtggtaagacactttcttaatatgttggataattcccatgttgtaaagaacatgtttgtgattttatattaggattccaacaggccaatgaattgcctgtaccaactaattcttcacaataaacttcttaatacaaacaactttagggagccaattttcacctactacaaatacaaaagcatcccactcttctttagaagatggttgaccgttaatcgtgtaattgggcccttgatagagatatacaaggtgacgaatggagccaagcttgttgttttgcaaaagcatgcaaagaactctgatgttaaaaaatttgttcctttgagagcgctcaaggcagctaaacctggaaccgtttcaacaaaattggaaagtagttgaattatagaagctccaataaaagaaatgacatataccagtaacagaggaatcaggaaacgcaatagttctatgtactttttactgaccaaaatatcacccttgtccacttcaaggtttttcaaacctttggacaatttgaattttttcaacatctggaaagaaacaccatcaggaataagatattatgctcgaatcttatcaaaagttgcttcgtattctgtcatgttgttagggtcaatcacaggggaagacttctaggcaattcatcaaaatttacccttagtaactttagaagccataatcgcaagaatatttagaaagaagaagaatagaatagcaggggagacaaaatcaaagggaaaacttggagaaggaaggcaaggtcaaaagtaaagtagcagggaagttcaaactgatgtgatttacctgattaaaaattgtcaatttaaatttaaagaaaaaaaataaactaaaatatttgggtaagttgaaaaagcaacattagtttcccaatgtttaaaatgattactaaactgaatgtttgcgacattaaaagacatgtggaaaagattttttgggttctggttagaggtgttcactaagtatctgatccaatccaatctgtacgattcaatccaatctaatccgtaaaatgcggatatatccgcacttgcgcggattgg

SEQ ID NO: 322682 - DNA, 773 bp, Cannabis indica
tagagtttttttttttcctttttgctgtcgaagttttaagttgtttttttttttttttcttttttttttctttttctgatctatgtcttcggcttatttttattgttgttgtatattttgtatttttatattttttttactgtattcatatttatgtttgtagatttgacaataaaacatggcttagaagtaagaaaattaattaaaaaaaagttacatacaattgatactagtgaagaagaataaaaattaaccctttatattaatccaagaataaaaataaaaaattcataaattctgcatgcacatattcatatttttgtttaattctgtaaataattgaatttggacagacgtagatgaatagaggaaagggaacttaattaagtaataaggtttggaattgtctaataaatttatgttaaaagtatttttcttttttttttgaaaaggaaatccattaataaaattcagtacaaaggaaatggcaaatctagctgaatagctcgactagtacaagagggagagacctcaatccagggccagccatttagctgtgcaacaagtgctaatgctttagagaaatttacactccgcgacgaatttttgaaattaatactatgattaccatttctcttttttatttcagtcataataccttctcattttaattttttacattacgtgtatacagtccaaaaaataagcagcacattaatacaaatggactaattgtgttgttcttttctttccgatttttttttttttttttg

SEQ ID NO: 322683 - DNA, 861 bp, Cannabis indica
tgttaagttattctagggtaatttttaatggtttttgagttatttttttttttattttactgaaacacagtacttttataattttgaaaccttaaacacagtatttttgtaaatttttccctattttatagtgtttttattagtttcccaaaatttaacttttagaatttatgtttgagtaatttgcagaataaatacttatgtttaacttcctattacagataaatacctaagtttaatttttaacggtaagaatactttagttatatatctggaacattcataggtacctggtctttaagtgtcaagtcaatgaccacatggcagtccttgattggttcaaatcattaaatttttattttttatttaaaaattattttaaatatactaataaaaaatgacacgtgaataataatttgacactaaataatcaggtacctatagaagttctaaaaatataacttaagtattgttatacccatatttcgagcaacaatatagtgttgacatgtgcaatgaagctaaaatatgaactagctcgaattatccagtaataaatacactcagacaactcgcctcaggaagtacaattggtagaaatattcgaactcaccataattgctagccatgaataataattgctagttgatgagaccagcgagacaaacaaagaatgctcatatcgggatacatagaatacacaacagactgaaaaagattggaaagggtagataatgaattatctaaagagctcgcaatttattgacccacatactcgtgagtatgttaagagataagatatcatcagcatggttcactgtgggtgcagtgtggtgaccctcccagctcaccccaccctaa

SEQ ID NO: 322684 - DNA, 548 bp, Cannabis indica
gcactctaaaacggactaaatcacatcatgcatgggtgctgcccccttaactcgaaggcatcactatgtaaatttattcttaaattacatataaatttatttctataaatctttgccaaacacaagaaagaatctttatataaagggaatataccttattacattaaattttatttgactatatgccacaataatattatgaagcctctaactgtgctaatcatgtatattatgcacaggagggtgtgtttttggtggatggtagtctgctgcaaaaacaaaacattgctccattttaattgtaaattcattattatcatcattaatcttcttaatattataaccgcttttaatttcatcagatctcttcatcaaggtctccattgttcgtcctataaaaaaataaaaaattattacactttttataattaagtaaataaattttcaatatattatttttttttttgtgtaaaaaaagaaaaatagatccaagtacttctctatttttactttatattttttgatattatttatataaataaataaat

SEQ ID NO: 322685 - DNA, 986 bp, Cannabis indica
ggtgactgtacttagtcttagcaaccaagttgcctacgtgtccttttataggaatcaagtcaaacgtagttccaaggcattcaaaattttgtatctttgagaactttgtgaagaattaactcactttgatattttagggtaaatggcctcatttgagatttttgaggtgaatgtcctcatttaaaatgttttttagtagaggtgagtaacctcgtttgggatttgatgagataaatgacctcatttgggattctgaggacttgtgattgtagctaatcttagcaattaggttgcgcacgtacctagaatgggcaaatcaaacgtagtttatatatgtttaaagatttttgatcttgtattctttagagacactgagtttattttgaattaaaattttttctttagtctcattttagtgaattcaagatcactaatattataattctacatgagaatttgaaaacaaaatttaaatttgtttgagactttgtgtcgcttttttttaatgatatttgagaataatattttatcaaaatatcatgactacattagtcattttgtattttgtttagaatttttgtttgatgcatataatttcgattctctctcactgtgcatataacatatatgtttattagtactgcaacatatatatttgtgaccaattggtttcaaactaaaatattaattcataaataaatcatacactttttataaatcttatattttattgatatactgatattatcatacttatatatattgatcatttggtcacattttttttttcgtatagattattatgcatattaatataaatatatatatatatatttatatatatacgaagcaaactggatcactaagaatcactagtccaagtagttttatggctccctttcaagtacaaataaatatgcacatcgatttactttcaaggaatatatatacatatatatatatatatatatatatttgttttaaaa

SEQ ID NO: 322686 - DNA, 1870 bp, Cannabis indica
atggtggttgaggaaatgaatatattaactacggtttttatgaggtatgacaaccaaaagatcatatatcccaacagtgctctatcaaccaagcccattgttaacttatatcgaagtccagacatgggagattctgttgatttttgcgtccatatctcaactcccatggacaaaatagtcactatcaaggagaagataaaaaggtatatatgtatatctatgtacataaaaaacatacattatacatatatatatatagagaggcacacttaataggtaatatgagtatgaataggtattattaaaaacatttgagtttttatacttaattttgctatcaaattaaaagaaactcttcaattttgctatggttgaaattgttctattaggccaaaaaaaaaaaaaagttgaatttgagtttgagaatatataaatatatttttgataaagaataaaaaaaagatattttttaattaaatagtaaaattaaaaaaaaaaaagaatataaatataatagtagatttagtgtacctgttaaactatattgtatatagaatagaggttaaaagtttaaattcatctttaaatcatggataccccactgtatataatacatggagaattactaaaaaagtattagtggtgcttaatatcttttttggtgtcatatcgttattggtgtaagtaaatatcgggtcctatataacttaagaaaatagcttttaagtaatatcgctagctaatcatggagcgttacctataaaaatactggatactactaatacccaataacaatactctaatatatgtgtgttccaattaatattgttgaaatatatatattatgcaggtatattgaaagccgaagtgaccattggcaaccaagtccaataaggtttatgatgatggatgtggttgattcgaacaatctcaagttatcaatgtgtgttacacaccgaatgaaccaccaagacattaaggagagatggagtagaagggcccttttggttgaggaaatggttaagatttttaagcaactccaaattgagtacaggatgcttcctcttgatgtcattatcccaaccaactcaaacttcaaagggccaacaagttttgtagatcatttccaatgagtgcacaactaaataaataacacatttagctactttcatcaaataagctaaatgttcttccactttgtataaataagccttcttatataggcaatgggcaaattatgtgatttactgtatgttaattttcttcttcgtattattatttaattatcatcatcatcattgtattctttcagatttgaatgcaatggtatgtaataagttcttgctatataggtgaatggtaaattatatgatcaaatcttgtagtatgaaagagggggacaaaaagaaaaaacagaggtgatttgtttaaaaataacttaaggagggcatgtcaatttaggttttacaaaggagtaggaagtatggtgatgtttgtttggtggaatgtaatgatattgataatggtaatagttatagtaatgtaataagaattgttacgggaattgattatgatttttagttatattgaaataagtgataaattgataaaattgttcacactttattttttagagtcattttaattttattttattttagaccatcttcaatagatagtgtatattctgagttaaatttaatttaaaaatatatcatagagttatatttagcctattttttatatttgtgctctaatgtacaaggtacaaattaactataaaagttaatattaccattaatgttctattcaaaatatacaaaataattaattttatttatattattttaatatcttataaatatatctt

SEQ ID NO: 322687 - DNA, 1694 bp, Cannabis indica
tattgtattgttgacacttaatattttttttcaagccttatagtattttgacaagttttgctcaaagtttgttgtatttgtgatagtttaattatttagtgatagtccaaaccgcataaaccgcaaaaattgaaccgcaccgcactattttttgcggtgcggtttttgcgggtttttaattttgcggtgcggtgcggtttgggaaatttgaaaaaccgcatgtgcgggttggtttgaaaaaatagtcaaaaacagcaccactcgcaccgcgaacacccctagtttaaacactggtttgtggaaaattaaaagaatgttgaaagccaacacgttaagtgggaacaacagagagctaacctgtctcaacaaattagagaagtttatcacgaaactacttcccgaagaggtttttccaagttggtgagagagaagccccatcgaccagctggtcacgtgggaactagtgtccaaggcaaaacccttaatgcttgaaacgacactgttacacttgataaccgagcaggcactaggaaaacactaggcatggagacctctcagagggaaggtacattcaatcaagagcccgagaagactcaagctcgagggtaccaacaaatgggccctccactcgatgctgaacgacctcgtaacaacgagagaactaacaagactcctccaccaagtcctccttgacgttctcaagaaaccaggcctcaagaccttgcaaggggaaagggacctactgctcatcctgaaagaagtagtaggagacgctacttcgaaactagagactacaaaatccaacagggaaggaccaacgagttgcttcatactcggaagtattttcgagatgaaaggggggaattgtgccgttactttgctcgtggccccaatggccaatagtatgagtacttcactcaagttcatgaagaagaatcaaacctaaacaaccaattcaattctctccacacttgtgatcctattgaagactactttgagggaattagccattacaacactatgaatgaacactctcagaactggtcatcccatgacgatctagagttcattttggaggtctcacatgagttaccttcacgaactcgtggtcaggagacagctataatacttaggtcaaatggagtacaagaacgacctggaaggccaaaagacctacgtgacctcttgaataagagaagaatgatggatgtgggaacttctaaagaagaccctattcaggtaacagaagctccatctgggacacaaaccaccactcacagggtcaattgggcagaattcgacaccttagctactttagttaaggggatcacaacacctaagttgtttgaatttgagctcgacaaagaacaacgcccaccactctctgaaagaatcaaagatcttcccatttctctgaagttcaagaaaccttccttgcatcaatacatcgggaaggaagatctactctctcacatccactactttgaaatgcagaccggtttgtaaggtgggagagatgatgttaggtgcaaaatcttccctaccacgctaacgggcctagctcaatagtggtaccttaagctctcccttggatcaattgactcattgaaagatttggtggatgcttttggcaaccagattgctctttccccgataatgcccctcaggactacatccaacggttcttagaggca

SEQ ID NO: 322688 - DNA, 1295 bp, Cannabis indica
aaaatgggaagagagagagagagtcagttttgggtttggtaaaactcagaaaatggttttcaaattaataaaaatatgattttgctgaatataaccttatttggccaaaagaccaaaaatgcccctaagacacacatataaccatatacacataaaaaggacaattttgtcaaaccactgacacacatatatcacatatatcatattttctcattaatcacataaaagccataattaaatctcaaaaatattttgggccccaaacccggttcagcccaaagtacccagttttgactataccgcccgacttgtcagaaaatacatgcagaaagacaaataaacatagacagaataaacatactatataataatatagtccataagcacaatatattataaaataatgattttacccttctcaggtcaaaattacgaaaatgctcctaacacaataacggggtcttaaaatgcaataaatcatattagttccacatattaaattatataataatataattcctcattaacacttaagtaacttagttagggttgctaatttgattattaattattagggtattacaacgcctacctccttggcaagtctcctctaccaccagagcaccatctgggcatccaaacgggcccttagcgccctcaacgctagactcggtagggtacacaccatacctccaaaagttggccttgcaagccaaccttaatatattcttcctctcgatggggagggacataatataattaactatatccctcatctatagagtgggtatggtgcatgtgtaggtcggcatcctctggaagaggtggtgtaccttcgggatatcccagccaatgaaataagtcctcgggtatcctcccaatattgataaagtcaagttattggtgtcgcctaaccactgatagcctatctgtctgaagtaagagtattcgatctagttctgcttcagaacaaatttcagctcaaaaaagtgtgttatcttgtagtgggaggactgaggctagcctaactctgacttaagaatgaacattgttgtaaggtactttatacctttcagggtgatttgagttagaaataccctgaattatatggatatatcactaaaataaggatgcatgggcaacaccgctccctgctctatatggcgcattgactaggccatctagttgaagggcaaccgatgctcactggtctctcaaaggcatatcgactgggcagtttcagtgttggggtctttgacttgtttcaaaatccacaaatttcctgacgtgtacac

SEQ ID NO: 322689 - DNA, 881 bp, Cannabis indica
gggtatcgtggatactatttttgaaataaaatattttcgggcctgatggctgtgaaaactcgacgaagtggtcaaagatgtcacgaaggtataagataaatcggaattgaaattataccggactagtatagaattttaagttatcgatttggcgagatagttagctagtgaccaaatgcccctaggaattgattataggtcaagtgttgtatgggggtaaaatagtcattttgggaattgaatagtgattttgttttatgtatgatagtggctgagtttaggttaatattgaattaaaaaaaaaaacaataatgataaaatagaaataatggataagatgagatagaaatttgaagctaccattcatttcttttcttccttcctagccgacccttttgaggagcagcaactatgggctttcttcatttaattatgcaattttggactgagtagacaagggatagaagttggttaaacattaaggtaagttttcaatacttttcccctggaatttcttgagttttaggttagtttagatagggttctactaggatttcgtggctttatgtttagtcttggcttagagtttgttttggttttaattttgtgagtgtttaggtttcaattagtttaatttcatggctgcttgattttgaagttagaattgttgattggtgaattaagcactacgatgaattatggtgaattaatgatttgaataccttgtttttatgttattttatgaagtttgggaacaattggttaggtttggagcaagttttgaaacattgaagatctgaaattttcaagtttctattgtagtgaattgaaattccggatggtacaggactgcaccaactggaattccggatggtcaattt

SEQ ID NO: 322690 - DNA, 982 bp, Cannabis indica
catctaatctaaacctaaccctaagagcctatataagaaacaagataaagcttttattgacaaattcattaacccgaacatcattttccacatcaaaaagaaaaccctaagtgactcaaagttttttttttttcattttgaatttttgaataccactctcaaacactctatcacaaatcagcccaataatgtattgagtactagctcattctattcaaggtggtactcgaatctctgtggaaggttgtgtagtattgttacagtttgagttaaggaaagcgatccaagttcatcacttggcactagcccgcttcagaaagggaatcgagggttaaagtgattgaacaaaatgagtcaatatttttagctgtaaccaatgtaaggattcttaatcatttacatgttatttatcgttttatgaatttcatattttaggatgctagattattatgtgataattaaatatacatgttagtaaattgagatcttggtaaaaaaagttccaacacatttgccttttgttcactgagggtgacctcaatttagaaaaaatgaggatataaacatgaccttgatctataagttgcgctagaagttggctagagaggtagaaaatttgtggtgcgtgtcttcctaactatgtatggaggtggaattaaatctttttggtctatgaaatcacctagtaatgcttcttatttggagctagagaaattttatcctctagaatttcattagaagtgaagctttctatcttatttataaatgtagggtggacatttggaaatctcctttgatttcttagcttagctaggatcaatatagggcttccttcaataattgataatgagaaattatttccatgtttcctcattattgaggggagaatggagagtgaaacatggataaaattaaattctggtttttctaaagtgtttctagcttgattggtatgattaagatgttgggttttataccctaa

SEQ ID NO: 322691 - DNA, 1350 bp, Cannabis indica
aggagtaattaaccatgaaaaagaaaaataagacgaagacgaattaatataataatattatgcaacattgaagaaattaagaaagatacgtacgtacgtatcggccggcagaagagaacaaagattaacacaacatgatgatgaaacgacaacgaaaggattgaaacgacagtggagaaaggaaagactccgacgaaggcgtgagagatgaggcagtggcagagagagattcagatctcactattccagcgaacttgaattaatacttttctttaaaaattacgagaaagacagaaaaaaattgggaacttttgagtttttgttgtaatatggttaaaatcttcaatattatacccatgcattataattttggtccagacttaatcaaagtaccttttaatatagggtataatgaaaactattataaatgaatgaataataatgctttaacactcaattatatattttgtccttaggttcaaattgtaatcttttacaacacacaagattcaaaataaaaaatttaaaaatataaaatccaaaataataatcgagtaaaaaatgctataaattatttattttattttttaacaaaaataggcaaaatttattaacagatccttatcaattatatcatgcaaagcaataggagtagtagactcactatggctgcaatcagcattaaaataagatgtactagccaaatattgagcaacttgattagtagattgattaacaaaacataaaacaacattatgtaaaccaaacaatagctcctgacactcaaaaacacaaaacccaaaaacaaaagtcatatgcactaagctacgaatagcttgaactgtaaccacactatctgtttcaacaaccccattgcgcatgatgttttccttcagccaactgaaaacttctttcacaataagagcttctgccagcaccgaactaaccaagcctaattttataccaagcttagccaccacaagtcagcattcatcatttttggcaacccaaccaaaaccaaaactatttttattctcaaacacaatagcatcaacattaatcttaatcattcatacaataggtgtaatccagtgctcactcccatcgattggttgtaaagaaaccaacgagatgacaaaagtttgatcttgagcacaactctattgattaagagaactttgttgaaaattattttaccaggatcttagatctactcacaagtatgttgattaacaccctaaatatgaactttctaaaacgatgaaataaatagttttggaaaccttacattgggcgcagcggaattaaatgactccttccgttcagatctctaaaccttgtatcctttct

SEQ ID NO: 322692 - DNA, 1040 bp, Cannabis indica
atattgatgataggattcaaatagtcagtcgcacgtgtgcttgctttatatagtttttacacgagtacaatagactagttttgaactttgttttcagtaacgtaaagtattcaaaatttctacaaaaacatataagatgcctattattactatgattaatatacaatgtcatactaaagaatgaggatattgttggaagttattttattaggatctaaaattactaacatgtatgttgattataattttataatctatcaccttaaatataaatttcctaatacgataaaataaacacataagagactaagaaatctttatattgatagcagcagaataataatgactcatttcattcagatttctagctcttgattcttttctgtagcagagtattatcaagatctgaatttagatctccttcagctgttggatttttcacaatcttccacactatgattgagtacttgacttgatataagtgagcatgtactgttcactatggttcaaattgaatgaagaagaagaaggaatgaattttgagatagctattgaaggaaacctttaatttctagttgtctgacaaaaaatgaaagctgggttattagagttggatgagaataagagtcatcttattcattttatagtatttcaactatgatttaggatttaaattatatggaataacaaagataaaataatggctaaaaatagcttaggtagtcgaccatacctagtggatcccactagcttttgtcattttattcaacaatttatcttttatttcactaatgctatactttttttaatttcattcctataatctcaaactatttatttaataattataattaattatcattaaaaattatcatttaacttatttattaattaggtcatacaaagtctctcaattaataaataagctctaaaaactcttttattcataattaatcccttgcttaataaaaattcataaataagacatagtctaatttataattataattaattaattaaaactaattaactgagtttta

SEQ ID NO: 322693 - DNA, 693 bp, Cannabis indica
ttttttttttttctaacaagaaaaagttgcacaataagcatcgctaattgctatcacttattaataatcaatcaattaagtagaaaaatcaattgatttcttccctaacaaaaggaccaaattaatggcatgttctttccaaacagataaaacggttccattaatgccttattgaatcaaacatgtgcatacagccaagcaaaattctttggaaccctcttaatatatgtattcattaattaactataatagtcaaacattttaattttatattaatcaatatcaaaatcccaataaaactactctttgttcagaatctgatactctctctttttctctttctatgatacataagaattattagccgcctaattggttccctttcatcattcaatgcatgtacatatgatcaagtacttaattattatgtaattaaattacatccattgagtgtaataatagctgctcaatttattttaccatgatatagagaaagtgaattgctaaaaaacggtgcttaggaacctaattaatattatagtgttattggtgtaattaaatatcgagtctcatatcactataaaaagtattggacactactggtgtccaataacaatactctacagaaaaatactaaaaggcaccactgacaccctcttaagtatcatatcgttattggcataattaagtatc

SEQ ID NO: 322694 - DNA, 755 bp, Cannabis indica
ataccatctcccaccagactagggcatattcttggaactgaaatgtagcgcaagttactcggtcattaccgttaactcccatgaagttcataattctattaatagtagttagctattgctcgactttcatcacatctggacttcccagaaaaactagagatccctacttccggaacatttcatacagtggttctattcaattacgagtggcaggtcgcccaactagcaacactagaataggaactggtggcacctactgaggtggtgcaacaagaggagcctgatgtttgagtcgctacaactcctcttcctatctctgaagtctggcttgcatttctacaaacttttgttcccagtcttgcggagcctatggcggattagcattactgccgccacgaccccgaccacagcctctacctcgactaagatcaggaaggggattctgacctcctcgaccacctctagcctcaaccatatcaccctgacttctagtatttcgtcaggtgtccattctataggatgagcctatgatttcataaggcaggtcggtcatcataatcatgcaacaattaccgcaaaaatatggaaactcaatctattactcattcatatatttatcactaacatgcatcctatcatgcattttcaatcataatatcttatttaaaactattaaagcatataaaagtttactaaactgtgagtcgcgcttctctctgatgatgattgtgttgaattttatgccctaaataaaa

SEQ ID NO: 322695 - DNA, 1770 bp, Cannabis indica
accaaaactacccctaggtggtaaagatgctttttggcttaagcaagggcaaaatggtctttttgtcatatgtttcttctatcctttattaacttataattgaattagtaatctgaatcaagttagtagaatgttggataaacattaggttttatcttcttttgtcaaaaataaaaaaaattagaaagaaaactcattttctctctccattacactctctttctctcgatcccttgaggaaccagcagccaacctagatttttcaggtcctctcttggtgatttagcaaagtttgattgcatctctaagttcccatttaaggtaagcaagctcttctctctttctcttgactttttaaggatttaaagcttgtgtttcatgcaatttaattttgagattagattactataggggtaatttaagtttggttatgatttatgaggttaattataagttatttaagctggtttggagttgatttgagtgttgtttttgtgtttgagcaaagtttaaacgttatagctctaactttgctctctcatggtgattttggtttagggggtatgtattcagttatattgcttgatttaggtttattgtggccatataaggaggtctagaaagtttggagacgtttagggtctatttttttcttattaaggagggtttttgtgtttcctgcattgaatcagtcgaccggttgagttggacttgtgggaaccggtcttccggttcgtccccaggcagaccctcatagaattgattttccggttgggaaccggtctacctgttcaggcatttattggcacccaagtttttcatgtttttgggatttgtagagtattgccatgttatccatcgataggaaaacttttagttttgattttaagttcccgaaaagtgatttagtgcattactcatcaattttacaaatattgtgatttatggacctgtaaatcgtcgagcagttgttccactcaggttgaccggtacacctgaatttagaaacgaggaaagattagtataatgatatgcatatgtatttacatgtttagcgtacatatttattaagcctgttagattacatcgatagcggtatcaatatacgtagagttgtattggataccgatagatgtttgtttgtctcaaatattgatcgacgctatcacatcggtacaactagagtatgactagagcattgagtataagctgatattatggtcgatagtattatcgtatgaacgttccagactcagtaccgccttgggtgcggggatatgataacagttgggtgtatgggaacctcattataattcgggttatatttataattatgattatacttttcttactgagtctgtcgactcacagatattgtttacatgtgtaggtaagggaaaagctaaagctgagcagctatgagagcgtgcagatgaagattgtacatgtcgaggcggttaggcctggagcatatgatcttggggacagcagactgtatttgtatagtcgctaggcggtgacttttgtatagaacattttgaatcagttgtaaatattttaaactcgggatcctgattatataaaacttatttaatttcattattgataatatttaagcaaaattttaattgctcgcgattttaaataaacgcgttgattactaacaaactgtagagttaatataaaatcacgataacacgcctaaagtagtaggatgttacaataattctttggaaaacttagacaatatgtttaaaataattttttttt

SEQ ID NO: 322696 - DNA, 869 bp, Cannabis indica
taacctcatttaattatcatttgtaattaattaaaattatatgtagttattacaatacagagtacaaccctgcattttttttttcataaaataaaataaaatacatttggtttggatattatcaaccaaccaatacttccattccaattaatattcatgtcaattattttctaagcattattcatgtcattttgaattaaagattttttttttcttaataagtcattattaataatatatatatatatatatatatatataaaagccattaattgtagaaacactcttgcttttaatttatcattttacattcgacttaaactaatatatatttagggatataattttgtcctgttattgtactttcacgaattgtaatccgtgatgtacggcagccatcagataaggatattatatgatctgatggctgagattgatctaggagtaattaggtttaaaaaacagaaacgtactctaacactcatttaatgtacactgagacctatatataccacagaatacattccgtaaaagtacattaccgaacaaaatcatatccatatatatttatatttattcaaaccattttcgccccttcataaaagatgaaatatattatcttaatatagtaatatatattttcaatgaataaaaaattataataaccacacaaaaaaaaattaatgacgtaagtggtgagggagctatgtacgtaataaacacgtgtgggattatgtagtataacacgtgtgagaatgagaaccattcccttgagaacatgtggtgtacacatatgatgtcacatcatcacatcaccacatcaccacatatcaaactcaaatatattacttggagcattgctagaagaa

SEQ ID NO: 322697 - DNA, 644 bp, Cannabis indica
aaagtattcttaaatagaagttttactgtatataagaattaattaattggtgggctgttaatggtaaaaaaaaactgcagtagtagtatctatctactatagtctatagtaattaataatggaaatatatattaataatgagaagtgtttaattaatattaatttgcatactgaaaaaataaataagatgaacacaataagattaaatggggtattcattggattacattcattaaatttatccagatccaatccaattgtatattatatgttaaattttactatctataatctaatctagttaattttagtcattttttttttttttttgaaatgattttagtcatttatttgattcaatattcactggatatattttatcaattgatttaattcgagtttattcaatattttagtcctagtatttttttagatcggatcagactcatttaatatttagatcattggattgaattagatgcatcccattaaaaaaacgagtaaacatttaatgttaatttttatagggtaaatagaggcataaacatacaaagttttaagtttgcaagcgacacctaatgcttgtaaaactataatcactactacaaaaatgggttttcccgacgcttttaaacagtcgttta

SEQ ID NO: 322698 - DNA, 1322 bp, Cannabis indica
ttgcttttaggttttggggtactctggaagaagttacagatgatcacttgtaaattatacctctaaatattttgtttgagagaaaagattaaaaagctctgaaatttgattgaatatatatatgatattctttacatctcataatgttcatatacaaatattgaagattggtatttttttcttctcatttttattttttttactctgagcatttgaagtaccttgatataacaaatgaaattctttcaaactgattttaagattaaaactgataaacttattgtaccactgattgggttaacctcgaatcttggttatgcatctgcttatggcattgaacctaatgcaaatgcagattttggagctttgattttagcttctattaaaattgaattttgttaagagagttttttagagctaaaagttaaaatttactagttaccaacctttaagtccaaaagaactttcagctctctttcatcctaaagctagataaacaattgatgcaacttcatttcagatagatgaaaataaatattgaatattaagactcttattaagaaaataatgtagactattatttttcttcattttagatagaaaaatagagaaagaaatgaaaaaattgatgtatggtgtagtgtaaaagtgtaaggtaaaatagagaaaattgagttttagtcagatattttgaagaatatagtagaaaagatgatgagagtgtttaggtattttccaaaaaagaaaaattgagtgaatagtaatattttgaaaaacgtgtgattcattaagataaaaacgttaaccagttagaatgctgtgaccaaagatcatatagtctaattgcctgactattacatacaatataagatttttttttgtattttttatatattttttaatttttacatttttgtgagattttatttccaatatatttgaaatgtttgatatttttttcatatgtaatgcttttgttttctttcaaccaatcaatttcttaatatttttgagcgcataatagcaactgatttttgatttctaatatatgtctattttttgaaattatatttgaagagaatttgaaattatatttaaacacaaatttattatatttgaaattataaaaattatcatatataggatgaatatgctactcatccctgttagactttttatttgggcttacattaagttttattggttttattaaaacttgggttgtttggatagttctttgctgtgttagcccatgttgttggtgatcaattgttaatgggcttagcatctgtgtgtaaagtctaggtgaagcagaagtgtgg

SEQ ID NO: 322699 - DNA, 670 bp, Cannabis indica
aaataaggccaaacaaaaacaaaaatagttttttaattatgattccaaacatgcactaaatttttgggtaattacggcaagattagatttctttatgcactttgtggtgagactacaggctgttgcttagctctagagtctgcagctgagaaggggtgtaattttgttattgtagaaagaggtagtaatcaattctcttaatgatgtggactttcgttcagagattgagatgttggattaaaatatcaatatgggtttatatgtatattagtatattgctatttaaaatttgacccaaaataaattgatcattttaataattatgggtcattgggcattaaagtgtcatgagtagatactttaagcaatatttataatttgttgaggagctaaattaaaaatactcaaaattataacctagctatcaggttatatattggtaggagtctcgaaaaaacaagagtaactctattctcatcttcacccattaagagagaaatttagaaaaaccttaagtcttgtattcttagaagatcattacctaaaattacaacaaaaatcatctttacaaggttgattaagatcatcactatccatggattaaggtacacttccgttatttgagttcttgaatcaacaaaggtattctttagatctatagttatacact

SEQ ID NO: 322700 - DNA, 1054 bp, Cannabis indica
tgttcttatatatgactcaattctctaccatttattctaagtggaacaatatcgacaacaatcattatactatgtatatataggcagtagagatttaattagagagtaccaagtaatgatttttgtttgctttaattttttcaaactatacatcgatctcgatcgaagagaggaatctggaattggaattggttttggtcgaaattatgtgtcagattcaataatggcaatgagcacgaacaatggtctaaaaaaattcaaaggttgtaacactatgttcaagttgcataaagggtagtaatcattaattaacaaggtacgacatatatagctgttcattgacatttaagttgactgcaaaacattatacccttcccaatatatatgtttatatgagacatccaatcatttccaataacccatccttcaaatcccatatagctggtcaatttctggaagaacacacaccatatatagagaaaaatgtctgatatatagtatatctattgttaaaaagaaaactatctatgttagaaataatcatatagattacaatagaagaataaaataagataaataaaagataaagacaattataattttaaacaaaatgttataaggacaatatattaaataaggagttacaattctaaaaatacaaataaaagaaaagagttacaactcaaaactcaaagatacaagtaaatgtaaactatataaaaacatatatataatagagtatatatatgatatatagcagagatataaatagttcatatagagacactacaagaaatgtcacttttgccagcacatttttgtgctggcaaaagttggtattgcgctggtaaaatagaatttacccatgatgtgttggcaaaagggggttggcaaatcaatgttggtattagaacttttgccaacataaaatgaaaagcgctggcaaaaaagacttttcccagcgcgtaaatgtgttggtaaaagttagattttagccactgtaaatgtacgctggtaaaactttgatctctttgccagcacaatttgcgaaatg

SEQ ID NO: 322701 - DNA, 1020 bp, Cannabis indica
tacttgtgagtagatctaagatcttggtaaaataaattccaacagctggaaccacaagtactcatgccgggcagactggcccaagtactaaaaatccatctattggaaatcctaaagtggtgattggtgataataccgagctacaaaatttgtgagatgctttggggcagatgcaagagcacaccaacactcttcaccatgatcaataagatacctaagcaacggtgaatttagccttcgagtagcaaaaatgccaattttatgagtggacagatcaacaaattgagatcatgagagtccaacaaacgacaattgacaatcgctctaggcagggcaatcgtgctgattaggcaagcttatcagttgattggacaataatcagtgggagatactctagttatacaggatccaaacaggaggacatatgtctatatccctaacggaccacaatatgggccagaataacgtccggtcagtaacactcaacagacctaagataatgggttgtccaatacaaggccacaaagtcaaactgtaggccacacgataaacaaacatgtttttctagcccattatcttaggggaatggtcagtataacatccgtcatcaaacagatatatcgaaccaatcaatgattgataacatccaaacaaggaggcttccaggtgaatcagtcgttaatagattgggacccatacacgatgtaagagatgatctaaattgtataagaagacaagatagatagttcatccctccaaatagtcaaccaattaatgtggacaactacgtgtccgatgaagttttagggggttcataggcgacacatgtcaataaataggtaggccaagttaatccaatggtgcaagcccaaataaaacaactcaagagccctataaaaagcctgaccaactcaaaactcaccaacttaaagcttgaccagacatggggttcgccattttcaccttaaatgaacgcccttgaccttctgcacaagtttaagatgttgggttttgtgccct

SEQ ID NO: 322702 - DNA, 1022 bp, Cannabis indica
ttccccaaacgtaggagcagtactcaaaagtggatcttcggtcagtgagagaactgacccaatctgcatctatgtatattttaagatgtttgttgagagttttccttaatattaacccttttcctggtgttcccttgaggtacttaagaatctgcatccatgtgttcctagaatggattattgagaaattggctaacaacactcacacaaaagcttatatcaggtcgagtgtgagttaggttatttaactttgccacaagacattgataccttcctcgatcaacttttgttctgtctctctatactccaagtttggtattaggatccatcagagtttcacttggcttgcatctgataatcccactttcttgtaagagatcaaggacataattccgttgagtgactgcgataccttgactcgatcttgcaacttccatccctagaaaatgtcttaattagcctagatctttaatctcaaattcactggagagaagctgcttgagatgagaaatttattccatgaaattacctgtaaacataatatcattgacataaacaatcattgctgttaattttcaaccaactaagtgttttataaacaatgtatgatctgattagcattgagtgtaaccatctcctttcaacacttttgtaaacctgtcaaactaggttcgaggggattgcttgaggccgtagagagatttgttttagtttgcacacttttctctttgagaatcaatcctccaatcctagaggaatgtccaggtatacttattcaacaaggtcaccgttaagaaaagcattctttacgtcaagctagaataaaggtcattcattgttggttgcaatagataagagaactcggatggtgttcaacttagcaataggagtaaatgtctcttggtaatcaatgccatatgattggctgaatcctttagccactaattcggctttaaatctttcaatgctcccatcagccttatgttggaattattttaccaggatcttagatttactcacaa

SEQ ID NO: 322703 - DNA, 673 bp, Cannabis indica
atataaatataataatattatgtcaataatttaaagtaccaaatattatccaaaataaaatagaaatatttaaatattactaatatgtaataaaaatttcatgaagaaacatgcataataactaaaaaactattaaaaatatataacaatcaaactaggcatgttaaagtagaggtgctatttttattcctattcctgccctgtttgacattcaagaaagagaaattatccctatatatgtccacccattcctcgtttaggcggagaatttccgtcccaatagggtcgggtacccctaagctccgtcacggttggtaaaatttctatccttactacgaattgaaatggggtaggtcagtcccaacctaatatcattttggctcgtcccgtaagcattttgaattggagcaaatcaactcactcagatttaccatggtgggcttgattcggcccaattctttttttttttaaaaaaaaaaaattaagaacatatacttcagacccatctgaactttaactatcatgaacaatagtggaaaaaagtagttctcgactgtggcttgttgagaaactaccaagattgaacaaagtagtggaaaaataaggctaattaagattttcgcctcctgaactttgacatgtactaaatcattccccctgaacttttaaggtc

SEQ ID NO: 322704 - DNA, 2025 bp, Cannabis indica
gttagatgatgacagtgtcaattctatatcctcacataatataaagttttgttcagttttaattttcgttttgacaagaaacgtgaaaaatagtcaattattatcatgaaaattggaggacatgcttggtagagtattataaacttcatatataaaaattagaaaatgaagaaggacaagtacatgttcttcattttgcaaggatgaaaatgattgctattcattttgcaaggatgaaaatgattgctaatgtgtcacatatacaaccaattgagtatattatgctatgacaataataataagagattattaaaaaaaagagactaataatagaaaaaaaaaacagccattagttattcaaagtggaatgcgtgaaggattttaaatcacaccaaattatataatatatatataaatatatatatatcgaaaaggcttctttgagtttgagtccgagtactctttgtgaatattggttataatacacctctgttcttagctcaataaagattctaaagctactggggttgttctagcagaagagtaggcaggtgatgtaatcttcatcatcttatttgaatcacgtttagtttttggtgttctgttttatatttatgcatatgtattaaattcagttcatcattttcatgttagcattgcacttgttataatccacattgcattgtcttgtgtttcattatttttaatcaagtaataaatcacaataattgacatcagagctcaaacaagagcaatcaaaaactgaatcaagacttcaagaaagatcaagatttgattagcaatggcgtccgcacattttaaagtggacaatttcaatggtactaacaattttaaaagcaatcgatcgagaagagcttacaattcttggagatggcaagaagaaactcaaagatattcagataaaagcacatacatacttctgaggtaaggagatgaagtgctcaaagaagtttcaagtgaagaaactacattaaggctatgggagaaactggcttcgatttatctgaaaaagtccttagccaataaattttattttaagaataaaatttacacattgagcatcgatgaatcgaaggatctcataagcacttagataagtttaacaaattatcttagatctcaacaacatagggatcaagattgaagatgaggatcaaggtatctattattgagttcattgccaaaatattataaatattttatagatacaattttatacgggaaggaaaatttgactataatagaagtcaaaactgtattgaattcataggaaattcaaaaaagaaatgataagaaaactaatggctatggagagggtttgtttgttcgtggtagactagaaaccaaagataacaaaggtggctatcacatgaaaaatcacaaaggaaatcagtataagggttcaaaccacatattcacaaactaagatcaaaatcaaagacagacaaacaatgctattattgtaagaaggaaggccatgacatggatgaatgcagatgctgatgtaacctatagccatcagcatatgtcttaatggtttccagttatgaaatggtcatttctggatacttgactcagggtgctcattctatatgacaccaagaaggagttgtttagtagtttcaagaagattaatggtggtgtagttttactaggaaacaacaaaacctgcaaagtttttggtagtggaattgtgatgatcaagtgagaaccatctaagatgtcagtgttggaaatatttaatcaggatctagatttactaataagtatgttgcattaacatcctaatatgaatttctaaaacaatgaaataaacacatataaagtttaggaaaccttactttgggtgcagcggaatataatgattccttccgttcagatctctagcccttgattcctttttgtagtagagcattatcaagatctgaacctggatatctttctctccttcttgagctcgattctccttcttgttgattggattcttcacaatcttccacacta

SEQ ID NO: 322705 - DNA, 1266 bp, Cannabis indica
ggggtgtgttttgatgcaagctgatagagtcatagcctatgcttctcgtcagttgaaagagtatgaacaacattatctgatacatgacttagaacttgctgctactgtgttcgctctaaagatatggcaacattatttgtatggagaaaagtgcatgatctacacagaccacaagagcctcaagtattttttcgatcagaaggatatgaatacgaggcaaaggcggtagttagaactagttaaagactatgactgtgaaattttatatcatatcaagaaagctaatgtagtagcagatgatttaagtagaaaaggtcccaggcaggttttcaatactgtaaagatctcacctgagttggcttcagacatggttaggactagtattgagttcatggttagaaaactaaataatctaacactccagtcagacttgttagaaagaattagagaggcacaattggaagatgtttagtttgtcaagactcgagaggaaacgttagctggtcgagctaaggatttctcagtctcgagcagtggaatgctactttataaggcttgggtgtgtgttctgagcaatgttgggcttaagaaagaaatatttgatgagacccatactacaccttattcattacacccgggtaccaccaaaatgtatcaagacttgaaaccatattattggtggtgtagaatgaagaaagatgtagtagaatatgtgtttaaattcttaacatgtcagcaaatcaaggtagaacataaaaaacctatagggttactgcaacctttagtacttcctgaatggaagtgggaggatattagaatggactttgtggttggattgctaagaactataagaatatatgattcagtatgggtcatagtggactttttcacgaagtgaacacatttcctgctagtaaaaataacttatacaatggatttgtatgcagagttgtatgtgaaagagatagttcatctctatggagctccaaaatccattattttggatagagatctaaagtttacatcaaaattttggataagtcttgttagagagctatgggtatgaagctgaagtttagtaaaacttttcacgcacataatgatgggcatttagagaggataatacatatactaaaagacttattgcgagcctgtgtcatggacactgagggtttatggagtaaatgttggaaatattttatcaggatctagatttactaacaagtatgtttcattaacatcctaatacgaatttctaaaacaatg

SEQ ID NO: 322706 - DNA, 689 bp, Cannabis indica
gtttactttttctttttctgacattattatcttcttcatttatttattaatttgttttttttttaaaaaaaaatcttcttcatttattattctttttctctaaatttattatttctcttagtttttatttttatttttcctctagtatttagatatctcttattttttacggtctccaaaacaagacaaccagtattaaaaattacttttttgtttctttttcatattttataacaagaaatagtaaattttaaacttaataaacttcaacatatcaagtaacatcataagttatcataaagtcttctgttgcgttgtatttaaaagttacgatacaatatactaataacaaatcaatatatatatatatatataaagaaagcataaaaatagtatgtggcatcttatctttttttttgttttcctatttttctaattgtaagacacattcttcttatttcgtttgtaaaatagtccacatatacaaactaaagtctcacatcgattagatagtttttaagtgttagagcatctccaaggggcacaccaaatttagtgtcaaaaagtattaccattccaaccacaataccaaaaattacactaaaaaaatatttcttattattatattattttttaataaaattaaaaaaaaataatatcatattaaactaaaatcaccacaatgtacc

SEQ ID NO: 322707 - DNA, 1286 bp, Cannabis indica
gacaataaagctataacatcttctaacaacgctcccaactcaatataatactgaagttccaacctgaaaaaaatcaaaaaacagaataaaactttaattagaaaactacttttgtgaataaaacatgcacgtggagttgattttagtatatatatcacttggatgtgtcttcgatccccactctcactgctgaaatttcaaaccttttatacatgtttgtagcaatatttttacattcaaatagggcaagtatattaggtacaggtcctcttctacgagataagataaatttctgaaatacactgttcgttcgtgaaagtgtcaatctctcaatgaagcaaagtcctattttatcattgcatctcatagcactcaatgttggactcaacaaattggtctcctttcacttagtttctaaaagaatttggataaaaatgaaggatttttttttttttttaagttctttaagttagaatttgtagcttctctcaaaaagagttttgagaaactacttttagaattaaaataatttatataattcttagtttactcacaattttttttggaataagttgagaaatacctttttttgtatccattaatcaaaaatacgctcaaattatatttcattaaaataaacatgttaaaaattattggggtcacaattgtatacataaaatatgtgttgggtcatcatataaataagtcaaatttatatggtttattttggaataaattttatgacttaagggcataattgtcatgattttaatatgtggataccaattaaaacaatttctattttgatgaggggccaaatagaaatagtcaataaatattaccaacagttttgtctgttggtaaataaacatgtattggtccccattttttgcatcgcttcacatatcgtattcttgaatccccatcatcaagaaaactcaggttctagagagaaaatttttgatgcaaaaattagaagatcataccatttaaaaatcgattctatggactccggtacgcttccgctatttcttaatacttttgtttaattctcatgaattaattagggctatatatatacggatttacagtattctaacaaatacctacttctgtgagtgggttgcataatacaccctcatcttatacttaattctaacacataatttacattaacctaatagtataatgagtgtaatatccactttcttaaagggttataataatttgctttatacttttagtttattgtgtttgccagtggggataatttatcatttcgaata

SEQ ID NO: 322708 - DNA, 1914 bp, Cannabis indica
gggttgggatttgttgcctttggattggcagaagttgttgttgtagtagctgagtagcttgtgctgagggaagaggtaggttgtcggctaacctggcttcctcagtgtttatatatttttaggcaattttcataaattcgtcaatagtaggggcacctatcccttggaggttatcccatagtatagattcatgagttatgcctgcccctaaggccatgagtctcccactatcattaacgttcttcaccttgggcgcctggatgttgaacctattaatataggcttttagactctcacttggttgttgttttacgttggccaaggaagatcattcaagtttttgagacctgacggcacgaaattcttttttaaaatcactcgatgatttgtcccaataggtgatttgaatgcttcttgaatttattgtgaaccatgttttggctgctcctgtcaaggtcaccgggaataacatgcccttcaaatctccacttacttggcttctcctcattaatgtgttgaaatcactaatgtgggctcctggtcagtacttccatcataatcagcaacttaccctctctttttgttccttttttgtcatggtgggaatcttgaacccttgggggtatggcaatgccaagatgtgtggagcaaaaggttcaggttcctcattagtacccctcgactcttccttgggcatccaaaaactactaaatttattgttctaatgctgtaattcgtggggcatttatcacatgcgcaggagtattcagaccgtctagtggaggatcgttcacattaagttagggcgcatattctccttgtcgtggcagaatgtcatactgcgctcgataaggagcctccctctgtgcatgccccctgttcaagtggtctctcaaatcaagttttcgcctttggttcagatggtcctgaaggtccgagctcctcgcgtcacgtggggggtatcgaggatgttcctcataatatggagaaggtgcattgtcttgaacgctcacagaccggctccttgagtcggaatggtaacactcccccatgaagctcatcgttctctattgttgcggcccccgaagtgcaggccattgttgggcatacgattgcattgcggtagtccgagatcatgataagtaactatcctctcggggtgagtgaggttgtgcatgttgtggtctagtctccctgggtgctagtctcggatgggcatagttatcacaggagatggtgcgtcgtctttcccgtccatgtcccctaggttgaggtacctattaagcatggttgtctcggtaatcctctcgcccgttttgagtggttcgcgataagtcttgactttgaaggcgattgggaggtgcttccctttgtcgtgacctctctcttagggctggttgatgtggtgctggtgcattagtacatggaggctcaggatgccttattggtgatggggtgaaactgattggttaaggagggttccgaacatggtctcttcccctctcgtccacaccaatatccctaggtgctagaggtggctgagatggtaggatcccatttgcgtgttgtgtccctctcctcacgggagcctcctcgtgggggatctacaacattgtcttgtggggcagtaggtccttgtgcattcctcctagttagttgctgtgtaggagggggtacattattccttctattctcacgaccttaggttgttactcgttgtctttgttgtgacggaggacgctcgctcctcccgccatggttgtcgttctcacgagaaggtcgttgtgatatagcattagcatcacaaccctaggtcgttggtgacctagacctctcttgaccttcgagagggcaacgtgttgaacgactcccacggggtcgtccctgtaacgccccgatttcccgagacgtcac

SEQ ID NO: 322709 - DNA, 1862 bp, Cannabis indica
ttatttagggcgttacatcatctctatgtgtttgctcctcctctgtggcttcgagactctttactgttgataattacactagtgttgtaacaaaataacactagtggtttttccatatttggaaggataccaagctctgtaaagaactttcttagctagaacaattatttagcagcctcaacgaaaactatgtatagcctccatggtagagttatagattttagattattgcttaatctttctctaaatcactactccacccccaagagtgaacaccatcctagatgtagacatcctgtcattgagacaagcctgaaaatttgagtcagtgtagcctaaagggttcaaagcaccactcttgtagactaacacatagtttttagttgttttcaagtatttcataatgtgtttaactatcatccaatgttccttttctgggttggactgatatgctcataattcctattgcatagcaaatgtttggtctagtgcataacatagtatacattagacttccaactaatgaagcataaggaatcctcctcatgtatttaatctcttggagattagtgggacactattccttagatagatgcataccatgtctagaaggcatatgagcatcttttgcattagtcattgagaagcgctcaagcaccttatcaacataagcttcttgcgagagagcaagtgatctgttttttcggtctctaataatttggatcccgagaacataaatagcttcacccaagtctttcatctcgaattgggtgtttagacattcttttacgtcggtcatcttcttttcattgtttccaatgagcaagatgtcatccgcataaatgaccaagaaaactaccacttaatttttcttgacttgttatacacaaggttcatcattgttttggtggaagtcgtacgtgttgatgattttatcaaaccttttggtccaagaatgagaagcttgtttgagtccataagttaacttatttagcttgtagatttttctttcttgcccttgaattttgtaaccttctaatttctccatatagatggtttcatcaagaatttcattaaggaaagttgtcttcacatccatttgctaaatctcataatcaagagtagcgactatggaaagaagtatcctgatggatttgagcatggcaactagaataaaagtatcctcacagtccacgccttaactttgggtgtaaccttttgctacaagtctagctttataagttttatcttgcccatcaacacctcttttctttttgtagatccatttgcacccgatggcctgcccatcaacacctcttttctttttgtagatccatttgcacccgatggcctgtccatcaacacctcttttatttttgtagatccatttgcaccagatggcccagaagtctttaggtgcaactacaacgtcctagactttgttcttcttcatggaatccatagcagttgaccattgtttttgttcaggactggccttttcttgtttataggttaatgggtcgtcatcactagtgtcaccaacaaccatgttgatttcaccatccaagccataacattgagggttcttaaaaactctcccactacaacgagatacagtgatgttctgaacaagaaccataatgatagtctcctcaggtgtctcaacttgcattggatcatcttttacagatgtagaagatatatgaacatcttttagtgttaattctgaaagcatttcttctaatactactttactacatgcttgaagtctttgatatagtcattctctagaaaataagtgtttgttgaaagtgttgggttttatgccctaaataaaactctttacaatctgattagttatc

SEQ ID NO: 322710 - DNA, 1200 bp, Cannabis indica
aaaataatttccaacatcaacatcccaacccacggcataccactccatagacacccaccgacccacggagctcccccagcgacccaagacgcacccccatcgacccacgatacccacggcgcacccacaaccgaattaaacacaatgtcaaaggtgagttcgtgttccgttttttagttttttattgattttgtttgtaattttagtgttaaagatagattttgttagatttaagaatagatttaggttttagattctcagatttgtgatttgggtaaggtccgatgtaggtccaattggggtccgatgaggtctaatagaactgtgagtttgacaggtaggagacgtaggtccggtggagggtgtgatgggtccaatatggggttcgatgtggtccgatatggggtctgatgggtccgattgggtccaatgtgggttcaacggtgttcgatgtgtggtccgatgaggggtccgattgtgtaaatggggtgatgtaaatggggggtattttagggatattataaaagttttcatatcctacaaatataaggtattatgagtttagggaaaaaaatttaagcacgtgcaagcatgaaaaattaaatttccctttcaaaattccactctttaacctaactttcccattctcattctttatcttcaccatggatgcttcatcttcaagagcaaagaggcaaagattcttaatgcaacaaagggaacaaaggtccaaggcaagaaatgacctcttctcccatagaaaatatgcaagaaggttcaataaagacttctcacaaagggatgttctaaatggtaagcaatgtgatctcaaagctcttgagtatgtcgtgttttattctctttttgaacatataggatgggaaaccttgttaaaaattcaaaccaaaatatatatggccccatcttgtatttaaacaagtataagggaataatcacattacccttagggggcgttcggtatgaggtgttcaaaataatttaattatagggaatattatgaaggagaatatgattatagggaaatgtgtaaactgtgtttggttgtgtaggataatatgtaatcatattactgttaattaaattacactgtttggttgagtacaggaatcttatatatattattttgaaaaattaaaataaaaatattttttattatatctatttaatgttaattacata

SEQ ID NO: 322711 - DNA, 1143 bp, Cannabis indica
agactatcaaattataaatgaacaagaatgtcctaatttattcaaaaaagaattcaaaaccaaaactcatgtaggtgatgatattgtataacccacaggtcccaggatcgaaacatggctctgataccccttattagaaatctttatcactcatttataaatatgtaaaatcaatattcaactccataggtaacatattacataattataagtgtgaaaaatacaaatctaaagaatacctttgttgattcaaagagaagaaaccaaatagcggaagtgtaccttaatccatagatagtgatgatcttaatccatcttatagagatgatctttgtggtgattttgggtaatgatcttccaagaaaacaagacttagagttttctaattttttctcttgatggtggaagatcagaatagaaatcggctattgtctcttggggaccaccaccaatttataacctcctagctaggttattaattttaagtatttctaatttagcccctcaataaattaaaaatatcgcttaaggtatctacacatttagcccatgacacttaaatacccaatgacccacaattactaaaatgatcactttattttgggtcaaacttcaaatagcaatacactaatatacatatgagcccatattgggaattttaatccaacaatatgtactggttttaaaattaagaaattattgtgtactttatgataataaattaaatttttgtagatgaattttttggtggcactattaatcaaaattgatacttttatatactaggagagagaggcgaactgagaaataagataaagaaaatttaccttgatatgtgaatctattgaccaaccttgtcaccactacctgcaacccaaagcagagagtgagagtgagagcgtgaatgagatataatgggaggaaagagagacatgtaagagaaataggacatcccaagcaagaagaaatttaccagtcacttgtgctacatcgtccatctcgtcggtgctgcaagagaagggatttggtcgccagagctagcactgatcagtggttagagaaaagagaaaggagagaggtagcgactgatcggtatggtgcaacgccttggatttcagtccgattggagagagagagagagag

SEQ ID NO: 322712 - DNA, 642 bp, Cannabis indica
tcatgaggtgaaggcattccccatcgcctcttagcgtgtaggacaaaaatgcaactaaatacttgatcgccttcagtgcaaaatgcaataggaaaatattgtaataatcatcaatcctcctaaagtacggatggatgggtagcattgcgccctactgagcatgtggtccagaccaagcgcagtttccttccctagggtcggtggcaagcttcccgtcatagggaagaaaagtttccacaccaccgaggacacccttggcctgcagattcttaagtctcttcaatgaaagaatggacaagggagaaacccattgagccttgtgtttttcttggtactttgtaggaagaactttcttctattcctcaatgacataattttggcccttaattaggaattcaccaagtttttgaattggctccctatcctcgttatatcctccgtacgatagagtcgcatggaccacttctttttcttcagcacgagctagacgaacctcgccttggtcctcaacttcttgcactcttacatcaccaccatgcatctcgacgacttcttcttcaggccctttaagtatggtgcatgaaccatgtgttgggttttatgccctaaataaaactcaaattcaatgtaatccgtattatt

SEQ ID NO: 322713 - DNA, 558 bp, Cannabis indica
atagttttacgtttaaaagtaaacttagaaaattaaaagtaaataaataattttttgaacaaaaatgcaaataaatgatagttaagatggtttagttaaaaaaattatttcagttttttccaatcctttgtactactgactcaactaacatcatcttaattttgttatcaaaaaaaaacatcatcttaattttatttttctgaaaacaaccaacaccatcttaattaattcaataataaatgacaaaatgacaaaaaaaataaataagaaaattattgaaattaattaacaaaaataaaataaataatcaaaattggtttttgattgtgaggagagccggagtgctgatgatgtggatgcacagttatcgttagtttgaatggacgcagaaagggcccacaagcctctaaaagagcacgtgatattaaattagattcaaagataaaacttgattggttcttaattataatttattattcaacttttacccaccaaatcgaattattttttccaatagtaagttattttttatagttataatattgtttttataaattt

SEQ ID NO: 322714 - DNA, 814 bp, Cannabis indica
taacgaaaataaatctgtttttttattgataattgaatataaaagattacattagaatagagttttatttagggcacaaagcccaacacaggccacatacctcttcgtgggaagctgggccaaatcagcagcaaagtgacttaccatctctgaagcaaatggtgccaggttagggcccaagaagcgcttaaaccggtcagtcatgggatctaagttcagatcccctacctttccggtatactcacctcggaaaggcccatcttaagcttcgctcaaccatttcttcagggcctcagcttcagtgtcaccattggacaattcctccactgcataattatgtttggcgatacagagctagaccctttcctcgtcagcataggcagggattagaaggatgccaggaggggcaggatactcatcaattttagatggaatccctgaatcaatactcgaaccgggggtaacaacccgcttcagcttcttggaagatttgggctcgaaaatgacactgttgcacttccagtcgagtggaggaaccacctcgtcctcctcttcttcaatcagaaccacctcctggttcctgataacttctttggcaagtccccccggagtcacactcactcaagggtgctctggcatgtccggctcagggctgtgggtccgggcaagggcggctagaagatctgttggagatattttaccaggatctagatttactaacaagtatatttcattaacatcctaatatgaattctaaaacaatgaaatacacacatataaagtttagtaaacattacattgggtgtagcggaat

SEQ ID NO: 322715 - DNA, 611 bp, Cannabis indica
tggtaaaataatttcctacagtacaaccacctaaagttgattggagtaagtttgtatggagttgttttaatattctgaagcatagctttatggtgtggttagctatgcttgggaaagtgaagacgaaggaaaaattgaagagatttggggtgatcgataacgatgactggcttttgtgtaacaatggcatcgagacaattgaacacctcttttttggctgccagttttcaaaggactgcttcgcacaaatcaagcaatggcttcaatggaggacctcggcagcaaccttgaaaaaaatcaacaagtggataacaaaggcaaaatgtgacaacttcaaaaagaaagtttttgctgctaccattgcagcgttgatttactggatttggggtaaccggaataatggattttggaatggggagatagaaaattgtaatagaaatgtgtacaaagttaaagctttcattaaaaatagaatagtttgtatatggccaaaagatgtaactaatagagaagagtgttggtttaattcattgtaaatctattgtaaagattatagattttagagttggaggtcctctccttgagggtgctcttaggttgtataaattgtt

SEQ ID NO: 322716 - DNA, 560 bp, Cannabis indica
taataaataaatataaactagccaattagagcatttgataaaaatttagagaatgatggctgggtgaccaaataatattgagatgctcatctgagagcatttccaatgactccgatggtaaaaaaaaattaaagcatgatttgtcaagtggatagatgaaatattgagatattatatcattagggagaaataaatactatttagaaattgctatatggtaatattgatgctattattattttataataaaaaaataaaattaaaaaattattgttgttaaaaaattaaattataatgtgtgagattataattatagtatattttaaaagtgtatattattggagtgattttagaaataagagtgccaaaaataatatggaagagtgataaaataaaatattatatttttagatgatgtggagatttttagcacccttaaaagatgttgccattagagatgctctaaaagaggtttttacaccacatgaaattttaaatttttttacttttttttattgtagggtggaattttttttcaaaaatattgtgtaacttttata

SEQ ID NO: 322717 - DNA, 717 bp, Cannabis indica
ttcatatttaggatgttaattcaacatacttgttagtaaatctagatcctggtaaaatattcccaacacccaaacagtggattggacaaattagcctgtctaatccaatccagtcttgcgtaacaaacgggcccttagagagttaacttaatgaggtgcattttggacaaaaaaatatgaacaaaattattgagaattggttaactcaataaattcttgttggcaaaagaggtgcattttattattttcttttacaatgcttacagtaaacaaagagggttttagggccagtttggcatagttgtactgtagggaaaagcaattatagttgtgctgtgtaaaaaagcagctgtagctatgttgtaagaaaaaatagttgtataagaattgtgaaaaaaaactcagctggatgtttaataattataaatttaaaagtgttgtgagtagttaagattctattatattgataatgataataatataatctaattcattagaatcacaaatatataaaaagttatgttgtataacatttttattttctatatctttttaattattttttcccatagcataaatttatatgtatttgattaaaataatttataatatttttaaattgtatttttatcacttgtaaaagaaattgtagtttataaaaaactctaagttgatgtagtttgttaataataaaaatattaatataaatataaaata

SEQ ID NO: 322718 - DNA, 782 bp, Cannabis indica
aaaattctccctaaactattgagattgttaaatttaaggacttttgtctaattttagtaaaaaaattcttacatggatgacagttcatgggacatgatttagtacatgtcaaagtttgaggggcatgattcggtagatatcaaagtttggggagcatggtttagtacataaacaatcactgaaacagtaaaattaaatgaaattagacaaaaatctttaaatttaacaatctcaatacttcatggggaatttttaacggccaaaaaattcaaagggcataatttggtccatgtgaaagttcaagacaaaaaaatcctaattagccaattaaaatatacaccttcatcttaaatagttaattagagaaacaatttaaaatttgaataatatatatgatgatgcatgtactatactacatgataatgtgggttttctaggaaaagtaaactgacttatatcggatatacattactcttccaaactattactattaatcatttcataacaaaacaaaaccagagttaattaattattactaacattatgaaatagtaatcagttgctcttcatgatctacatctagtcttgaaataagttattattacgtgaacattaggcacaggaaagtaatatatactagcatttaagcatgtgatgagaattattttcattctgtaataatatttatggaatattttggtttgtgagaagtcatttataaagagggtatttttgtttgttagttagtaatgttatattatataaatataagtatatatata

SEQ ID NO: 322719 - DNA, 1166 bp, Cannabis indica
aaatatttgaatcttaatctttgctgaaaatgggaagattctcaggagagttctcaaaaaagatcattgaaattagcctaaattgacaaaatgtcaacttgggcgttgggtcttgctttttaggggtgaaaatcggtcggtttttacaattttataaccgatcggttggttacggttttattttacaaaaactgtaatcgaccgtttagaaattataattgtataaaactgaccgtacgatttttggcagttttttagtttaaccaattttttatttcaaaaattgaaaccgaacgctatgtcaaaaaaaccaaaaccgaaacctaccgccaaattcggtgatgacgtgaaatcaaaaattcagtaacggtctggtcggtttcggtttatcgatttttatgaacacccctaatgctttttgcactcaggaagtgcagtttctttcctcaaatcacatattcctcattttctatgaagacaaagaagatgcaaaagttggatctttaatttgaatcttggaaggcacctagatttataaattgtcagggtgctcggtgcccaggcaccaggtgttaaaaaatgaacttgcttcgaatctgattctgattcctcaactatgtttgtggtatgtctttagttaatgtcccactgtaaattttgacccatttgcactacgatcgtcctgaaaactaaaaccctagttgggaatgtcaacctatacactaggtgaaaccctaggttcccaggttgacttccggagtgcaggttcgtgtaatttcagctcccaagacttagatttgattgctccatgcctccataaatactgaaagatagtgagttggatcaaagttattaaagtttgaacttccatctcggagctcctagagtcaacctataggtgcatgactagggtcccgtcccaggtcgattattatgactcaggtccactgaactttttgatcttcttgccacgagtcaagcattaatgttctcgtcactagggaaagtttctaggttaaagtttgcccccaatttaacttcatacttgtgtgcagttgacttgatgacgtgaatgttgggttttatgccctaaataaaactcatttcagtataatcagatttacttattaatatagatcagaaataacatttaatgttgcatggtt

SEQ ID NO: 322720 - DNA, 505 bp, Cannabis indica
gagtttcctataattagtaagtagtcttcaaaattatctaaagaggaagaagtaaaaaagatattagcaccaaatgtatttttttttttttttaaaaaaaaatatatattaccaaataataatgagaacaatgatgttacattcaatgacaaatatatcacttttaacaagttgttgaaaaggatagatctcacatgtttgaggctaagaaatgctttcattggcttattagcaacaaattttggttcatttattcaacatattgatattatacagaaacacatgaacatggcttcattgtatatataaacaagttaatgaagtatttaaatataaataaataattaaataaaattgactaattctttttattttcttctttggatggtgttagtcaacacgtatgaaaatagtttatattttaatcatttctacaataagaaatgctaaaaggcaccagtggtgccaaacaccctcttatgtgtcaatattgctattggtttaa

SEQ ID NO: 322721 - DNA, 1012 bp, Cannabis indica
ataaaatattttcaacataataatatatggcatcaatttcttaaaaatattatttaaaatttaattaactttgtatttttatactataaaatatgtaatattttggcatttaacatgcaaacttctcattcgcgagcacaccaacaccttaatacaatgataaagggatgaagaatgattaaactaaatctagaagacctatgacaaatggttgacaacaccagccttaggactaagtgatgaagacaaagctcaccaaaattagtctataagaacacttgaaagaattctcatagactaggaggcaagtgttgaccccaaaaaatttctaagtgtaatctttggagtcattaaggttatactcgaaagttcaccaagtgtaaattctaaaatacacccaagaggatgtgttggtaagaggaagagcaaatgcacgggccaagctccctatgcccacacacaataacggggagctccacgtagcaggaggagtcctttctaacaagtagctccaagcagtaggatgaggctcctccaacaagctactccatgcagtaggaggaggctcctctaacaagttattccacgcagcaggaggaggctcctctaacaagtagctccacgcagcaggaggaggctcccctaacaagctgttccatgcagcaggaggaggctcctctaacaagctgcttcacgcagcaggaggaggctcctctgacatgttgctccacgtagtaggaggaggctcctctgacaagctgtaccacgcagctggaggaggctcctctgacaagctgctccacgcagcaggaggaggctcctataacaagctactccatgtagctaagggcagctcctagaacgagctgctccacacagcagtgagcaacctcctcagctcgaacacctatagtgtaataccctagaattaagtgatggattagcaaaaaccctaattagataattatgaataattgaggaattatattattatatagttcaatatatgtaa

SEQ ID NO: 322722 - DNA, 778 bp, Cannabis indica
gatgatcaaagctctcagtttgaaatatgtgtgcatctatatgtgtttgttgtttttctatttgtgtctaattaaatataacgatcaagttggcacaagtgaaagaaacaaaaagtagtgtcaaagtgtgaaatagaaaaaatatattctaactctaatatattcaatgtccaatatagacagtgtatatatttatatatagttgcggattgtattatattatccaatgctgataataagacatttttctttattcacaaaatcatcaattttaatcgtttctttgggtctattgattgcaaaataacgaaaggctttaacttgagataatatatactaagctcattaattaacctatatagggatcatgttaacaataaattatcaaatatatgtccccacttccaaactcaaaatataaattaatttattcatcattataagtataaaaagatgtgagaaattaagggttgacattcactatatataatatgtattctttatcttaatttatggaacttcaatgaagtatagttaattaggatgtaaaattgtagataaattagtgtgaaaagtatattaaatttatgggtgactactcttttatttatttatttattttttttgagcaactcttttatttatttatttgaacaatgtgattattcaagttttacattaacaaagtgattatgatggttaagtatttcttttataacatgtgttataacaggtcgttaataggttattattaaaggatttttttttttttaaaaaa

SEQ ID NO: 322723 - DNA, 3289 bp, Cannabis indica
aatgggatttatttagggcacaaaacccaacacatctctcatcgccttagccacctccttctgaatctgctccttgaattcacaaagccccttcacttccactgttaggttggctgtcgtctgcaaatcagcttggtgcagctcttctaaagactttagcttggcagttaattcctgcacggactccttagcgtcccgaaactctcgcctcgcagtggccatagccgtgtccctcgccttcagcgcatcatccttagccttcagctcctcgacctttgcctttagcgcctcttgatggctctgctccaaaagggcctccctctgatgggcctcctcccggatagacttcctctgcacctccaagtcccgaagactcttcatggccttttccatgcccccaaactcagtcatggtgtacccatggtcaatcagagtctttgaaagacgaccagtctctgcaacaatctggaaaaacaagagaaatgtgtaagtacgtgatgccaagcactaaaaggcaaaagcttggaaacacatagaaacttaccgcggtcatggctgtacttatgtcctggatctggtagaccgggttggtggaaacgcaggctgcgtacctcttcatggggagttggacaagacttgaggcgaagtggctcattaattctgaggcaaaaggagcaaagtgggcctaatgaagcgattaaaccagtcggtcaaagatccaaatttagatcccagacgttcctggcgtgctcactgcgagtgtaattgtcctgggcctccctcaagatcttgttcatggcctccacttcagcgttcccctttgtgtattctgtcgtggcatagttatgctttgcattccgaagctggtttctttcctcgtcagcaggaacgggagttaaaatgatactggggagaacagggtactcttccgcctcgagtaggatccctgaatcagagctgggagccggagtgtcgaccctcctaggcttcttagcgacctcgacctccaccattttgcccttgcgctttcggtccagaggggtgagaatctcgccctcttcttcctcttcgatctccccatccttgtcaatcaaaacaatttggcttaaggggaagctagaagaaggattcccggaggtcacctccaagtcttgtgcttgagatagggccgggtcgggactgtaagtttgagcaagggtagccataagctcatccattggcttagctgctttaagaaacaaacaaataagtgttagaacattgacgagaaattttgcatgcaagaacaaagcggtaaaactaatcctacccagataatctaatgcagccctagcaaagtcatgcactaaaaggctggtgtcatcatccccaagaaagctgtctgaggggagaaaccagctggaagacaagtaggctaaatgatccagagggataggtgcgggaggcccggaccccatccgggaccggcctaaaaaatgacctaagttggaaaaataaaaacccttggcatgatcgccccatcgagtagggggcattctaaatctaaggagacgttcatcaaactctataggcctacatcgagaataatcttgagcagaagggacttgatgaacaactaagggagacttaccggatccagaggtgctggcgccaggagccccagtgttgggacccaggtatggtagcttaggctgggaaggcgcctgctctttaccagcttctacctgaagagccctcccgacagcggcttgagccttaatataagctaactcttgctccctcctaaagaggtacttcttgtactggtcttccgcggaggcgataatgtccgcccggagtgccttctcggagtccagactgcgaatgttgggatagagaaccttggataagttgaaatcatccactgattggctctctgagattagcttagccctcctgcagtttgcagttgtgactaagtcccccacatttacgtggagaagaccttggcatgctggaggaagagttgggtaggggcggtccgatgcatcggaggaaccctaacccactccgtgagcagttctaggcattctacagcttggaaaccggaagaaaagaaaaaccggtgatgatactcctttacattcttttgaaaattaaaagggatcggaccctcattggcaggatgggcttgagtgtgaaaaaaccatctttaagtctatcccccttcttggggacagacacgagttcataaaagtataaaattttggccgggctaggtgaagcccagcctttggctacatagaaaatgaacaagcctgaaagtaggcggtacacttggggaataagttgatagctagcaaggccaacaaaaactaagaaatttataaagtaatcctgaagtggtagtatgggcctggacataaggtgagtccggctccaggccccaaagccaccgtagttgcagttgggcgtctcctcatctcggggcagacggtgaaaaactccataggcggaaggcttgataccagccacagtcacgatcttctccaactggtgggcacaggtcaaggttgagtgaagctcatccgcctcccaaccattggatcttttccaagcgcttaaccaaaagttctaccctaacacgcaagtaaacaacaaaagtataaagtacccagaaaacttacacaaaggttgtgaactggaaggtgatgttgatcgacggtagaatgcggattggcaacgacgaaggaatagcagtaaaaaatctatggtttctataatttttctcgaggaagttcttgaggcaaaatggcgaagtggtgaaagtaacccagtgaagaaaaaaggctggcttttatagaccagaaagggtgcaaggcatatgtgatcggacgccatcgtacggtcggaatcataatcgattcgtattctacgaatgaacggttgagataaatgctcatcagggcggttgaaaacgtttgagtacttttctgacaccctgattaaatgcatcagtttctcaatggacgggaagcgaatcgttgactgcaaaaagaaaaaaatattaatgatgaccatcataaatgcagcccactcgcttgaagcacgtgccattacaccaataagccgaccggaggcaccaaacaagcctcatttatccttcactaaacgaggcttgggggtaaatgttgctctggattttgtccaaaatacttggacctagataaggacgacacgtggagccttaaggaccagggcttaaggaaatcgactaagtcttagacgaaagaggagtgtctcagggaag

SEQ ID NO: 322724 - DNA, 579 bp, Cannabis indica
atgttttgagatatattggtcttttttattggtgagtcaacaacacatttacttttacaatttattgagaactatatattgtattgaactgaatcccatagtaaactacactatgttataatgttattttgaggattatgtataacaaatttatcctagctagcaatatatctatgtaatagttaatgcttctgtgtctgtgtttattatgcacaaataaaagtaactattaaaatataataagaattaaagaagtaagaaagtgggctccttttgtttcttaattattgtatttttattgtaaattcaccttttataaagctaagagtaaagcgaaataagagaatttgttcattaatttgccccaagtagcggtatgaccatacagtaggaacttttttgtgtaattcggattttgcttttgttgttaacggcttggcgcagcgacaccaaaaatactatacctatactaagattacattctaaaaactcaaaaatattctccccaacaattactttattcacattttacaatatatcccaatgataatttttccctttacaagcaaaattaaatta

SEQ ID NO: 322725 - DNA, 887 bp, Cannabis indica
agatagattgtccaaagaagaaggtggagaatttcttgtcatttgtttgtgaatttggtatcgccgcattacttttgtgcatgataaaaagctaatatttctaataatatagtaagtagatgggctcttagctatctatgctgattccaggatgctcaacaccattcttataccgtggccccttgtgcgcctcaaggattatttcttctttccatatagggagttaaattttggagattttaatttgttcatggacactgatatttgtcttgaaaggagggggttgggcatgtaggcgtttgggtctcgtactaaatgaagaagtcttatattcacctgctactctagctattcgtcttcttgaacctcatgtggtagagactttgactctctccttcaaattcttctcctcgccaagtggttggttatattcgcatttgtgtattttttgattgtttgcttctaattaaatcagtctctaataagatgtcaatctgtaatgagtatggtataaatatatatatattaatgatatctttcatgtttagaaattattctctcgtatttctattactcattataagcgagctataatgctcttgcctattcttcaactaagttggctctctctttagttgaaattctcaagtttagtggtcagatcttctgcctaacttactctaattgtttaatcttctaagatatctttagatttctttggcattgtgcctttcttttaatggaattattctttttctacaaaaaataataataaataatttatttttgtatgatatgttttacatattttccttttttcctacctataaattttaattttttttagttttgtttattcattatatatatatatatatatatatata

SEQ ID NO: 322726 - DNA, 698 bp, Cannabis indica
aaattaaaaattttagaagttatttatacattctgtttaagtttttttttttttaaaaagttatattttatgaagaaaattttaataaaaattttttaaaaaattgagaaaattagataaaggtaatcaaatattagaggagtaactaggtacctcttatgataattagagaggtaattaggtaaccttatggtaactagaggggtaatcagttaattattatactaatcattttttaaccctttttttttttttaattttcccaaattaagctacatttttacaaatttataccttaaaaccaataaaaatgaaaagttcccttaggtaatttatagttttgatttgttaacatatatccatattgttttgcatgtgaggtcaaaagaatattagtgaaaatatattatgaaagataataactaagaaattataatagaggacaaaattgaaaaacaacactagctaggtcaaatatgaacaacgcttctaccaaaagattaattagactaatactttgaggaaattacactctatactttttttatattgtcctttttatttttaccatcttttttaaagtctatcatttttacctctttttttaaacattgtaccaattttgcccctgtcacttcaagatactctccaagtgactctcttatgtcagggtattttgggtacaatacatataaaaa

SEQ ID NO: 322727 - DNA, 1380 bp, Cannabis indica
actaattagcctaaaatatattattgataaaaataataattaaaaaaaggcatgttcagatatggatgatgatgggacacgtagcacatacatatgcattttgtttccacttagaaagagtgatgtcttcacctgtttaccgttatcttatcttctctcctctcttattaattctcctaattaataataattttacacatatatctctatttttctcttcatcattcctttgctttaatttattagtttatttttttaacccaccaacttcatatctggaccctatatagctaattaactcctttaatttgccatgtttttccacacactacagtactactttgacctgtacacacgcatatacgtatatagtagaatatatttctgatcacgatgaccatgacaaacttattatcatgctgatgattgggtgtacgtgtatgtatatatatagtggtctatatatgaatgaaaatgttttatgattacacgttgggtgcgttatcaagataagaaactgtggggataacctatgccgtcatttatgttcttgcgagtgaccctttcccagttatataatgctttaaattctgcaatatctgcttgtctggacagcacatgcatgcacacatacatacatttttattaatgaaattaatgtccccactatatatgaatatcattagacatagtattaattatatctttctcaaaagtaattatatatgacaaaagaaaaacgcatgtacgtatactatttgagtatgattattagacactaataatattgagtttttataagtgatacttgatattttgtaaacattattttttcaatttacgtaagacttaatatttaattaatattaataacaaatactgcagaatgtactagacacaaataatatattttatcaattatataccttaataattaatcttatcatgattagagtcacgtaatatatatatatatatattctactaatatagttatacatacatgactgaaaacactagaaactattatttatttttcttcactaaaaataagaaaaataacaactgtgttgtattatttaagattcagaataaacttctttataccttttccaccacctttttctgtcctttctgttctatggctagctacattaattgatgctaaaacaacaatttaattacatgtataaggggtgttcatccaatctaatccgcactatttttttataatgcatttgatccgcacaaaatgcagattttattttttggatctaatccaatctgcagaatatagcttaaatccaatccaatctttttgcgaattagattagttattttggatttgttactttttaatattaaattatttactattta

SEQ ID NO: 322728 - DNA, 1016 bp, Cannabis indica
gttatggcatacattagaactatccttcggcatctcatgagtaaacttgtgtaacaatttaactaaaagttttatgtttcaggatgcatatctgcggatgaaagtgggaatcgtctgttcatttctgacagcaatcatcatcggattatcatatttaatagcaatggcaagattctggactgtgtatgtatgaaaaacttttgcattcaagctaaagtgcaatgtggtttgtgcgcttgttttagcatatcaagttactttacaactccctatacaactacttgtctaaaacagctaaaccagttcaaatttgaggttttctaattttcattctaaccaaagacatttgaagtatgtatatcagctatgtataatgatctgcatgatcttgtttgtctttatgaatttgtgattcgttaaaaacaagttgtgttacctggtctttctatgtttttctttctgttaattactacaaaattgcttgaaacgtagtcttagatgtgcgcttgcattgtttattcgtcagattggttcttctccaggctttgaggatggtgaatttgaatctgctaaactgatgcgcccagctgcatcattttatcatgatgctgaggattgcttgtatcttgttgattcagaggtattttgttaacttgtatcactgttctagcctcagtctataacaaacatactttacaaatttctcacttaccaatttgctttgctgaaatttggatcaactaagaatcatgccatcaggagagcagatttgagcaaacggattctagaaactttttctccagcaagcaacattagtaagagtaatcaattttggaactgggtcagggagttgggtttgggaagtgttgcagagcccgaagcacatgctgctgaatcacttttgttcccttggcatatgctatattcagatgacgataatttgttagttataaaccgaaggtaaagaagttataactttttattatttttttttttaaaaaggaaacttcttattc

SEQ ID NO: 322729 - DNA, 1348 bp, Cannabis indica
taccaaacggcacctatatatatgagtactatttttttaattaattacatttgttttaaataaatttattgttttaggaaaaaggagaattattctgtattttttgttttaaaaaaaattacagtttggaaatattattctggtggttgttctaataatttttatgtgagttgctatgtgaattttaattataatttaagttgattcgtcaattgttacgtgagttactatgtaaattttcataaaaatataaaaagagaaaattattttaaaatgtaaaaataaaataatcgtaaaaagataatatcatatattttaatacatggacttataattactctccccaatataaagattccataagttttgtaaatattatagaaaaattctctggtagggtagggacatgttttacgcatggttttttttttttttttaaatgtaaactttcattgaaaattctaccatcacaatagtatattgatgagataagtcacttttatgcacgggtgttcataaaataattgatccaatctaatctaattcgcaaagtgtagatgtctgcacttgtgcagattagattggattggaaaattccatatccgcgcttgtgtagatcggatgttgattgacatgtaaatgtaaccgatccaatcaaatctatacatatctataaaaaaaaataaaaaataaaattatatataaaaaatatataatattttaaatgtaaaagaaaatagtaatttaaaagtctaatacgtataatataattatactttcaaaatttaataaatcacatgtatattccattattatataaattttttttctacatagaatgtaaaacaaaattaaacatttctttatacatacaattttttcatcctttgaatttattattttatttattttaatttgttgttagagacataaaataataataatttgttttattttgttgctagtcatttgaaaaaaaaaatattttttttcataaatattaaataatttaatattaaaaagtgaccaatccaaaataaccgatccaatccgcacttttacggattggattggatattggatttgagctattgtgtgaatttgattggatccaaaaaatgaaatccacacttagtgcggatcagatgcactatgagcacgacttatatagaaaaacaagagctacaagcaagacaataagcaactttgtttacagatcattctacaaaatgtaaaaataccaaaaaaaaactaagtaaaagactcttacagtcgtgaaccaacagatcaaattctgatagtatatgtagattgcttggtattgcttggatagagatcaagctatcca

SEQ ID NO: 322730 - DNA, 677 bp, Cannabis indica
cgtcaaaaataaaaaaaaaaaagagtaagagatacagacagagttaccttcatcataaaatcccttttggttgtcgagcctaggtgaaatcggcatcgaaagaccgctccaaggaaaatttagttgtgtccatctccattctaaggtaacaaagatttgaattccaaccctccaatatcaaaagatagcaaagatttctgagagagagaagaagaaaaagaagcgattgatttttgggtcaaagctacaaaaatgaaagtcgtagaataaaaaaatgaattgattgatttttggaggaaataccaaaaacatgggtttcaattgaaagaggagaagcagctgccacagatgcttggagttattgtcgcagaagagaaattcataattgaattgaactatcggagacttcctcagccgaaatctccatctgggtaatctgtgtgacacataatcttgggcaagctcgaataatcgtcgtttaggggcgtaatttaaaaggggaagaagaaggtgttgagttttatgccctaaataaaactctatttcaatgtaatccattttattcaatatcaataaagaaacagaagtatttttcattcatttgtatgtattgggtcatcttatcaattacttgtctatttgatttataaattcatccaaaccattttcacatactt

SEQ ID NO: 322731 - DNA, 1214 bp, Cannabis indica
ttgctatatggttgactctgatgctaaaatcacagtgttgaccaaaatagcatcatcttgaactgatcccaatcttggtacaggcagttgttgtttgttgatgttatgttgttatataatattgctgcacatctggacgtactgagtgattgtcatatgctatcagtatcatattgttgcacatcattgattagttagttgccaaacatgtttgtgtttttgtgttgctgattgtgttcacacacaatgagtaccatgtgaaatcagtttctttacttaatagttttatgtagaacaacagacttttgtcatccttggcttgtagtggttcacatccttctttcagttgatatttgtacatttttgttgtatcaggattgcattggagttcctccattttttttcactagttgaccgaaagtgtaatctcttgatagtaattctccacttgattcgtaatcaacatagtgcttattgagctttttgtcatcccaatagtcatttctttgtaacaaaatttacagatgttccatgtcttgaaatttttgaattcgttatcaatatgttgtatcgatagttgcaaataactattttaatcttattaaaaaaatacttataaacaactgttttcttttaagaaacattaaataacatttaatgcaactatagttgctctatttgtaaactactaattatgtaaatagttttaaataattatttttatctatcaaaacaaatattaaacaattgcttttttataagcaacgataaatgagatttaatgcaacaatagttgttcatttgaaaactaatcaattttttttttgtaatttatttctctattcccaaacaactattttaatcttcgaaaataatatataaataatggtttccttataaaaacaataaattatattatatgcgtccgtatttttttaattgtaatctaatttcatctattttattcagatcaactaatttttctatgatttatgattgatttgattttcacacactaaaaatatataaccatgaagaaaactctaaataaataacttaattaagaagaaaatcgttaaaacttttgttaccttgtatcttttgtgtgattcgtttttgagtaagcttcgaattctctctgatcttgttatattgaaattatctttccagtatgattcatatttttggatttaggttgtttttgtatttttttt

SEQ ID NO: 322732 - DNA, 1974 bp, Cannabis indica
cccgagcagtaggtgtatttttctttttgtcaccatatctagatggaaaaccatggagaaaatagcacttctcaaccaagtgacctggtttaaggcaattggaacatgtagggcgaggcttcttgttccgagaaggttgattcattttcggcttggcaggggcagcagtaacaatgtcggtgttgccaagacaacgttggcgctcttgttgaacaactatggagaaaaccttggatggtggcagaaggggatccaagagggtgatttgagcatgtattccctaataagattcattaagaacgatcaagaattgaaggatctgttctcgagcgtagtaatcttgaactttttgcatggtaccacaagtgcagccacaagtgcgaggagtatttggttgatactcgttgagttcatcccatagggcttgtaactgagtgaagtatgtggtgaccgagttatcgtcttgtttaacattgttaatagaggtcttaagttggagattgcgcgggccattactctgattgagacgatcatggaggtttgtccacatttagtgagtagtggttttgaacatgatgcttgcaccaatttctcaagacacgtattgaaggatccatgacattacaagtgttgttgcaccgatcccaagcggataaagaaggatcattgagtggtggacggggtaaggtgtcgtcaatgaaaggagttttatttttggcagcgatattaatcgaagttgctcgtttccaatactgaaaaattatcttgactagtcaaaaggaacgagaaaatgatatttggttgatcttcaattcccaagtgataacgatcatcttgagaaggtcgatcgtaaaagccacgagataagccttaattagcaagaaagctagagctatcagtataagacacatggccttgagttccaagaaaagggttgttaccattaaagaacggagtgggctgtggttgggccggagccgtgatggtgccggaaaaaaaaatgacgccagtgaagggactgtctgaaccgatgtcggagtggaggaggaaaatggcagaagcatggttgtttgaatctacgaagctatggaggtcaacgccggagtagaggaggaaccaaatggtgtggtggagtggcgttcaaccggtcccgaactggggagattgacgacgggatcagagccgattacaccagcagaggacggatcgaacatgatggaggaagcaccgattggatccgagattgagttttcaagagtgagagaagtgacgggcggagcaacgtcagagttggtggcagttgtcgacgatggaacttggccatggttgatggtgggagatggtagcggaagagaaggagcttctctaatggaggtagtggcaatggtggaatttctagttcttggagccatacagaagaaataaggttagggttttgtgaggtagaaggttatagcagctgatgccattttagagaggaaatacttctcttatttccattataggcagccgaaattatggctgtgagaaatgtggtgtgtagggtttaattacaatgtaaattgtatatatatacagtaaaaggaaaggcccagtgggtcggtattgggcattctaatagtaagttaagcatgattctttatacagtagaacttttatttaagaataatttctaatttattataaaaaaaattaagtcccaatttgggttaattataaaaaagaataacatctaaattgtaattagttatacattttctaagtcccttgttaacaaaatatacatctatataagaataattacatctcaataaaatatatgtaataaaatatatacatatatttaataaatttatttatgtaaaattaataattttattctaaattttgatacatgtataaatattatatttacttaaaaataattctattataatgtagtattaaggattattcattgttattgtttttaca

SEQ ID NO: 322733 - DNA, 1085 bp, Cannabis indica
tatcttattcttatatattttagctgggataattttaatgtccatattaatcaaaataaaattacaaaaataccaatattaatgttaatgtttataaatataccagccaaaaaaatcatatggacatcggttggcttgagtcatttcccaaatttcttttagtgacaatttgtctggcacagtacgagcatacttgctaaacatgttctcaagattcattggaacaaacctgaaataattaatattaatataaattccactatgaaaattacaaaaagtaatatttttggcaaaatttttatagttttaggttcaattttttttatatatatttttattatattttataaaaacaacaagagaatcacatgaaaataacaaaaaaaaataatatacaaacaataaaaaactaacaataaaataacaagagtacaatataaaaatattaaaagatcatatttttttttttttttgtaaataaaatcttaaaaaccattaaaaatagtttaaaattacgtaacaacatattttcgtaattgttgctttttagtcatttataaaaaaaaaaaacataaatacattttcttgtgtattcatgagtataattaataagttaaacaactaattaattttctatatgtcatcataattaatctagttgatatccttttaattataatattaaaagggcattttcataaataataatgataatttaattcatgtggaaattaatcttccaaattttgtagaaagtatattattaatcatactatatataagtaataatcaaataatggggtattaattgtaggaataattagcaattttctctcttgaactttcgacaatactgattttgccccttaaaatatacggcttgttaagaatcctcctgaacttttacatttatagagatttagcccttctgttaggttatgtcgtctcattattcggtttaaataaacgtatcttcgtaaattagtaattttgtcccttaaattttgacaattatcaaatcgtaccccataaaaataaaaatgataaagattcaatattttttttaataaattttaaaaaaataa

SEQ ID NO: 322734 - DNA, 858 bp, Cannabis indica
atagttattaaataagataattatttttcaaaaattgatcctaataaatagtaagatataaccaagttcataaaagatactaactgtcttaaaaaaaaaataataatattaataattgtcaccaaaaaaatagatagtaattacattattgagaaaacagatcaagttttactgcgatattcttacaagcaaaaagaatttgtaagatactctaattagaaaaaaaataaaaaaaaacttcttccgtgtgaatctctctaccaggcttaactctcgttttgctagggttttcttccccttcacctaatcctttcaaaatttattgctttaaccctcctttcctctgttgacttttctaaccgtgtttccatcattactaaggcaaaatttcaaaccacaaatagcataatccccatttattgccctattacccatttaatgctgacagcgcatgttttatcatatttattatgggttcatacaatgtatggtgatccttcgctcaaacgcttccagcccctcccttaaccgccattttctacccccacagttctcttagcaccatcattgcgaatctaatgatgaccttccatgcctgtgcgaaatccgaacaggctgacctcaagaccttccgcctctcaaggtggctctccatctcttggtatttttctctccttcacatttactactatttaaagtcatggtatctcaaatcatccaccatacctgtaacgccctaatgctaaggcacgctacagtgctttttcaattacagtgcaatcttcgctaatcgaagatgttttcttgaaaaacgtgtcaaattaaaacttttatttcaattaataaactttataatat

SEQ ID NO: 322735 - DNA, 850 bp, Cannabis indica
aaaattccaaaacctaaccaaatcgattcgaatccttaccaaaccttccagacttgcatattatacctcaatagacatattccaagcaataaaacaactaccaaagcaaagaatcaaaaatcacccttaaagagccaagcttgagttctaaaactcaaagcttgctcaatcaacaccacaaccatcaaatccaactcaaaacaacctatctaatcataatttaactttagaaacacaattcaaacaccaacagcagctacagtagctaatctcacaaatcatgcataatttcttaacttaatacccaagaaatcaaagagaaaagcattagaaacttacctagagcttgagatcaccaagatcttgctagaaaatacaaaatttgaagaagaaaaaatagaaccctagttggttctatggtgttcaaaaagagagagagaattttgagagaaaatgtgacttctcttgaattttctaattttatataataatggataaaaaaaaatgagttttattttaatgaaaatatcagcttaaaacttaaataaaaatcagaaatacaaatatcaaatcccactaaagacaaaataaaaataaggcaaaaagtccaaaatgcccttgcccacactaaaagtcaaaaacaacaactaaggggaatttagtcaattctaaaatctcgactattcccggcattctcaatgtctaactatattatcccactatactaaaaaatactaagatgtgattttaatagccaaacaccgcgttccaatgttgtcggacacaaaaacatgcaaaataatgaagttccatatataacatataatatgcattctgaattcaaataaat

SEQ ID NO: 322736 - DNA, 1251 bp, Cannabis indica
tattatttggctagaaaagccttcgagtattacacaagtgttattgtctagtttacaaaccctaactttagccttagcttgtaagaatttaatttctgaccttttgcattaaggggtttcattatatttataggctagggtttctatgtaaatatggtccactaatggggtgaatacaattaatatattgacattgggttcattcagtgaggcccaaaccgtgaggcaatgattatctgtacacatggtaaccactttatagtgataggtggagaacgtataccaccttcgcatgtaataaagaaaatttaacagtcgttgcacaattactatatttctttttatggttcgcatggtttccagatttgactttgaggacaaagtcctaatatggtgagattcaatattaaatgagcatcatattagccttaacattcggagatctatttaattaccgtttaggaagcattgccaaaaggtatccgaatgctctctctactaggcccttctctcacatagatgagatgttctttcagaactcggatggcccaacttactaagtttaatctattatcctgactggacccacaactggacctttgttgattgaatttaggtcttggaagtacatgtgtccctctttcgaaaacatgaataacgggctatagcccccataagaagtggccgagccacctgaataatttagtgggtaaaaaaatgaagtattaatgaaaaaaatataatttttaacaaaaaaaattgtgatgataaaaataaaaaatataaattttttggagatagacataaaaatatgtaaatatatagataaactatttttatttttatggagtcaaaatgtttacccaaaaatttatattacagaaggttgggaggggaaggggggcataaggcaatgagtggtacgttcgtgtttagaaaaggggtcgcttgtacccgtgaaagtattgtagagactgtaattgaaccacattaaaggaaaacagtctggatatctggactagcaatggcagattcatttgatttaatttgacacaaattggtctagatagattggagtttcgaaccacgatttccgaatttcatttaacacccctagtctaatgcctaataacccataagaagaaagaagcagcctaagtttcccttaaatatgttccaaagtgaaaagaaagatagtatttttttttcaaaaagaaaaaaagtaaaaataaataaaataaaaatactttg

SEQ ID NO: 322737 - DNA, 1433 bp, Cannabis indica
tgctaacaaaacttgggtttaggaggttttaccaccaaaattttagaattgggggttagttgcaaaaacctggtcacttaaggaggttacgccgcgaattaggattttttgttaattaggatttttgtcacttaaattttaacatgtataaatttatggcctttgaacttgttttcccgttaaaagttccccgaaactattgagattgttagatctaaagatttttttccaattttagtaagaaaaatcaaacataacattagttcagagggcttgatttggtgcatatcaaaattcgaggggcatgattcggtagatatcaaaatctaaggagcatgattttgtacatgaacaatcacaaaattagtaaaattgaatgaaattagataaatgtccttaaatccaacaatctcaatagttcaggagaattttataacggaaaaaaaagttcaggagcataatttgatacatgtcaaagttcaagaaaaaaaaaatcctaattagcctttaattgtagtggtctctaaactttttattttattttcaaaactaatatattatttagaattaattttgaatgattaatttattaaaataacaattttttttaaatcaaataacaattcatttgaaattattaattaattcgaaatcaattattcaatctcaataatcacataattgtgtatttgacttgaagattgattcatgtatcaactcttcccttgagtagtgttgatagagccgctcagtaaacttataatttcaatctccaataaattttgatcatggattaaaactctttaatctaatagtcataatttattaatctcattataagattacattcttaataattatagacatatatttactaagtactttattataatcattgagagtccattaatatatgttcaccaaaacttttgacaactacttaatcttgctaattaagtttgattatattatgagaaaataaatttttatatagttggggcgttaatcaagtttagtccacgagtaaattgtattgatgcttttaagatagtttttgtacaatggacttttttgcaaaactcaatgcagaatcctttctaacctccctcattatctccttttttcttcttcctcttcctttaaaacctttcgatatttataggcaaaaatgggaaagtgtcttagtggtctggtacatcctttcttgctagctaggatctatgttatcatccctacacttaggaaatgatgtgtggtaataggtgtatcgggtaggatctaaagtagacgtttggtgagacaagactagacttgttcacgactaatgggacagtgttgaaacaagtcatcaatagatattcaagtaaatacaaatgtatgataagcaaatatattgagcaaataatcaagcttgtaaagtaaagagtttaagg

SEQ ID NO: 322738 - DNA, 765 bp, Cannabis indica
caagttcatttgaatgtgtgttttagtttttgattatagggatgagaaaaaggtatagtactcattttcaagttcaccttgtcattttgcttgtgtaaaaaatcaataatcatatgaaatatgaagtactcatttcttctactttcttaataaacaccctttaaggattacaaatgtaactcaatgtgattttgtttaaaatcaaagcttgtttaaaataggcttcatgtaagccacatacttgtcatgaagctattatttatgctactacatctattcctactaaagcctgaagctttaattcatttcatatatgttatttatttttttgataagtttcatgtgttatgtttgctacttgataatgttcaaatattgtttttgaaagagttcttttttctgaaatgaataaatcaatgttcttctgttaattatttaaggctataaaatttaatatttttgacaagtgaagcagtgccttccggcttcaacaagatatgtcatcaacaatcttaacaggatatggtttctgattagatgtaataagtttcatagccttctgttgctcctaaaatcgcccaatatacgtggaccagtcaagaggggacacgtggatcagattacttggaaagaactgctaagtctttttatgacaccaggaagcgctattcgcatgggtcccggaggatatacccggagtacaaggtactcccggaagcgagcatagcatgaaggcactccgggatgtgtcaggtctctcccgag

SEQ ID NO: 322739 - DNA, 866 bp, Cannabis indica
atattaatattttttgaagaaaaaaaaatctatttgagtcatctctctaaattgaataaagatgcatacatatatgatgacataaatgaaaactttaaacactactgtataatcataaactaaataaaattagtaagatttactgcataatgtaagtactttgagaactgcagggtacgactgtaaaaagaaataaaaagatgagataataatcatggtggatatatcttacattcaatgatcaaaccaaaaatacttacatgacaactttactatagacttcttttacaagtacattttcaaactaaaaatatatatatatataacaatttttttattataaaataatactaaaaaaaaattaaataatgatcatgataataccttaacttcaatgtttaaacaaaaactatcttgcatgacaactttgatatgatctttagccattaagcaaatctatcattcactctttagttaccaactcataagtcaccacaactatttgttgaaactttatatactatctaaaaattgaaataatatgttatttaactcctaatacaaataaaaattaaatattattagtaataggaatacagaaagaatgttataataataataataataataataataatggaatcaaacttatgagaatgaaaagacattcataaacaagaagttatgtgaatgaataatataggtacacaataatgatggaataataattatgagaatgaataggcactcataaaaatatagtatagtaattatttgtaattattagtaattatttatttaaggataaaaatataaataaaaataaataaatcttaaaaaaatcataaaatagaaaaataacaata

SEQ ID NO: 322740 - DNA, 913 bp, Cannabis indica
ctccccttaattttctacttcccaaaaattcacaatcactcaaataacccaacaataacacaatacaattccattaagcccaatatcacaacaaatccacaaaatatgcactataccacccaaaatttataataagtaaatcaaattccttaatatggtaggaagtgatacttacaaacccaaagaagcttttactccacctccattgttgaatgtccttgaaagcttgaggttgaagatgaagaattatggtattttcggatttgggattgtattggtgatttttgggatgatttttgttggaaagtgtaaattgatgagtgaaattaggtttttagatggattgggattgagaaattggattgaagatgaaagaattgaagatttggggaataaaatttgaaatttttgaatgaaaaggggttcgggtcggctgagagaagaagaaagaatttgaaattggtgtagggttgaaggggggggggggaaattggggtatttatagaaaaatcgtaagctggtcgcgacttgcccaaaggctggtcgcgactagcttaaattcaaaatttagaggtttctggaaaagtggttggtcgcgactagggtcatgacttggaaaaagggtcgcgactattaaaggcccaagtcgcgaccactgtaaccaaaaaaaaaatggtggtttctgtaaaaccccaagtcgcgaccagggtcgcgactaccaaaaagggtcgcgaccgaggaacctggtggtcgcgactactgggttcctagatccaaaaataaaaactttttttttttcacgtttttcacgattcaactggaaaaaaatttaatgtctggtacttaactaaaaaatttaaaatataagaaatactaaaacataaactaggaacataaccaaaaagtctgaaaa

SEQ ID NO: 322741 - DNA, 654 bp, Cannabis indica
aaaagtgcggattggatcggatgaacacccctaatgagagcagtatcagtctttattttgttaattaattaatcgcagacttttgtgttctgtaagactagtaattagtaatcattattaattggacttttcgttaactaatctgtctaattataatatacagactattataataagtaacattagacttttgcatgtataccctaattaccatgcattaaactagtactccttactttattataatatatattattagtatttgaagcactaatatggaaacaattaagaagttgtaatgtagccatgtttggaaaatagggttagattagattaattagaacaaataattataagctagagaagaaatatattgaagaatactaaaggacaggtcggactacttgttcagtggcagaaccagccaaggggccaagcaattttattatttttattattataattatctatttttacagtatacaactatatcatttagtatcaataataagattaataatattatgagtacatatatcacacacaaaatcaatacacaagtcactttaagaaatagtcactatacaaaaaaatttatttttagttacaacaaaatttgtggctaaaaataaataaattgtaactaattataaa

SEQ ID NO: 322742 - DNA, 869 bp, Cannabis indica
atccgctgctattaataattaattagcggcggggtgtcagtccgctggtattaatgatgaatagcgaccctttattaccagcggagtattaccggcggaccccgccggtaataacttttaccagcggaatctcatatctttaccagcggactgttccgcccctaataatagtatttgttgtagtgaatggcagctcgtgatcaccacggcttcttggttgaaggccgaatggacttcttctcgggggctgctacaccagaagttgccgaagcaatcggagtccgcgaggctctgagttgattaaaaggaaaaattggcaacatgcgtcgattgagacagattgtttagtggttgttcaagcaatacgaagttcaacaaaaatgctttctttgtttggacaaatcattcttgaatgtaaacaactcctgttggagttaaaacatgtttctatttattttgttaaacgatcagctaatgtggtagctcataactttgcaagaacttctgtattatttcctggtcgtaccttcggtatggagtctgttcctaccgagttgttacattgtttggtaacagattttgttggttaataaaatttattttccattcaaaaaaaatatatataaagttgtataaattattagtatattgtaaatgttgcttataatatattaagatcgagtaagcacatgcatttagcatttcttatttagttacactataaatgaagatgcaagttcatttgaaccttatatgttacatttagggattgtttgatatattatattaaattgtattgttgtatattatatttttatataataatatattaaatttaatttatattaaaatattatatatttaaatgt

SEQ ID NO: 322743 - DNA, 1291 bp, Cannabis indica
ttccaaaaaaattaagagaattatatttcttaattcatttttggtgtactactaccttttctgttaatcatgcttattgaaccagtttcccttcccattcagtaagtatgagttactatactatctcactcttaacatatttttatatacaattattcccaacaattttcaacctttgattggagatgttatttgactaaagtgttcaaagattattaacagaaagggaatattaaatgacattgtgcatttatatactattgtttttttaagggcacttatactattatattgaagcagatttaggataaatgttttttttttctaaaaactatatataacatcgaattagttttatttcttcaaccagagtggccttaaagtgctttcatcaagttaaaaaatacatgttgaatcaattgaagagaaaggttaaaaaatacatgacttataaagaagaaaaaaattacctaaaatgcggtcactaactcttctttcaaaaagttcaagttttttagttttataattcaatgaaattccggtcaatttatcaaacacaaaaatttgttaaaaaaataaacaagaagtgatatcatttacgaagccctaccatggggttaatttttattgtgtaaaagtgaacacaagcagtaacatctccagtgcagagagcgcgagagggagatgatcagaaagtaattttaacaattcaaactctacaaaaaggactgagaccaaagtcaccaaaccaagaagccattcagttcaacattcaaagaaaatggaagatgacaacagaaactaagtttggtgactggcaacaatctttctgaacaaaaaataatcattaaatctaaaacaacctattcatgtataatctatacatggccctatgactcatctatacacttccaaaaaggccccagttgttgactttaaacgttgagacagcaagtttgaagacctcaaccattggcgtacatccagaaagctcggcaggagtggcagcaccagccccgacggcggtagcactttcactcaatggactgaaacaacaataaggaaagcgtgagggtgtcggaaatattactggttcaaatgatctcacacaacacaaaacagtgttgttacgatctaccatctatttctgttcaaacatttgggaactgaaccacaatcggagaatctaacacagaggaggaagattatgctctgcccctttacattactaaagcactggtggcaggaaaacttatgttgagaggaattacatttgtatccttgaaattca

SEQ ID NO: 322744 - DNA, 896 bp, Cannabis indica
aattcatgtgccagaaaatttgcataaaattcctttaccacttgacaaattgctgaggccggatcttcacacaatgtaaccaattccttttttttatgttctttattagccatggcggcatgctaccgaagtcttcatctcctactatcattcctcgctcgacataaaattccttgtggcgaaccgaatcaagatattttttttcatcagcgtccgaaataaattttttagcttctcgagcatctttttgcggaggcttatgagcacacctcttgatttttgacattttgatctttgttttagtaaaattcagccacgcattttctctcaatagccccaattaacaccagtatactaacagattagcaaaacaaatcaaatactactctataaaaatattcagatagcacagacaacaatgttcaccaaataatacattccaaccaaatagattttcgatttaaattcacaaacccggaattacttctgcttggctgaaatgtgcgggctccgattcgttggcttggctttgactgcgtacaggtattgttgtgcagctgctcgatttcttgctgctgagaatggtgtgtggtgaacggaactcggtggtgcgtgcctcggttggctgtgcaaactggagctcgtgaagatggtgttgactgctgcttgggtgctgtcgacggagatgggaatggctgaaggcagtgttggtttgtagttgagttaggacagtggctcgtggagatctcgaagtcaggcggaggttcgggttggtgcttaggccaagttgatcggtcgcgttttctgtagaggggacggtggtaacaatggtggtggctggtgtctcgttcggagatggtggcgatggtgattttgagagtgatggacggagatga

SEQ ID NO: 322745 - DNA, 1210 bp, Cannabis indica
ccacaagtggaacactcttttcctcactacttcccttcaccaccttccttttttttggctcggatcatagggctattaaagttgtctttgatggcaatcctatgatcttcaggcatgactccaatttttgtattgaaaaccactggtttcttgaacttgattttttcgaccttgttaagactggttggacccttaaggtcactccagataccataaattcccctcttcagtcttttctttcaaaataaaataattgcattgcttctatggtttcttgaggaagggataaaaataaattcaaaggggaaagaattcaatctgaaattgataacatttttgctgggccctttatttctccctctgatgttcaaaaagcaaacacacttcaacattctcttgataatctcttgcttaaagaagaagttttttttttggaaacaatggtccaagactaattggcttaaagcgggtgataaaaatacaaaatatttccatagccgggcttctactagaaaacacaataacttcatcaagtcccttactttaaacgacaattccagtgtctccaggcttcaggatattaccaactcttttgttcatttttactctaatcttttcacttcccaaggtacggattatgattccatagccctgatcctttaggggattaacaaaaccatcacccctgatcaacatgctttcctggacagtcaatttgatcttgctgaagtcaaaagggctctcttccagcttgttggggacaaagctcctagacctgatggtttgaattatggtttctatcagaaacattgggataccattggcattgatctctgtaatgctgcctttcatgttctcaacaccaatgctgacattgctcctgttaatgagacgatccttgtccttattcccaaggtcaataatgcttaccgtatcaaggatttccgggctatcagtctttgctccactatttataaggtcgtgtttaaggctattgctaaccatctcaaatctatcctccctgatcttataacgcataatcaaggtgcttcccttagcgatcatattatttttaataacattattatcgctaatgaagtcatcaatgctatcactaatcgtaaaactgagaaagtgggctgggctgctcttaaacttgatatggaaaaggcttttgacaaagtggaatgggatttctgttgggttttat

SEQ ID NO: 322746 - DNA, 1058 bp, Cannabis indica
aaaaataaaatattttaaattatagaaataaaattacaaatataaaaaaaataaaaatacacataaataaatttatatatacactattgctaacataatttaaacaataaaataaaaaatatcaaaaaatatattcatataaatacacatatacataaattacaaatcaatatatatatatataaatattaaattaatatataagaaaagaatgagaataataacattacattactgagatcgtagttctacaaattttcaggcggtggagaagaggcggtagcgtgcgctagtctggtgatacaaagggttttgtgggtttggatatgaagaggagatttggaatgagaagaggaatggaagaataaagatgaaatgaagaatatgaaaagggaaaaaaataaagagaatttcatatttggagagaaaaatgtagaagggagaagataacatggaaatgggagaagatgaaatgaaatgaaatgaagaaggagaagggagaagatgaaatgaaaatagaaatggggagaagaaggaggggttcggggtttcttttttctgcatgtttttcaccaacgacaatcaccaacgacaaagtcgttggtgattattttagagggaaaaagcctgcctaaatgtaatggcaaaatttcaatttgcctatgataatatactaacgacattgtcgttagtgatataatattatcaccgacgacaatgtcatcagtaatttgttttattttttttataaaaaataattatcaccaacgactttgtatatgtcgttaagtgaggacattttgttgttggtaattgtggcgtcagtgatgcctttatttcttgtatataatgatagtgatggcgatgatcagggatcaaggacggagctacatgaaagccggggctttagcacccccaaatatttattatacagtagaacccctatctaagaatacacttgggaccaagtaaattatattctaattgagaggttataactaaatagagttacactaaaaaaaaattagaaaccaaaaatatcaacgtaacaataataa

SEQ ID NO: 322747 - DNA, 525 bp, Cannabis indica
catgtgagaaaaaggaaaaattaaggaggaattaataagaagagcaaggcacacacgcacgttgcttttttgcttttggctttttctttattaataaaatagctcacaaaggtttaattttaccctgtttgtgtacacactagtacacatggattctcttctcctaattaatcaacacttagtttaactggccaattaatctaccatatatatatacggtaaaacaaagaaaaagaaatggaaattagttaatatatgtagatattaatattgcttaattggctaatctcgatattatagatctttctctctccaaaaagcttcgcaataaccacgagtgcaatcattgtccaaataagcatccactatatatatatatctttatatattaaaagtgcctatctaacggcaattcttggtttaacgattctttgtttaacgattcttttttttatttagccttacacgattaacttaacactgttaacgttaaacgttaacaaatatataaacccaataattaaa

SEQ ID NO: 322748 - DNA, 799 bp, Cannabis indica
acattggatctcccctaagccctctcttagtttcaaaaaaataggttagtaaaattaaactatttttactacaaattcgaacttatgtattaaataatacgatttgtattgtattaaaatttgtgatcatagtaattaatacaatacaaagtcttatccaaatatattgtgttccttcttatttaatacaatgcgatatttatgtgacctaccaaccaagcccttatgatattgtgtcttgcaaataattaatgatttttataataataattaggctaattaggatttttgtcccctaatttttgacaagtaccaaatcatgtcctctgaacttttctggccgctaattagatttaaggacttttgtccaatttcattcaattttacttatttggtgattgtccaagtactaaaatatatttcccagactttgatatctaacaaattatactacttgaactttgacatgtcccaaattatattccctgaatgacctttttttactaaaattggaaaaaagtacccttaaattcaacaatctcaatagttcaaggaaaattttaaagtcttaaaagtttaggggatataatttgatacatgccaaaatttgggagagaaaaattctaattaactagcctaataattaaattaaaatatataagtatcaatactcactacaaaaacagctacttttagtgacaattttttagtcacaacataatttttttgtgactaaatatgacttttagtcacaacaaaatgttacttgtgactaaaacatagtatttagttacaaatt

SEQ ID NO: 322749 - DNA, 909 bp, Cannabis indica
ccccatcaactcctccaccttcatcttcctgaaatctttactctccaagccaataacttaacctcaaatttgttaggaaggactctcacaatttttcgaactatcaccgattcatcaagttttttgcttaagagaagattcgttagcaatataagataatctttcataaaatttagacatatattcattatatacattctaagatcatcaaacttggtttgaagcattataaatctagatcgcttaacatcaattattcctttgaatttggtttgaagaatttttcatgcatctttggcagattcataagaagatataagtttgataaaaacttcatctattccattaaatatagcatgtaaaatttttattgtaagcatgtaacttatcatcttcactaaaccattcaagtttagcttttaacattttattacctttagaatctaccacaaccgaatgagacgagcctgaaagaattgatctctatgcttttcatcttgggattgatgatgccctcattctaaccttccaatataaatagttagaatcattgagaagtagaggacgaacaatagaacttccgtctacaaagggaaatatgttgcaaaaacacaaaaaacattaaataactacactaacaatttagtgtcctgctctaataccaactaaaaacccgtgttttagcatatgccaatatatttattaaatttcagttattaaaaaacacaactttaatagtgtgcagtaacagattgaaaaccggtcatagcagaacaccaatttgtataatcaaaatagaaacaactatacagaatgtaaaaacttgacataagagaattatacgtggtatcggtgttctttcgaacactcctagtccacagagccacgcccagagaatgaaatcaatta

SEQ ID NO: 322750 - DNA, 1078 bp, Cannabis indica
atcagtctagggagcaccgatcttattctattagctaattttagagatgaccttataaaccacattgcagagggaaataggtctaaattgggatactttcttagggttggccaccttaggaatgagaatcacaatggtgacctgtccctttttcttataaaaagtaaataaagaataaaactcttatttaaaaaaaaaaatcaaagaatataagtaatttagttacccaaaaattgtaatatgagataactagttatttaacacacctattaagaaattaattgaaaaaatgagttgaatggtaaaaaaaagtattaagtaaaatattaaaacaaatgagttgatattttacatatatatgaaaattttggaaaaaaaatattagtagtactaataaaaaaacataagacaaaaattctggaaaaataaaaccaaattatatatatagttattaactacataaaaaaattaaaatttaaaaatctaatccccaattaaatcaaaataaaaatgagagttttatttacaccccataaacttataaatacatcacattattaaaaacatataaacttaaataattttcaaaaattcctcttaatattttcttaagttttttttttccttacactactattttatgttaatttctaatacttattttaattttattttcataatttttttctaactcgtgtatatatttttttaataagaaaatttcatataattttttattttaatttatttgtcataatatataaaatgtaattttgtttttcattgatatgtatattttttaagaatacaaattgaaagaaaaaagttagaaaaaatataatacaattaaagatataaatttatataaaataaaaattattaaaatagtgtatctttaaaaaattttaaggtgtaaataaaatttctcaaataaaaattaatgaaattacaaagttaccctcaaaataaaagaaaacacaattattaataaaaatgtgacataattacattgttgtagcaaacttatgggaaaataatcctacaatattaacattggtcttattgttcaagatgttcg

SEQ ID NO: 322751 - DNA, 1014 bp, Cannabis indica
attggatttaaactcttatgcggatcggattggatctaaaatatgaaatccgcacttagtgcggattggatattgtttgaccaaaaaagtgcgggttggatcggatgaacacccctactatcccatgtgggactcctactcacacacttcacttttctatttttacataagttcatacaaagttccaacagaagaagatctcgatgttaaaccatgaactgagtgcacaagagataagcagtcagtttccacaacatgtaaaggcatattcatttgtctagcctattgtaagccataaaataatgcctttacttccatctcttggggccgaaggttaccagcagttttcttgcagctagcagctaacacataaccattggaatcacgaataatgtctcctaatccaatctggtttgtagcagagtgtatagcaacattcacgttcaatttaagttgaacttaaggaggtgctttccatggaacttgttctgcaactgctggtgtcaaactttaaggatattgtggacattgttccacatgaaataaagaattgagcatgggctactctacttattgtcaattggttttaagatgtaacttcgtaattctcaatatggtatcagagtcatatctcttgcggacaagtgatcctatccgatctgcacctatacagatagtgatcatattcattctgatacagttcaagattaatgagcaaaaaataactatcattttgagggtgaatattgtggacattgtctcacatggaataaataataaataattgaacatgggctactctactcattaccaattagttttgagatgaaaccccatgattctaaacacagcaacactcttttgagaaacatgaaaattaaagagatatgccatctaatttgagaaaattgctgtcagaccaaataaatcgaccacattgtgcaaatatagtgtagagttagtaaagggcagttttattttttagatttaataacttggcatttggatagcatt

SEQ ID NO: 322752 - DNA, 1628 bp, Cannabis indica
tttttttttttttgaagaaagtagattttatattttagatctgttactttttaatattgaattatttaatataaattaaaaaatattttttttacatcactaacaacaaaataataaaaaaattattattttatgtatcaaacaacaaattaaaaaaataaacaaaaaaaaaatttagaggaaaacaaaaaaaattaacaaatttaaagtaagaccaaaagaattatatgtataaaaaaaaattataatattgttttagattatattttctttataaataataatgaaatatacatttcatatactatatttttgaaatatatttgtataatatgtattatatttttatattaaaatattaattgtatatataattttttttaaaaaaaatatatataaatatatgtggatagatcggttatttttatgttaattaatattcaatcagcataagtgcggattttagattttctaatccaatctaatccgcacaagtacaaatatccgtactttgtgaattgaatttaattatattggattaagtattttatggacatctaatagtatcaataatatatatatatatatatatatttgaatcaaaaatgattttattcataaacttttagcataaacaatagtctttaaatcaaaaggagcatcatgctcactgaaagtacaatctgacttcaaacaagaccctcgagcagcaacacagtgagcggccttattagcagatcgtttaacaaaaattacaaaaatattatttaatgacaatactaattcttgacaatcacgaacaagcaatccaaactgggaaagcatagcaattgaacttttaaatcatggtgtataagaaggtttaaactcgtatgatgaggtaagaacaatttaatcacaaattaaatgtgacattagaaaataaaattaaacaaatggaaaggaggcatggctaaaaagtcaaaaagtcaattccaatattcttcatataatttcaaaaggtgagcatgtaccatttaattgtcaaattaggtgaccaattcgtgtcattatcacaaggattagagatcaccttttccaactacttattatgatttattatctttagatgtagaattaataatataacataaatatacatatataatattttagtgactctcccttcttaatatgagagttaagaccaaaactagaatttgtgtacatattatgtacgtgccatttacttatggtcattcagcacaatatgtatgaattatttccctttcaatataatataattttttctctaataaaataataaaaagtttcaataactgaaagaggcaaagcctactagaaaataaataaaataaaggtctgaacataaagggcccgtttggtacgcaggattggactggattggactgaaaaggattggactggactggacaagattggattatgctgaaagtaatcttgtgtttggtttaagaatggactggactattttatttatttccttttagaaaaaaaaacttaaattaaataaaaatatataataataaattaaaattaaaatatataataataaataaatataaataaataattcgtagcaaaaaaaataatatatcatatataat

SEQ ID NO: 322753 - DNA, 1569 bp, Cannabis indica
agagttaattaccaacttactacatattttttactttttttaatatatatttatatatgtgtgtgtgtcattgataaaaacttgtatatatctctattagtaattttacaaattgtgattagcagtcaaaattcaattagcataaaaaaattatgcttgcaacttatgcatgcattttctcacgtagctgattttgaaaattagctagtcagcattatatgtttttttaacttattgtatgactgtcttccatctcatttcaaatattaagtagtaaacaagatttcattggtttccattgtttggttgactgaattaaattaggataaatgaagggtttggtttcaaagggtatctatttgccatagtgcaatatttttactgatttatatatttctttctatagcaagataatccatactagtctcttctttttacaagctgcaaaatgttgaagtacagaagttcaagtacagaaatgctcttgttttttttattaaaatcattatctctatgtaatgtatatatatcatttcagtatatattaatgtttcaaatgatagaaattgctatttcatgtatgttccaaaatattttcatgtaattataaacaaaatttaaataataaaaatatcaaatttgcaagtatttaatattttttgctctgatgtaatacttattattgtataagtagtatacgtaattaaaatactaaaactaattatataatattttaatatatttaaaattaattatttataaaatgatactttaaataataaaatatataatgacattgcaacaaatgtgagtaatataatttaataacaattttaaaatgtcattaaaattatttaaatatataaaaaaaactattaagtgacatttgaaatattattaatgattatattagtggcattttcaaatgtcactaatgtggcccatttagtaacatttcacatgggcatatcttacactttctacaaatgctataaaaactataagtgttactaaaactatataattgtgacatttataagtgttactaaatggcaattttggtatcaccgatcactactaaataactaatttttctagatgattttaaaagtcaggtaaagtattcctgtcgatttctataaccgtcacctattcaacagtcgcaaaactggtggaatggaagacaattcaaaactgtcacccaaaacgcattcccaatggtgtaaaactgtcgcgtatagtgtacaatataagacacgatttaaaaccatcgcctatactataaggtacgacttaaaatcgtcccctatagtataggcggcgattttaaactgtgctttatagtattataagtgtgacagttttgaaccgtcacctatagtataataacctattttttctttaaattctaagatctcaacttcaaatatcgtctagtatagctccaaagaaagacttaacaatatatacctgcacattcttaaaaaaaaaaacccagttaatgaataagcatgttagacttggaaagaataacttaccatattccaaacacatcaacacaaaaaaaaa

SEQ ID NO: 322754 - DNA, 1002 bp, Cannabis indica
tctttgtcaaaatgtccttcaaaaactttatataggttggcatttgctccaaagcttccactaatgatatgttgatgtggagttgatttagtacatcaagaaatctttggaattgaccatcttcttagtgctttttgaatctttcaggaaatggtagaggtggcttgtgcaaaggcttttctgcagcaaaatgctgatctgatgctgtaactactggaggaattttaacagttacaattattggttttttttcgtttcctccactttttagattgaagtgggctctttgctgccctttgtctctgctttatttgactccaaatttttactatttctcaaggttaccactttgtaattctcctcgatatctcttcttgggtttttggtatcactaggcaaagtaccttgtgacttatttcgaagctcattagctagttgcccaacttgattctccagagttctcatggaagttgcttgactttggattgcaatgtcattttttgccatataattcttagttcttgtcatgaaaatttctgtcttggccataaaatctcgcatcatactatcaagagagttggtttggctgccttgttagggtatttgttgaaaggcttgttgagaaaaaccaggtggaaagttaggtctaaaaggcataggcgaattgctaggaccaaccccttaacttttgtatgccaagtttggttgtttcatgtaggtttggttgtatccattctgacttccaatgtaacacacagatgcatgattgaatggacaattttcaaaggtatggctctcactacaataaacacacgaaacctcctcgagctgacccatatatgaggaaaatgatagggtttatgccttgaaaagcttgtaaagacatttttgattattaaataaagagttaaacatttgatatatgtttaaatgttaaattgttaatatttattattgaataatttacattaaatatcagaaaattcattattcatatatgag

SEQ ID NO: 322755 - DNA, 886 bp, Cannabis indica
ttatttacatcatcaaattaattaatcttgtattataaatctatataaaagtagtagatcgatagatgtgataatattatttaatctctttttccctttataggtgttatttctaatctttaattatgatagttctttcatcaataaataaataatgatccttcttttccaaattcagaaagttgatcattgttgttcaatcttgaatatatttacatacatatatagcaagacagttttattttttttaatacctctactaaagtattattttatattttattatgttataataaaccttttttttttaggatcatagacttacccaataaaaaaatatgtaactagatcccttactatttatttatagaaattttaattttttttttactataattatgtagttatagttattttaattataataataaatttttaaaaaaatttagtaatagtttactagttctgaaaataaaattctaaatattttacgtagcatggtaaataactatttgatctttattttcgacatcgtaaattattttaatttttttaaaaaatttataaataattttaaataactataacgtacacaattaaaaataaaagaaaaacaaaactaaaaatttctccaaaatacttttaacaaccatatctcatacgcatgctcatgccaagcattagcaaagcatgatgactttattttttagaataataaacattgtatatatttctatattatttaattatacatgataggtaacaacaccaacttcaccatcacatgatattaatgatgttttttctatatgagtggtaataaaaacagtgttaaaaggcactagtagactctaaataatatattattattattggtataattaaa

SEQ ID NO: 322756 - DNA, 1388 bp, Cannabis indica
taacagaaacagaattaaaatcatagtacttgaattcaatttgattttttagtatttaatagaatacaaataaacataaagtataaccaagcatattagattataacaaaacaacaaaacatttatgacatccacagtaattaataatacaatacacatgattcgatcaatgactgaggtgattatcaccactcaacacctgcttccctgtaaaaaaaataaacaaagcaccatagcaaacacaaattaagcacacactaatcgtttatagtttatatattaccattactgcttaccaaattgtaaatatcttcaaaaataatttatattcgatgcaacactgtctaccaatcgtttataatttatatttgaatttgattgtaggaattaaaaaagatataaaataataaataatgtttaatgaatgaggtaagtgagcaccaataccaacaatattagaatgtaatgtgccccttgatctatcgcaatgcttgcattcatattcacaattagttattctcatgaagcatcatcatctatacatatattttcttctaattaaaagttaaaagttacaggttcatgcctttttcaaatttattatatcctcatctttacaggcaaaaagaaacaactaaatcctcgaacaattcatacgcatcgatcatatattctttgaacaagcttcgttacactgctattgctggcgaatagagctattggaggagactctgattggaaacggttgaatcgccatcaaggtgtgagagatctaggaaggagagaggaggcgttgagatatgattagagtttcgatcttatatcgttttattttcaaacagagtttcgcagagtttcgatagaatagaaaaactttaaaaaaaaaaaaaatcacccaataatttctcataaattaagaactgtgttatatggcacattttatatagaataaacatattccaaacctagaaatgaaagaggttactacgttagtaattgaaattcctacaaaagaagatatatacattccccaaaaatatttaacaaataaataattaattaaaattaacaaatctgcatctcccaattcgaatcaacaatcgactccaaccctcatgctttacacaattccaattccatttctcagtacacacttccaaccctccatcaatagactccaacactcacttgtaaaccttacacactttttaacatactaaaaatcatatccttatctaaaataaagcctcataacattacacacattttcttaatcttctagtagaaattagaatctctttgtattttttttttcttcaacacattttttcttttcctctttctttctctgtaatattctacttccttcatactctctctctctctct

SEQ ID NO: 322757 - DNA, 616 bp, Cannabis indica
aaattaaaaaaaaaatatgtggcacgttaaaatagtgatagttttctctctcgggaggatggtcttatactgttcttccatctttctttgacgtgtcttccctttgactaatcccatattttcgtttcttattccttttgtgtgtgtctcctactctttgattttcctttgttatgtcctattcactgtcactcatgttctcccctagtctttacctttcttttttgcttttgtttcttggtccgctctttttagttttatatctggttttgtgtcttgtgttggtgagtgttttggtggttttgtctttgttggcttttgcgtttgattatgtttgtcgtctttgtgtgtgttggtggggttggatgggtgagcttttgtcttgttgctgtctgttgttatggagtctgttgttgccaccaactccccttttaaaggcaagtgttattcttgcattgatgccttagtatctttatctccatatgttgcttctctcaaggcactttctgccctttgcttatatgggaaagtggtggctcccatgcttgtggatgttgccacagtcatggattttgtggctaaaaattggaacaaagctctgttggaaattatttta

SEQ ID NO: 322758 - DNA, 694 bp, Cannabis indica
ttcgatccaaaaaaaaattaggcaaggaaaagcggcttagatccgataagtgattcgaatatttcatatcagaactaatctgtcggatcggagctccgacccaatctgaataaatggatcttttttccatgcctagtgtcattttgtgcacgaatgaggtgcaaaatggccctaaatttaagaattaaattagtaaatgtatctttttcaaaaatatagcaaaataaccaaatataataaattagctaatataaaaataaatttaaacataataatttttaaaaattatataaaaactaaattaagttttataaatttcttagtattgcatattaatatattgaaacaaaaaaacaaataaatatattagatcatgaaatatatacaacagtatttgatatagcgtatcacttaaaattaatatatcgtactaataaaattatataccacaaaaaaaattataacaatactagactttgtatattaatactcaaaaaatatatatatatatatcatgctaataaaattatatataccagtattaaaatatgtataccataccaaaaatttatacataataaaatagaaactaaacatcatcttaaatgaatgatagaaaaatgtatatcatacaacaaaacatatatacctacaataaataataaaataatataatataatattattttaaaaa

SEQ ID NO: 322759 - DNA, 939 bp, Cannabis indica
cagtttaattccctgaatggaaccattatccagagcttcgtggaatagtctagacaaagcttcagcagcccagataaatagataaggtgaaagggggtcaccctgccggagcccacaaacaggcttgagactgcccaccgggcccccattgagacaaatatttagtgaggtagtagaaatacactgcgagatccataagcggaacttttggggaactccatagcagtccaacatgtggtcaataaatctccagctcaacctatcgtaggctttaaccagatcaatttttatagcaaagagaccctccttgcctttcttccggttgaatgaatgtataatctcctggacaattacattattatcatggatgttccttcccgggacaaaggctgcttgagtcgggcaaatgatagagggaagcagaggtttaattctgttcgctaaaatcttggagataactttatagaccacattgcacagggagataggtctaaattgggaggttcggaccggattttggaccttcggaatgagaacaacatttgtagcattaattccactatgcatcttaccagtgataaagaaatctgaaaccgcgtcacaaaagtcagctcctactgactcccaataatgtttgtagaacagaacagacatcccatcaggacccggagccttatggttactcatggcaaagagaactcttttgacttcatcaggcgtagggcaactaactagggccaccgagtcctcgggggagattctctcttgaaataaatgagcacaattgtactcagcaccattgtcatccccggcaaagatgcctttacaatactcaatgaattcacacccaatagcctttcggccagagatccaaacattgtccttgttcaaaatactttcaatggcatttcttcttcctttgatagcagccgagaggaa

SEQ ID NO: 322760 - DNA, 1964 bp, Cannabis indica
taattaaaaataagattttaaaacttatttctagaaaatctacaataacactactttaaggatgaatccttacccaaaacgagctaacaacaaactgcaaactaaccaaaaaatatggtacaaaattgaccaaaacaaaatggacacaaactagaccaaaaaaaaatggcactcactataaactatccccatataaaaccaatctagataataaatcaatatttaaaattatttttttaaaaaaatacgataatttataaaaatctttattaatataattaaaactaaatgatagttaattaagaaatgaaacagatttttaaaccaattaataaaatatatgcagtaagaataatttaaaaaaaattaaaacctaataaaatataataaaacacatttaaagatataaatatcaataaaaaaggaaaatataatagtagtaataaatattcaaaatccaactaataaatgatgacagaaatacataaaattacgcaattactataatcattgacgataatcacgccataacttccaactcacaaagaagattcgaaatggagcaagacactagccactagcaccgatagacgaactttcaaccgtccttggccaccgaagacaatcacaagtcccccatatgctaaacggtctcacaaaacccagtcaaattcacccacctttctctttcgatatagatcgtcatcctcctaccgttaataagatcaaagaccaaataatagcatacaataaaagaagatataaaattaaaatttgagaatgttctatactataaccaatacagtcgaccaaaaaataaatttatatatatagtatacaaagaatctaataaatatgatcataacgctattacagaagacagtacaatcaaacaaaatatatatatatatatatacaatatataaacaaaacaagtaaatatgtaatagaagtactaaccgatgataccgtcgacaatgaagcatcttcgacacgctcaccatctacagtcgtgaacgtgaaagagatccaccaccagtgagagaccatgattataccacctctgtcgacactttccaaatattgagagaccatgacttcttatgcgtgaaagagatccaccacgaatgagagaccatagatattattacactttgattggtaatacatatattttttatttttcaaaaactggtttttatgtttagttattagtgttattatttcacataactgacaaaaattgcttcttgatttagttattttcagataatcatttttatgtattagtttttaatttggtttgttttgtgtaacagattttgatgagttgcagggttaaaatggataatatgcttatatagggtttatatattgatttttgatttgagttaattttttttatattttttaggatgtaatttctaaatttttagactaattttagagcaatagtttatctttcttttctaactttttatcttttctccgctgtatatgcattcttcataaaaatgaaaaaaaaaatattggttgagttttgggtgtgtcaaaatacaatagtcatagcatgatggtgaggatagattcagataaatgagtaattggttatcatgtgttagtctttaatttgtttattttataaaatttatttttttatgttagatttttaattagttgtctgattcattcgttaagaattcttatatggtatttcttattataatttttttcattatcttgttgatgattttttttctgtttcctttaatgaaattattagtttcttttataatgttgatgaaactggttttaaagtttgtattatttttatattataattttttacattatatttttttaaaaagtgatgttgatgaaacgagtttttttttctgcttaatgatttagttttttttttttttttttttaatttttgatgaaactgatttttaaagttgtat

SEQ ID NO: 322761 - DNA, 652 bp, Cannabis indica
aaaaacaatataactaaacaagaattagtgagagagctacgtagctttgtataattggtacatactgcatatgttgattgaactttctgtagcaaaaacttttgattcgtgtgtttacttaacagctaattattaattaaaagagtaataaagtgattttgtttggagaagcacattattttattttttgtgttaaataaatgtgtctgcgtacaatgtgactgtgtggtgtaaaaccatttgtcaatgacgagtagtagtaggtgagctatttgtcaaaaagtagggtcccactaaacaaactttgtcttaaaaaaatatgataatttatcttcagattggccgggctagtacgtaccatggtctaaggaacagaacaaaaaattggaaaatgttcaacttttgactttcttcattatcaaaatatattatatactgcaatactaaaatgtaccctttggtcatcctttcaccgcaggcaaacgttgtatattatatatgcatctttttatagatttcaaagttacattaattaatataataaagtatataatttagttacaacgcagggatttatatatatggttattacttagttgccaagtgtcacgggctcaccttttcaggcagcggaatacccgtgcggcacctt

SEQ ID NO: 322762 - DNA, 895 bp, Cannabis indica
taaaataaggcaaaatattgggacgttacactagaattatgatttcttaaaattatgtgtgccctagatactggttgtacttcaatctttaagcaagtatttgtcagagaagagaattatttacaaaaatcatcctagatttgaacttattattttgcatagattaggaattttataaaaaaaatgcaatataaatcaactaattaacaaaactaccaaacaaattaaagtaaaagaatgattgaataaaggaaaaatgtgaaagataccctaataagagtagacaaaatgggtttaaatggttgagttaggtgtgaagtgaggaaagtgtatttgggaaatttatgtgaatgaaaaagatgtgttttttcatttttgaccaaacagaatctacctatgaaaccctaaaaaaacccctaccaaaatgaggtcctatcctatgtaccataatagggggactactaggttagtgtcccttgttttgtttttgagagagagttataaatgggcccttgacccccaacaacatacaagccccaaattaatggaaaaaaaaaaaaaaagaataataaaaagataagaagaaatgggtctctgccacttcccacgtgtcaattcacagaaacaaagaaaaaatcattatgatggagaaaattattcacttagtacaatgtacatagatggtgtccaatactattacaaattatgaaaataatactatgcaataatcaacggtttttttttctttaataatttattttaatataattattatattaaattacactaataataatatatatcttatagtaatactttgacatgtgtaaagtagagtagataaagtactattttttagcattgttattagatagtattatctaaaaatagcgtc

SEQ ID NO: 322763 - DNA, 1206 bp, Cannabis indica
gaagactcaaaaacttgtgaacgatgcacgacagaaggccctcgtgcggctgtgagccatgcggccacggattacaagcattttgtaatggactaggacagtggaatctttgggtggcaggtaaacaggtacccggccattcaccaggtggctgagaaggcggcaccgacggcagctcagtggtcggagaagtataaccatactgtaaaggatttgacgcagaagggttatgctgtgtttggatatttgccattggttcctgtggatgagataaccaaggcatcaaaaagggtgaggcaggaaagaaagtagaaccaccaaaggagcataaatcagattcagagtcatctgattctgattgagctgtaagtttattatatgacagatgatttctctttcaacttttgtaaatgatttgccaagtgaactttaaaaactcttttgtttctgaatgaatggatgttaagagtaggatatacaattttctttgtaattgttctgataatcattccaactcgaccccaaatggcaaagatgcttgaaaaaataaaataaaagcggaagatctattgtccccaacatatgggaaagcagaaagttaactatatgataaaatataaacttaagcaatagacagtttgttttaattaataaattaaaaacatgagggaaatcttcatttgattatagtagaattattctggctttggaatttttaatggcaatcacaatgaagtgggaaataaataaggatagtggagttgcatatgtatttttttttttttgtttcaataaataatgaaattggcttagtgactattgattatacagccaggttcacaatcttataagaaatcttatgcatgagaatttcatttttttttacgtataagaacgtaaatctcaagataaagttagagtaggggcggagagggatactgttgtatcaataattcacctaatacgctttcaaaaggataaaaaaatcacctaatacattaagccaagaaaaatcatcttatacaaataatattttctgccggaaaaaaatcacaaaataatatttttagcatcattgtagggaattatttaatgggacattttagtatttcactctaaaagtaggggtgttcatccgatccaatccgcatttttttggtcaaacaacatccaatccgcactaagtgcggatttcatattttagat

SEQ ID NO: 322764 - DNA, 1598 bp, Cannabis indica
tgtgaaggtgatgtgtgccgccgagtttgagaatagtttacaaaactaagctccgtatgttgtcatctgattattttacattacaaaatgttgcttgtaattccattatatgtatgcaaataaatatgttaatttctgataatatttaagttgtatagtttcataaaagtcttaaaccaaaaccaatagttttcttttggatagattttaatctcacaaatattatttatcccattactaaaatttatactttattaataaatatcacatttaattacaaatataaataataactaactaaaataaacatatttttcttttcatttcttaggagacaactaactctctcgcctttctgtgcctccttccatttaggagtgtcaacgggtcaggtcggatccgactatgattcaacctgatccagatcatgtaaggatctgccccgccctgccccgttagatcaaatactcgaatcagatcaaagcctacccgacttattcggatcgaatttgatccgatctttcatttggtctaggcttggggagcactcatcctgaggttaggctcttccgaagagagcatgagaaccttcgaaacgagagagagtcgagagagtcgagagaggaaaatctttctctgcaaattgatcttgtttttgtttttagtataaaaatgaattttttatgtaaaagtaactaattagttttttatcagcataactaaaaggttacatttgaaaactcaggaaaataataaaaaacgaaatttgggattaatttcgtttcaggcatattattttaaaattaaggtattctttaatgacgtggcaaggtattattgtaattgagatttattaaggtatttttgtaaataatttatattttaagtatattattaaaaaaatccccacaataaatgtactattttttcatttacatttatgttatttttattattttattagtatatttacctatcacattaaattatgaaatacttatattattttttattatcttacataataaaataataataaaattaattataaagttattaggttttatttttcttaaaaaaacattaattaaatattaaattttacattaaaattttacaattgtatattagaacacaaaactaaaatctaatgtaaatttaccacaaaactactttgctcttatcttatgataatgttaagcactattactattttaagatgtgtaatcaatactatagaaatgtgatactttgcctttagtatttttcaaataaaaataagaatacttttcttttgaaagaaaaataagaatacttctataaatacaatatcaaattttatataatttaatataataatttttataaaaaataaccttaattaattacaaaacaattacgaatcgaataacacgttctagtattctactaatttccgttcatttagctaatgacgtgtacacttttcattggacaagacaaataaaattccactgtttccaacataaaacaaataagttattacatgtgtatccagtttagatgaagaaaaagacaatatgacgtggattatgacgtcataaatggtattatctgaa

SEQ ID NO: 322765 - DNA, 756 bp, Cannabis indica
tgataaaataatttccaacaaaatcaccctaagcaatcacctcctcacttctcaaatgatgacagtcttcctgcattacctacttagtgaagaatcagtatcccacctggttttcaatctgtgtctactcctcaacctgtgtctactgctcctcacaccaattctcaatcagatgtctctgtgtccagtgatcctgagctagttgttgttcctcaaaataaccccactcttcccattgttcctgagtcatctaatgttgttcctgtcacaccagttttatccaattctgcccctccaaccaacacacaccaaatgaccaccagggctaaatctggtatccacaaacccaaaacttttcttactgagaaaataccaaaaattcaaatctgttatgcaatttgaaaaatggagaaaggccatgtcccaagaaattcttgctcttgcaagaaataaaacatacactgttgttcccctaccagaaggaaaagaactgatatgttgcaagtggattcttagaataaaagaaaatcttgatggctcggttgacaggtgcaaagcaaggttggttgccaaagattttcaccaacaaactagatttgattatactgagacttttagtcctgttgtgaagccaatcacaataagaattgttctgacattggctatttcaaaaggatggattgttagacaattggatgtcaacaatgcatttctaaatggagagttacatgaggaggtctacatggcacaacctcc

SEQ ID NO: 322766 - DNA, 891 bp, Cannabis indica
aattgggttcggttgtgcatttccaagacccaaaaacccaaaaactcgaaaacccaacccgtgtgcaaccctatctagcccaaattcatattttttcttgccttgctcgtgtctctcgaactcatatcaattcgtcccgtgtcaaaaaatctgagtagcgtatttaatgcacacattattattattattatttatcatcaacaattaacatggtaataatagtagaaaaaatatatataaattttcagacatagattattagacatataaatataaatatatttcattcaattatgaaaaataaagaaaacaaaaagaaccagaaaacttgcacccacctacctctcatcaagatctgttactcttttcactcttatttaagtcttaaaccaattcagccatttctgttttccaataaatccattttccagttttgtcagaattccaatcaaaggaaagaggaagagtaactgtgtagagagagacagagagacagagaggaaagctatagatgttgccgcctaggttttcctccattttcagcggaagtggtggtggagaaggaggagccagcgccagagcttcgaagagcagcgcggcccaggttttgcccactctgaaacttcaaactgataaggaagtgtatggccctggagatcccgtggtcgtcaccatcgagatcgggaatccttccgtcaatggtgattcggccttgtcgcttttggtcgaccgtttaagctttgagatcaaaggcattgagaagctggatacgcagtggtttgccacgcagaagcctgttccgggatccaaacagagaagaggtaatttcggggttgtgattgattgaagaactgggtttggtttttttttttatttttttatttttacgtt

SEQ ID NO: 322767 - DNA, 917 bp, Cannabis indica
tgaaaacatagaaaacaagcgtaattccgtcccaacacagctaagaatgcacataaattggatccaaaacataggctaaaaatagcctaacaccgatcttcttgttcatggataagggatactttaggtgtgcaacacacttaaagtgtgtgcttacttatgggattagatttaaaaaagagtattgctacggggcaccaagcgcctagcctttttatgatatgatgtttaataattagttagcggttctctataataattattattaaattaaaatagataagacccaatattaaattgcactaataataatattatacctcataaagggattagacaccataagtgcccttcagtaatctcactagaaaattggagaatgaaattattttttgctagcaaaatttaattaggaatgagaattaattgtgtgggtcccacataaatttaagattaaagtgtgagctataaaaattataatttttaattttttattgtttaaataatgataatatatcgaatcataataattagtggtattataacaaataaaacgtagtatttattataggccaaatttaatataatgttatattttgtactaaatttggcacaatttttatgagaaaattgcattgtatatctactttacttttcatattttaatttttacctttatttccatattctttaagatatacatacttttatagatgtatccctattataccctttacgttatgttgtgctaaacttaagtagagagtaagggtgtattgtagggttgtacatcggtcggtttgggtggtttatcctatatattttctaactcaatttaaagttcgggttgctaaaatttaagtgcaacccgcccaattttaaaaacaaaaaaaatctataaaccgaccaacggtttg

SEQ ID NO: 322768 - DNA, 545 bp, Cannabis indica
attttttcccaactaatttatcgttgttaatttcttttttattattttcaatatgcctttgtcctaactaatttatatatagttgtcaattattttattattaattttaatatgcctttctcctttttcttttattataaatagtgatattaatagcatgtgtcatctcatttaatcatcaaaatgatttcttttagactatttttaaaaataaaaatttgttcccacaataatattttgtatttactaaatacaaaatttatttttataatagcatatttttatttaatataaatttttaatgatataaaaaattaatttaacttattatgtaaaaattataaagaaaaatacatattatttatcaaaaaaaaaaaattaagaataataaactcaataaagagccacaataatacaatattttttgctgaaggtgacccgcttaaaaccaaacaactttatcattatttcaaggctaattagcaatttttttcccccgaactttgacatatactaaatcatgccccctgaacttttttggccgt

SEQ ID NO: 322769 - DNA, 1371 bp, Cannabis indica
tcagtaaaaccctgtgttctgataaatctaggaatatctttaatcacatagtcttgattactttctactgtgctgacgacacaataaacaagaacataaatgtgaaaagggtttggatgaatttataaatcaaatagataagtaattgacaatatgaaccaaataatacacaaatgaatgaaaaatacttctgtttctttattgatattgaatagtagagattacattgaaatgaagttttatttagggcataaaacccaacaattaaatggatgttttaactcgttattgcataatcatagagcagttagattgaacgataactgattatgttggtttagcaattagtaggttattttttacctgtgttcaaacagattgttattacgtaagaatgatttgcttaaattttggtaatgaaaatacatttgtacttgtttttatggttatatatgagctcaataaagtgtgatcataatttattgagttgggggatttgtaatcttgcacaacttgtttaactccaaatcataaatttcaggaatgtgatttgtgaaaatgccttctttttaaccataaaaccctataaaatcctacaatcacaaccactgcacctttgaacattacaggtacccgtgctgctacaaggactcatgccatgagaactagatccctaattgacattgtcaagacaaaagctcatctggccacaaaatactctttgaatgaagctctcattccttctgaacctcggactactacaacaactcttcaacaccctcagtagcccaaatctatgcagcaagagttcactactcttaaaaaagcaggcacttggacattggttccatactccccagatatggatgttattggaaacaaatggcttcataaagtaaacctcaatacagatggtacattggatagattgaagtctagtagctaaagggtatctacaaacacccagcattgactatgaggaaaccttctcaccagtagtcaaacttgctactgtgagaatcatacttaccatcattgtatctctcaattggatggtcaaacaacttgatgtgattaatgcgtttctcaatggcaccttacatgaaactgtgtttatgaagcaactagaaggcttgtggatgagtctcgacctactaatgcttatcaataattcacaaagctatttatggactaaaacaagctccaagagcttataaccaaactttgaaagacactctaattttcccattacatgccccaacaaacctcatcaacaaaatgatttttgacttaaacaagtctttttcattgaaagacttatgccatgttcattattttttaggtgtgaaaagttttagagacaaatctagg

SEQ ID NO: 322770 - DNA, 1090 bp, Cannabis indica
accgcttccgaacacaaacacagaaattgggtaattaaacattaaatagcataataaatacatacgaactcaaataaattcacataattgtcttattatcaataataataaaatctcatacataaaccctaattatttaataattcaaagtattattcatatgcggtctttacacagatattccatgactaggacaaaaaggaggggggaaattgggtctccttgccttagcccttgttcgcctttgaaagaaccctgaattcttccattcaggagtaacgaatacgacgtatttctcacacagttcattatccacttaacaaacttttcaggaaagcaataggccaccaaaagtttctcaagaaaatcacagttcactcatacactttatttctcatagtaaaatttcactaagttccaacaccaaaaaataaaaagcattagccatatccatattgaatatagagaatggattaaacatcaaaggaagattgaaagcgcaagaggtagaacaaacactttttttcaattgcaagaggtagaacaaacacttcgtataattagtccatataggaattactatatagtactagtagatatagataagtgctaatcatagtttttcattataattttttagttaatttttgtgttcaaaaatgttaaaatatttttttccaattttttttataacaatattcattataattaaaatatcattagaaattcttgtcaataaaaaaaatattagaaattcaattatcgatattttaaattatttataattttttaaaaatttatattcttgatagtgtaactataactatatatactataagcatggtcgactcttatggcgtgcaagttatttgattactgtacagggtttaaaaaataaaggacctaatatattttttttaataaacccaatttttcaagagactaacaacttatcattggtcacttccatactaatttctaaaacctattttcaattctattactgcttataagaaaaaaaataatttagacttatttattatttttttcaaacttttcatattctttttttttattttttttttgtatt

SEQ ID NO: 322771 - DNA, 2704 bp, Cannabis indica
ctaatccaaattactaaagcggtcattacaatattcctcttgaagaagaagaagcttagtaggtatatttttgagttagtaatgaagttacagtagtgtgttttacagagaatcaatcttcgattccaaggtgaagagttgaagtaggaggagaagaaagttaagtcttagaatcactatcagaatcccccctgccttgtgcgtcttcaggggtatttataggtcgttcctcttgcatgggctgccgttgatggatctttctaaggatgaacccccaatgttagattggtaggtggcatatttcccatgtggtctttactaatgttagattgtaatagttgtactagcggtgccttaaacgcatgttattctaaggtcgttcttatttgaattatccttattcctagttgttggatcatttgacacagtacacaagaacatgcatgctctacatggtagcgtgtcgtgggagacaacttttgacatcatacaagcagaagcctcaccattgggtacgtagcctgacacgagtggcctgaacttctgcaggtcaaaggcgtactctgaactggtgcatctcaacgaaggaccttgttttacgagggtccatatccttcgcgggagcaaagggtctcgtcttctataattgaaagagtttttgacatgcgggtatttctcttgtggtctgcatctgggaaggtttctctcgcagaggctggttttgggaagttggggcctctctccctcgagagcatggagcaaggccctttggcagcttaatgactccttgacctttcctgattgattccacgtgtcatgtttgcgaagatgcgaataagattgtgcaatttgattaaaaaaggaaactgttctagacttctaggaacaccttgtttggccctccaaaaatgcggtactaggactgtttttgggtacggggcatccttggcagaagctcatctcagggaagaacgaagctaccttccttggaggtctttttagacttgggcttcgcctaagttagcttctttgggcccactggtgagctttggatgctgacctagaatccacgtgtctcttaccgaaaatgcggataacagtagaaaacaaacctaaggtcaaggaatcatcacagaatgtaaataattttgacattgatattgttcattaatgcttatatggaaacgaattttttttttatgtttgttatggataattttaatatttcaagattttgaatgactgtaatgtttgatccttaatgttttgtaactttggctacatgtgtttatgtttgaacttttaattattatttttttgttacgaaatataagtcataacccaaaccaacactttttataaaggaaaaaatgggttgggttacataaaatttagtatgtgaatggattaaaaatttctaggttgatatcattaggttgggtcatttagataccctcaacccaactaatgcaactcatgctcagccctaatgacaacatttagataaggaaatagttaaaaagttcttgagctaaaataaagaaacatttacatcatctgatagagtcactattttacatatttgtttgaaattttaaatttttaactatttcacctatactgatgtgggtgctcacatcaaatgctttcaaattgagaatttctaacatatttaaaaaaaaagtacactaaaaacaagctacatgagatactttaaattctttctctattttgaagcttctttaaaagggccaagatgcaaaatgactctaaatctaacaattaagttaataaatgtccctttttataaaaaattaacaaaatatctattcagctaaaaatttgatgatgaaattacaattataatcttgaataattaagtatttggtatagttattttgcacaataatatattgtttttatgttcaatagtatattaaaaaaacttaaaggtagtatattagtttaagattgtggtatattattttaatgtgctatggtatataatagacgaaagacagaaattaaaaaattagaatattagtttaagttttaggtatagttatatttcactaggaaatattgtctttaagtttttggtatatataatgttttttaatttattatattaatttttcattatagtatttctacttatgattgtagtatatattttgtgtatgctataatatatcttggggaaaaaatctcatttaatagtatattagtttaagtttgtggtatattttattagtcttaggtatatcatttgtatgtgatatgaaatatcgtgaaggaaagaaagaaaaaaaaattgaatattaatttaaatttgacgtatgtataatttttactacattatatattatgcattgcattatcttaataaaaaaataaataaaagacaaacaaaaaagaaacttataaaaaatttaagctcgtgatatattaattttacactatgggatatccatttaatctacaaatatattctttttatgtgttgatgtatatcaaacaagaaaaagaaaaaaacttaaaaatagtggttttttgaataaatacatatgaggaataaaataaagaaagaaagaaaaaactaaagattggtattctttgattaaaaatatatgtatgctatacaacaaaattaatatacaattcaagtttttttattttattttctaaatggtataccatagta

SEQ ID NO: 322772 - DNA, 1438 bp, Cannabis indica
atgagatttgaaattttccactactcgaaactgtaatgaacaactgaaaatggagaagatgaacagtttgaggagagagtgggttacaaaaaaattttatattcgaaaaataaaaaaaataaaaaaaatataaaagtacacttgctttttaggtaagtatagaaaaccgtcaaatacaaaaaatttaaaatgatttcctttttttaaaagaaacgtggcaaaaccctatcgtgacacgtagtaaaacaaaaaaaaccaatatatattaaactttccaaatgcagtatactgaccaaaaaaaattagaaaatgaaaaacagtataaaagtaaaatccttcgtgtcacagtacaaaacgaaaaaaaaaaaaggaaaaaacagtaatgggtgtaaatttccctttatatattaacaaccgataacaactcattaaaaattaaaaaaattgacataactttcaaataaaaaagattttaacaaaattaatagagatatatcataatctttaactaatttacttctaattctaaaaaaaaaaaaaattatctggtaaaaaatatataaataataaataatttaaaaaagccattttactacaagttttgaaataaagacatttactaacatactattatgatttgtgaccatttactattgtttcccattatataatacactattttttctgtaaattttttatattttatgttcaaagattttctttttatatttttaaggtgttctataaaacaacactaaaataataagaaaattacataaaagtatcaagaaaataacatcataacaacaacaaaaaaattaacaattacaatataaaaatatatgaaaatattacattttctgtaaaaatatttaattccgtaaaaatttagttttattatttttgtattgttattgtgtatttgtgaaataatccctcccataagcattgaaaagagaaggccagcaccgagaagactaaagcagaagctaaatgaatgagacggcggcggagattgcgggaaaggagtacgaagccgaatctggtggcagtgccaaaattggaagtcactggtggtgggctgcggcgagcgtgggccaattgggttggggtatagtttccgtcagaaagggctgcgccgaacattcaaccctcatgcccttgaaggcttttgccgtcgcatccctctttgttggtgccctcgcctccgcctcttttgctggccttcgcgccgcaggaattcacaaggtcagttttctaaatattatcactttggatctcggtgttgctgttcctagttctcaataagattttactgatgagattacaagaaatatttttttttttcactgaaaatcttcttcgaattatgtttatcccataatttttctaatttcttttttactaagtaaaatagaaacaaaaaaaaaaaaaacaa

SEQ ID NO: 322773 - DNA, 534 bp, Cannabis indica
taaaataatttccaacaccttccacctcctaatggtttattgcgcgttagagacacagagtgaacctctaggaaaaggatgcaagctcccgatactttcaagttctgagagcttggggtaaatgttattccagttcccggatgggtttagtattaatgtcgcaaaagggtgccatgtcggatcaaaccctgatatcacgggccttccctaagatgaggttatggaagatactacagtatctgaaaggaggcttccctggcaaaggctagagtgattcttgaagttctcatcttgtgcttccactattgaaggtgaatgggagtcgtatgcactctatgatgattaggaattggctgttctaggaagcccttggacaaactgttgggttttgtgccctaaataaaacacattacaatctgattagttatcaattttagagatttgaaatggtttatgttaagatgtatatttcatgttgatgatttaatatatatatttaatatatgcacaaaattagttaagtccagaacatat

SEQ ID NO: 322774 - DNA, 501 bp, Cannabis indica
ttttagtttcctaaattatacgcatatatttaacgatatattagttactaattctgttctaaatattattttgaatttaaaaaaattagtttaaattgaatataggaaatctcccaaccacttgagagaatatctaattaatccaaaacaaattcagtggggtccatcttatctaatgtgcatctatcactgtgtccttacacagtgtggcgccactattttcttaaccagtcaatggtgatgtctttaccttttccccaatttatttaaatgataaatttaaaataaattatttagtacaaaataaataattaatactttttgaattcaaaatatatttttctgtccttgactgttttgtaaagtggcgatccggggaccatggacttataatactaagccaaataaattagattatttattgaatcttattaactaaataatcttatttattaatttcatgattactctattataaatatagaattaaactcttagtaa

SEQ ID NO: 322775 - DNA, 571 bp, Cannabis indica
tgaaagatagtgggttggattcaagttattaaagtttgaacttccatcctgaagatcccaaagtcaacctgggcacaaggctagagttccttcccaagttgactactatgactcgagtctactcaactctgtgatgtcatccttaatgtcatgtgtcaaacattgatgtccacatcaccagggaaagtttttgtattaacattttcccccaagtcaatttcacacttgtgtggagttgacttgatgatgtgaaccaagcccgtttcgctcgaacatactagatggacatcaatttttacaatcttaggcacttgtatcagttttgtaagcattcccagcttaattaggactttgaacactgttaattagtctttgggaattttgaaaaccaattaacaaagagaaaaaagaaaaaagtttatctttttttcgcttatcttttatctctttctttgaaaatttgagattttcttatttttgttatgacataaggattaattggatggaatcttaatcaaagttgaacatgtcattagaaattagagagagaaaggaagaagagaaaagactt

SEQ ID NO: 322776 - DNA, 2539 bp, Cannabis indica
ccatatagaaagccctttcccatcaaaagggaatttaggggtagaatgaccagactccggaacaaggttcccagaacagagatccaatgccaccaccagtggcaagacacttaggggtcacaagagaagaagacgatgtacaacaccctttatactacatcagtaagagattgattgacgctgaaagttagtacccactcatggagaagctgacctatagcttgctcttggcttccagaaagttaaggccatacttccaagcataccctataaaggtgtataccaattaattattgcggcatgttttacaaaaacctaaagcattaggccgactacttaagtgggccattgtgcttggtcagtttaacatcacatattaactaagaatgtccataaagggtcaagcccttgcagactttgtggctgagtgcacaaactcatctattgaaatctctcaagatttatgagaaaagcaagagccatagaataagagagagcaagagcagctataaaaacctaaagaaccaacatggaaattccgtgttgacggaagctacactgaccaattgtctggtgtaagcatttcccttataacaccttgggccaacaattgcacggagtaatcaaattcggcttcaaagcctcaaacaacatgaatacaaagccctaataactgaactcaagttggcacataaagtacgagcttaccacctagacatattcaaccactctcaattagtcgtgaatcgagtcctaggtgaatacacagctcgaggtgaaaaaatggtggcctacctgagcaagatcaaagacttgctaagtcagctcaaaggctacacaattaggtagatcaccagagaacagaatgctacaaaagatgtacttgcccgtccgacaatcagcaccattgctgacaaggcaaacctagggccaatatagctcatgaaagaaccaagcattaccatccctaaagaaattgaaatgttggacgagagtccaacatggatgacacctattatagcttgccttcaaactggagctttgctagaaggcaagaatgaagcaaaaaagataagaagaaaagttgttaggtatccaatcctagatggagtaatgtacagatggagcttctcaattctgctcttaaggtgtgtcaccaaggctcaggccaagcgactaatgacaaaagtgcatgaaggcttctgtggtaaccatgcgggggggcaaagcctatccaaaaggatactctaataggggtacttttggccaacaatgatcaaagactcaatggactatttcaaaagatgtgacaagtgccataaattctcaaaaattctaagagctctacccaatgagctcacaatgatgtagtctccttggccctttccagtatgggggatagacctgattggttaattcccgtagggaaaagaaggtgtacaatttattgtagtcacagtagacaagtgggcagaagctgaacccctgacaacaatcacctccaagaaagtccttgactttattgtcaagaacatcatatgttaatttggacttccacaaaagattgtgttagacaatggaaagcagtttgacagtgacatgttctctaatttctacaacatacatggcatcatcaaaaacttctctgtcgtggtcaatcctcaagaaaatgagcaggtagaagctatcaacaaaaccctcaaggacaccctgaaaaaattccttgaggaagaaaaaggcaactagattgaattgctcccagaggtcctatggttgcacaagactatcgagaagatgatcaccgagcaaactccattcgctctagcttatggctatgaggcgatgttgtctgtagagctggtgccaccgtctcacaggaggacaacctatgaccaagatacaaacaacatattgatggtagaatcccttgacgaagtagaagaaagaagagatcaagctaacctaaagttggaagcctaccagtaaaaggtagaaaggaacttcaacaagcaagttaaggataagaaattcttcataggagacctagtgcttcgaagagtgttcctgaataccaaagattcagtagtaggagtgttcaaacccaattaggaaagcccctatcaagtgacaaagataactagtaagggagcgtacaagctgggaaggtacaatgagacaatggagcttgttctcctaccaagatattggaatggagagcacctttgcaaatactatcaataaccaacttacagaacactaccataaagtagcagttctaccaactcaacattagattgtaaaagagttagtacccacgacctttttagcgtggcttcccaccgttcttcaacggcgacctctcttatgcaagtcaaccaggggtagccatttgatatctagaagcaaaactttgttatgtaagcgtgtagattaaatttatgtaagttgcacatcaataaagaccaattaatgaatagaatacaatatttatgttcaaattatcatgtttaaactacttgctaacaagattaacttctta

SEQ ID NO: 322777 - DNA, 528 bp, Cannabis indica
tctgcaacagcaacaccagtttggtccgcaacatgataatcagttcttatatagaatcccatcaaagtctcctccgctcgactcaaattttgctaattttgaaatatttaggagttcatcacaaaagcaataattttttttcgtacccctaactcaaccaagcttagttaaggaaccaacacttggtttatcgccagatcaatcatatgttccttctccgccatagccattgggacctcccaatgataataatgcgtatcaagactttgtaacccgagaccttaatgagaattttatggaataataaattcatgtttttttaatactttaatttaatttgagacattttgacagtattaataaaatgaacattgttattagtttgtaatttttatttatttagtgtaatttgagatattttaatagtattaatgaatattgttagtgttaaattataatatttagaattggttaaattatatttaattttttttaaattgttatttatatatttatataatttattaa

SEQ ID NO: 322778 - DNA, 889 bp, Cannabis indica
attatattggatgtctctaaaaaataatgtaatatacacatatattacatatatttgttcttacatgaaaaaagaatacaaatcatattgaaaaaattggtaactttataatttatagtgcggtgcagtttaaactacaattattaaattcaaactcgcaaatcgtattgcaccgtgcagtttagtaaaaatacaattattaatatgtggatatttcttacagagaatgttctgctctcttttttctgacacccctcattaaattggttgatgggtatttataacagttgtcaagaagaagaaaggtctcaattgtcttaagtgcttgccttggctatgcacaaagtagggtatgcatcccctacgtagtaggttacgtagggtttaggtgagataaaccctcatccttcattgattgttgtgattgttcataatggattcgtcactaatacccttgattatcgtgtaattgctgaaggatgggtttatagcgtctgacacgtcctttcatatgtgtgtataaacgcttcctccatgctactacattaaatgctagctgacagtacattttcggtacccttaatccggaggagctagatgctattatgctcccggagacgagttcaagtcaaatctctctagacttggtcatggctcctgaagtagctattgggttgtcccgaggggattttgacctttgtaatgactctcctttaattatctctgagtcctcgagtctaacctaccacttgtcctataataggattgccatatatattgggagaaaattagggtaatacaaaccaattcaaatcccaagatgccatatgcattttactagtattacatttttcacctctacgtaatttttttttttttacaaattttt

SEQ ID NO: 322779 - DNA, 662 bp, Cannabis indica
atttagaattgttaaattatatttaattttttttaaattgttatttatatatttatataatttattaatttatttttcattttattttttaaatgtaacatcaacagatattagcggcagagtacccgccgctaatgctgtgtgttgattttgttaatcgaaactaacacaaagcattagcggtggtgcccgtcactaatgtttgccactattaatagttattaaattccgccactaaaaactattaatagcggccaagtattagtgggagactattagcagtggattcccaccactaatagccaacaacgacgaattttggagttattagcgacagacccttccgctgctattgataataaatgttctagtgtttggtccccaccccagaaagattggatcagaattaattgtgacgctaaggtagggagtgaggcaatgtctgtggtggcgttagttatagatcgctagaatagcttctttgatcctcttattggcgaagcaacgacttccttgttagccttggaaacgatgatttctatgaagcatctttttgtgttggttgagagcgactctaaaataattatcaaagtgcaaaagggaacttattctaattgggatattagtaactacatacatcaatgtaatagactctctaattt

SEQ ID NO: 322780 - DNA, 1194 bp, Cannabis indica
agtaaattattttgctcatttttattctactttattttgtgatcaaagggccccataattttctttcgccgtaggccccaaattgtctaggaccggctctgaagcttgggtaagcttcctacttcattttctatggtttctttcgtttaaacagcttctcttgcatcaattttgaaatgctggattctgagttgttaaagttgttggattttgtattttaatgatatattatggttgtttgagctgatttgaagttaattgatgggttaatttggtgtttagacaaggtttgagtttcagaactcaaactttggtctctaatggtgaatttttgattttgtgcatcttgagctattttattgccttggatatgtttattggagaatgatatgcaagtctggaaggttcggtaagctttggatttgaattggttaggttttcaaaagttttgagttacccggtgtaaaaccggttaatcgattttacaggccctgtaaaaccggttaaccagatcagaaaccagtttcctaaactttttgtgttgttgattcgggttagtttcagagccttagttggttaattccctgttggtttagggatttccatgttaagttttagtagaaaaaattttggtttaaaacctaagtccctggttgtgatttagcgtgtcacttatctatgttatgaacgatgtgatctaggggcatgtaattcgccaagcagttattctactccggttggccgacacacctgaatttggaaacaaggtaagattagtataatgatatgcatatatgtatacatgtttagcgtatatgttagttgccgttagaataacatgtcagggtatcggtgaggtgtaaatggagttgcaccgagatactaacatatatatgttaggcaaatatatagccatcagattagcatatcaaggcatcaatgaggtgtagatagagttgcaccgagatgccaacacatatatgtgaggctattagataatatgagttatctgctaccacatctgtacgactagagtactgagtataggctggatttgcagttagtcatacattgtcgtatgaacgttgtagactcaacaccgtgttggacacggggatagggttatcgttaggtgtatgggcgcctgattataacccaggttattattatgttattacttatgcttttcttact

SEQ ID NO: 322781 - DNA, 1130 bp, Cannabis indica
taataaataagcaattagttaattatagtgatacactcgtgccacactaaaatacctataaactaatgtcactaaaatcacttaccggtaataattattaagtacttaatcttccttgtaaaaccattactttgcataagaatttaaagatattgaaattttgaaaacaaaatatacaatttgagtaccatttttattatatttaaagaattggtttcaagataaatatcgccatatcaaaataatattaattaaacaataggtactttattttgttttgttttattttcttagaggtaaatgaaaattttcaatttaaaaaagaaattagacatattttattgcatgtagatatttttcaatgagcataatcaacaaaaatagataatccaagccatttatttatatagatagaaggaagaaaactctaataacaccttccaattagctatcaatgatgaagcatacaaaaagcacaaaggatagttgatttccaaccaaatgaatttgtgacaaatcaaacctatagtgactatgagctaaaaatcttccattaaaaattagaaaatgataaaccaactaccaaatgagaataagaagaaataacaaaaccaatcatgtttatgataatcataaagaagaattgatctggtgaacatggccttattaacaatccgagagattaccggaactgaatacgaagaggtgtaattatgccactcacaccaaagtgcctcgagttatttgagagcatgccaacggcccaacaaaaaataggactgaaattccttaacacaaacaaactagccccaccacaataataatagtagagtggtgtcgcaatagtattattaacaaacaaacaaacataaaaaataaaacaaaaagaaaacaacccataaataaaattagcacatgccaagagaaagcctaaagacccctaagagctctgttccctaacataatttttttggacaaactcccaacaccatcaacctccacctaaaccaaatcaaaaccttgactgtcgatcaccacaaacccaaacctaaagctgttaggttgtttttagtattatttttaggttaatttttagtgtgtttttggtttagttatactcttgtttggag

SEQ ID NO: 322782 - DNA, 1420 bp, Cannabis indica
tatcgtgggagccctaattatgtcatcattcaagtactgatcaaatcctccttaatcgacatttcttaaatatgctatcgtgggagccctaattatgtggaagggggtctcaccactaccgaaagtgctcgctctcagagcaccctaattggggagtacatccttgaatcagatagtgagctcctcaacctcactcagaatttttgggaatcgtctcctccagtcggtcaaccattgttcatcagccttcaccgcctttaaaggttcctcaactattatggcagcaatggcctctttaacctcatccagatccccacaaagagattcctagacaatctcattcagaaagagatggtccacgtcttgatgaggagaaatgaggcccacctctcagagattcttagtagtcaccagtttttccacttgtaaatccttcgacggtaaggacctgtagaaattgatcctctcctccagttttagagtcagaggggattgaggaagataatctaactgataaaaggcttatcaaaacacaacaatcagaaggcaggtaatatgctaaatttaaaggatggagaaatactcacttgctatattgaagtccaaatgcagtgtgggaattcttctcaatgggaagtcgagatgtagaaacaatagtcccaaaagtcgtgcgtgtatttcgtggaactggttgggcaaacaacattcttggaatgatgctccaacctatagaaaccaactttctccttatggcctctcattggttgaaatttgatcttgtagaaatataagatctcttccggcatcggtgcagatttattgtgctgaccacaaagaatataccaccctgacaataggcgatacacctggggtataaactgaaaaggcgctactccggccacatcacataatttggaaaaataacatcttaggggcagatgtgcacccatctctatgtgagcccagctctagatgccaaagcctccttctgcacgcttactgggcatttccccatgaacggagagtttgttccagaatagccttggaacactttcaagcccccaatgggtttcatatttcgtcaaattattgtaaattcagaacttgttaacatgttgttccatctcccatggactatcgttcaaagcaagcttgggagaattttcttgctccaagatttcctcctccaagtcaacctcgtcttgatggacccatttaggcacactttctgtgcaaaagaagaaaattcaagcagttagccaccataactacctaacatagaaagggtgcaaggggtcctcccccataaactgcttggagaggtcccaattagactaactatccagaaacgagaactctcaatagttattcatgttggaatttattttaccaggatcttagatctactcacaagtatgtt

SEQ ID NO: 322783 - DNA, 727 bp, Cannabis indica
ataatttccaacagttatatctctagcaaactttggtgaaatcttttttctattcataaacttgtcctggccccttttcggcctagagcatctgctaccacgtttgctatccaagggtggtagaaaatctcacagttatcatctttatctagctataaccatcgtcactacctcatgtttgaatccttctaagtgaagaagtatttgaggctcttgtgatctatatagaattcacacttttcaacatacaggtaatggcgccaaactttctgtgcaaaaacaactgcttccaattcaatatcatgactggaataccattgttcacactccttccattgtctaggtgcacatgcaagaactctcctagactataccaaaacacaatctaatcctgtttaggagtgtcatagtaaatcacaaatttctccccactgactgacaatgttaacactggtgcaatagttagcttctgtttcaattcttttgacttaatttccgttaagagcataggaatccttcaacaaatatttcgcagcatcctatcaatccaagaaaacctctaacctcagttcaaaacctgggttgaagccaattctaaactgctttattcattgccaaatgtatcaagatactatctatgtctgctaggggtgtttgcggtgcgggtggtgcggtttttgaccattttttcaaaccaacccgcccgtggggttttttcaatttccca

SEQ ID NO: 322784 - DNA, 1748 bp, Cannabis indica
atatttcttgttttttatattctttctttcatatgtccagttatatgcctgctacccttattctttataattttattattaccggctcgagttaagtgtccatagtaagtgtgtagccattattattttttaaatatattttaagctaatctccattctcctcttctctttctgcaaattttaaatttgatttttcactattgattttcaaacaaccccacacactaattaaaattagtttttaaatcattttaaattatatgattatttattgaatctttctcaattaaattatagaacacctaacataaaactaaatatacgtgccttgcacgtaactttcttctagtatatatatataccataataatacgacctttactaaacaataatcattccctaataagagttattgtttagaattagagcatataattaacattaacaacatgaaatttattttgagtattatttttatgttgtcacttatggtgacattaaatttttgtatggcgcgacgtttaaattgcagaaatttatctgaatttaaaccatgttggaaaattgactctaccaactcgacttgttgtggtcatgttcttgacgttattggatgcagatatcattgttctactcaaaatatttcttcgccaactatttcaccaccattgtcgcaaaatatcacgacaccaacacattcactaccaccgtcgcaaaatatcactccaccgtcactttcactatcgccgaagcgaatttcgttatcatttactttgcatatcctattattattggtggtttcaagttagaacatttatatatatgagatttttttacttggataggtttatttttctaaatatttcgatcgatgtttcaaattgttttttttttttaattctatatacataagatcgaagttgaaatatgtagaagctacattaaataaatattgtggaagtttgtgtaatagaaaaaaataagttttttattattaaagtttataaattaaatatttattcagattaagtttttttgtaatcaataattcgatattttgtttagtttcatattttttctaatgtttttcaaaatgtggtagtaagcattaggttccaagttcaaattcccaaaaaaagatatatatttcaaaattttaaattatattctatagtatatctatatacacatgctatcatagatatagtagttaacatgtaatttaggatctgaaaataatttatgttaataggaagaaaaatagttatcaatgcaatttaggatcttaaaataatttatgttaattgtttggtacatagctttagtccaaagaaatattaaaaggtatcaatagtacttaatactttttaaagtgttaatatattattattgctgcaattaaatatgagatttaattacaaaataacacgtctaaaaaataattaaacaccactagctagccacttaaacgtccttcaaattaaagagatgtttgcggcgaaaatctttaatatttgttattgttacacatacgattatattaaaaaaactaaatttgtgtataaatacttaagttaactctagttgcaaataaataagtaagaataactctatttgcaaataaataggtaattagccacgtgacaatttacttaacactacataagtttcaaaattaataacttaaatatttatgttacgattactctaataaaaagtggtaacaaaagtgctttattatcttataa

SEQ ID NO: 322785 - DNA, 509 bp, Cannabis indica
atcaattatttatttatttccttaaatggaaatttatttcttcaaataaaaatatatttccttaaataaaaatattcttatatcatattcagtacatcagattcaacaaatatcattctctatgctaaataaaagcattaattgcaacaaaattaatgtgtttgtataaatgctttgctctatataattagtatacataccaacatgaaactaaacaagacaagacgactgaatggaatggaatggaatggaggatgataagcattaattaccattcttgatggctcagctccattcccaaactgagacaccagtagctacttcttatggttgaatccaccaaggaaataaattgtaattatttcttattgaaattatcagagaaaatcaagagtgaaagaaagaagattaatgttattataatattaagtatagtaagaacgtaattgccaagagaagcagaagtgggaatgattccatcatcatcaccactccatcaatcaagaaaa

SEQ ID NO: 322786 - DNA, 1090 bp, Cannabis indica
taaagagtagtataatgatgttcaagaaaatcttttttgaattagcaaaatagtaattatttattttgtaataaataaataatttttcaaattaattaaataggtaagacaaaatttgtcaagacaatatctgttgagaaaaaattatcaggataaaagacaccatccttgtcctaaacaataaggtaggcgcctaccatgtagcttgtccctatggagtttgtatttttgggttaattaattctattaggtatacatctaatttaaaagttggttatagttatttcaaagttgttgagatattctctcataaatatcagtaagtgaattcagttatagatatttctttatttaaataattaaatatgatttaattaaaagaattaactactataaataaaagcatgatttggaaatcagtggatgcttttccacatcaatttttaaaattatcagagaaaataaaatagttttctctctcaactgttcttgctcatgtgttgagaactcaagaacaacattatacactttatcctaatagctcaaactattccttgtgtacggtggaataatttggaagacactggtatgagttcaattgtattatcctcatcatctggattaagaatacaacatacaagaagttttgaagatatcgtgatagtcttccagaggtatttgttctaaagatattatatattattttgatttgatgtacatacatctggagatccaatagaaaatggcacaatgataattagataatatgaaactcttccgctgcgtacctgatttagtaccataaaaccaacacggatatcattgactaaaggcatgccacaacacaaattcaagtatcataaatatgggattcagttatccctaatgcaggttttggttgtacaactaaaattattcaatgaaactctaattttgatattttctattatttatgtgcacattaattttatctaagaaaattatagtaagaggaccagaataaacataaagtttaggatttgttcgctaaagtacattgccacataaattacattattatataatgaatatatcgtaatacatggaagat

SEQ ID NO: 322787 - DNA, 1758 bp, Cannabis indica
tagtgtggtctacagtgttccactaaatttggtgggacactgtagacaatgccatttataaggataggtttagtgtcccattggagtaaatatgatgtgaaactacaccatatttagtgttttagtgtcccattggagatgaccttaggttcaatcctttatagctacacatttttacaatttcgagaccttaagcgtttaagaactcgagacgtacgcttggctcgcctacccttgaccctgattcatattaatgataatgagttcttcatgtcgttttcatattaatgatgatcgggaaaaaatgggtggttaaaagaaggccacgtcatgttataaggttcacttgaccaccaattaagaacattgtttaattgaatattgttgtagtgtaggacttagtcaaattgaattatttatttaatcaaagtgaaaattcttacaccacattttgtggactggactgtatgtagtgtttgattattgtaattgcatgtttgaattctcacactatagattttatggtgtggagagtgtaattacatgtttgaattctcacacaatagattttttacatttatttacgaaatgttttccattttcttttattattattaaagacggagttgtacattcgggtagtttggtggcacgaataaaacacgatacgaaaaaatataagtttgggcacaatacaataaaccaaatgcaagagatgaaatgaaagcaccaaaacacgataaagctgcaagaatatttcagactcatggaccagattggcaagcacgtttcaagccaattgggagccttgggccgaaaaatctaattaagcatttttcatatgaattttttttatatatcatagtaaaaatctaaaatatagcatttgaaaaatatgatcggaccttttttcttaataaaatattaaatgttgtatctaaaaaattaattaagcatttatttagaaaataattatattttttttaataaataatagtcaaaatataaaatatagtattttaaaaagataaatatagaaccttttaattaaaggattttttgggcttgggtgggagccttgggtgtggcccctgctgccccacccttgagctggccctgtagattaggcgttaccttcaaaatataagctagttcgacaaggcccgtatttttacacgagccaagctagacgtatgggcatggtggaatcttcaatttataaactccttcaagcatttgtaaaacctctctctgaacggcctaagagaaggggcttcctcaatacaccacaaagcaatattcacatacctcacaagcctttctcttatcattcaaggcatcaatctcaaaatccacaagaatatttaacaagttttctttgaagaaatgttgaccctaaaatttagtaggccataagaaataaataataattttaggcccctattaaacccttaggctaggtgagccctaggcactggcttctagcccacctattcccagagtcgggcctgctctgaagcaatcataagcccaatctgtcaatatttcctttaccaactatatcgatatctgtggtgaatcctcaccctcaaaataagttgttacaacagtaataatgttcaagaaacacaaatcaaaactaaaaccaatcacaaaaccaaaacttgaacttaattgaaataagacaaagaaaacttaactcaataatggatgaatgatgaatctttattaaataggaatagtcagcagtacacaata

SEQ ID NO: 322788 - DNA, 847 bp, Cannabis indica
ttttttttaaaaaatatttttctagttgaacttattcctttatattttctctcacatacctaggtctgggtttggggttgagacgtctgggtagttcggatccgaatccgggtctgggtacagggctagggcatgggtggggtcaagttcgagtttgggtatgaatctagggtccaagtctaggttcgggtctgggtctaggtctaggtctgggtccgggtcagaggtctagatttgtgtatgggtttaggtccaggtccagatcctagtccaggttttgggtcctaattcggggattgggttgttagggtttataccctgaaaatcctataaaaatattaatgattattaataaagagctgaacattttgatatatgcgtgaatattaaattattaatatttattatttgaataatttatttataaatattagaaaatttcttattcatatatgagtttatgacttgtaattgtacagagaaccaagatcacttagctatgaataaaacagttagcaacatattcaaattatagaatctttaatccattgttgctagtacggttcactgatgctcgttcttcgatacaagtaatctcagttcggattacgaatgtagtataacatcaaagtgaaagtgttgtatataataaagattatatatgacaaggaccaatatgcatgaattttttttatctaatacgtcatttactctaaagacctaattcatatcataacgataatcaatgttagatcgacatagatcctaagtaatcatgaacttgtgttcatgttattagtttctttaatccacccattaaatttttcagagaagataattcttacaa

SEQ ID NO: 322789 - DNA, 894 bp, Cannabis indica
tatatatatatattgatcgatggtgatgaaaaattgagatgaagaacataaaggacagatataattaaccgaccaaataagaccaaagatcttttttagatcctttgttcttgtctatcttggctactactactactactctctctcaagtcttaccaatgcacaaattccaagacaatatatctcttccctatatatatatatgtatatttatttatttatttatttagaagtaggattgttaataataaattcccatatatattattctggtatatggtcacaaattgttattctgttattacagtttatttttaccgttatggcacattattagtagtagagaaacttggagtaaatgattctctttgtttttttttttttgtctatgtagttgacatgactatctatatttatatacatatataaatgcattgttggaattagttgtatgagaatctttttgtatagttttggactctttggtgttctgatctcagatgaatcccccctttacccatctaagactattcaattctgacaatgtttgccatgtcttttttatatttaataacacaaaacctatatatatacatatatatacatatatatattgatcaatatcttaaggatgggataataataaaagggtatatattttaagtcaaatacatttcttgtaaggaaggaagagaagaagtgtccaatttatcaaaaaatatatataaggggagacatgaaacaccactaataagtgacaacaaattaatagccctacatagggcacaagattccaatatgtataataatatgaacaagattagagtaggaacaccctagtagagactttcaatcattttcgatgacaatttatattataattatagtacgtat

SEQ ID NO: 322790 - DNA, 1005 bp, Cannabis indica
aatggtgtcttatttaattattcttttagattatatgctcgatatttatttatttttttaaatacaaaaagtcagttatttctgtttttctttaaaaataaaaacaaaaaagttgaagctagttgtaattgggccttcggtccaactttattgggtgtcaaattagtaaacaacaattgggttcacgcgcgcaggtcgagaggatgacggcccatcacccattggagaaagagatagcgacggacaggaaggagcaaaagatagcccaggcagagctaaacaaacagcaggcgcgggagcaaaacgcggcggcaaaagaggctgccaggatgggcaccaacgtcggcggtcacactgggtactcggccgtcggtaccggaacgaccgcctactcggcaaccggggcgacgggtcagcccacggggcacgtgacggaaggcacagctaagacccacccaattgggacccacacgggtacgggtcggaccatgacccaggacccaagtggaggtgctcccggatacggaactggtggatattaaaagcaagcaaatactgtgcgtgtgtattttcaaaggatccccactcccattttttttcttttcctgatggttttttttagtgaagtcagtgtagttttatgtaagaactatatcacgtgtatgtgtgttctagctttttttttattcgaataaaacgaagtaccttatggtgtagaattgctgcatggttttggttttaattgagtaatgtattagattttagataaattaacaattaatttcaagataaatttttatataacatagaacacaataataatatataataattaggtatgcgtacctgattgatccatagtaattatctcaattcgatccacagcaattattttaattcgatagtgtaatactatcaactaagtcttcctccctaaatctctaaatcagaagcagtttattttatttgattatcaaaaagtatacaattgtgatgagacaatat

SEQ ID NO: 322791 - DNA, 573 bp, Cannabis indica
aaataaaataagataaaaaaaaaatgaattagtcccctagcgatagtattaaaactaatagaagaaattctcaataattagaagataacaaatctcaaaaaaattatttaaaataaacttatcggcaaaagttttgtagcagttggccctcctcaaaactgatctacatattaacaataaataaaactccattaccatacaatttaatgaaaattaaatgatgagaataaatatggtaaaataatcaatattataatgtcaagacttgaaacacttatttgtcaaatttaaaaagttatttgtagaattcatgagcacaacatgaaatacttctcatacccattgactatatcacaaatctatcttaaacaattaggggcaagccataaaatggcacaaaagccaaaaccatcaaaagttggtgaaaacgagataatcatcaaacctatatcttattttcccacacatatatatatatatgggttattttcaataatatgagaaaaattattaaggttatgataaatatgacataaaaagtaaataccactaaatatggtattatctaaccaa

SEQ ID NO: 322792 - DNA, 1382 bp, Cannabis indica
gtttgggaaattagaaaaactgcatgtgcggtttggtttgaaaaaacagtcaaaaaccgcaccactcgcaccgcgaacacccctaaccactatcaccaccactctttggcgacccatctccgaccactgtccgaccccatgcattggaccaatcaaaacattaggtgtcggtgacctcaccccccaagcggcgctgcttctttcgccgtcgttagctcgggatcacaagtcaaagtttagcagttcaaactttgaacggattttttggccactttcggtgtccgtttgacgagtcatcttcaccactagactcaactcgtcgaggaaaacaacctacactaagctatttcgaacaacctacattaatatagtatttattgttatttaataaaatacaactcttatacagccaacaaaactaaaaaactacgtaataatatactgcgattaggtggtgtttgctaactcgcagcccctttgagtgtattattctaaggtggtatattttctaagttatttttctcaaatatatataaatatatatgctgctagtgctattagtctaacttatatcagattttttactttttatatatatatttcaatttgcatttagtctattcactgctataatatgggcctttagaggttgtttttcaatcagatttataaaaagggaagctaaagggtgtgaaattacccgcctaatttgaaattgacatttagaggtggttttttagtataaattgtaggtatagaatttaattatatctataccgttggttgggggttggggtaaaattaagagttttttatgaatcctatggcgtcggttagttggtattaatcgacgccataagtgcactcgttatacgacacgtgtgcacctatggcatcagttaataccaaataatcgacgccatagggtaatataagagaacccatcagagcttcgtctttctcatttcacaacttgctgaacacgaagaacagcagccatagtagccacatacccacgaaaaaaatcctcgccaaccacccataaaaaagcctcattctccttcatttcttaaccattttattccatttttgttttaaaatcttttatgttcaatacctaaacctatactaaaaaaagttttgtttatttccctctatcactataaccgaacctattatataaaaaggtggtggtataactccggtcaccgattttagcagagaaaacgttgaatttcaatgtccattaaggtataaatatgatttctatttattttattaatgtgcattgctattatttcgtttttataaactttttttgggatttttcaattttattaaaattatgttagcttgatatataattaattatatatgtatat

SEQ ID NO: 322793 - DNA, 1269 bp, Cannabis indica
tctcaataacctaatgaccatgtagattacatgagtattaaggtactgagatacacccaccatttcgagaaatccagccaactctcccaaggtataaatcccacatgtgcaactagtagagtgcctcaaaaaatggatgggggtttcctagtgacctaaggggcttgcatctttaagcatgaccatggagttattgggaaacacccaccgttttgagaaatctaaccaatcacaacatgtgaacacatcacgcctatccaactagtagcatacctcaagaaacagttgagtagtctccagtatcccaaggggcatgcccatctcgcataaccattgggttaatggaaactcctcactgtttcaagaaaaccaactagttgaaacatgcaattatgcaagaaaagagaaaactggccgcacgtcgcaaatggctgggtgtatcacagtggcccaaggaacatgtgatcgcacgcatgaacattaagttacggtgatacacccaccatttgaaagacctaaccagtattcccaataaaaacatacagagaacacaaggaaattctaaacaatgggttgggatgaccaaatcccgaaaattcctaaggaatatatatgcgagtatttaaggtgttcatctcaatactcgcgagtattcaagacagcaagcaaaaaaggtgtgaatactcaaaatgttgctcctaaggttcacgattatgcaaatttcaagcctattttctcctaaaagttacccagtttttagcagagaaatagatttctatatgcattccctacaatgacatacattttccattccctaaaactcaaaatacagattatttctcaaaaatagaaagaaaattcacagaaaaagctttgaaaactaaccttgggattgatcaatgccttctttgattggtttttgattgcttctgaaactcaaaatttctggagaaaagagggtagaaatctggaaagaggtttcaaatctatcagagagataagggaagagggaagatgtaaatgagagggaaaatgtgaattgtgtttgtattatgaggcttaaataccaatagccctcactaattgggatcgtgacacgtggcagaaggaatgcctaaggtcatcccatctaacggttatccatgggcacgcctacacggaatccgaagagtttcgtgacgtggtaccctaaataggatcaaatgtaataattacaactgtcattttttgaaaccctcgatgggacaaccaaaggtcaccacctcgtga

SEQ ID NO: 322794 - DNA, 716 bp, Cannabis indica
aatcaatgcaaaataaaaagaaaatgataagaaaaactcccgtaaatttgatttgtttaacgtcgttagctctactatatgttgtgctcatgtgatcttcaggtcgggtcttctaacaaagactcattctttatctatttatcaatagaatctaatatattatacttaattactggactacactcgaccaccactatctttgctccactaccagctacacttgccgcttgataccatcagagtagtacatggtccccatatggaccacacaagtatccgcttgtaaattaaggccaatagatcccgttataaatacccttcttttccattgaagagaaggtatgaaaaaattgtaacacaatactatcgagcaatacatttatacttttctccatttgtactcaggatgtttcttaaagcattctaagcttcttcatttctcttagttcttacactttcactttaatattctgactttgatttcattaataatttaccgtcaacaaaactcacgctttctcattctgaaagactcactaatagaatttaggggtcttttcaatattatacctaaaattgattttatttataaaaatacctttaagaaaattatttgcacaaataccgattgccacatcagcataaatactgaaatataaaataattaccgaaaatcgaaaaaaaatcaaaaaatctcgcttccagaaatttcagtg

SEQ ID NO: 322795 - DNA, 1365 bp, Cannabis indica
ccagtcatccatgttattaagtttccaaaatataagttgtaagaaccatctcaataaaaaaaaattaacaagtgaatcaaggaatcgaataaatacttagaattcagacaaatctattaatgatcatcattatgatataaataactcttttatgataaatggcatgttaatagaagatgtttatttacatcggtccaatcataaataatcaaattatacacagtacatttactaaatgtctatcatatgtgatctgaatcaaaatcacatgtttagtacttagtaaattgtacttggtaattctatattaaacattacatactttaatacactacatactagttttattcatatggtatgttcttaaatttcttgtactcctacaagatcatacactcctatataaataagaaattttctattttattaattatttgactaataattaatgtattcatttataatatatctgtatttcatatattcaataatatattatccattaatcacttgcctttaaggcataaaccttaacaaatatcacctagaccgcaacatttgcgtgggttatgaaatgacgcccaaaatcttatctttctttttatgatcgatacaatacattagtgtttgtgtctcccgcatatgcgttggttatgccaaccgacgctaataccataaatgtcggtccaaaactgacaaaaatgattgttttgtagttgttgaattaataagtttgttatgttaattgatagctcgggaatccttacttgttgcctatataaggcttatttgttcactcttgtaggtgacaatctagatagagtttgtagatgaaaaatacaatttgagtgttcttcgagagttgtaaagaggttgtgtgtgtttgatcacaactctctcaagtgagttgaattttgtaaggtggaaattgaagaaaccatttatgtatacagccttgtaaatctactattcttcttaataaataaagattttttaaaaggcaattcctctcgccacagaaagaatgatgaatcttgttgcaacttgtgtcaacttctttaattattgtttttatacttttgaattttaatccacttcttgataatgtttcaaattggtttctagtactacagttgttgtttgtttatgattcttcatattaactcaccacatagttaataatgtaactaatctctttatgtcagatttcaaccactaactctattgacgactctaatatttaacttcgatgacattctggtgcataattttgacaacaactgccaacttaggcaaatttctggtggtaatggcagctccagtgataattgtatttagaaatcttgttaagtctagttatagtat

SEQ ID NO: 322796 - DNA, 1657 bp, Cannabis indica
ttttaagtttgtttttgaaaaaaatgccatatttaatgcaattaagtttgcatgccatatttatcaaaactttgatttttttcccatatttttgtaaatagcccaatttttaatcatctggtttagataaaaatatatagtatcaattacttctaaatattcttttaataaatttaaaacaaagtatgtactgacaaaactggaagaaaattacagttttataaatattgggtaaaaataaatgttgggtttatgccgcttacaaatataaaactttgggtacttatgccgctatttaccctaatttttttactatgtcttttaaaatacattatcataattctatttctttattttacacttttatttgtacttgcacatttaagaacactttagtgaaacatcttctctataaacattttaagagctgaaactagaaatcactttatattctttagtaatctgtacggtattatctcacaaaaataatacaactaaaagaagagtatgttattatccatatacaaaagagctgaacctttaaaataaattttaaaacaaaaatatttaatgtattaatataaacgtgtgttacgtgtataaaaatatatacataaatagtctataataatagttaactaaatcacaccttaaatttaaactaaaaagtttacagtataatacctcacaaaatttagccttttaaattatgcttcaagaagtcttttatcttttatcttttgtattttatttttaattttatatatatataaaattttaaaattaagtctttcaaaaacattaaatgaaattaaaattattatttaaaactcaaaaagtaaaacccaacctagaaaattcaaaaccctaatcctcttcctctatctccatctctatgtcacgaagctgaaactcacactctcctcatcggcacgacaaggcagcaatcacccactctccttttcatctcaggactcaggtaggaaacacttgctataaattttgcattgtagtttctggttttcagtaggaaacctaatttggaccttcgttcatgcgttacgttgctagtaaatactgcagtgctattttctttgtcgctatagtatctgctgttctatatggtaaatctttttttgggtattactttagagtgtgcttaaagaattcggctctagtgttcatgcaatttgttgtatatgatttttggcattacttgttgtggctgacctttttccaattttcaattaaattatgtttgattgatacgaccacctgattcaatttcttttgctttctccaatagctatgagttacatttatagtttttttttaaagcatgttcactataattgataagaacgaacagagtgagcaaacgagaacaactaattagagtttggaacaagatgttgctgagagttagcctatgtatcatgtatgttcaattatctaaatgatagcattccttttaaaagtaaatgctatttcaattacaaggaaaaactgttttttaagcaggcttgaacaccaatataagatatgagaactataagagtttaatgtttagtgtgtgtgttcacgagtgcgtgcgagtgtattgattctgcatatgaaatcattacgaatgtccgaataaaaaagagaaatctttaaa

SEQ ID NO: 322797 - DNA, 1461 bp, Cannabis indica
attggcattgtcgttggaaaaatcactgaaaaattcatcaagaaattggtttgggtttgggtccgggtcccgggtcccaggtctaggtcccgagtcccaggtttgggatcgagttcgggtctgaatcccgggtccatgtcggaaattggtgttgaccccgaattatttgtaaaaattataatacaatacaaaccatttattatgtaaataatacaacatacattgtattaaaaattttggtcataataattagtacaatacattgttttattcaaacataatattatttattatttaatacaatacgacccttatacggcataccaaacgagccctagatgtgtcattttgtatttggttagtgatactcttaaaaattattacattaaattatatatagagtattgctattggacactaatagtacctaacactttccagacgtgtgatcttgtgattaactaacgatactctctaaaaattatgatattaaattatataaaacccgatatttaattgagctaataataatatcagcacatattaaatactgccttttaaaatttctctaaattatacagacccaaaacttaatttaatcatctcacaaaatactgattagtccaagaaatctacttaacattactagaaaagtcacatgtgtttcgtcaaatagtccacttcaatctccttggtcgtaactagttaggtagaataagataaaatttcaaagtgtgtgttggaattatgtaatttttctatgtatatttcaatttaaaaaatttatcttatatagtacaaattcaattcactttttggttcgtgctacaaagttcttgaaaaccattcgaatacattaacaaattctctccaacatgagaagtgaaagccatgaacatcagctccatgtaatcttcttcccttatatggcgcaaggccatctcatacccaacattcacatggccaagctttttgcttccaaaggcactaaagtaaccattctcaccacttctcacttcacacccttcttggcaaaatccattgaaaacaacacttcccagatcaatattctcaacatcaaatttccagctactgaggtcggattgcctgaagaggtagacagctctcccgctgcacgtaccccagaaatgtttgaaaagttcgtgcaagcatgcggaaaactcgcccctcaactcgaccaaatcttagaacaacatcttcccgattgtctcgtgtgcgacgcgctgttcccttgggccacagatgttgctgagaagtttgggatgttagaaaaattaataatgaacccaagatctatttgtatataacatagaacacaatagtaatatataataattaggtatgtgtacctgattgatccatagcaattatctctgtttgatccacagcagttactccactttgatagtgcaatactatcaactaagtctttctccctag

SEQ ID NO: 322798 - DNA, 645 bp, Cannabis indica
ccattgcattatcccactcaggagtaccagcaacttcatgataatattgaggctcataatgactcgagatagagcaaatgaaagccttgaaggtaggagacagcctggagtaatcaagaacatgagataagcaatggacagtagtgttaaaattatggtaagaattcaaataagatgacttattagttaagaagcaatgataatcttgaaggtacaagggccttttaatctgtccaataggtctagatgaggaaggaacaggtgctgaaatggaaggagagatgttctcagcatctggtgcagcagtaacatctgttacaacagtaggagaactcgaattctggtgcgtagcatcaacagggtcacaaacctgtgtagcaggtgtattgggtggtggatcaggttttggaacaccaaaaaacagatcctgagatgaacctggagtatcaacaacattagggacagcatggaaaaattttcataatgggcaggcaatccctcattagtaacaaaaggaaaaatgtattcttgaaattaaacatctctaaaacaaaagaaaatgttggtttcaagattcaataatcggtaggctttcattcccatggggtatcctagaaaaatacatgacacgactctaggagaaaa

SEQ ID NO: 322799 - DNA, 674 bp, Cannabis indica
acctatttttgtgagtgagttgtttagtatactttcactatttatttaagtttatcacataatttatattaacctaaggggtataatgaggacattatctataaaagtgaatatttcttatagaatataaaaataaagataaaaattaaaacaagtaaagtgggtatacaatgttattttctcttatttaatcctataataataatcaatacaaccgataatataatcatggtgtaaagggtaaagttatcttatatcaagtacaatgacatgagttcaattctttcaaaaaacacgattttttttaatttaagtttttaaattaattaataatttgaatttatttatttatttaaacaataatttaaatatttttaatatttattaatataaaacaattcttatactgtaaaaataagtttgtgattattatggtggaaagtcttaaatttttatttgttaatatatattgatggttgtattacataaaacataataatgaataataaaattaacacatccaataataattatatctaaaaaattgcataataaattttttcaaataaaaaaaatatgttataaatagataaaaaatttcacactaaaaaaatatctaaacgatctcgatttacagtcgatctcatccaaatttgatagtctatgacaacttt

SEQ ID NO: 322800 - DNA, 529 bp, Cannabis indica
tttttatgggttataaatttgtttccatttcatttatattcttattctcattattaatcctattcatataattttattattccaaccacacgttacctgaaaaaaaattaaagtaaccatttacattaaaatgatcaacccgaaaagagaaaacaaatcagctgagctataaattgcttatttttatcagggttgttcatctgatccaatccgcacttttttcgtcaaacaacattcaatcagcactaagtgcaatcagcactaagtgcagatcctaaattttgaatccaatctaatctaatccgcatgacagtttaaatccaatccaatccaatccgcaatagtggggattggatcggttacttttttttaatgttaaattatttaatatttcattaaattgcaaaaaaaaaatacacacacaacaatagtagcacaaccagaatataacaaacactagaaataaaattaagaaaaaaaaactattgtttcttaatcttcaactccaacaacacattacactaacagt

SEQ ID NO: 322801 - DNA, 1139 bp, Cannabis indica
  modified_base (1096)..(1096): a, c, t, g, unknown or other
  modified_base (1101)..(1101): a, c, t, g, unknown or other
ctatatatttctgtgcctatcaagttggtagataatattaattatgggcagtattttttcttgttttggtctcaaaaaacaaaactctccagagttaaaattagttcgtcgccctgatccacaacttaacagtcacatattaccaggaaagcagggacatggaagtactgatcatgctaaggacagcttcaaaagttccatggaagaaaaactgatcagacataataataatgatgagattgctggggttgggaacaacaagtacggaggtagttgtactactattacaccagcaaataatcaggaacatgatcatgatgagaataacttcatcgaaagtggtagcgcagcctccttaccaccaaaactgggtcatgatcatattcaaactgatcatcatcagatcaaggggcaagattgttgttgaatattatattatacatgcttcattcatttcttttatttataagctctcccatgtctatcgatttatttatatcatagatttatataaatgaataaatccatttatacagatttgtgttttttaacaaatggccaagatcattggtcattttgccgttttatttctgtttttaattatatatgcaataggttctttgtattactatcacttaattaataatatgtatgtacgtacttgttgaaaatatttattatatgcttgtatttgtttaaacaattttatagctaatagtaatcatagatcattgattattaattggaaaaaagatattcgaccatatatataatttcttataggcagtacaatactgctaggttgttcactttttgtgtttttatggaattataatgtagaacatatgttattcatattatattcttatttgagtttgattatatatatcaatatgcttaacttagatatttgtcatcaagctagctagcttaatcatatatattcttgttgcttattcttttcctatatatatattggtgtgcttctctctaatctctctctgtacattggaatcagaatatatatctatataatataaaatgttttctttgttttcactaaatttcataaatatataaaaagtaatgtattttntactnttacactaatgttattttgttgttttgtatttttattt

SEQ ID NO: 322802 - DNA, 942 bp, Cannabis indica
aaaccatacgaaaatgtgactctctaccggcccaacgctgcgttccactgttaccagttacaaatacgaaaaacaagaaattttacacataacataaataacacattttgaattcaattaaatctccataaatgcataaatcatgattaataacataatttcataattacaccctaattatctaataatctatcgtattaaaattaagcggtctttacaattatccccacattaaaaagattttgtgcacaaaatctaacctgaatagctctggatattgagttctcatgtcagactccaacccctaagtggcctcttccactttaatattcctccagagaactttaaccaaccctatggttttgttttgaagaactttttcctttctattgaggatttgcacaggttgttgatcataagacagatccggttgcaactccagggcttcataacttaaaatatgcgtcaggtaagatacatatttcctcaacatcgaaacacggtatacgttatgcacaactgatagtgttggtggcaaaaccaaccgatatgaaacctgtctgatcttctcgagtattttgaagggccctataaacctagggcttagcttgcctttctttccaaagtgtctaatgcccttcattggtgacactagcaggaaaacatgctcccttgcttgaaatgtaacatctctacgcttgggatttacataacttttttgcctactttgcaaagcaagcattcaagctttattcttatctatttcctcatttgtcctctgaactaattcagggtcgttatacttttgctctccaatatcgtcccaatgaattggggaacgatactttctaccataaagcaactcacaagggcttgtaagcttggggaggaagagtttcccctctcgttacaatgcgtataaatagaaagatcgtgggatca

SEQ ID NO: 322803 - DNA, 878 bp, Cannabis indica
attttttttttatataattatatatactaataagtacatactccgtccgagtgagctgaacatctcattgggtagcaacagggacctgagagcaaagcacaatgtgcaccagcttgtatacagcgtgagacaggttcacattttcgattctcaccccatccccactcaccttcacaactcagtccttcacagcaaaccttgtcttgtgcccaatgacaatattcaccaggtaccctacacctgttaggtaccatattcagatgaatatccggttgtagtcgaccaaagcaccccacaaccatcacacccactaccaacgccataaccaaaaacttcttcatcattaattcttttcttactctcctatactttgggtagctaattaatatttttatttcttttgtaatgcccactgtatttataggagaaaagaaacgatttttcatagtttcacatattaattacacaaatagttacacttgtttgatgtaatggccacttgcttgatgtaaaggaacttttcctttaatagttacacttgtttgatgtaatggccacttgtttgatgtgtgtgtcaatgtaatgtatgcatgtactaattgtgcggtgcagaaggtacagacagatcatcatcttctgagaagttaagcagggtcaagatgcatgattctgttggggattgtaaggttctatgtgacattctcttgctcaatttggatggcattctattggagacaaaagaaaaaaaaagtgtttttaaatcaaatgaaatcttattaggccaatgcaaaaaaaaaaaaagtgaaaaagagtttcacgaactcggtaaatctgaccaccaaattctagcatagtcactagtaagagtgtacataatt

SEQ ID NO: 322804 - DNA, 1865 bp, Cannabis indica
taatcatgaaataaatcaggtgaaccatgcaacattaaatgttatttctgatgtatattaataagtaaatctgattatattgaaatgagttttatttagggcataaaacccaacagtttttaaccgtgtaggctgtaattttatctcataatgtagctcaatctaaagatggcagatacatactcctgtgcctagtctgcaaccttaaaaaccacgaccaccaccaacaacttgaagaagaagatggacaaggctaaaaaggaggccgagatgaagagcactcatccaggaaaggttatcaaaaaattcctggttgctaataagctcattgaagacttgaggaaggagattaagataggtcatccactactcagctcgaagcagacaatgagcccttggctaaggatgtcaactcccttaaggacgagagggaaagcctccacgctcttctttcaagtcttgagatcaagttcaaggatctgatcaaagaaaagaggagtttgcaggagtcccttgactctgagcagatagattttggtgctgaatgggaggtgcttcaaaagaaggtggaaacttggagacggctgctctagacatcttctatggattttggagggctaacttagggtcaaactttgattacctcaatgaaacaaagaggattatcttagtttctatgaagcccaaaaatccaaggaagatggcgaggtagccaacaccaatcctctggctgaccaagacaatgaaacccctaccgctgatgacacatttgatcggtacaaagacctagggactccaactgcatgaattgacttctttttctatattagttcggcctacgggcctatttttaagtacaatatagcttataaggtagcttttaaacttgggaatatttcattttgttctaagacaactggctggctgtgcagcttttaatcctagagttatcatgctttgttatctttcaaaatgaatattttcccttaagtctaaatgattgcatatttaaatatttttttttcaagcgtgttacttacctatgcttcgtacgggtatagtttccctcaagtgaccacgaagacttatgactcttggtcacttgtattgcacaaattcaattttgtttgtccacttgctaggtttagttgaaccctttgtacacattttcaatggtaattacataacttgctataaaaaagagataaaatggacgcaagaatgataattaatatttttattcatttatttgtctagatgtattgttaccatagtaatgtaaatttattgatttataaaagctattacatgatctaactgatctttagctaattaaaacataaaatagttgaagagtttagtccatccaagagacatcgctcaagagcaatgatttctgaacatagtgtactttaggggtggtcatccgacctgagtaccaattgtttttccaaacctttgagcgaggtccgctcagaaggccacatacttaagagtgagggttcgagcattgtgtactttgggggggggggtcattagaccttctacacttattggtagtattttcttagatgttcaccattccaatgccttcgtactagaactagttccatgtttttatcataccgaccaagtttatatgctctaggaatctataacttctgttacttgatatggctcttcccaattgggtttgaccttgccagttgtgctatcttctgtgtttacgaacactcttctaaggatcatatctcccactaaagaattttcttaccctctcttcctattgaagtactgagctaccttttgtttgatgagccactagctttaggtttgccgaagctcttttttcttcaatttcatca

SEQ ID NO: 322805 - DNA, 1212 bp, Cannabis indica
gaaaaaaatttaaatgttctacattaagtttaactaaagttacataaattacctaaactaaacaagcggaaggtatttttataagtttttttggccaaaagatgaaattttgcacagctaagcccacttggtagaagcctttctgctttagacgacatggtagactggcattttcgttaacaaccttttctatgatgacacgtttaaagtcagagtgctttttcttttctccatgtactatgattttacctttgtcatccgctttttcaaatttgacatacccaaatgcaactaagccatctccttcaatgttgggatcaatcacatgcaaactgcacttttttgtcttcatttacaaaacatacaatacacaaacttgtattacaatataaaaattaaacaaattcactaaatggaattataattattttaaaaatgcaagtacaaaataccttatttgaagtatctgaagaccgtgctggtggagtagatgccctaacgactgttggtggtcgtggaggagaatactccttggtagcaggtgctggaacagaggtagtattaacacgaggtaactaaatacctagtgtagaggccctggtagcaggagctggttcgttggatgctcttctaacacctgaaccagatgtgtgtgaggtgccagtaacatcgctttgttggccttggactacttggaggagttgttttaataattcgtcagtccgcctacccctttcctcttactcctgaagtcgcttctccatctcacccatgcgatcattatcattagatctctttctttttggatgtggagttttaaaaaaattgtgtgtgtgtgtgtgttacgccacgccccatacccctaacatgtcctccgtgctcttctgtcccgccatagtaagtatgtcttttttgccttccaatattaccgaccttcttcaacttacttccgtaactcatcctacattgaaaataatagttactaagaatttaaataatataaatggtaaatttaacttcctgaggagggccataaagcttgcccttcttgttagtgtgtaatctgatccacaagtcacatttgtcgtatgtagtaagttggtagcccaactctcttttcatattttcttccactttcttaataccacctcgccccccgtggtggttatattgatttttggccctaactccttgcatttttgctctcaattt

SEQ ID NO: 322806 - DNA, 1400 bp, Cannabis indica
ttttgtataattatatcaattatcaattgagtaattaaagtggatttaactatttagttttatttgataaaaatatatttattagtaaaatataatattattgttagttatcctaatttttacactatgacgtggcatgtgactaagtgacacgtttctcacatttcataacatgggtggatgattatgctcctagcaagctatgaaaattgatatgaagcctaaagtcgttcatgaatgataggatgtccggacaagctcactggtggacatccaaccagctctattaggtaaatagctcgcatgcaccgacgaggaggtgtgagttgccaattttagagatggacattgttatttcctagcttgcatatcacgaagataatccctatatttatgggataaatttaaagaataaaggcaataagcctagattttccaatctctgcattgtaattatggaaataaactagtttcttattgtttatcgagatttttgaaaaactaattataaataatcataattgaagaaataaataactaaaagagaaaatgcaggaaagacacaaacagtttttacatggttggggcgttacttagccttagtccacgagtcgatattattaagtaattcattggcttgaaaagcctttaggaatacaatgaatgtaagttctcaaatttgtatattttcatgcaaaaatcctatgttccatgagagaacaaatcacatagaaatcaaatatcactttatacgagataaagtgactcgaggtgaaattgaaattgaaatggtgcctactgaagacaacccaacagacatgggtactgaaattgtgacttttaataagttcgtacattgtatgaacttattgagaatcaaccttggagactaacagtaggacctatcaagctagcaatctcagagataaaaacacatactacatcaaaatttattataggaggaattcaggtggaaactgttgagtaaattccacttataatcagtccacttacaacatatccacatcaccatacaacaacaataacaaaataatagaaagtaagactcatcctaggtggctttgcctctacaagaccaagaaccagaagttagttacaactagtttttgtaactaacttctagctctgatcaaccgactcagtacactataaaatacaagaaattaaaagtaaaagtagaacagaacaaaaaaaaaggagaagaagtaagagaagattaaaccctagatcgagacttctgctccaaaatccagagaggaaaagctaggcagagagatagctctcgtggtgaggagatagaaggaaggaagtacatgcacaaagaagaaaaatgaagttagatcgggctattaaacagagaagaaaaataaatcaaaaaa

SEQ ID NO: 322807 - DNA, 755 bp, Cannabis indica
agaaaatttattttgtaaaaacattaaatggaggataaatcaaatcacatgtttgcctccgcccgcctcccagtgtatacattgccacaattttctctctaattaaactcatagtcataggctataccttacaataataatgatatgtattgaaatttaaatttaattgattagtctcgacttgacttatattatttagcccttataataatttttaaattttatttttgtaaaatttcaataatgaccattagtgtcaaagaaattaacatggtcttactacgttttctctcgtaatatattgataaagctccttaaaagtgttactttccaacaaataaaagtgaggaattaaaaggagaaaatgataataatatgctgataatattaattgtgagtaaaatgtaacataaaatttaaagctaaaactacgtaaaaaccaactttagaaaaattcttttgaaataatttgaataaaacactattattatctataaatttatttctttatatattaaaagtgtctatttaatggcattttttttattaacagaatatactttaaaaataaaagaatattctgttaaatttaacgatattagtaggtttgattctcccgttaactttcaaaattatataaataattaacccaaaaagttaaacattctttttttaaacgtttaaaaccaataattaaatccaaaaaaattaaacaatcttttttttagaattaaaaaaaatcatcttatccacat

SEQ ID NO: 322808 - DNA, 1103 bp, Cannabis indica
aaaataaaatttaataataattcgatctaaaagtgttatgacaaaactgtttatattttctgtatctgttcgtgttaggaattgtctttaagttagttatatttaaaaaaatataaaaaattaaactcaggatcctatttttacaattttagaaaatacaaggttcattttgtcatttaacaaaatagatgatccaattggtaatttttacaaaacacaatgttcaaaataatatttgccctatatctttaatgaaaaaaatataaaatatgtatatatatataaagtatttatcataatttattaatgaatgtggtactgaattggtagaacaagttcgataaattatcatgtttgaaagaatattctaaataagactattatccaaaataattatatatatatatatttttattaaaaaaatcactattttgtcaagctcccattttaaacgagtttaaagatatatacatatattcctcctaaataattatatagaaattcttatataatatacaaaaaattttaaaaaaaaattacaaatatacgttaatatagagaaattttttatttttatggtttatttttttattatgtacaaaaatatagaattcaataaactctttgatatgcttttttggtatcttatagtttatttatagcttatttatagttattttgttgttttttttttaaataaaaagttattaatttgttgttttagtttatttataattaatttagagttgttatcatattattttttattgttttcttatttttttctatgaaaattgtactttgtaattttgaaattttaaaatcgtatttttataaataagaacttcaaacaggaaaattataaataaaatataaacaattatatattattgaagaaaaaaccctatcatgttgataattaattaaatattaggtaatttagcttaacaacactatttattaggcactaaagatataatgtggttttataatgtaccatcttaaaagaaatatactgatgcattatttacctattttgatatctagaagaattttttactctactttttttttaatattcgtatatgttatagttatttaag

SEQ ID NO: 322809 - DNA, 824 bp, Cannabis indica
aaaataatttccaacaataccttctcagtagggggaatatgcacctcagtttaatatggttactgctctaccagaagatcacaacgtcttggcttcatggacaaatgaccctagattcaccacattagaacaataaattcaacaattgttaaacactaacaaatattttgggggcacgagtaagacgaaaaacttgagccattttcaccacatatctctacactaccatatcgtctaggtttccagatgccacccacaacaaaatatgagtgagtacagatcccagagttcatattagttatttcaatatactaatgagagtgagtcaggtcgttggagacttaaagtgcatgttattcccggtgaccttaattggggcgactaagacctaaactaacaaatttaagaagcattccattatttcttgcgataagttgtcgattgaatttaaaaaagatttttcgtgccgcctagtctcgaaaacctaagttctcctccttggccaatgtgaaccaacaacctagtgaaagtttaaaagcctacatcaaaaggtttaacatgaaagctgccaaggttagagatgtggatgatagtggaagacttatggaactcagggtaggtttaactcatgggtttttactataggatagcccgcaagaaatgagtgcccctaccatagttgaatttattacaagaccctagtagtacatcaacattgaggaggcaaggacagccaacatcctctctattccttcagaacaaactaccccaggtactaccaccactaatgttgcttcgtcacaccaataactttatacaaaata

SEQ ID NO: 322810 - DNA, 1186 bp, Cannabis indica
atattacaagtatgatagtaatttttgtttttatttaaatcactattatgcttttaaatttcaataattatatattattaattttaaaattataatattaaaaaaaactaaaaaactaaaataaaattaacatactgacttggcacgtaacatctatctagtacaatcatgaatcgatgtttccataccgtagactacatatttatttatttttaaaaataattaaattttaaaaaaaattaaataacttacaatttaaatataagattcaaatagttaggtccaacattaggataaggcgggctataaccatactaagagctcacccaacccaatgactaaaaaggaaaatatgtatacacacctataaaaactagaaagtataggaaaagaaaataataataataaaattattattatgcacaatagtttactcatggctacaagtgcagaattgtttttgtttttgtttttgctagtgaaagcaaaagaaaataataataatataaattatgcaatgcatttttttttttttcacttttatgatttttttctttttacgtttttttttatatgctttcaattgttttttctatttttcttttttagaaaaatgttactattttgtagcaacaacttaaaaaataatgttaacttcaaaataacaaaaaaaccaactatcagtaattttatagaaaaaaaaagttaaaattcgtaaaatatatataaactataaattcataaaaatatgaattatttgtcatttataaaataatcaaaaaaattgaaagggcccatttttttcaaatacccttaggcccattattttataaggtcgattttgagtctagccagtcagcaggaaattaaattctataacttttttatattgttctcttctattttcatcctttttttaaaagtctattatttttacctctttttttaaacactttactaattttacccctatcactttaatatactatcctcccttatgtcagggcattttgggtacagaacatataaaaagaagtaatgtttcaattaaataaaaattaaaagtaaatttggttaattgacaaaaaaaaaatgtattttcaatgggaaatttgatattatatgcttaaaattaatttatccactaaaaatatgctagcatattttgtatcatgcaaaatatact

SEQ ID NO: 322811 - DNA, 1479 bp, Cannabis indica
gacccaacaaccttgataaaccgatatggactcgcatgtcttggttctatcagttcattacaagatgtccatataagcgactccaggaggacggagacatcctagacttgattagtctcgaacgcatccaaggcctacgagctcatgcgagaatatgaacagccagctcgcactataaaagtgcatacgttgttgtatttagtgaattaagctagaaactgttcttcatttattatgtttaggttgtttagtttaattattgtaattcaatgtgtaaacggattgataattaatgcaatccttgtgtaaatgatatggcacttgctttgtatataaaggagtgatccgccgtgaaatgaacaagacagaatccttgcaacagtggactaagcagaccgagatctgactgaaccatcatactccctttgtgttcattatttttctagtcttttgctaagtatttttgttcttgatttgaatactcgccattctgggtcgagtactcgcactcgttatacatataatattattattgtttattttttggtgttgtaaaatttcttcaacaatatttggcgccgtctgtgggaacactaatactttgctgatttagaaggagaatcacaatggctggaaatcagacaattgaaggtcttaacaatgaatcaatcaacattgggacaatgaatgtcccactttcgggaaatagggtacctcccgtcgataacggaggagtaggacggacgagcgtaaggccactcaattttttccccaaaactgctattcacattggggaaacgtccacgccagcagccacaataggacagttcccacctatcacacctatcgtggtatctgagggtattgttcaattaaccaccgatcagtacacgacaatacaggacaaaatatgagctttacaggccgaagttgacgaacaaaacaaaacacgccgtcctcctcgagtacccactacccgctcagataacccacaagtaacaacctctaagcgatgaactaatcgtagtcgcaaggaacgaaggacacgttaggaagggctcgatttaaatcagccgatgtcgagggatcaattcgcgaggaacttcaaccccgaggcacaaccggaagaagacccagagcgacatatccctcgcagtagaccccaaccacgaaacgaggaaaacaacattgagttcggctcttcgtcttcgcaaagtcgtactcctagcaggtacaccaggtcaggttcggtggaaacaccgcaacgagggagataccaagttcataggcgcgaacttcacgatcaccttaacgctgtttttaaggtgcgttcccagaaaccccagaacgatgaagagtctcgtgatccctacttgggcaatcagggcattatcaaccacaccaacccgcctacactactacaaggaaaggccttttatcctggtttttaaggctttttatcccggttttcgctaatat

SEQ ID NO: 322812 - DNA, 1175 bp, Cannabis indica
aagactctctagttggtttcatgattttgggtttaaaataaatccttcaacaacagtttataaaagtcgaaaccactattgtgagtgtttaaaatgactctctattaatattcgacctttataaacagacgcaaaacaccaatatttttttaaaaaattttgatatttcccgtcagttttgttattatcgtctaatagaccacagacacaaataatgtcgtttttagcgtctgtttggaacactcacataaatacaaggcttacttttccgtcggtcaacgaaatgaacagtagcgttgaccgacgtaaatagtgtaatttttagtagtgaggcaaagtgtcgagcacaccgtcatgaacaatgtaagtccaagaaccaggaagaaattgcttccacccaaggctcaactcccagatgaactgactgtaaaactcactgcctattcactccgaacggcggtgatgctggaccccaggttctggagaaccaccactaacctcaagatcacttgaggagctactagaggaatcaactagacactggtccttgaagagaaaaccaagtaaatcttcgtcaatacggttgttacctccccaatagtcactcggtatcatatgcacacaaaatacaaggggaggtgagcaacctgacaaaatgacaaggtttagacaagactctggtcaactgtacccaacagtactattaaataatttcatcgtataaggctcgatatcatcgaagtacagtttcacgtgtaataacttggacaaatgttgagtcttaagttaagcattcaactataatagactcaccatggtgtgtcatacagagttcctaagggaagcttgatgagacataggttgtataggttcacaaagccatgataggattgttgccgaggtcaaaagaggatagaaaactggccacccgcttgggaccaaagccctaggccggccagggttccaaagcattgagagggctggccagggtctcatgacccatgtaagaaccggccaagcatgaacctgctagcttcctagggtaaaccctaaaactagccaacccccatgacaaaatcctagagccggccaggtgttaaataagacccctagggccggtcaaggtgcattttggatcaaaatgtctgttttttcaaaactcaaacgtgttcttc

SEQ ID NO: 322813 - DNA, 1074 bp, Cannabis indica
agtgaaaattcataaataagacatagtttaattttaaaattataattgattaaataaaatcaattagctgagtctgcaagcagtgttatcagaattgctagatgaacccgttagtttcgctgttactttccattataagtaatggctgctgatatataacagatgatgcacttgaagatattttatgtttattatacaaatgatccaggtataacacctttatatacagtgatggccctttctcaccgccttcactttcaaaaatgaaataagaatagtttattatttggttttttaaatttattacataaaaaaatttaattaaggatgtttgggtacaaatgtcgattatgactcaacaattattatatgtaaattttattaattaaaatttatatagtctttttgaaaaaggattactctttaatgttcaagttattaacaatccaaatatctctcaattaatatatcatcaatttaggtttggctataaattataataatgtcttttgtggcttattgcttcagaaaagtcatatttgcgataagatacacaaattaaaggtgagaatttgaaaaattaagacaacataatcaataatcgtcaaatcatattacctgatacttgttttgaggtctatttggaaagacgcttgtctatcttttctttttatttttggaaggctccttataaattggttctcattaaagcttagcgtcgtctagaatcaatttgtgttctcacagttttgtagaagtacacaataaacgccagccgcgatcttgaactggctactcaacactacaacaattttcacacgacttttgtctagtacagatcgagtcggtctacctgcaaacatagataaatgttagcaactgtaaaataacaagaataaaagttaagtgtgaaggtatgagacgtacgaggttggcgattaaagtcaatcctgacccctggcatcttaaacgcataaaatcacttcgacttttaatctttcatatttgaaaattgtatacacaagtgtacgcaatcgttaacaagtaatagagtgataaatcgagtatcatctc

SEQ ID NO: 322814 - DNA, 665 bp, Cannabis indica
atatatatatatgtgatatattaaatttggtaacccatatgtacacatgtattaattttttaaattattagtttttttttaaatatgaattatacgtttataaaatttttaaaaatatataaataagcgtggatcaattacttttgcatgtaaatcaacatttgatccgcacaagtacaaattttagattggatattttgtatgaattgaattgaaccatacggattaaattaaattagaaattttatgaatatccctatcaaatatagcacaatttttacatctccaaagtcttacaactaaaagtttttaaaaaattgtactaaaatacaattattaaatatgaaagtatttaaaataaattattataataaaataaataaatttttatttttttaatttttattctttaaagatatattttatatttattagataatttttattttatacttttatattaacaaaccacatcatcttgtctcttataggggtgtgcataaatcatccaatccaatgacaatcgaccgatctaattataaacaatcgaccgccaagcatcagatatccaattgtgatcggattggattggatgttatttttgaatatccaataggatcggattggatgtttgatggggtgtctaaaaatccaatacatccaac

SEQ ID NO: 322815 - DNA, 1750 bp, Cannabis indica
ttacgtctttcttcaactctctctcaatgaaagtaccaaaatatttaccaagatttttggaaactaaatatttaggaactaaagaaataataacttgcggaaattaaaagacgaagattttttacgtggttcaggtgttaattaaccttagtccacgagtcagtctattagcctttaagagcgatattgatgtttttacagtatttttgtaggaaaccctaactctttacccttagtttcttttcaaagaaaaacaagatcaagggtaatctcaatagagttttagctatttgtttcagcttgctccctttgcacgagaataacagggtctttatagggtaaagaataaccgccactttggtgacttggcgtgtgtaaaaggtcgacatccgtgatgccccatgaaggtcgatattcgctttaggcctttctactatctatctggacataagctaagagagcaaccttgttagacccttttgggtctgggggagacgcttcaccttttgcatttgggaagtagaggcatatgtgggtaggcttccgtgtgccccttcattctggatgattcttggttcggggaagccctttagcgatagagcaatattaaaggacttcaatcaaaggaggattaatttggccttctccattaaatgcccgtgtcatacttttgtagaaatgtgaataacagaaagcttaagaaattaagttatgatcaagtaaatgagttgcaaatttttatgtgtttcatgcgttaattatccctagtccacgagtcaacatattggtcttataggcttttaaaatgtattacaaatgttgctttacagtagaaaccctaactctggctatgaggtggtctcattaagtttcttttgaagaagaagaaattttagaaagtattttaccagagcttcgactaagtatcttttttcattttctttgcatggaggaataaatgggtttatgtaggctagagtttgggtcagggcatatccgtgacccatttaggttttatgtaaaagaaggtagactatcgaggctaaatacacaatatacatgactatagggtccattagaagatcttctctcgtgggatgacacatttctgtacaactaggaccacttttggtgcagggcacgtgtcgggcagaaatcatgcctggcagacaaagtcgtcagaggagtcgtaagacgaaatgggtgtacacagaagaggtgctcgcactaccatgacctgacatatgagacaacatttgatcctgtgtcagaaaggcaaatatgttaggagcgacctccgatttttgaattgtggtaggcatccgatattcctctcgctgcaaacattcagctatcatctttcgatgggcttctaggtgtccccctgtaagctaagggctttgccccttctacgttccagaaggttaaaaaaggcttccaagtcctgcaaagatactccgcttcgcattaaggctccgaatttttcttgggcttgggcttgggcttgttccaggtttgactggagctaccgtgataaaaagacttaggacacaattagttggatcattatctttagtttcatgccacatgtctcttctctaaaatcacggataacaatacacatgtgagatagatggtttgaatattaatttttatattataaattattctgagtttctcaaaattttactcgatgtgtcaattaattataacatattggattaataaaagaaattgaactaaattattt

SEQ ID NO: 322816 - DNA, 1074 bp, Cannabis indica
gagttaaaatggaataacaaatttgtttaacaaaaagttaagacacagtaaaaatataataaataacgctcaacagtaaaaatgaaataaaagtaaaaaatacaataccaggcgtaaatttccctttttaaacacaaatataaaatcaatttttttttttcctaaaaaaacctcaaatatcacctctaaaatcactttcttctaaatctacacgacttttttattagctaatttttctaaaatatcacataattttaaaaatcataactcacatatttttttatcacttactaaactctctctctctctatatatatatatatatgaatgtattttgttgaacataattattagagaaataagagattctttttttttttttttctaacaactccaaaaaagacaagctcaataaataatcatacagttccaaaaaaataagctcaataaatagtcatctcactaccttcttttgaaatatatattccaatattagtaatataaaaatccacatggcatcatgtatatacaatacatgataaatatataactagattgaatgagtaataatttaaatatctatataaatttacatattcatataaactgaaacataggcggtaatatgacagtctaaaatttaaaatagaatctaagactaattaagatttgggaaggagcatagtgatgactacaagtgaattccgataataacaatgggtaagatatagtgagacaacaaggtgatatatgatgatgattacgagcatggtcggcccaaaagctgtgcaaccagatcaattgcacagggcccacaataataaaggacccatctaaatttttgttttttttttttgaaaaatttgtatttcttcttatagtttctcttaaatttctactttctttattaatcccaattttaaaaatacacctccattattactatttaattttgtcaaaccttctatatcttatttaataaaataattaactaaatattttctttatttaaatagtagtcttttattttttctgtgtcaaacaattattttttttcatcttatttatatatat

SEQ ID NO: 322817 - DNA, 662 bp, Cannabis indica
ggaggcaatctaaattttattctttattttagtattttatttacttttgtttagacacttataccagtaataatattttgttgccaactagaccttgtggaactaactttcattcgtgtacatatgtcatgtcacatatataaatatagatatacatgtggtttaggtgtttttttttaataatgtcgtattgtcgttttagggttgactgggagaaagagtaacaattgtggggcccacattgaaatgatcccaaaaacgtgttaattgctgattggcccttattggcttttcaattaaaaagccaattgttgatgttttacttttgacaagtaccggaatgcgataactcacgtggtcttagccctaaataaattcaatctttctttctttatctttttaaacttttggtgctaaatgcatatatattcaacatttttttttttttatatagatatgtctttcttttttgagttccatggagaaatttttagaaccttcattattaaatattttgagtctctttgaaatgggacgataaacttatacctaactaacttgtttccattttccagttaaagaaacagccactacaaaaaattgttacttagttttttaatcacaatataatttttttttattaaatgtgatttttagtcaca

SEQ ID NO: 322818 - DNA, 535 bp, Cannabis indica
aaataataaaaataaataaaatacaattaaaaaagtacatttgtattatatttataattcaaaggaattttattttcaagagagcataattctagaacataattgttgaagattaaaaatcatatatattcacttataaatattaaaaaaaaacaaataaaaattgttgcatatatttattgtaatgggcacttattaaatgatgggcataaaacaataaacaaatattttagggaactctaaaaatggatgagaaaagtccactcatctcatccccacatgagaataagagtagcaaaattgtttgcataataagtgggaatgggaaatgagctaccacgtgtaccgcaagggattcctctcgagaattgctactactttctttgatgtcatagagtttaattaagagaaatggtaaagtgcgttagtagtgcattatcatccttttatgtactaatatcgctattggtttaactaaaaactaggtctcatatgatttaatataataatttttagaaagtatcgctagtcaatc

SEQ ID NO: 322819 - DNA, 1049 bp, Cannabis indica
ataaccttttggcacattattggagcatatttttttttaggtgagctatattttagctttatatcatttatttacaattttattggagatgttatgcttctattcaaacaaatcacaatcatgttgtactagatttattgattttgttaataatttttttaataccattaattgtttcaaaacactcaggtggcatttggttggaagaattgaagacataagaatgagaatgggaataggaataggaatgagaataagaataggaatataatagaataaaatttaaaatgcattaaaaattgataaaaaaaaaattattaatttttttctcgtcatgcattggaattgtctttcctttcatttcaaaatagaatagtcattccactaaaattgtagaaaggccattctattggaatgacattataatactttaatatgcaaacaaacaaaagaatagaatgaaaattattttctttcctttttattctatttcattacctccaaccaaataccacctaataaatttgctataaaaatataaaactaatttcaaataaaatgaaggaataactttatttcttattctttcaaataaagtatttcttgaaatatatatattatttactgaaattttcagaaactaattaaacagagcttcagaatgaattaaaataataactgaaagacaagtaatttttatatggttcaggcattaatgatctccagtccacgagttagttgtattggccttttgggcaagtatttagataatacaagtgtttgtgttataaaccctagctctgcgttctttttgtttctcttgaagaagaagaagacttgtaggaacttttgtagaggttcggctagcattaaattattcaccctttgtacataaaaagtgggggtattcataggcttacatgtgtgtaagggcattccctacacccacttagggtttcataccacagctcgctgcaagggcaagagaatactgttggaatttattttaccaggatcttagatctagtcacaagtatgttgtttaaaca

SEQ ID NO: 322820 - DNA, 905 bp, Cannabis indica
ttttagtaaaaaaatctaacgtggatgaaaatctaaaggtcatgatttagtacatgtcaaacttcgaggagcatgatttgttagatattaaagtttaggaagcatgatttaatatataaacaatcactgaaatagtaaaattaaatgaaattagacaaaagtccttaaatccaacaatctcaataatttaaggggtattttcaacaaccttaaaaattcaggaggcatgatttgatacatgtcaaagttcaatagcgaaaattctaattagtcatttttaaattcaactacattatttattttccatgttatttttttactattgttaaataattagtagacaaataaaatatgtaaaaaatgctccaaaaggggaaaaaaaaaggaagaagaagaagaaaactagtgtgaaatgaaaaaaagttagtttactttaaaaagaaagattagtatacccaagggtaaaatcgtcaatataaaactttcgaagtaactaaataaagggattaggctattgagctgggttacctactccagttgaacaattcacctcccacaaccacaactgaaaaatcaataattgaaaaaagaaaaataaataaataaataaataaatgcttctttcacttcaaatctagtaatctacagtttcattttgcactttcttttttgtagcgtttgactctctttcaccaagtaagagcatctaaaataagtacctatgtttttttatttttgctaaattttaattaaaatagtaaaaaaaattataatagagtcatttttattaaaagagtaataattataatttcttaggcaattttatatctaaaattatttatcaaaatatttttttttctaatttttttctattagcaatattcgttatagttacaatattaatt

SEQ ID NO: 322821 - DNA, 1461 bp, Cannabis indica
cactaataaaattcttagccattggtctaaaataaaacacctaaattggctctcatgagaactatatatatgtcactataagggaataactttatattcttcatatatgtgaatatggattacatgattatgaccaataataataatgttaataaagacaacataatttgatataatggcttctgcgaaatttgtggaatctattggatgtgtccatgtttatatgttttattaagttgatcatgaccccaagagctgtaatccaatctaaaattattcatttttatgatttttttaggagaaattatgacccatttaagataattaatgtatttgttgagtcaaatgattatatacttctaggttacattatggttaaaaatatacatttaatggatgagctatacaatatataaatagtatacctatcctaaattacattcaatttgaaatcttgtccctcaaatctttatgtaaaatatctatgtagagttagaactaggatcttgtaagtaatcacataaagtaataaacttggataaaaccaaaaataatatttctaataattaattaaagtacaaaaatattactcatacataattatatataatattgttaatcaataacaccttgtgcaaaagcttataataataataataataaaagtaaataaaaaaaaacataagaaataacttacacatttgaaaaaaccaatacctaaatcaaagaatatatttacttttatcgataatagagaagaagaagaaaaaaaaaagtgatatatagataggtaggtggtgggtggggatagagggataatggttttgttttattcagtttttttttcttttcctaatagatcattataagtataaataattgatatgaagatcattatgcataattacttcatataattatacttattaaataataataaataattttggagtagctttcatataaatatatatatgtataaaaataatattattataattaattaattaatataaatagtaaggttctgctacaaatgttgttcttgggaggagtttaaaatatagtgagaaagactgaatttttcacttgttgttttcattaagaaaatgacaaatttttaaaagaaggcaaagaaagctcattctcactgcataaagctttggtgagagacaaaaactattttagcactgcctcactatcgaatcttcacttctctcttcacaaataaaggaacaaaaaaattattataattcaccctcatatatatataaatatattatttatatttgcacatatatcctccaacataagtgatgatcggctcttttccatgtcatatcttatgaggaaaaaaaatggacacaaaagactgatacccttacacaaatcgattctagttccatccataatcttcttcgttcgaaagccctactagtccatatataatatatatatata

SEQ ID NO: 322822 - DNA, 1595 bp, Cannabis indica
ttttgttaccaaaaatctcaccattttcaggactaggttagagttttattagcttagattaaattagtattttcttcgatttcacgcaattcccatgggttcgacctcgttcttcacaatctcaatactacaataaagattcgtgcgcttgcgagttgataaatgtaaaacgtaccatttcggtatacaacaacttccaagcccacaccataaaaatactaatgactcatcccctctgccaagtgattcagaagccagattccttcagtaagttgctaaaatgggccatggaacttagccaattcgatatccagtaccacccacgggtatctattaaagtttaagcccttgttgatttcatagtagagtgttgtagcttgaatgacctctcagaagatctaatcccagaactgcccacctagaaggtctatgtagacggtgcatctaatgaaaaaggagtcagagcagggatcgtgatgatttccctgcaaaggcaccaacttcagagtgctctatgttttagcttttgcgcctccaacaacgaagcagagcacgaactatgctggcatgcttaagattggctaaggaagtgggagcccaatagattgaagtacacaaagaattctcaactggagctgttgtaaggattcaaaagttacaacatctgtcaggttgcgagagaacaaaatttgttcgcagacatgttagctaaacttgcaacagaccctgagatcatacaacacatagtagtcccaaattgtcacctgaataaaccaagcattgaggtctagggggtaaatgccatagtcggcaactctcattcttggatggcacccatttataatttcctaaatttaagagagcttcttggggacaaggccgcttccaaaaaggttcagtaccaagctccccgttacgtgattatggatgggaaactttatcgccaatgactatctatgccatacttgaggtgcatcgcttgaataaaaatccactgtgatccatgagattcatggtggcttttgcagagaccatacttctggacctagtttatccaagaaaatccttcgccaagggtatttttggcctacaaaatgattgcatagagtatgtaagaaagtgcgagcaatgctagagatatgataaggttccatgtgcaccacctactaagatcacactcatgagtagcccatggccttttgcagtttgggggatagacctagtaggatccctccccacaggaaaaggaggagttaaatacgcgatagttgtggttgattatttcactaagtgggtcgaggtaaaaccaatgaatactgtcacctcaaagaaggccctagactttgttattaagaacattgtgtgtcgatatggacttccatacaagatcatctccgataacgagaagtagttcgacagcgagcacttcaccggattttgtgcccaacatggaattatgaagagcttcttagctgtggctcggccacagattatcggacaggtggatcttaatcctgatatggttaggttcagcttagttgtattatttatgttcttagaggtgttcgtggaagctaactaatggttctggcgga

SEQ ID NO: 322823 - DNA, 927 bp, Cannabis indica
actcctgatggtttggatgaggcaacacaacatgtctcactcaacaatctcaggtcaaatctgaattaaccgccatggaatgattacgagttcttaatggtaatgatgaaaaggtttatctctcgaatcattttatggaattggaatgcatacagcacttgatgaaagaacagaagttcatcgaatgaatggattcaggtgcacaaatgatcatgggatcgggatgagaacaacaaatttgtgcatgtgtagttcttgataatttctaatctaaatttgtgaatttcaaaagtttaacttgttgtttttgtataaactatttataaatggcttttatttttcctctttgtaatttattttggtgttattttctttaataatgttgcttttcatttttttcttcattatgctgtcaatattgttgttttacgcatcattaattgttttttttatgttttagtcatatgtatgtcgtgtttaaaaatccacaaataagtcttttggtgtcgttttataactgacactaaagaatctttaagtgtcggttataaaatgacaccaaaatttaatggttcggttttaaattgacactaaaagaaaagtagttatgtatacttttaagtgtcggttgtaaatcgacaccaaaagttaatagtgtctgtttagaaccgacaccaaaaattgactttttgtgactgtggaataagtatcggttctatgaattgacactaaaagtattagtgtcagtttaaaaccgacactaaaagtatagtttgtagtagtgaaagctatagaaaaataaaatatgaacaccaggttttttacgtagttttgcagttaaaattctgcatagtccacgagtcaatcttattcaaatttctgagtaattttttcagggcctcttgcataggagtttttccgtccctt

SEQ ID NO: 322824 - DNA, 701 bp, Cannabis indica
atttggctctcaacaccctgcagcaaagtgactgatcctctgtaagaagggcccatccccattttgccaagaaagccacggttacctctcgctttagggaggcacaggtggtcccatgcctttaggtaaaggccacggttaccttgctcatagccccaccaaaaatccctcaccataccgtcaattttcgaagcaagtttcttagagagcttagtagtttgcatagtgtaaacaggcagagccagacccactgactttataagagtggcccgacctgctttagagagcaattttaacttccatccgtgtaacttcgagagaaggctgtctagaatgaagtgaaagtccgcatccttacggttagatctaaacagcgggagccccaactaattgatattcgtggtagctaggttgagacccaattcttgcataatacctcttctcattctgtcactagtattattgctgaagaaaattgaggttttgagcttattaacacgttagccagaccagttacaaaatttctcaagacagctccacataccttttgtttcagcaatcgtcactctacccacaagaataaggtcatcagtaaagaaaatgtgagataaagtaggaccatctctactcagcctgatgcctttaatagatccttcctcaattgccttttccaggatgcgagaaagaatgtcagcagccca

SEQ ID NO: 322825 - DNA, 2139 bp, Cannabis indica
ttctataacaaatatttgatgacatgaattatattttttcacatttttaataggtgtttgaagttgagttttttttttttttcttaacaatgacattcttatgtattgttttctttagttataactgtttctttttgttttctaaactggccaaggtttcttgaatatttgactgagtgtcattttatatttacttagtggcttgtttgaatcttttattgatttggatacttgtagaagctagtatgatttaattgtttatattttgtaagagataaatatatatatatatatttttttatctatttcattgtattattggtttagaattttgtccaaatttaattttttatttttatcttatataacttgtttcattttagttaatattttatacaattgatttcattttagttaatatttttttttgtaatgtcctttttttttttttattctgaacggttaatattttagtggtattttatatgtgttagtttctattaaccggttattttttaaaataaaaaaaataaaaataagaaatcattatcaatgcctttttttggtgtggaagttttatttttatgtatattgtttaaatttattaacttctttttctttgtatgtattatatatgattggttttatttttattgattatttttattggtacatgtttaatataaccggttttatttttattgattatttttattcatacatgtataatataacttgtttcattatttctgtaattttttttttgtaaggtaaatgtttattctgattttttttattaaatgtcaatattattgttttaagatatagttcatattaaaaaaatattaaaattattattagcacatacagaatctattattgtgtttttatattaaaattatatctttatctttaataatgctcttattgttgttgtttctttactttcttgcttcttggttgttttgcttgtttttgttttggtggtagagttggattagtgcatgtctttctgttgtggcctgtctttttgcaactgtccacactttatttatgcctttgactatccttttgatcttattcttcttttcctagctctccctgcttgcttttttgtgtctggtggtagaactatcatttccaagtactcaggcattatccattcactttcatttggtaatgagtttgctattgtgtcatatgttactttcatttcgtctgttttgtcgtagtccgcaacatagtcataaacttgcagtcctcttttcgagaatatagcgattgcatgagcatgagatttcatcttgttggaaccagttacagttacatgttttgtccagtaaattgacaaggaatttccctttctctagcacattcacttggtggagtattattgccaccagtgtaacctgtttttctaaacagaaaaaattattttataaccagttattttatactttacttgtatctctctaatatatattttatgtatataaatatatttatgtttagtgtgttatctcatattttattacttgaataaagttatctctgagtatttttctgtcactgttgaaacttttgtgaatgtttcatgtgcttcattgttgtttgtccaaacccttttttgtaccaaacttcgaagactctctatcattgtagtgatgggcagtcttcttgtagcaagaattgttgaatttatcgactcagctatgtgggatgtcatcattgtgtaccttctagtctagcagtggcatctactccaatatttgtatcctattctttccagataacgtcttattcttttgtctattttgtcaagttctgacatataaacttcaaatgatttcatgttgtatgtttttgcggctttaacaaagtttattgtaagatcttccccatgtactctaaaattgaccttaatgttgttaagcaagtagactatgcatgctccatggaatatatttgggtagacttttgctactactttttgtatgcttttgtgccgctctgagatgattgtcatgtctgcaagtcaatatttgtcaaatatcagtttatgtctattttaaccggttctttatttttatttttgaaaccggttatttatgtttagtaagtctaacaataataggaaaa

SEQ ID NO: 322826 - DNA, 705 bp, Cannabis indica
cattttcttaatctttttaaaaagttgacatttactaacttatttaccaaatttaaggccattttacatcttaaccctattttcattcctataagatactcacaccacacaacacaccaaaaataagatctagccaactatttacaaattttactaatggtaattaaattaaaataggtaaaatttctcttaaaaaaaaaaataggtaaaatttctcttcaaataagaggttctaaattggaatgtcgcctataacaatatattatatatattatacatgtatagaataactattcaaacactgtatttcatccatgtataaaataagagttactcgtataacaatatgtttgattcttattttcaacgtattaaatttcttcaaaagtttcaaaattttacaagatattttaaataattacaacatacacaactataaaaaattagattaattttttttttcaaatactaaaatagatatgggtatattggcgcatcccttttaagagagtgcaatattttctagatacataaccaaataaatgtgcatctatccacacatttgaagggcatctattcaaaaattttcctatatatatataaaaaaaagagtaaataccattttggaccctgtgttttgcaaaagttagagattgaaccatgtgttttgttaaatgacaaaatagatcttgtattttctaaaat

SEQ ID NO: 322827 - DNA, 2217 bp, Cannabis indica
gaggttagctggttttttgatctgcccttttcgttctctatgccacccagaagtgggatatgctttctcctcatgaggttagctggttttttgatttgaagtctactcctaagcgaggcaggtcgagatacttctctttttctcagttagacttcaagtggttgacgggcaccggggacaaggctgttagcaaaattgggaattttgttgatgagtattacatggtggatggcatgggcaccacctacactcggttctagaagattcctatatatcaccgtccacccttcaagcttgctctcagcgatagcgctcaaagactcgctcaggagtcaggtactgcacagaatatcactttgttgacctcagaggataactttgttgagtacgggctctactcaaaggatttcattccccaacatgtgaaggagaaaaagaggaaacccagtgctggccgggctgagggaggtgcgggagccaagtagtatgcttaggaacatcttgagcagaaagacgatgttgttgaggagcaggtgactccactcaaaaggaagaagaaacttcgagccaagcacaagcctattgaagatgcaattcagatcagggagcccagtctacctgctcggccatccactcctgtagtaggaaaggggaaagccgtcttggaggagcaaagagacttgtcagatgatgatgagccatcaggtcttgctcgggcaaatgcttcttctgaagtgcaagatactccatcttgactttaactttcttgattatcatcctttcatacttctagtgcttttctctaaccatgttgcttttatttcgtgcagacatgtctcagaaaatgctcgaatctctgaagaagagagtggcaggaatctcaggtttatctcctccagccaagaagtccaggggcggtgagacaacactgtccagagagaaggcaccggcttaggcggttattcatctttctgaggagccaaccgttgtggatccttctgccccgaaaacaactaagtccaaagaatctcaaggaggaagctcagaaatgcctgagcagtcaaagggcgaaaccgagctggtcaagagcggacctgagcagatccgggctcctgccccacctccagcactgcatccaaagactaagagaggtaaagatatgctcacccactacatgactcggtaagtccctgaggtgaatgagcaactggccggagctgataatgagctttccctaaagctggtgatgggaggagtcctgaaggagtttacgagggtgagtccttcttgatagtttccttttatacttctttacttagcttagattctaatgttttttctctgtgcagaccagtctgaagatggcttatgcttattcctgggctaagtcggatgcctctaagaatgctgccatgtctaataccatgagggcagaagtagacttggccaagaaggatgatgatggagccagtgttcaacttggagccgtcctaatagaactgtgtgaagtcaacaaaaaacgtctggctgtcgagaagaaagtgggtgagctgaccaaagatttagaggcttctaatcaacttgaagctgccatgacctccctgtccaaagaagtgaacaacctccaagaataaagggaggttctttgaactatcttccgcaggttggaagcgcagaagaagtctatggaggaggagcttgctgttgaggttgaaaactataaggctaaggctaagcagtagagagctgaggttgagacgcacaaggcaaaggctgagcagtagagagctgaggtggcaagactcagagggaaggtaaattccatagagacggcgggcctcaagattttttatgacttccgaaaggctaatcccaaggcaaactttgattacttgggtgattccgaagacttgtttctcgagtattgcacttctcaagtggcttatggagaatctgaggcgaccacttctacctctggccaggacattgacatgccccccacccagacaacaaatcctccagctcctactggcctagaagacccgtacaaagagcctaggactctagctttctgaatacttctctttttatctttttcttttttttttatatctgtccggccataaggcctttttaagacaaagtgactgcccaaacggtttttaaacttggaattatttttaattttttagataacaggctgaccgggcagccttt

SEQ ID NO: 322828 - DNA, 574 bp, Cannabis indica
aatcagattgtaaagggttttatttagggcacaaaacccaacaaaatcacgttcatcttcatctccatcataccagaccagatccaaataaagagagagggaagggaaaaatgaaaaagaaacccaaaatcatgttcagcttcatccctaccataccatctaaaactctaaactcaaaaacccatttaaactccaaattgacacataccctttgatagtgcacggaccaccgcaacccacccttgcctctatttgaatcgccattattgttgttgccgccgatgtcagccacaccaacaccagatctcgctaccaatgcaaaagagcaaacagaaacccatctcacacaacttagaaagtctcgtgcctaatagattctttacagaccgaaaaagatgaaatggtttagtttatttgttcatgattgatttgggttgtagaagaagaaaagataaaggaagaaaaagagcggtgggttggtgaatgtgggttaaagatagggtttgattatttaggtttaattcatttactttttaatcttttattttattaattaatgtttttttatctgttt

SEQ ID NO: 322829 - DNA, 511 bp, Cannabis indica
ttaattaaataatcaaactgggaatattaaaatacggaatttcaaattttattaatattataattgtactgcaaattttatttagaaaaaattatcctaatattattgaatattttttatatatattttaatttttatttaaatattaataatttaaatatggtgaaagtaataataataataataataataataataataataataatgggctaaacatatagcaatacttgaattaaatgtgataatataagccatattttttaagaaatgaaatatcatcttaagcaacacttttacaagttttatctaaagtcttaatttttggcaacggtttggaagcaacacttttataagtgttatcttttaatattttttagttaagaaaaagtgttgctaaacataatttttctatgtaagcgaattcaaaatgaataagctgagaggaataagtaaaggataatttcgatataaaataagaatccaacaatatctcggtaggcgagagtca

SEQ ID NO: 322830 - DNA, 730 bp, Cannabis indica
actggaatagctcgccattcacagctaagttccgtcggtttagaggaaaggcctacaagtggaatggagctgtgagcattggccaaatgtgccgataataccccgggaaactggtggagttcccctgtttacaagcagttgagcaatgttcagaagggtcagttggattgggtgaaaagtcagcacatgatatacaaaaaggttcaatggtgagatgccacaagaatgttcaaatcagcaattttaagtaaggtgtgacacatgataattatgaagatataacagaaaagtgtatttataactgagagatataacaaggaataaaacattggcatggccagtaatgctacttttacaattacttattttggattaagcttttgatgaaacaatgagttttgtgttaccactgaattgggatgcatgtaaatggagattaaattgaatacaaaaatcccaagttatcatatactaggaattatttagaatatatttgataaattctttcaatattttatcttcaatgtcataacaaagccactttataaaaattattcaatccaacttaatattccaaacacgacctaattgttaaaattgtaggtgaagttgagatttaactcatattctgttgtacttgatccgagacaagctgctatagaaaattgatttcaaaagtcaaaaataaatatttatgtaaatattttagctgttttttttttaaaaaaaa

SEQ ID NO: 322831 - DNA, 1083 bp, Cannabis indica
atttttaaaaaatactatttattaaaacaccccttagcattaatgaaacataattatgtgtaattcttgaatgtgtgtcaaataagtccataaattaactaattttgtcattagaataagttggcatgtgctttggttgggtggctattttgatggttccatagtcttttggtttatgcaataaaatcattatatattattatatttttatttaattaatggttgtttttaaaaaaatattatttagtgtaaatagttaataaatcttagggtgcttttgcaatacaccttattaaaatgagtgtattgatgcaactcctaactgtttcggtatctatgaaaactttttagtctaaatttttttatagttgtatatgttatagttatttaagacatcctgcaaaattttgagaaatttagaataatttacaatatcgaaatcaatgtttaaactgtctatttcacacgcatataaaataaaaaagtcatgtttgcaacaaactctttgaacattgttttcgacgtgttaaatttttttaaatttttctaaattttgttagatgtcttaaataactataatgtatacgaacataaaaaaaattggactaagtaatttttagatactgaaatagataaaggttcatcgatacacccttttaaagtggtgtattgtagaattttcctaaatcttattccctttttttagccactaatttaggatacctagccaaatttgtgggcttttttgctatttgggtggatttgaatctttttcaggttgggcctaagagaccattttattgagaaaaattgaaaaatacttttttttcttatacattaactaaatttatatttaaataaaatttaattcaaatatatattttttattagtattgtactcaaattaccttcataacctcacataaataagacaatttcaaacataataaattgtgttatttggagatggatgtgtaggtttgtaaaaaaattagggcaaaattttagttaggaaagaatggagactatcgtgaaatgatagaggtaaaattggtagaatgattgaagaaaaaaaaaaggtaa

SEQ ID NO: 322832 - DNA, 501 bp, Cannabis indica
tttttatttaaaaaataaaaattaaaacaagagtgattgaaaattagtaataattatgctatattttcatgaatttttgttgttttgttcaacaaaataattaataattacacaaaaaagcaaaatatttattagtgaaggtttgtagtaattatattgggggtcatgagattttttttcagagaaaaaccccagtcactttcctgaagagcaactagttccaaaaaaagaagaaaggtaagatcatatattgatcaacatgcctcagctaaaataatgctctcaatgcaatctaggaattcaggcaatcagcccgtctcaagtttattgggtcttaaaccaaaaaatctaattcaatctttttatataagattttctatgtttttttttattattaattttttatatagttaaaatatagtatttttaaacataagtgagcattttatcttaataaaatattaaatgtaatatcttaaaaaaataaatgagttttttttt

SEQ ID NO: 322833 - DNA, 891 bp, Cannabis indica
attttttaaaatgatacaaaatattataataaactcattttttttatcaaaataaaatttaataataactcgatatataggtgttatgacaatattagttacaatttctgtatatgtccatgttaagaattgtttttaagttggttatatttttttttaaaaaaaaaagatcaaaaattaaggttagggtattattttgtatctttaaaaaaaaaaacaagattcattttgccgtttaacaaaacagatggtccaatcaataacttttacaaaacacaagatctaaaataatattaacccctaaaaaaataatgaatcaaaagttaaaacatcaaaattgacaatctatcatatgttttctcttcaatttttctttttcttttatattaaaaaaatgagatcacgtggtgtagatttcttctcgacctcttcggaaacatagacaatcccaacaaccacacgttggtcatagaaataaactttctcttccaatttttattagctaaacctcaaaacactcaaatgttaaaaacaaacaaactctcaactagtgcttaaaatataaatacgggccgaactttttgacacaacaccacgaaactggcacgagctcggaaggtatgagcacgactaggtacgaaaaaatatgagcttgagcacaacatgatacaatactataaattggcataatacgatacagaaaatatatgattaaacacaacacgacaatggcagaactattcgatactacggggtggccatgactttctaatgttttggggattttatttttaatacatgtaatttatataaaattgcattaagttaattaatctttttgttactaaaaagaaaatttatacatgtctgctataataagaaggctatgca

SEQ ID NO: 322834 - DNA, 572 bp, Cannabis indica
ctaatggcagaccagagcactttctaagcatctctagtgctagtttttccttgcctttttcatcaacatttgagtctgaatttatccattgaacattcacaaaaaaatcaattattaagtaatgaaacattaattatagagacttacatactactggatggtcatcatgtcaaacatatgcataaattataattatattgagacctgtcagttagattttatctccctagtgctacatgtacttttctatagatgaaaggaagaaccaataggaattagaaatttagatagttaccaataatatgtataaatatgggtaactatgtcatgtgtaggcatgtaaaatatgtataaatataaatggtagcaaagataaaagaagaatattattatgatgattgagttacaaagagtgaagtatagtatattacttgatggatcagttccagtagaagagtacttgttctgaaacagctcccaactctcctcttcattgaggaaatgaggttcatgaatgtaaccatgttgatcggcatgcaaagctacatcatttttccgagtagtgagtaaga

SEQ ID NO: 322835 - DNA, 1643 bp, Cannabis indica
ccttatgctcacactgctgctatacaaaacagttctaattcttaaccttccacagtcactacaggcctacaaccattacctcccttgctcaaacggttaactctaatgcctaatcctataccctatatcccaacctcaacccctaactcacctatcccatctaccaacacaaattcttcacaaccaccgtctgtcaataacattcccactattgttagcactcacaccagtgttcctactactgctgcaccagtacaatatgcatccctgttcaaaccaacaatactcttccaacaccaatctctaccccaatacctcctcaaaccacctcaactcatcccatgaccacaagattaagagctagcattagaatacccaaagcttttttagctgtttgtgaaccaaaaatagttaaggctgcccttcaagaaccacattggaacaatgcaatgaatactgaagtttttgctctaaaaaagaataaaacatgggttgttgtgcctagactagctaacaaggttcccataggctgcaagtgggtgtttcgaataaaattaaatgctgatggaagtcttgacaggtttaaagctaggcttgtagctaaggggtatcatcaataggcaggttttgatttccaagaaacattcagccctatggtgaagactgttaccattcgagttgtagaatagcttttacaaaaggttggacaataagataacttgatatcaataatgcctttttaaatggggacctacaggaagaaatatatatggagcaaccaccaggctttgtagatcctgaatttccagatcatatttgcaagctaaacaaggtgatttatggtctcaaacaagctcctcgagcatggttagaaaagttgtccactgtttgctgcagtatgggtttcaattttctaaagctgatcattgactcttcatcaagatcactgactcaatttgtatctatgttctagtgtatgttgatgatatcttaataatgggcaatgatgccattatggtcaatcaccttgttgctgatctcagtgccacttttgccttaaaagatctaggccatggtcaattattttgttgggaattcgggtcattcaaacagaagaaggtatccttctctctcaaaccaaatacctgcaaggaatcctctacaaagctgacatgcaaaatgtcaacacacaaaatacacccatgaatagtggcttgaagctctccaactatggtagtgaacctgtcaaagatgcaactctctacagatccattgttggagctcttcaatatgcaactgtcacaaggcctgaaattgcatactctattaacaaagtatgtcaatttatgcaccagccactgatgtcacattagatgggagtcaagagaattcttaggtatcttcaggaacacttgattatgatcttctcatcaaaccagtagctaatttttccattgaggcattctgtgatgttgactgggcctctgaccctgatgataggaggtccacaaccgggtattgtattttctttggagggaatttggtgcactggaaatctcagaagcaaataacaataagtaggtcctctattgaagttgaatttcgaagtctggcaagtgttgtcacagaagtgacctggctac

SEQ ID NO: 322836 - DNA, 630 bp, Cannabis indica
tttttttttttttggttttctaatgtttagttatttttttgagtactaaatttttaacattttttttaccctaattgtgtgtgtatctcacatatttattttctatacgactatacttatctttggatcatgtggcgaatgcattccgttttattactagaaatggttcctttagtgatcccaatctctttgaagaccagtacgatactctctttgttgcttgcccaaatcaccaatcaccaaaccaccgaatgtactcattgtaagattttttgagtttaccctatttatttcttcatatctatatatctatatatctataaatctataatatataaatctatatatatatataaaggagagatatgaggctgtaaagaccgcttaatttaaatttggaaattagcagataattaagatttaattattaaaattatttatagatatttaaataattatttatgttgttatatttgaattcagaatgcatttttatgtcatatagtgaaatttctgaattttgtattttcggtgtccggcaacatggaacgcggtgtatggctcaatagaatcgcaatttagtattttagtatagcggggcggtatttttagacattagaaatgtcggga

SEQ ID NO: 322837 - DNA, 743 bp, Cannabis indica
tcgtcagaattgacattgtcaacagaaaaatcacgaagaaagtagtttattcatcaaaaaaccggtttcttggtatttttttcagtgatttttccggcgacaataccaattccgacaaattttctggcgccggcagcaactctaacggctttttcggcatcgacagcaaactccggtgacttttccggcatcaatgaaaaataaaaacaattaaatatgagatttgaaaacctaattatatatatatatatatggcatatcaaataccataaaaagaccttaaaacaaaaaaaatatcatataaattggtcaaacttaaatgtgtcatatttatcataaaaacttttaaaatctcataataagtgtaatttcttcaaataaaaaaagcttcactaaaatatagctataaaaggatgtaaacaaaatataatcaaagaagaaggacgttttttagttgtagttgaattttttcaaaaaaaaaatacttagtttgttatggtttgacgaaataattactaatttagtttatatacacacacgtgcattactaatttaatatatatacacacacgtgcatgtatcaataatggttgattataaaatagttactaattaataagtatcgttacgtgtgaattagtactgtgagatggcgaagtgtatagctccttccaacttgtaattagggtcggtcctgagttaaaaagaaaaaaaataggtctttattataaagataaatgata

SEQ ID NO: 322838 - DNA, 552 bp, Cannabis indica
tctaaaaaagaattttttacatattggtaatctactattacaggtcaacataaatgtaaccatcatggttaataaaaatgtaaccattgagtagtcacccatatttatatatatatattgtactattatatagtatttagtaaattttttagctgtacatatacttactagatcaagtttacaactttcttttatttttatgatttacgatatttttaacgttgattttgtcaaatatatatttagtgaaagtatatttttttgttttgaataatattttctcaaatataaattattaatatatatatattttttttagcaaatatccaccttctaaaactcaagctttcaaaagataaaaatgaagattacaaagtttttatgagctacttattattttttattaattttttatatgaatattgtgagcataaaatttaaacaaccatacgcgaagcacgagctttctagcattataaaatatgtttaactgcaattttactccccatacaacagtgattggagctatgcactttataaaaaataaaagag

SEQ ID NO: 322839 - DNA, 1225 bp, Cannabis indica
tgcgccacattaattgtcagaatattttgacaattaattcagaaaatcaaatcaagtaataaatattgaaatctgaccatatataaaatattatgtaattaattttatcaaaattcaataaatataaaatattcatttatcataaaatcaattctttattttattccttaattagaaatatagtaatagatatgtgatattgcctatatataagtagttttaatagttaactatactattttcctcagtcctcaaatcaaattgtaataagaaaatagaaatgaagttatatatgcagtttcgtatgtcctcctcttaatattattgactttgggggcttcttttgataacgacgacttatatctatatattggtgcatatatatatgttgcaataattatatatatatatatagatatatattttcttttttatataaatacactgaatatgtagtagatgaaaatcactaataatactcttattgccattattacttgatccttaagattttcatttaacataaaaattcatttttgaatttttaattttaaatataaattttgatgtatattaatcaagtgatgagatttatatttcacgtactcgtagctatataaagccaccaagccatatataatcctaataatctcatttttaaataatttatgggatttatattaatagacgtttgattataaaataaaaataaaaatggtaacaggatggaattttttttttttttgagtaaataagtcaatgtattcctcaagaacaaactttacaacctacaacaatacaatttaattacaattataaatcttaagtttaactaatctttattagttctcccaacatgattattatttaaactttaaatcctattcacaacaatcttttttgtatacaattaacaatagtccaaatgattttaattttagcattccatataaggctcgatttcgcctcttccaaatagcataagtgcatatgcattgaacacacaagcatgtagacttctctcttgatcttactagttttgcaaggcctaattcaattaaaaagacctctgtattgatatactgaaatgtcccaataccagtctaagactacaacggttgtacaaaacaacacctaaaaaaaagatgatcacgattctcaattccttgaccacatatctaaaatctcactctctcgtgagtaacttgtatccaatatttcatta

SEQ ID NO: 322840 - DNA, 772 bp, Cannabis indica
atgcccgccctactagtcccactgactagtagtagctcagttagcaccaaggtgcaaggggtggtggacagctgacaccagggtacccccttaaagagcataccaaaaggacaacaatctaacttgggaatcaaaagacattcaaagagaagaacaaatttcatgcattcatggcaaaattagctaaatcaagtgaatagcgggaatagaagcgtacccataacaagaaattgttggtgaagaaggtgggaagcttggatcatcaaaacaacatgaaaatctcgggagaatgatactatgtgggtttggccctctagagagaaggaggagcttcaccaaaagttactttctagtgagagagtgaaaagtgaaaagtgaagagagttttcccccaaaaggacttaaatagtatctctgggaccactccttcacttgccacacatactcaataaagagaaatgtaaaagtagttagtttattgcaacaaatgagattaaaaagtcaagataaagtattttaaaagactaaaaatgcatcaaattctattcagcaaaggctacatcaattccaacttaacttgtaagtccttattcgtacaaacatctgcacacggactaggggcaaatgttatcctgatttttttccacctgatgtggcatgcttacatggacaatatcaacgacatgtggtgctcaaacggtggtcccgatgcttaaacgggaggacaagtaacagactagccatgtaacgccctaatgctaaggcacgctac

SEQ ID NO: 322841 - DNA, 1525 bp, Cannabis indica
aataaaatagactcgtggagtatttagaataaactacaaaaccatgttaaaaattcctttatctttcaattattgttcatgattgaatatattatttatattaatttgatatttaaagaattaactgtcaaacccacatttaatgttagcaaaattctgagttaacatatatatatatatatatcactttattttatgatcaaaatccaagttctagcagttgttgtaacttgttttttaattgcctcagagaataccacctaagaacaatatactcaaagggatcgagagctaaggatatcattgataaatgcatggcatcactcaaaataaggttcttgatacaaagaggatattcaggccaccaaactgtagtatcagtagttgaaatgacatatttagcaagagtatcaactattacattaacattgaaataattacaagagactctaatatcatcaagaattaaactcaaagaagaatctaaaattactgagttatcatcttaagaataaaacttactcgaattaaaattttgagataccaaagagcactacaaaaaaagtaacatttagtgacaactttttagtcacaatactattacgaaaactgctttcgaaaacccttgttgagggactctaaaactatttagtgatcttttattgcgcgtcactaatttcagtgaatagaaaattagtatttagtgactcttcaagttggtcactaaacccttttatattcccccgcgcttcattgtaggctttaaaaactactttaaaaaatgtcactataactatgctttttatatataaaaaacgtaatattatttttttaattcatattatatattatatttataaaataaatttaattaataatataatttaattaactatatatttatcagttataaattaaaatattttaattttggctataaatttattaataaacaaacaaatcaaaaatctatatatcaacaaataaaatgagtaaaaattaatcaaaaatatatacatcatttgtactaaaatataaacttcagaacaataaaaaaaatagacacaaacatacaatttaattcaaaagtaaaatctctaaatctatatataaaaaagaaaattacaaactaattgcaaatatcaaacctagaaaaaatttaaaccgggggtgacctctgttggtttagccgtcaaccctagaaaaaattacaaaataactacccaatatcatggacgatgttggttcagtcgtcaactccaattaattcgtccatcattcgtcgagggctaaaaatggccacaagtgactgctatagctgtcgatacctctgctctactaatcgtttggaaatctaggtgttgcgagcactgtgatgtggtccatttggataaccctcgttgatagttcggccatcgtggcctagcaacactgccccacaatggaagatggaaagggagataggagagaggttgagggattctgtaaagcccgcttagttaatttggaaattagcagttgttta

SEQ ID NO: 322842 - DNA, 820 bp, Cannabis indica
gttggcaaaaatatataatacactagtaaaaaatgaatataccacaaatataaaataatatatgcaataaattatatttttctccttcatgatatacattagcacatacaagtgatgtaccacaatttcaaatcaatatactatgccatatttttggtgtcaagttttactgaatatcgagtttcgagtatcatatttgaaacaatataccacacttaaacgaacacagaacaacaatataccataaattcaaactaatatactattcttttaagtgtttttttttccttaatataccatagcacataaaaaaagataaatcatagtgcaaaataaatatactaaaaacttaaactaatattctatttttagtatgatatagcttgtcgtgccatcatgatctgctgggcactttggaagtctcgaaacaggcttgtttgggagaagaagacttcagctccaactcaagtcattcattcagcatggactacacttgaccactggcgtactgctcaagataaaactagtttattatcattgtcactcttgcaacatgataataacattgagcgatggactaaacccgattctgacacagtcaagttaaatgttgatggagcgttatttgagagagaaagtgcctatggtttcggcattgttgctcgagattcgacgggccacattgttgatctccgagccacttatcagggaggaaactacccagctgaggtggttgaagctcttggcatcaaagaagctctaagttggttgaaggacaaaggatggaataaagttgacatggaaactgatagtatggtaa

SEQ ID NO: 322843 - DNA, 1351 bp, Cannabis indica
cctctattaatttatttattttttcctttaataaattatgaaattttattaattgcaatgaaataaaataatagcttaatttaatctggacattttctctattagagacacaactagaatttaaatttaaaaaataagtcaaataaacagtcgcttaattctcatgatacaaaaaaattaaaataaaatttgatgaaaaagattatagtatatatatcacaattaactttaagaatacctatattttgttttatttgctgctaagaagatataacagtagaaattgttgtagcagattcattcaacctcgtaccttgagtactcaattactattgtgtaaggtatgtgtaacgacactactaacaatcccttcagtcagagagaacttgatattaccaatcattaataataatttgatgatgagcaatcgaaaaacaaagaagaacccaacaatgaaacacaacaaatttacgttgtaaagacaagattaaaatatttaaaactatatcacaaagataaaactaaaatacaatcccgaccaagccacacctaagtccaatgaaagctcaggctgactatagaaaaaaaacaatcgctaataattataaatttagaaacgagaaacactaatatttttccttaacgtaagtgttgagaatcatggggttccatctaaaaataaattgtcaatgagtggattagctcatgttcttatatatgactcaattatctaccatttattccaaaccggatcagagtggacatggtcactatctgtataggtgcggatcgaataggatcacttgccgcaagggatatggctctgatatcatgttgagaatcatggggttccatctcaaaaccaattggcaatgagtggagtagcccatgtgtttatatatgactcaattctctaccatttattccatgtggaacaatgttataaggacaatatgcctctattagttactttttttttttaaggaaaatgcatctattagttacttaattacataaatttatatatatttcttaattttatatttcttttttgataataaacatatttataaaaaataaccataatatcatatagcttaaaaaaaatatacgaatatcatctatctaaaataaagagcatgcatactcttaatatataaaagatacttctaaaaatttagacgatatatatttgtaaaatttttaacaagaccaacatcactaaaaaaaacagggaaatttacatgatatattaacttttgctaattttttacaaaaatactgccaagcggtattttttacttttttactgtgttttttttataagtttcatactgcagtatactgtatt

SEQ ID NO: 322844 - DNA, 1253 bp, Cannabis indica
ctttcaagactttttcaatatgaggaaaatcgtggtcatcttcaaggtttaagagttgctcggggtgctccttcagtatcgcatttgttctttgccgacgatagccttgttcttagccatgctaataaaagatccattgatgctattaaacgctctttggatttctattgtcgtgcttcaggtcaaagattgaatgttgataaatcggttctttccttctctcctaacacaactactgcaatacaactcaacatccaacaaactttacatatgccaatcaagccttgccatgaacgctatctaggacttccttcatactttgggagagacaaaaaagttctatttggagagatcaaagaaaaattatggaaccaactttctgcatggcaggaataactattttcatttggaggtaaagaagttctactaaaagttgtagctcaatctattccaatataagcaatgagttgtttttgcctttccaagtctctaattcaccaaatggaagttatgatgaataaattttggtggggatccaactcctcatcatctgggattaattggaaaacttggaatgctctttctcattcgaaagttgaaggaggcatgggctttaagagttttgttcattttaaccaagctttattagccaaacaagcatggttaattttctccaatccctcatcactcctacaccgaatactgaaagcccgatacttcaagtataactcctttttagaggctgacttaggctcctacccatctctcacttggagaagtattgtttggggaaaagaattactttttaaaggcttgctttggaaagtgggtaatggaaatcagatcttttgtgcttcagatccatggctgcctggtattacgggtgttcatcaaactgcccaaactgcccaaactgcccaaactgcccgcaccataccacaccgcaaaaaaatgcggtttgaaattctttacagtgcggtcacggtttgaatttttcctaaaccgcgcgatgcggtttgtggttttaaattgttaacatgcggttcaaactgcaccgcaccgcacattataaaaataccaatttttatatttatttagatccaatatgtgaatgttcaactcaaagtccactaattattgtattgttgacacttaattttttttttcatatttattttcaggccttatggtattttgacaagttttgctcaaagtttgttgtattcatgatagcttaattatttagtgatagt

SEQ ID NO: 322845 - DNA, 1038 bp, Cannabis indica
ttttcctttatgcatcgattgttattgacattatttggcgaattcgcaatgataaggtatacaataattgtccagtagatgtgaagaagtgaattgactctatttgtacttcttttgtagatttacatgcttctattttcccttttcctattctgtgcttgatggaggtctagaatcctccctttaagattggattaagttgaattgcgatgttaaagtagggttagaaagtatgtgtacttcggtagtaaccaggaaccatcttggtagagtgatttgggtttaaatgtcttagttgaatattactgatgtgttatgtgaggaccttgtttctaagtttattattgtgaaaaagcaattcgagggtagttatcaatcctcttaatgggaaggaggagtctcgttaggcacttaaaaattatgtctcattttataatagtattgctcccttgtttattagccaaattattctaatcttttaagaattttttttcgcaattgatctcttagccattgccgatttgcaaaaagttttttggggagtttgtttaattttttcacgatagaaaaagaagaaccagaacatgaataagaaatttcaaaaaacaaattgaaagatataaaattggaaggagttgaaagtgagaagatgaagatgataatgattgtgggtagaaggtgagataatgtgttttcatattaatttcagctttttattaagaaagaaatagcttgaaaattgtcacagacgtgataagtctaatcaaatcaatatatattttttttttaaaaaaatgacaaatggcactgtacaaaataaaagaatttttttaaaattaaatgggtaaaaagttgtacaatattcttgtaaaaaaaataacatgtatcagtacaaatgtaaaaaaattaaaaaatacaatataatgtaaattttcaaaattttaatgttaattttaatatctttatatattaaaagtgcctatttaacgtcattttttggtttaacagaatatacttagaatattctgttaaatttaa

SEQ ID NO: 322846 - DNA, 1082 bp, Cannabis indica
tattcatttttcataattgaaaaatatcattttgtggtatttactagaaagtgtaaatataaaagttatcactatacacaattaaaaaaatttgaagtggtagttaaaaaaaaaatgaggtagtatgtcttaccaagcaaattaatattactaaagaagaaataaatgttttaaagaaaaaaaaatacaaatagatttttcatataaaataaataaaagaaagtaaatacatatcgacaaaaacacaaaaaaaagttaataataattataaattttagtttgattattttaaagaactgccatagaataatgaccaaaataaactagtttacatatatattcttggggggccataacatatatggtgtaatgtatgtctgttcctgattttaactataattaactcaaaaagaaagagaaaaaaaaaaagtttaaagtataaagttgtagtagtagtacaaaagataaattaagttattttaactaagtaaaagaataataatttttgtgatacaaatacatgttgaatagttgatattgttttgcatattgtaacgatgtcaatgtcttattatttttctattggtttgtagttatttttttatagttttcatattattaacaggtattctagtaattctacagttattttttagttgtcttagttgttttactaaaatataatatttttgtaatattaaaattttaaaataatatttttgaaaacttagtacaatataaatgtaaaaaaacaaaaagtaagacagtaaaaatgtaaatataacagcaaagatgagtattttgtaaaaacctcatttttttgtatttattcattattttttttttttgaaaaggaaaataaaatgataaaatacagctaggtatgccttgtcacaatacctttgcatcatataagaacatttttcatagagtgctacaaatatagtttagggatttttttttttcataaatatgagaaaatgtagtattgtttacatttttatggtataaaaaaataatcatagagttatgagttttttttttttttttactatttatatggattttttattttatatttt

SEQ ID NO: 322847 - DNA, 821 bp, Cannabis indica
cttatacctgtatccacgtttccagtaagggacacgtggattctaaatataagcttaaggcccatcgatgagtccaaataatataaactaggctaagcccaagatctattttgccttatgagaaaacatcaatacaactcgtccaagtgaggttcagtcaagccaagttagcatccgaaaaggtatatctccgtgtatctggaagagatctttagtgtgtatccagaagcctaatatagcctcccatttactatctcgcacaaaataaggaattattttccttaaatctcaggcagagaataatatcttgctaaaaaaggaaactatataattggaaatcaggtaattaatatgtcattaactacccatgaatatatgacacagtatgaacagctagcttcgtgataaggcttccacgtcagcaaacacaaggtgtctcatgggttgggcttcaccggataagcccgaagtcaatgtattatttgtaaactccccattagagggaaaatggtaactagtatggcctctataatactataaatactcattgaatccttcatgcaaagggttgaaaagtcttgacttactttctcaggaaaagaatagagtgttcatacttattgtaatcccaaaggcctttcttagctagcttcgtaataatattgactcgtactcgttaacaccctaaccacgtaaaaacactgagtgtcttcttcgtatatttcattcttagtagtattttcttgagctcctatatttaataattggttttttaaaaaattcgataaatattttgatgctttcattgagaactaaagaaa

SEQ ID NO: 322848 - DNA, 712 bp, Cannabis indica
aaatacattattttaatattaaaaactaagaaaaaaatttagtgtagtctatagtgtcccactatttttagtgcgacactatagattctcacatatatatgatgacatttagatattcgttgaagtaattttgtgtctaaacttcactatttttgagattttagtgtctcattggagaaaccttaagtaattacactttatttaaaatataagctatgttcaaatgtcaagtattaattaggtatgaattcttatttgacaattaaattactaattatataatttaacaatattaattatttaaaaataataataatttataaatacacttaaattctcataagggccataaaaattattaaaacttcttaattatcttcgttaacatgtttattgtgtacttaccatgttgaacaaatacatggaaccttttaattaatcattttgaatatactcaattctaattatatagtgaattttaaaatgtgccattaattttttgtatacgagaccgtataatttaattaactattttgattttctcgccaaagtagaatttttaattgattatcgatgctttttcgattatatatcaatatcatctcgataattagggtaagaatgtaggggatgacaatttttgatactttttcgatggtatatcattactatttcgactcaagataaaatatagcaaaattaatcacacaag

SEQ ID NO: 322849 - DNA, 795 bp, Cannabis indica
gaaggaagtcgcacgacctaaggccgtaaggaagaatcagtaggagccttgccggttggccatctcgggagtaggggcatgtcttttcgagagggctgtaaaaaataaaacctcagtcagaaaacttagaataaaaagatatagatcaatctaaccgagcctaatgaaaataatcacttacaaattttgtggaaggtggttgtgccgattggggagaggccagttgtccaaaagaagttatctttaaaaggtagtttgtttgtcaagtccacaataattttaggctcgccagagtgagtacgaagataataaaagcctcctaaggcattctttctcgctggaacaaccttaacggagtagaggtactcgatttccacaggtgtagggcgctcccacttcataatcttatataaaaccttcaaacttgcaaggattctgtaggagatgggatttagttgaaatggggcaagcccgaggtggcttacataatccttgaaataatcacggagggggattatggcccctgtcctgatgtgttcaagggtccaagcacctataccaatcgagccactcgtactggtctcgccattggccccttcaaatgtctcgcctgtgatacgcgcaagcgggtaacagctaaactcaccagctcgtactgacctaactcggcatactcgcctataatcgattctacatgtccttagtgaatcgcctatgtagcttgagatagttcgcaccttcgattctattaactcgacctcaaaggtgacgttaggatcctgatgagtctttgat

SEQ ID NO: 322850 - DNA, 726 bp, Cannabis indica
tttttaaagaatttcacataaaaattcttattagcaattgcaaaatccatatatcaaccacatagaaatccaaaccttaaatttaaaaaaaaattaaaaaataacataagggataatttccctttaaaaaatcctaaaaaatatattataatatttacattcccagtttgactttttaattaaagaaaataccattgaaaaaaatcctaataatttaatttgttaattgttatcaaaaaaatcctaaaattaaattatgaatatatgacaatagcacagcatatgctaatgttcactttgaggtatttgctgaataggaaaaaaaattatgaaaagtagagaaaatatagataaatagatgagagatttaaatgtctgtcctttctaaaaaaaaatatacttttatttgcgggtcttgtgatttgattcttcatttacattgaacagtttttttttttagaaaaagaggaataaaaattgtggaattatgcacctattgtttcccatttgctttttgcagatgatagttattggtactgtcaagttaccgaagatgaagctgctcaattaatgctcctacttcagagtttcgaagatgccttgggtcaaagagtaaatctgcagaagtcatcccctttctttagcttgaacactcaggggatattgttgggttttatgcgctaaataaaacttcatttcaatataacccattttattcaacatcaa

SEQ ID NO: 322851 - DNA, 1073 bp, Cannabis indica
ttgagttaaactatattatatggtagttattttgtaagatatattttaaaggacaaaattgtcattatatatttaatattaaaaaataaaataaaaataattaaaattcattacccttaatgacatttcttataaaattggtgggggaagttctccttttcttttctcctttatttaatcaatttctccatttcctaattttaataatgtaagtaaacaaacttaaggaaatgattactttaccactgattcccattattaccactgattcccattacttattagtaaacatgccattaaggctttcctattaggattttatcattttctatatgtaccctttttaatttttcgtatttcattttattttataataaattctgatagaaataaatgcctcatttaatattttaggatcccatataaactttagacaaaaataattacctccccaaattgatatttttttttcctctctaaatattttttgataaattaacaaagagtctctttaatttatttttccaataattaataacataaaataaattagttaaaaattaaaaatattaattagttaaaaaaatattcaataaaaattaatttttatataaaaaacaattaaatttataattttttcttttaaaaaaaaaatgagatttgtcgtcattgatgtgctaacggagaaaaaaaaaccatactatcaccaacgaaaaaatcattattggtgatgctgatttttaccaacgactttaaatatcgtcaataatactacttatcatcgatgaagtatcatcaacaactttttactaacgacatatcatcattgataatcattactgacaaaaaaccaactttaaccaacgaaatttgtcctcattaaagagggtattttatgtagtgtactcatatattaattgtaagatcttaattaccacttatttattagtgtagggtatgtggtaattcttccatacatctacttatcttctatatatctacagtagattcactttgaaaagaagtaaagatctacaatctttatatttttaatttcattcaatttttttttt

SEQ ID NO: 322852 - DNA, 1575 bp, Cannabis indica
tttttctacacttttttttttatgaatttgaaacaacttctattttgattgattctggtcatcttctcaggtgaagtcgctagaattaatgatggttctctttttggttgaattttcatttcggttgcattaggttgctggatagttgcacgatgattgcgcgatggttgcgtgatagttgcccagtaagcatggatcctgagttaagggtgtgtgtaagtggtatttgtgtaaaatttttttatttaacttatatatttatttatttggccagctggaagtatttctataataatattacttttttttttggttataattgaaattatcccaaaataatatctaaacaatattaaaataacaataaaaaataatatacaaataacaaaaaatcaacaacaaattaatagaagtataatataaaaatacatcaaaaactcatattttctgtaaataaaattataaaatcgtaaaaatatttaaaattctatataactgcatttttgtaaatttttttattattttgtgtgttttgtttttgttttttttttttaaaattatccctataataaatcaattataagtttataaattaaagttacaaaatatgtttaaaggtacattaaagttatttatatttctataaatactttttatcaccaaaacataaattgatatatatgaaactagattttatattatacaactctctaatttatttttggttaagaagttaatatttctgtatatgtattaagctatagtttcacattttctctaaatccaaaacattatatccctaaacctaaacaaactttagcagttctttgtatctttttgtattactcttcagaaagttatatcccaaaacttggaattattggacttcctaatccatttcaggagcccttgcagagaatcaaaattcacctgccaatttaaccaatctttcagttgtttcaagcagtcaagtgaagtctcacacttgaagaataagtgatccacaatctctctgtcattgctgcataaaatgcaatcaggagagtctatgattttgtatttgaaaagcctttcacgagtcttcaacctgttttgaacagcaagccatgtcaagaaactatgcttaggtgaatttagtctgcaccagacctcattacaccaagcaactctgtcattttcagtgccaaaccagcagtatcccacattaattttgtattcagtaacagagaacattgctggctgctgcacttgctaaattttatctttaatctccaccattttcctccaataccagttgttggttatgggagctttatactcccaccagtcatattgtttgaggtacacacaatgcacctacttaacccacaagttatcttttttattagccacaacccacatatgtttagccattgctgcaatgttccatgtagcaatattcataagtccaaggccaccagctttttttggagtacacattttctaccaggataccctaccagccctatcatcttgtccttgcctgtccatagaaaacttctacaaacagcttcaatttcttttatgacttttttt

SEQ ID NO: 322853 - DNA, 1191 bp, Cannabis indica
ttaagggcggtggttggcgaggatttcagggttattttctagtttggaaaatgaaatggatgaatgatatgagaagaagacgaagcatgaatatggatatataaatcttttgttgtcagttactaggaaataactaacgacataagggcatacgtgtcataataatcgtgtacctatgttatcagttcctaataatggaaactaaggtgcttgagtccaatccacaacttaaccgtagctatatgggatcttttaattgagaagacactctatagctacaatttttataaaataactgtctataaatgtaaattttcaatgaatgagaatattagaacactttagcttttcttttttattgattctgaaaaaattgcctctaaaaagtattcttgttgtagtgtatatattcacatttaatagggtaaatattattttggatcctgtgttttgcaaaagttaccgattggacccttgttttgttaaatgacaaaatggacactgtattttccaaaatagtaaaaatagagcttaatttttagcaacttttttcttaatataatcaatttaaaaataattcctaatacgaacagatacagaaaatgtaaataatttttggattataattaattttattttgacaaaaatcaattcagggtcctatttgtaccattttagaaaatacaaggtctattttatcatttaacaaaacagagggtctaattgataatttttacgaaataaagggtccaaaatggtatttatcccatttaatataacatatatcaacatctatatgtatatatttatatataatatcatataatctaaattaaaatatcattagttttttaaaataatataaaataatatatataatattttggaacttgttttaagaaattaatattggtttagacttttaatgttttgaaaagattattttgatatttttttgacgaaatgattagaattacttataaatttacgatgcaatgggcgctaaaatcaagattattttaaatttaatatattgttgaaagcaaaaagaatcttagtgttgggttttgtgccctaaataaaacccatttcaatataattagatttattaattaataaagaacagaaatcagattttatgttgcatggttcatataatttatttcatgattatatttaatgtataaattc

SEQ ID NO: 322854 - DNA, 1438 bp, Cannabis indica
ttgatgacaaaaaaaaaaaaaaatgctcgaaacaatttctccaaaaactaattagaaccaacccaagttgacaatatgttaacctaggcgctaggtctagttccaagccacctaaaagttctgtttggtccccataaatagttgtgtcttaacatttgatgaaaacggagaatatgcccaacagacttttcagaaaatctcctcagcattggcccaggttgataaaatgttaacattggcactaatcccttattttggctcctaggattggttgttttttccccaagagcatttatttccctatttttgatgaagacacagatgatgcacaagtcaaatttttggtcttatgcttggaagtggcctaagttgacagattgtaaaccttggcactggggtgctcaggcaccgggtgtctaggtactaaaaaatgaaagttcaccgaatctaatcctaatgcctcaaatatgttcatggtatctatagctcatgtcccaatgcaaattttgacccatttgcactaatatggtcctaaaaactgaaaccctagttggggttgttaacctaggcactaggtgaaaccctaggtgtccaggttgactttcaaggtgctggttcgtgtttcaactcccagggcatagacttggttgctttatgtctaaatggtacaaaataatagaatatagtgagatggaaatgacttattgaaatctaaacacccattcaagagtttctggagtcaacctaggcacaaggctagagacccctcccaagtcgactgctatgactcaggactactcaactctgagatgttatctttcttgccacatgtcaaaaatttatgtccatgtcaccagggaaagtttccaggttaatattttcccccatgtcaactgcacacttgtgtggagttgacttgatgatgtgaactgagcttgtttctctcaaaactaccagatgggcatcaattttggtaatcttggatttttttttattcttccaacattcccaatataattaggactttgaattcccttgttcttgtgttagggaattttcaaatattgttaactatagaaaaagaggaaaaacttatcaattttcacttatcttttatctttctctttgaaaccttaaaatttttacatgtatttctcatgaaattaggattaattggatttaaatcctactccagtttagatgtgacattcaaaatttatagaaaaaagaagaagagaaaagatttttgatctttcgcttatcatttatgtttttcttcataaactctaaatttaccttaatcttaattgcgttagaaattattgtttccttttaaatttataatcctattcctattcttataggaattttgaaattcattaagcatgaaggagaaaagaaaagattattatctttttcttatcatttatcttttcct

SEQ ID NO: 322855 - DNA, 919 bp, Cannabis indica
ctgaattctcagtatctgttacagtcaatattattaatggtgtgtaatttagtgtagatcaagtgtatcatttgaataagtataatgatatacatcatatcataggagattctcttattaagtattgttatttagtgggttaattaagttgaggatttcgaattattagatcattaaaataatgttaagtcaattcacaaatttgacactagaagagagagggacgtagtaggctcaacaaaatctttgtcgtttccataaaaacataaatggactaaacttgaaagacatgccgaaatgtcaaccatcatacacaacatctattaactacacgattaagacataaaccaaattgtttggttttgattgatctaattgacttatctaattagatatgtatatggacacaaacaaatgcataatatggagagataagaaaatctctaaacttcatttggacttttgtacctatatattatataatacagcattgagatgtttgactgtgtaaatggaatttttcttcctctcattggattattatacatcattccatttccatgtgcactccaccatccaattaatttcattgtatatataaaatttcatatttatatgtcttttttttttaaaaaaaaaaaaaaagaaaagaatttttgctttgctatgtgtttgaaagttctattgttttttttttccatgtacgtaaaaaaatacagctttattaaattaaatagcttaaacattacagatgatatatgtaagcacgggctgtctttagggttggttggccggcacggagctattgcccaaggccccctcagctcgaaaggcttcttagtttttttttcggggtaagttaaaaaataccatttttattaatcaattaatcaaatttacctctaattttatatttatt

SEQ ID NO: 322856 - DNA, 944 bp, Cannabis indica
tttatgttgtgactaaaaagtctctgaattaaaaaattttagtacacaaaaaattacaattgtttgtaactaaatatatttttagtcacaatacttattatgactaaaactaaattagtaacaacttgtatttaaaattaaaacttatattttagtcacaagtaatattttattgtgactaaaagttacatttagtcacaaaaaaatatattgtgactaaaaagttgtcacactatatgtagtaatttttttgtagtgaatataataatatactactttttttaacactattaaaaatgctcataacaagatctaaagaaaaaactaatttaaccaaacaatggcaacaaaatttttagagccaatacaatgctgaaaattaagtaccctaacaccaagtctggtcttagactagggctcactcctattaggggaccaaataaaaaaaaaagatttaataaatatacattatcttttttaatgattttaaaaatatctattgttataaaaagaatcaaaaaaaaatatatatatattttttaaggcgtaaattaactagggccaactttgtctaacactttctaattctataatagcgtaaattcttgtaatcgtactaaattcagccaaaagcaaatttatccaaggccataataactctttgacaatcattctaaacctctactataaaaaatctcagccttaaacatagttgaagaccatggaaatgttagagataaatattacatgatggaagataaataaaaatatattacaattcaattataaaataatacaaagattataaaaagttgaatattacatatttgttataacaatatatactgccaccatattctataggggtgttcatccgatccaatccgtacttttttggtcaaacacatccaatccgcactaagtgcggatttcatattttggat

SEQ ID NO: 322857 - DNA, 755 bp, Cannabis indica
tacctacagaatcgtgagcagcaagtgtagctttctttttataaaaaaggaaagttttactccgattttctccttaaaaaatctgatcagccaaactagaaaatccacattgtatcagaaaatcacaacgggataaataaaaaagaattcgataaccaaacttaccatttttacgttattttccataaatgaaaaagctacacaactgtctttctaaaaataaattaattgatataaaaattaaatacacaaaatataaaaactaatttaaataccttagctgaaattaaataataaattataaaatatttttgtctcattatattaaaaatagaattaacaaaaacaattaaaatgatatatgaaagtggtttaccaacaaaaaaaactaaatatcgtttgttggcatatataacttgattattagaaaaacacacaatgtataattatttataggaattttttttatttttacacttttaaaatatttttttttttttgttatttttacggaaattctacatagaaactcctattacaactagcgctgcaacctaaattacaacaaaaaatcgtatagaaagtaactagcgctacaataactttagaaactcaaatcgtaaatttaaaaaaaaaaattaaaaaaaaaagtatatgaggtttctctccttatttatatatatatatatatatactaggtgattctagcacgtgcattgtgcacgtgcttcgctctctttgtttcatgttattta

SEQ ID NO: 322858 - DNA, 905 bp, Cannabis indica
atatgggacaatattctccaataattacaaactatagatgcacttttttttttttgtcgtagatcattttgcataataataataaaaattaatttgtaataactctctaggacaacaaaaaaaaattgtgatcaatcatcaaaaaaggagatattaagaagtgttccataaatatattattacaaggaatagtgctacattctcctttccaagtaagattgtcatcaaacttatatatattatttttcttcacaaataagataaataatgtttattattagcttacaaagtgactgattaaaaattgttcgtttttgtatcccaaaatcctctcccttgatggaataagattcaattaaatcatgatgttgaatctgccaaccccaattaaatgtaacacctttcttatccttaaaactatagccaagccaaccataatttttttaaaggtaaagggaaatttatattaacaggtaaatctattatttaaaaaatattatttgttgagcagaaataacaaaaaaattattcattaattgccttgtgtgccaactaaatgtagaaaattattcacatttgttttttgagtaagagttttcaattaaggtacttgaaaaggtacaacactgattggagcaaatggattgatgagaaaaaggcgaagaacacttttgataaagccttattatgctgggattgtgtattgtatttggtttagggtaaatggcggcaaaacttcccaaaatttttattttagtttcacttaacccctaaaacctaaatttgagcagtaaaacccctaatactcgcgttcggttagcaatttaacattttcgtccattttaagtgttaagtgctgtgttggactattcatgtgtgcatctacgtggatacagtgtacacat

SEQ ID NO: 322859 - DNA, 753 bp, Cannabis indica
taaccttaatttaccacctgtgcctcaactttctaaaccggagtggagtgggttatttgaaagacaataaaagaactgcacatgaatgctacatcctcactttaactaaagccaaaaaaggacaatcgcacaaagatcaaaggaggacaaaattattgccaaatagggatttgcccaagacagggatgaagacatggatcctcgctttagggaactaagtacaaatattgggcatgtaaaagtattagaagaagttgaaatcgatcttgctatgctgactaggaagcttaaaataggaaatagtttactgctcaaaacaaaatttgctttgataaaaatttctaagaaaaaaccttgaaatttttcctggtcacacaaagacaaggttgggattgattcagctataatttcccatgccctcaatattgatcccaatttttatcccatacaacaaaaaagaaaatcgttggaaaaagaacacgcacatgcactaaaggaagaagtagaaaagctcagtgtaaacaattttataattgaagctttctacccaacctgggtagccaatcccgtactggttcctaagccaaacaagaaattgagggtatgcattgattttatcaacctcaataagacttgtccaaaggaatgtttctcacttccaaggatcgaccaacttgtagatgctacagcaagtcatgagatcctaagctttatgaacacctatttagggtataattagataagaatgcatcc

SEQ ID NO: 322860 - DNA, 740 bp, Cannabis indica
ttccatttttagtttattatagaaaaaattcctagttttaatccagagtggattatcagtgaaagttatatttttggtaaatttatataatgttagataatttgtggacttaataaagttctatttcctttgaagaaaaaacaaattaagaaaaggtacttatacgtacatgagatgcttcattttaagatcaacaacgtggtctttgcttttaaggccttattttccatcttttgactacttttcctgacattgacgggaaaagagaaaattgtgacacattctattctgtaacctatacctctaatctataaaagccatttttcatttctattattattattttaatgtaaatcagagaaatgtgaatggaaagtatttaaataagaccactaaattttgaaaatttgttaattgaatgattgagttagattacttttgcaatttttttttctaaaaaaatatataatgttataatttatgatttgagcatactatatatgtttattaaaaagacatattatatggggcaaaagagagatgtagaataataacactataaaaaaattttacttttagtcacgacaaaacttatgactaaaagtgaaaatattgtgactaattatcaattataattcttatattgtgactaaaatgtccgtggctaaaaatattaattacaaaaattacaatttgttgtgactcaatgtatttttagtcacaatatttgttgtgactaa

SEQ ID NO: 322861 - DNA, 1109 bp, Cannabis indica
ctagaattcaataaaatctctgtaattgagaaattatttctctaatgcctatttctgacaataagtcttattttctactgttgcacatataaacataaccagtatttaaattactaataagctactaattatctgttaattcgcatgtttaattatgcgatcattacaaatattttattgaattgtattttatacaatatttttatgtaaaattatatgtgatactgatttttataagtacctaaatatataatattttactataaatttaaaattaatataatattatataaaaatataataaataatataatacaataatacgatctaatataatatactaaaaaaactggtaataatgtacactatttttatgaaatatatttgtgaattattgtatatggtaacatttgtacaacttgttggctgtagaaaacaccatgattcccgaggatatatatataataaaagaagacattattgggtttccatgacaattgagattacaatatacatgaatattcctaagcaagttgtgttgctgtgctccctttctttttggctgctctaagggctgtatattacaacccattaggtaaataattaaggatattataataatactccaaaatttcatcaattttatttatttttgagaaaaaaaaagtattgtgaaaaggaaagggaaaaaatcaaccaaaaaagttgcaaatatcactctctacagtatgcaagtcaaataaatatcaatatatatcctgtcaatccaaaataaaagaacataaaaatatatagctttgtggtcataaacatcatttactagtttcacacttttcctcacaaaaataaagttccaaattccattttccccttcctaatttaaaatatatatatatatatatatatttatcactttatttaaaatataaaataaaaaatacaacgtgaatataaaccccaaatcaattaaatttttatttattataatacagttagaaaaataagaggacttttaataatacttttgtcttttaaattttttaattactaaaaataaaagtaaaattttaaaatatattctataactatatttattttttaattttaaa

SEQ ID NO: 322862 - DNA, 1371 bp, Cannabis indica
aaaaggggacaaattttttttggacccgtgagctaggtgggccctaggcacaggcctagcccgcctatgctcaaggccggccctgaccgaggtttataagttagcttggcttaacagctcgctaataaagaaccactggagtaatgaacatttgtgaccttattaccagcaaattcaaaatgtaaatgatgtatttatctctgtaatagttaaaggcttattatgaataaagttaattcaagtaattacaaagtttatcttttttaaaattacttgggggcatatgtatatgtgtacaatgactggaattcatctataaatatatactatattgaaaacccaataataaaaaaaatctacaaaagaaaggataattgattaaaattgtctacggacaatataaagtcgaagaattgaaaaactttttctttaaaaaagaaaaccaaatagcaattgtaagtgagatcaactcataatacaacaaaaacctatatgcaagttgaatacttaacagctcgcattgttctggcgtgtattataaacgaggcgcagatatgccttgaaaaataatacttaagctaaaaatatgaatataggattaactattcatatgagcaatcaaaagatattcaaaatagttcctgagataaattattcaaaatattttaagtttgctctaaaaaaatgtgtgtgtatagcagattatcaactgcttgcatgtaaccagggagaattagaacagctcgaataaaacatgacagattaaaaactattagtgaaggacacggtagattatttactactataacacttcaaagaaaatgacattagagatgcatttaacctaaagtatcttaagttaactcgagatataaatgtttagattgtgagataaaacgcaataaacaaatatatttagctcaaatacaagatacgaggcataaaaagtaaaaatatataaataagcaaagttggccgtccaataatgcaaaagtttttacaaaattccactaggggcaaccattgtctcggtcaaagggccacttttctaaatttaaaaagaaataaaacaataataataaccaagtctacatggtaggagacttggataatttctcctcttcttcttcttcttcagcatccaaggcttcatctttcttggtctttatgcaataggccaacatctccgcagcagcactttccaagaagcttaaattcataataagattggctagccaagctctgtagatagagcgttttgcagcattattgcacctttctttggcatctgcctcggcaccctcaagcttttttattgcttcattgagttcttcctgaagtttttggcgggcttcgcgatgatccttggct

SEQ ID NO: 322863 - DNA, 762 bp, Cannabis indica
taacatactcctatgatttggggccatttactataattttcctaaaaattattctctacctcaaacaattaattaagaacaacaatgatgaatattacattggaaaatttttattattatatgtataacatataaaaattacatgaaagatgttaattaattaaataggcatgtaatattgtgacacatcaatattcctaccctaataaagaaaaaattgcataacatagtctaaaaatgaaacatgccatctcgatctatgaacacgctatatcgttcaacaaattacggagtttgatctcgacaacgcgtgaaacacaaacaccaaaacgaaactataaatttacttctctaggattcaaaatcacaactccaatatttcttaaaaaataataaaaaaaaaaccattaataacgaacaaaaaagccttgttcacaaacaaatacaaaatacaaatcaagcattcataatcaaagtcatttctcaaacaactaacaaggtctacaaaattgattcgctactttgcaaaagagattaaagttacaattcgaaaccattctcaccaaggaaaactccattaacgaaaaaaaaagcttcgatcacaattgccacaagaacgatcaagaattcagaatcgaatttatttctcaacaattgaaaatcatttcccaacaacaaaacagtgacaaaatcattgctcgaaaaataacaacacaattgacaattcaaaaattaaccaaaaaatttctctgttctaaaaat

SEQ ID NO: 322864 - DNA, 1023 bp, Cannabis indica
aagaggtcttgttattaatcaatttatctaccttcacttaaaaataggcctttgtatccaaagtctttactagtttgtatacttggcaagtgttacttataacaaccgagttccattattacaggcaaaaagagaaattgtggaaaaagatgactgcttctggctataaagataaggttccagccaaaattcaagaagacaacgaggccaagctgaagtcccttgaacaggagttttcagctctggaattagcaagcgagcatattaaagaaacgtaaacttgtagacatggctaagaaactagctatttatttaaacacaacattatttatgattctaggtctgcaaattttgccgctacacctttttccttcccagtaggaaaggttttttttttatcttttgtattagttacattttggttccttcatataaaagttcttgatcatttttgattttatataaaagaacctttattgatactgcgtatttgtgtctgagattatctgttacttgaaattgtcaacgtgttaaacatcagatctattaattgacataaatgcttatcttttgcatgaattgtacaataatgtgaagcgctagtattctatatatttacagactttagcccatacattatatttcaatgagcaagcatcattataggttgtataatatggccaaaaaagagttactttttatttgctttcacagctttattttaattctcaatattactgttaatagtccccgtacaagagaacaaaaatagaggttgtaatagcatccttttttttgctaaaattgtataatatcatcctcgtttagtgtaatatcactagtgaaatttaatatagggttttatttattttcttttaataataagattataaaaaccgttaagtaattatagagaggttataatattgagataaagatggattgccaagattttataaaatttgtgaacaaaaaagaagcttgtttagtgacttacaaattaattttgtaagatatttattt

SEQ ID NO: 322865 - DNA, 756 bp, Cannabis indica
ttctaattgccttgttgtacccgtgcagaaatgtctcagaagatgatccaggctctgaaggagatagtgggagatagattgggcatgtctcattcggcaaagaagtccaagggtggagagactccatccaaggagaaagtgcctgttgacgtggtcattgatctttttgaggagcgacttgttgtggaccctccaaccaagaaggtctcaaagtctaaaagttcttgaggagggagtttggatgggtctgagcaagttaggattggatctgagtaggtcagggtcgggtctgagcaggtcagggccagatccgaacaggttatggccccttcaacaaccctagcgctgtgcacagaccaaggaggaggaacttgtgaaggaggtcagagaacttaaggaggagtcgaggacaagaaatcctgggtggaggagcttgagagggaactggatgtcttggagataggtggtctcgaggttttctacgatttctggaaggccaatcccaaaggaaactttgattatctcggcgattccaaatatatgtattttagttactgcatggcccaggcagccaaggaaaaccctgaggcgaccacttccactgctcctaccgactagaacactgacgttccttccgtctagaccgatgagcctctagctccttcagacctaatcgatccataccaagagcctgggactcctattgtctgaatgtcttctttttacctttcttttttatatatgtctgttcgacca

SEQ ID NO: 322866 - DNA, 481 bp, Cannabis indica
aagaaaatttaggggattaaagattttgatttcaactcactattcatatttagttgaataaagtgtagtatatataaactgatcaaaccaaccaatataaactctttcaaataataattaaaagaaagagggacagagaaatttctaatagagcattgctattagacactactagtatctaacaccttcaataggtagcgctctataattggttagcgacgctctttaaaagttattttcttaagttatatgagatacaatacttaattacacggtatgataccgaagaaagtactagacattattacagggccgactctaaaaattagtgggctataaaaaaaaatattcttgagcgcctaatgagcctatacccaaagccgaaactacaccaatagtaccatttagcatttttctttggctaattagtaatttttctccctgaactttgacatgtactaaatcgtgccctctgaacttt

SEQ ID NO: 322867 - DNA, 1228 bp, Cannabis indica
aaaaaaaaaactcaaaaaaattatacattatacataaagaccacctaattttgatatgttggattattaaataattaggatttaaatataaaattgaattattaattatgatttacacatttgtggagatttatataagtgtagtatgtattaattatgttatatatgtgagttttttgtttttcgtgttggtgttcggtggcagtggaaagcgatattagacaattagagtcacaatctcatatgatttagaattttgttgtagcgggtcatcattgttaggtattggaaatattgggaaattggcggggtttggaaaatgaccacattacccttcggggccattaaacctttgaattaggtgtaggggcaaaatagtcattttgttagaaaatacttttgtcttttatgggttattatgagattaataagctgatattaatttagattatattatagtttaggaatattagtaaaaagctagaaacaccttgatgttaccacactttatttctttctctttctttttctctctcttgaattctctaagggattagctagggttagattttctcaacttcaattgagagattattgtaggttttgagtgtcctagtgcaaggtaatcccttttagccttttctctttgatttcctatagctcaagttaagttttaatgtgtgaatatgggtaattagctactgtgttgtagatcagggcatgtttaggtattttgaggtttagttgggattgtttttcttgaattgagtgaaatttgtggttggtggaatgcttaaagcaaggttactttgtactccaatagtgttttgtatttttgggtgaattactgggttcttttacttgaattgggttcattggagtataagtaggcattctggaaatttttagagaatttggggttgaattgaggtgttgggggacctttttggtggttcccgcactgaactggaatttcggcttaggggtacctgtagcgaccggccgaccggttggtccccaggaaactccactaaaccaaaattccggttggggagccggtctaccgattaggacattttagtgaaccctagtgtaacgccctaactattaggcacactacgcaagatgttggaattattttaccaggatcttagatctactcacaagtatgtttattaacatcctaaataaaaactttctaaaacgacaattaaacacatataaagtt

SEQ ID NO: 322868 - DNA, 1661 bp, Cannabis indica
ctctctctctctctctttttttaaatctctcagttaattttgtattaaaaaatatctatatgtatttattctattaaattaaatattaaataattaacaaaaacacttcacagttcacattagttttatagcaaatttgataatttttttaaaaaacaaaatattttagtaaactttgtacatagtattttttccaattttatattttttgctttctagttaattatgatttaacattttgtgtcatatgtagtttaggctttgagtaagtatgggctaatttttattgaattatgacaagagtgctaaacatatctgcttaaccatttgagtatatatattcaaatgtattttcttttctctacattttatttgaattttagcttcagatataaagtttatttatgatgattcacatagatctatgtatattttgtcatgtcaaccttttttttttttttgggtcaatcctttattaaaaaaaattgttgcataataggtgcacgtaatttctacttttatgtaactttttttacttgattaattttattattttataatttaatttataaattcgatattattctaaaaagtagtagttactcaaaaaaaaaaaattgttctaatatataatagtctaagtatttttttcttcaaaaatttatacattgataataattaaaagtgagatacagtgatgatattgattacaaaattcataagatgaaatttttattgatttatcaattatttttttatatttttattttttaatttcgaatcttttctttattataatgtttatatagaagtgagtatttaatttattaagtaaatttattgaaagtgataactataagtaagatacaataataatatttacgttgaatataatggtgactagcagtaagatcaatgacgaaaaccaataaggccaaagggtgccacacaccccctcattttttttttaattatatgcaaaaaaattattaaaaaataaataaatattttttatatatatatttacatatattggctcttgataaattttgggctaaacggttttgaaataataaaataatttctttttatagatttatcaattattttttctctattagatctttattttttgtgacaattttttaattttgggcgctattttccttttttttttttttttggtacttttcactttatctcttaagtgtaagggtacttcattagtttctccatttaatttttcagaatattttattaaaagtttactttatttattttatctcacattttttatattacaatgtacatcatcttctttatttatctatctattttatttagattttatattttatttatatgaataaaaagttaaaaatattaaatgagaaaatagaaataatgagagagaaactattaaaatattatttaatgaataaatagtgcttctttacatttaaataagcactattcataatgtaataatttgagctattttaactcacttgatggagccttattttaacacattttctttatattaatttttagaataattacataaggcactatttttgtaaaatatttacatttttacgttcaaagaattgtttctttactatttttacggttttccaaaaaattaacacgaaaacaac

SEQ ID NO: 322869 - DNA, 600 bp, Cannabis indica
tagatattttgcatcctttcataagaatgcttagattgtaaaaagaagtttgtgcaatgaaatttttgattcaaaaaaaaaaaaaatactttaactttgacatttcaccttaaacaattgtcaatcacggaaaacttccggcagtgtctatattattaaaaatttaattacaacatttcactttttgtttatttacatctaaccttcattttttataccatgtatatataccatatataacttttctattttttttttacattattaaaatattatttctttaaatgtattattaattgaaataagagaaatgagataaaagaaaatagtaataaatgttgtaaaatattgtataatatatatttatagatggctataataatgaagaatcaatcatttaaccaaagatgaaaattatcattaatgtttaattgtattttcatttattaaattgatttagtttcttattcttttagtctcattcttgtataaaggagttcaccttaataaaaaaaaagaacttagagaaaaatctcattcattcgctcattctatttgtcttctctcttctcttatttcttactctattctatattattt

SEQ ID NO: 322870 - DNA, 864 bp, Cannabis indica
atgagcccgttgagcgaacataagtttttttcgtgcctgagataaccacagttgaaataaagtttacgtaacttaaagtaacgaaattgaatccactcctttcttccccacttaacatcaaggaagaagctagaaataatttgattgtaagtagcaattttgacttggaatttcaggtagccccttctaataatagctctttgattagatgtatcactgcctttatagttccttactttagcagctattgttggggtgttaacccaggttgaggtaacggggttgaaaatccaatgtcttggacccaaaaaatttcgtttcccatatctgcaaagtgccaatctccattcttcggccattcttgaataagtagtaattttccatttatgatccaaggacctactattcaggacctctaaacagtcttcctcctaatcaaagaagaaaccccagacccatactttcataatcttgattctctaatggccattaagtttccagatcttgtccaaagtatccttaagttcggaccttcacacaccttttccttaaaagaaaaactagcaagaactccagttttgactatctcatcattgagttcaaaatctggctcaagttctaaggtcatataatcaaaaaagcccctaacgaaggaccttcagatccctatctttgctgctgtctgtccctcattattctggctgtccacaaatccctcctctgagagctctacattaatacccatatccattttgggggttgttggaaggcattaatgttgccatttcgacggttgggtccctctccatcattggaattttttatttgagtttcacgtgcatgtcctaggttgtcccccgtaat

SEQ ID NO: 322871 - DNA, 1104 bp, Cannabis indica
gggcacaaaacccaacagttataaccctagaaatcccactaatcctcacgatggacaacctgggaaatgagggatatcctagtagatgaagatggcccccaaaatccaagaaacattggcaatagagaaaaataacctaacaatccaggaacctcctgtggaaatacaaaccttgggattgtataacttgaaaaacttagagcatctcgcatgaacgcagatgctaaacaaacacaacctagggatcaagggtttactcaacacgatgtgaggggtgtaggcagtcagcttggctcaagttaaccaccgagacattcatgaaggccaaactgaaatgatagagacaacacgtatacctacctaagtaggggatgtgtgtcaaatctattttgaagacagaggctagtgcaagaagaaccttatgaaacaggatcaagtattgatcctgacgggtcaagattaaagactcatgggcagagtaaattgaccaggacccatgtacgtgaaagacaaacactagtggggaaggtacaagttgccactatcaagatgattaagaaagcatgagtaattcataaagttatcagtctaagagttactctggaacgaggtcggttagcaattatgaacaaagaaatgaaaggcgacatgaccttgatctacggaaacacttaaatcgtagacaaccctaataagccacgagtttcatgttcatattcaaacgcacgagctcgtaggctctacggtgctatactcgcaagatgacctttaatcctatcatttggatgtctgtgtctatcatgatcgcataatcagacatttcatgcgttgaccacgtggaacacgtgaatccctaatgagtcgtcaaacacattagtcattcggaccaacccttatgtaaagaaatgatctttactagtcgcaggagaggtctacttggtcatctcatataaccggtatatgcgcgatcagtattaaatcctctcggtcctgcttattcttttgactaaatgaggtatagtatgcgactagaccctatcttggttgcatcttctcgcaagttctcttcaagcgaggttagctctactagagctattttattta

SEQ ID NO: 322872 - DNA, 1211 bp, Cannabis indica
gtattcatatgaattgaatattactataatttatatcatatcctatttatttttaaatttaataaaaataataaaaaaacttaaaatcaattataagacataaaatcatagaggtacttaggagtgacaataataaccgcaaaacaaagaaatgctaatatatatgatcaatttaccatatttacgaattgtgatcatctcctaccgaaaacaataaaaaggaaaatctcatcctattagttcatacgtactaaatatatgtaacttaattactattacaccaattataaaactacgtcaattcatacgtccaaattatctcttattacatcgattagctggctaatagtttaattgaaattactttatttagaataactgtattttgaatttttaaaaaaaaatgaaagaaaatatagctacaatatatatatatatatatatattttttgacatgaaatatagctacaatataatatagaatgaataaggcaaaatgcttagggcaaaatcgtgaaaacaaaatacgtctttggaggaagtcggaaagggaaggtgaagatgagctgtaaagtttcaaattagtaaaaaaaaaaaagagtaaaaattcacatagattaaaaaaaaattgaaaataaatagtattattataatttaaggttatggatggagtggggagagaggcggtgcatgcgactactcgaccacgttatattgttatctttgtgtctctttgtcatccatgttgtggataagatatagcataaaaaaaaagaagattagatcctatttattattaccatcaattattattcttattatttctttcacgttacgccctttcttattcttaccaaacctttcctctttattttttatcattactttctagaatgtaacttttttgctttcttacaacaacaacaaaaaaaaattatatccatttgattgtataggtaattaagtaattgtgtcggttcatctttatggctttcagcgcttcaacatatttacgagagcaccatcaatttagggtagttatttcatacattatttttttgatttttttttttaaattatagtttgaattttaaagtaattttcccagtaatttctatgtaagttgctatacgatttttttgttgcgatttaagttgctccgctagtaacaataaaaaattttatgtataatttcgtaaaaaaaaaaaaaa

SEQ ID NO: 322873 - DNA, 1240 bp, Cannabis indica
tgtatagtaatgtaatatattacctataattttgccaagaagaatgaatgaagaaaatagagatagaagagtatagctatatagtatatatagtatagtactagtctctgatagaaatatatatatatatatatatatatatatttatatatagagaattagacctaaaagaatatattatctgcttggtattatatataatgtgttgaaaagaaaaattgtttccatctgtcaaatattaattatcaaatattttgttaattagttaagaaaattaaatttggtaattaaaatatttgataaattaaaatcaaactataattagaatatttatataattataattatatattttataaatcaaattaaatataatatcttaccgtatataaatattctaaaaatataatattccaaatttaaaaaaattacaaattaaatttgattttagatgaataatatatagaatttaaaaatattactatattagaatagatcaattagaaatgattgacacaaattaacaaaagcataatcacgaaaaacatgataacaaataatcacaaaattaattagtttttcttttaccatttgcattttataaaattacattttttttagtgagtttgatttgtgtcgaaattattttattttttaaatatttgtttggttaattaccacataaaacaaaatttgtgtaaacccaaaaactcttagatgccatgaaagagaattaattatcatacataatgatagccaataaatattataataatagtagtaataataaaaagtaaaactcctcaaactaattcacacctttataatctatatgatgatttaaagtaaaaaaaacaactgaaattaaaattttactcataattacaaaatgaaacttcttttctaagggtatgacccgagaaaaatataatataaataattgtattctaaatcttacaaaacaaaggttatatatatgtaacacacaaatataatcacttcaaaatatgttaaaaatacaaaatttcaaaacatcattattttaaaatctccttataaattctaacaaaactaatttagaaaaaaaaaataagtaataaatagtgtaaaaatatcttttttttttgttaaattttaaaatgtaagatatttattacctacacagtgtcatatagtttagtcacataaaagttacttataactaaaacataatattttgatataagttatcactaattta

SEQ ID NO: 322874 - DNA, 900 bp, Cannabis indica
atatatatatatatattcactacgtacacttttgaaataaaccgattatataattaggacttgttatgtatctttgcacaattaatgatattttattttttattatattatagggcattgctattagcggcgaaaaatatgattcatcagttgatttataaaaaataagaaaggtttttacaagaaaagcaattaatagctgcaaattggcgggccaattccaggaaggaaacatagttcaccgctaatattagttgatttaaacaaataataagaaaggttattagcggcggccctgtcactattgtccgctgctaataacggtgaaaaaattcctgctcatttcatttgaatttttattagcgacggacgtcatcaccgagctcttctattaatattaaaaaaattgaaaaaaatggtaacattattagcggcagcattagcgacagactccaacgctaatcatgttatataagtaaaaatatcttaatttctctattttcttcgtctctttccctctttcttgtaaaaaatatacatttactaattttaataaaaagattataaataacgcttccatttttttttttcacatttaaaatatattttacagaattaaaattaaaaaattaataatcttacccaaaaaattatttatcacacactcttagataagattaattagattaaattatccaatcttgggacatgatcaaacactagataaacaattatttagcataatccaatcttggtggccgacagactaggggactaatttggatgattttgtccagactaattagtaatttttcgctctgaattttgacatgtactaaatcgtgtcttctgaacttttttgccgttaaaaatttcccccaactattgaaattgttaaat

SEQ ID NO: 322875 - DNA, 607 bp, Cannabis indica
agcaaaggaccattgacataatagaatcccttcataaatttagcatctaaagagttaggatgattaaataactgagttgcctgtttagcaagtaaagactgaaaatacaaagcattaaaccacaaatatatcagcttgatagaacatcgaaaatacaaactgtcactaaaccaatacaatcttaaataatgtcacattcatatttgagcaataagctcctgaaaagcctgaagtagtatatccttagtgatctagatccaaaaatatagtttttcctcttattattttgaagtttatttcaataacaaataactcagagtcaatgtgcctttgaccttgtagagctcatattgttactaatatacaacatgattgatttattgtcacaacatatatatttaatagtttttaatgctattcctaattttacagccatgtgacaaaaattttactaaaatctttataagatcataatcataaatcttaatgatctctataattttttgatctatgataagagaactgttgggttgtctgcactaaataaaacttattttaatattatcagatttactaattaataaaagatcaaaagtcattcgatgtt

SEQ ID NO: 322876 - DNA, 1191 bp, Cannabis indica
aaaaaaaaaaaaaaactgtttttgaagtgtaaaaaatgatcaaggcccaaatatatattcaaaatcaaaagcaacttatttttagttttttttaataaattttctagcttttttcttttaaatgttaaaaaaaaaaaaatcaccccatataatatttttagttttttttttattcttatggcttgaattgcttcggtagttgttatgtagaattatattacaatttaagttgttccgtttgtagggatttgattttgaccgaatcaaaaagtaaaaaaatataataaaataaaataaatatatataatataactaacttttccccattagcactctctttcactttttccctttctttttctctctctcttcaaagcttcaaagaagccataaccaccatcaccatcactctccggcaacccatcttcggccccacgcgccagaccatagaaaccccaagtgtcagcgaccttaactcccaagcagtgttgctcctttcgccgccgttagtctgggattgcaagtcaaagtttggcagttcaaactttgaatggattccagccacctctggtgtccgtttgacgagccatcttcaccactagactcagcttgtcgaggagaacaacctactctaagctatcttcccaactcgctactttttccaatgacgtttttatagctatgcccctttccagcgatattgtgaaccgttttgacaaactaatggcatggttgtgatctactcgtggaggtggtcgttttaatatacactactcttattttcggtgacattttcggtacactaatttttaccgccaccagtagttaatgtgcactgcttaggtgagagtaatatctaagattagactaaaccattagagctcggaacttgagagcttaagatcgtcttttggacaaagtttaacgacttgggagaggtagggactcaacttaatttttatgtgttgaattagacatattccaaattttatgatttacaaatcgtttgaaataaaattgaaaacttaatctgtatatttttctggactgttctgggacactgagtgccaaatatattcttgtacaaatatttatacaggttataatttttgggtttattcaaaatacaaccgatatgctgtcaaattttctagaaaataaaaaagaatatgttcttttgttattcttatt

SEQ ID NO: 322877 - DNA, 658 bp, Cannabis indica
gaatttcgaatttagggactattatgccagttttttgagcttggagactttatatgcaccaaattgattttttaaaaaaatttatgtcgcaatttaatattaacacgtgcctggtatttttggaagcaagtaacggatctgttaaaatgaggatcgacgaacttataaaaatcttaagtttatattacctttaaagttaggactattaccaattaaaataaattaattttaaagactatttatttagaatatttaacaatcaaaaaaatatattttccaaaatagaaatttgaaacagacactttaagataaaaaatatcattatcattgtaaagaaatgattacttgtttctttgtatatatatatgtagctagaaaataaaagcaaaacaatacaaaaaacttcaataatgaaacttgtgaagaattgaccatcaattatatatattattagtacacgacgaaaaaacagaaattataaaagataaaaaatacaaagttttgatcataaaatccaaaagaaaatacattggtatagtcatattcagggccggccctaggcataggcggggtaggcccgtgcttagggcccacactttccggggcccaaaataaaaaataaaaaaaattattaggcttttatttaagtaaaatttaa

SEQ ID NO: 322878 - DNA, 575 bp, Cannabis indica
aaaaatacattcaaaaatacctatatattttgtaagaatttgaaaatacttaaaattgagatatttagggttgttttaaaccctttattattcaaaagttatgtattattatcatttagtgagaacccaatagaattcaagtgtgtattgaaggtaagccctaggtattcttccttttttttttcttaagcttgaataggttttgggttcgtttaagcatgaaatttggaagtttaggttctgttcgaacctaggttgttcatggttggtattctaagttcaattgaagtggtttaaggtttacttgggtagtttttgttggcttttaaaggccttgagcaggtttgagttcaagaactcaaacttggctcaacaatgttattgttcaaattcttgagttttaactacatttattgcatgaattgtgtttattggcatgttgtgttcattgacatgttgttaggtgttatggagagttgcatgtaatttagggtaaaattgagcttggaattaggtgttttaggatttctttagaaaaacggtgcaccgttttttcaaaaatggtgaactatttt

SEQ ID NO: 322879 - DNA, 1145 bp, Cannabis indica
cctgcatgaatgatcatttcccattagaactttacctccatcaactgatctataatcaaaaaatgactctcgactcagacacatgtgataagtgcatccaaagttaagaatccactccatgcttgttaggtgtattttatgccattttttagagtccaatttagggtgtattttagtcttttagcttttatttgttttttaggagaaatggttggggatcttcaattttgataattttggtattctgcaagcttttttgagcaaaaatgagaaaatctaataaagaaaggaaacttcttttagtttggagtaatttcttattgactaaaatgggtcaaaaatggcatttttagctcttaaattcgtggctagagtcaagagtgatcactttctaaaactaaattgaaaaattctaagttttggatgttgaaaatgttctgtttgtgactgaaaataaagtctgaaactttaagctaatttttgactatgatcaattcacttctagaaaaaactttatgaataaaagttttatatctctctttcatctttccaaaacatcttgaatcgtccaattctaagttatatcgaaagagtcatggctaaaatactattagtcattgtagaaagcaactaaaaacaagaaactttaaaaatcagcgtagaaaagaggaaaactcttgtaaggccacgaccttgctgttttttttttttggtaaacttttatgtttggctctatttaaagagggctgaggcaaagctttgataccattcaaaagtttagtgaatactgagcatagaaggaaggttaggaacagaagacaccattggaggactccattagtgttctatctcctctatttttatctcttatgttttaattaaatttctattattttagaatatattttcgtagctaatttcttttaagaattattttgtgaaccacttgagtttattttatagattaatgtgattgttaaattttttcttcttctctttattcagtttcatacaatatgttttaattttgcaattattgactgatgaactttaaatgttatttatgaattcaaatcaaaattaaaaaaaatgagatttgaatatgctttgactgatatggatacaaactgacttaggacaaaagt

SEQ ID NO: 322880 - DNA, 528 bp, Cannabis indica
ccttctggatgggataaataatcacagaaaaatgagattagctagattagttatccagacttctaacatgcccaaacactggattggacaaattagcctgtctaatccaatccagtcctgcataccaaacggaccttaaaggatattgattattaagcatcgcacccaagctacctagcagcacctgtgtcaaacttttatttggtgacgaggttagcaattttttataatttttatttaaaaaaataaatgagattaaatattaaattatactaataataatattattagagattataaatactttttaatatttctcaacttttattattaagcatttttatagggtattaaagtgtctagtattctcctaagtgttatattattattaataccattaagtatttaatcatatataaattacgctaattaggatttttgccctttgaactttgacatgtaccaaatcatacccctaaactttttaggtcgttaaaaataccctcagaactattgagattgttggat

SEQ ID NO: 322881 - DNA, 1309 bp, Cannabis indica
atcaaaataaggagacctaaaaatttgagttaacagaacatttccctcataagtcagtttctcatgatcggcactgtacttgttgtgtacttccttctagttgtcactagcgtagactaaacaatcatacatatgtcttatctcttcattgaatgaagcaatcaagactaacatgtcgggatttatactctaaaagtaagtaattaatggataatatattagagaatataggaaacgcaactacaagataaatgtcaaggatcatcagacactaatcatctccactcgaggtatgatattgtccgctttgggcctaatccctcacggttttgttcttgggcaccttcccaaaaggtctcataccaatggagatatgtccatccttatgtacccatgatccttcccatttctagctaatgtgggattttatttgcattctcgaaaatcctcccctcaaaaacagactacatagccttccctcaaacaatctttcatcttgaaccgctcctatcaccaaatggaaaatgccacttgaccttcatttttaggaagactttcgacgtaagacaccaaacaagatctccaatccgtccactctttacaaactagtgtactttccttcaatgcattggaatgcacaccttacatggagccccaccactacctcgagagtttcttactcattacgaggctaactctggatagaatcagagtacactacctaactgaacacatccacagacatcatgagagtacaccgaggcacatcacctttagaggattcagaggatttactcgcatggatattgttgggatctagctctgataccaatttggcaaggatcatcggacaccaatcatctccattctaagaatgatattgttcaatttaggcctaagctctcacagttttatccttagacaccttcctaaaaggcctcataccaatggagatatatccatccttgtatacccatgatccttcctatttatagcaatgtgggactttataattattaaatatttgaaaatttcttattcatatggagaaggtataatcttgtaaggacatacaagagaattaagactatatgatatgaacaaaacaagtcgggaatgtattaaagtaatgggaatttttaatatagaagtgctaagtatggtttactatacactatacttctagtgtgtgtataattttaattcgaaacacatatgtggatagacatatagtaaaggtgtcatgtatatttcgattatgcatgactggactgataataataaacatctttcattaacgtgtcattta

SEQ ID NO: 322882 - DNA, 1056 bp, Cannabis indica
cgaatggtcctccccctaactttaagagatttttcaagtttgaggaaggttggacgagggatgtcagaagcaaacttgttgtggccaatgcttggggctcgatagatcattcttgggtgccggcccgagttttcaaaaaactgggagctacaaggattgctcttcttaagtggaatagaacacagtatggtaggactgattgggttattaaagacctggagcagaaactggataacattcagaggcttcctgcgggggcccgggactggagtaaggaatgtgaaattaggaaatccctgaacgaaatgttgacctggaaagcgctttattggaagcaacgagcaaggaactcttggctcaaggatggcgatagatgctccaaattctatttcctctcggcagcaataagaggaaggagaaatgccattgaaagtatattgaacaagaataatgtctggcttactgacagagacgctattggccttgaatttactgactattttaagggtatctttgagggctccgcgcttgaccagagcctggattgtagggatttgtttcaagagaggatttcccaagaagggcaggagggcacccttctctacccatcccgggatgaaataaaaagtactttgtttgctatgaatagtcataaggctcctggaccggatggcatgtcagtcctttttttcaaacattattgcgaatccgtgggagaggatttctgtgatgcagtttctgatttcttccggaatggccatatgcacaaaggaataaatactacgaatgtagttcttatccctaaggtctagaacccgaaaagaccgagtcaattcagacccatatcactctgtaatgttatttacaaggttatatcttaaataattgcaaatagaatcaaaccggttctgccttctataatatgccctattcaagctgcatttgtcccgggtaggagtattcaacaagagattatccactcattcaaacgaaagaaaggcagagaggttattttgcaattaagattgatcttgttaaagcttatgacaggcttag

SEQ ID NO: 322883 - DNA, 535 bp, Cannabis indica
atgaaattactatgttaaccctgtgttattaatcattcggagaaactaatagcataagcaaaagaatattagcgattcctcctcttcagagtttctctctcggcaaaggggtctctccacctatttatttgatgccgttgaggagattattgttagaggattggcattctggagtcattgttaattacattacgatttgaatcgcctccttcctctctcttgttttatcggctatctaccatctcccctattcaagaattcatgcacacaatttaaatttgagagttttttggtaaactgaggcaatggtatagaaaataaacttgaggacaagatattaccaaaggagaagactattgtattgaccttcttgattgatgccaaagtttttctcattctcacatcaacgtcttcttctgtgaggggttcaaaagtagttgtctgagagtgtggttcagttcgactcaacgatgtgctcagtttcagattttttgttttcatttattaatttactattattagtttaattccaatt

SEQ ID NO: 322884 - DNA, 1185 bp, Cannabis indica
aactctaatacactctcctcaagtttgcgtagaaagggttacgaacgacctttaagagaccacatgaccgaacatgacatttgaaagaatctcacaagaccaaatatcgagaaatttgtaggtgtacacgtcgagaaatttgtagattttgaaacatgtaaaagaactcccaattctgaaaattggcacacatcgaccgaaaggtctcaaatggaagttaaaggggagacatcaaaaatatcttttttggaatgcagcactttagctgcaatgtggatcacaaacagttttttggaccggtgacactttgggttcatagcggattacaatgactctgataccatgttagaatttaggataagatgaatgatattctatctcaaaactaattgacaatgagaagagtagcccatttataatcttatatatgacaatttatttccacacataataaatatgagactaactctaataggtagtttagaaagtttgtaacttaattttcctaagaagtcaacatctctttatcatacactacatagaaaaattgataattctactatttctttaattttctcgcatctcttaaaagcttcctagtgtatcataaatctagttcttagatcttagtctttctaactaatattctagaagagagacaacaaagacctttttctactaacaataaaataaagataatatctttatcttcatattaattgttacactaacctttttctactaacaataaaataaagatagtatctttatcttcatattaattgttacactagtatttttatttttattattattattattatagtataattcctaatttattatttctttatttttctctaagtaaatggtttttccttcattgtatataatgaatcatgtatgatgtttccatatttcaaaaattcaaatagtttgggccatacatatctaatcaaattagaagataacataatataaacaaaatgaataaataccaaagtcattgagtttggaaaaggctacaaataaatgaatatggatatgattttgtcccgtgatgtactgtggtacattagatgtgtctcagggtacattaaatgtgtgtcagggtacgtttctactttttaaccctaattactcctagatcaatctcagccatcagattaaataactccctcatct

SEQ ID NO: 322885 - DNA, 591 bp, Cannabis indica
aatagctataaataatttcgtaattaaacataaacaactgctaatttctaaattaactaagcgggctttacaacttgggtttaattttcttttatagaaactcatgacctaaagggaaagttgtagttgtagatagtaattatgcaactaacatggacaccaaaaggtctcttacaggtgtgatgttcactatacttggaggagttatatgttgtaaatcaaaccttcaaaaggttgttgccttctcaaccattgaagttgaatttatggccgcaacagaatcttttaaggaagctttatggctcaaaggtatcactcaagaacttggtttgaactgtgagaatctaattgtttattgtgataaccaaagtgccctacacctaatcaagaacccgatgctacatgaaaggtccaaacacatagatgtaaagtaccactttataagggacgtagtagcacaaggaaagatacaagccaagaggattagtacagatcagaactccactgacatgctaacaaagagtgtagcacacaaaatttaaagccctgcctaaatctactcaacatcaacaaatgctaatctattttagc

SEQ ID NO: 322886 - DNA, 1583 bp, Cannabis indica
gaactttttacaaaacagagggtccaaaaatggtatttaccctaaaaaaaatccttagaacttaacatttttaaatggtgtgacattaatgttatctggttgcagactgcagggtttggaagtactaaatctggatctgagtcctaaaaaatatacacaaaagagaaatgctaaaaggtactagtagtgcctagcaccttcttacgtgtcaatatcactattggtctaactaagtatcgaatcgcatataatttaatataatagcttttagagagtatcattagtcaatgacaacgcgacatatcaagaaggtactaagtaatagcaatgctccatacaaaaacatgaaaattaaattgttatcagtcacttaaatgaatcgaccaaactcatattgacacgcggggtcgtctcatcacatcatcaaacataactgtccaaatgtgactatgtactatgtttagacattaaagcatacaatacatttttttaatataatttacaataataattacttttcaacaaaaaaaaaataaaaataaaataatacgtcggctaaatttgactcatttaactttttttaattttttgatttgattttatttatcttttatatttttaagtaaatttttagttactgttaataaaaactatttaattacttttttatataaaaaaaattcatttttatcacaacaacatttaacactattactggtcggaatctccgtcggtaataatcataaaaatcgccagtatttattattatcggcggatattgctgataattattcgccgataataattagtcgctgatactattactagcgaaaaatcacatttccatcactaataatattactgctggtggatatcgccggtattaaatgctgtcctttccacgctaacagaacaataccaacggacccagacacgctaacagaacaatatcaacggacccagtaaaaaattcagtcggtattaacatgttttatataaaaaaaaaaaactaaaatcattttcagtttttaatattaatataacaacaataattaaaatactatatataataattatttttttaaaaaaatattattaaccaatttcattatttaaatttaagaaaccaaatattaataataattatttgtccataacaatatacactactattagcttaaataaaattataacattatcttgaaaaaactttaaaacaaataatttttcttaattaaaaaattgaattatcattgttcagatcactatattctataaaatcatatgcattggagtcaagtcttgaactgtcacgattattacgagattgaggcgccggcggggtagggtaataaggttgtctagattgttgtgttggtaagatctcaacaaattgtcgagtctgcgaacgaaccaaagtactctgctgttgttgctgactctgcagtgaaaatctgatcatacacataggctgttgtgaagatcctcccatttgactatactctatacattggtttgttacaacaacaatgatccaaattgaccatacacaagttgttgtgatgatccaaattgaccataca

SEQ ID NO: 322887 - DNA, 2903 bp, Cannabis indica
gccaacaagcttccttttcaatagaagcgcctcctacgcttacgatgtcacttcggcaaacttggcctagtgtaccaagcatacaacatggactatccaatcaatcttgcactataccaacgagtttcaaatattctattgcgcctctctacaactgcacatggtagttgtctttctagcatccttccacacacctacatcctctctaggataggccaaccagattcccctcccactaagatgaacctggctctgataccaactgtcacgggctcaccttttcaggtagcagaacacccgtgtggcaccttgacttctctaagccaaggtcagccttccaaccatctgagtaacaatgggctcattttttgcgcgatcgtgtgcctcgtccacacttccgtctctcgaacaactcccgccgagtcatgctcgtaagcatctatgagtgcatccatgcatcgaggcactctagccaagatactcgcactatccataagttcccactatgataaggcaaatcccaacaccaacgctcaccttgtcaatcttgacaaagggagcatgtgtggcaagatggcaacacccaatcaacgtgccaacgcttctatcatgccccattcgataatgttagaacagtctccctcgtcgcccaaggactcctatacatccatggaccaatcctcaaggcgccatgcctccacgcatatcaggccctcgagacaagcttccaaacatacattagacctctgtcccttcccaacacggtgcattcgtcccttgtgcatatgcaaactagcccacgaatgactacccgtgtcatctcgtgtcgagaatcgtggccaaggcgcaccacaacccctcttagaggtttaggccacatcccgtgcaagtagcatattggcaagccaatggaaacatactcgttaacctctgacagcttcttagacgcactattggatcgacccgataatgtccatcagtactcatactcatggagacatatgagtcccatcgtggtcctcctatgcctaccctactatcccaactgactagtagtagctcacttagcactaaggtgccagggggaggtggagagctgacaccagggtccccccttaaagagcattctaagcttttagccttctaccagaaacatacatgattttggctctgtagacatatggccaaaccatacaccagatcatatagttgctttaatccgattgcatcattgtattcgtagacccaaagaaatggcgaataccaagtctcgtcccaattcggacaatattgaagatatttacaaaaatgccactgccatacaaactaagcatcagcatgccgccaacatgcgcctcaacatgcgccaccacttgaccaccacttggccaacttatgggcatcacctaacttgtaacgtgccatcttggcacgcacgttacactgtgcaaagtagaaaaaaaaaatagaatgacgtcaaaaatgacatatgcaagtatagtacaataggactagtcctaccctggttatcaaattctgctctagcaaattcacaaattaaacggctggtgtcgtcatcccctaaaaatctatccgagggaaggaaccaactcgaagacatataggaaaaatgatccaaaggaatttttacagtaggaccggagcccatccgtgaccaacccaaataatgacttagattggagaaataaaaacttttggaattatcacccaccgagaatgcgggatccaaaaactatataatttgttatcaaattccactggcctaaagtcagcatagtcttggatagaaggaacgaagtgaatgttcaaaggagacttaaaggctccagaggtacttgcatcgagggctctagagttaggaaccaggaatggaaagttgggccagaccagagttttctcttttcctgcctcctcccgggatacccttctggttgtagcttgcacccgagtgaatgcgagctcttgcttccttttgtatttatacctgttgtatctatccttcgcagacaatataatatcttcccttagcgccttctccatcccaagtttccaaacgttagggctgaggactttggacaagttgaagtcatcaacagattgactctctgaaatcaacttggccctcctatagttaactgtcgtgacctggtctcccacgttcaagtcttccctattgtagccagcaaacacttgcgcatggttcgggaaaagttgggtgggggcggtacgatgcatgggaggaatcctaccgagtctgttagtaggtccgagcgctcaaaggctttgaacccggaggagaagaaaaatctatgacgatacttctttacattcttttggaagttaaagggtaccagagtctcattggctagatgggcctgaagtttattaaaaccatctttcaatttgtccccctccttggggactgaaagactgggtggagccaaattcctagctacataaaaaataaacaagcttaataataggtgatacagaatcaattggtaaggtgaaagtccaacaaatacgacgaagtcaatgaaatagttgtggtttggcatctcctcatccctgggaaggcaatgataaaccacataaccagaaggtttgatcctcgcaacagtgataatcttctccaattgatcggtgaaggtcaacgttgagtgcagttcgtcagcctcccaaccgttggaacgacatccaaacttcttatagataatagggcccttcatgacctcctccaaggtggccaatttctttggccccttcttcgaagattttgctccggcggcagcgcgggtccacatggaatacacttggtggaggttgaggatttcttggtcaaacctaaagaaaccgtgcgtgtgaaggtcacgaaggacttc

SEQ ID NO: 322888 - DNA, 1410 bp, Cannabis indica
aaaaattaagtcaaaatccagaattttatttgggttaagggttaaatttcacaaagcttcaagtgagcaaggtgaaagtcgaacaatgcgagattaaaggcagaatgtcgtaaacgacgaagttgtacaaaatattacagagaaaactacaaagtttcgaacctagattttctgtctatcttctacaacaagtcaagaataatggcattttctacgatggaaacccataaattaaacatacaaagtaaaagaggaaagtaaaagaggagaagattgaaaacttactcactgtttgaagcctaaacgtagtccagacaaagctgctcaaatgtctctgatagaaatctcacaacagatttgaagaaaattcctttttgctctgagtgtgtttggtggagaaagtgatgaaagtaaaattttgaaggagttccagctttatttataggcatgctggtgaaaagaggtaatcatttcaaatatcctcaaacgcttcgattttcccccaaaagtaaatattgggaaattaaaaaccatcaagtgcaaccgtcaaaatgtgccaagaggaccgtgtttcgatgcattaattaagtcataacattaattagccgaaacccaaagagacgcctggtcagactcacatcgaatcacgaacagacgcacccaatatgtgtcacccattcaaaggtaaaggcaactcggatgaagtctccacgcaactttaaaagtcctgtgcagacttgggcgacaaatgttattccaatttttgtactctgatgtggcatcacaaactagtcacacgtggaatcgactccccatatctgcctgaaggatatattccgaacagaacaccacatatacctgcacggacgaagtcctcctagccgagcagtggacaatccaaacaacatatcaacacttagcaacttcagcacttgcatcgtgaatcataaaagcaattcctataaatctaggatcatatcacagagatatggtaagctgtccaaatccctcaatcagtgtattttatatatttaatgtgtaatcttaccaattatagacattgtaaccaaaagggaaaccttccctcaagtacataaatagtgatctattctcactgggcaaggggtcgcaaaattatctattaaagtatactcagagatatcattgtatgaactttaagagaagaatctttgtattctttgttcttaagtcaatacaatctaaggggagtaagctattaccgaactgctcgggctgaaccactttaaatgctctgtgttctttatttatcttatcgtattatatctataccatatcacttattgcttactattaagactcattgtcgttggcaaaaactgcggtcaatatgtatttattaaatatttgattagtattattaatgtttat

SEQ ID NO: 322889 - DNA, 2348 bp, Cannabis indica
taataacagtgaaatttctcaaaaaaaaaaaaaataaatttcctccccaaaaaactattttcttcttcccacgatttatcttctggcgaattgaacctccacttctctatcatctcaattgcatccccacgatttttacaattttttgtttcattctataaatttctatataatgactattactcattttcttcctctcctgctattaaacacctactattaagaaactcattgcccaaagttctaaagctctagtaatgggagtaaagtagattgatgttgatgattctgatgaaaattttcttgaactgtcaacaaaacacgaaaactgtcctatgagacaattgccatttgtaacctaaatatctcatatttgtttttcaaaatataaagtacagctttttgaccaagtttaccaactaaccactgtgaagtttagttgcactttgtgagtgtaacccgttatttcaaatttcatgacttaacttagtgtgccgccttaagagtcggtatcacactaaaatatatcacttcctcttatctaagtcaagagatcaatcttgagaaatattatagacaaatacatttcttatggggacgaaatctaagctgtctcgaggcccgtctatactccctcagtgttgaccaataatggaggtcataggttacattgacatgtactccttctcccgctcactattttaggttaatgtgtttattttattaattctcagaattaatttatattaaccactttaataattacgattaatttatttataattaaagtctcaaattataaataaatttcctgtcataatcattaaatctgaattaactctttaattcataatttaaaattagttttaaattaataggtcaattttgaattatcaagttaattctaaatttatcttagccagtttacatactttgggatttaaaaacaataaacacatagaacaattctaagatatcatgtttctactaagagatggatgataatataattgtgtagaatttctatgtatgacatgttattcactaatgcatgagtatattattaatcaactattaatgaatatttatttaaaagcaatagataaatagtaatgatgaactgggtaataattatgtatttctgattttacaattttgaaataaattacaaaactaatctccattgtagcaagagaatttttataattttgtaggatcgtcataagcctcaaaattaattaaactaattttaattaattattcttaaattaacttttaatttaatctacctcttaaacccttttaattaattaaaataattctaattaatttattcttaaataaacccttttgtttaagataatataattatcattttagtcttgtcttaaaataatattatttattatttattttgggtcaagaaagcttttgtcttaatttgattttaggtttgagtttaattcaaaaataaattttaaaaaataaatatcccacaaaactttgatatttttgacttaattattaaaaagtaataaaattattttattatttattattaaataattaagatagttattaatggaatttaaaattcaaataaataattaattatgatatttatttagaattcagttaaatagtttccattttattggttaatatgttgaaaaataattacagattatgagcattcaaacgcatcaaccaacaataatctataatcattaaatctaaaatctagtatttatgtagagcatcaaagacaaaatacacatactttccatactatccatgagagtcattatccttcaggctcgtttggtacgccatataagggtcgtattgtattaaataataaataacactatgtttggattaagcaatgtattgtattaattattacgaccaattttttttaatacaatgtatgttttattatttaatacataataaatggtctgtattagcttgtattataatatttacaaagaatttgaggtcaacaccaatcttcgacccagacccggacctcagcccggaccctggactcggaccccaaaccccagacccggacccggaccctgacccaaacccagacctcgacccggaccccgaatcctggacccggacccagaccccagacccggacccgaatccgaacccagatctcggacccggtccccgccccggaccccggatccggacctggacccgtagttggtgttgggattgagtgtattaaaaatatattataactttacacaatcaattaatacaagtcaataccaaacattgtattgtattaaataatactaatacaatacaatacaatacaatacgatata

SEQ ID NO: 322890 - DNA, 580 bp, Cannabis indica
aattcttcttgggctttaaaaaactgacacaaagccttcttttcttcaaaattcttttctgccccgtttccactagaagtagtaataatatccttatcacacttaactaaaggtgccttattgatctccagcccattagagatttgtggctcatgagcattaaccggcccagaggagattatgtaatccggcccaagagacaataacttaccattaccattagtatcactcggcccaccaataagtaacccacccgattctctcaccacgttctcaacaaggtcagaacaataaatggccttttcatttaatttagaaggcccatacccactaggcctcatggcgtctggcccactagaagagaccggcccaccttcttggagagatgcatgaagtgaacgacccaaagaatcaatatttccacctttattagctttattcaaatgaggctcatcattcaaggaactgtaaagcccgcttagttaatttggaaattagcagttatttatgttaatcaggaaattatttatagccatttaaataatttattatggaattcagatatgcataattatgtcat

SEQ ID NO: 322891 - DNA, 1082 bp, Cannabis indica
gatgtattggatttttagacgccccatccaccatccgatctaatccaattggatatttaaaagtaacatccaatctgatccgatcataattggatatccaatgtttggcggtcggttgtaattcgatcggtcagttctcattggattggatcaatttatgcacacccctaatctctggacaaataataagctatctggagtgacaatcatatgcagtacaagcttacatgaaaacaccttctggattctacaaagtcttctcccaagactttttcggatccacaccaagcttcccgtatgtacttttctgattcatagcttcctttcctgatgaaagaacttgtaaccatattgacaaatctttcattttagaaagaatagaaaatactattaaaattgttgaatttattgctaaaattatgcacatttaaatatatgttggaggttggacaccatccatctccactcttgtatgatattatccgctttgggcctaaacctttcccaaagagtacatcgaggctcattatctttgtttgacattctgaggattggattcattaaatggctaacattgtgacccgactctaattctatttattgaacaccatacaccatccatctccactcttggcatgatattgtccgctttagacctaaaccctcatagttttgttcttgggcatctttccaaaatgtctcataccaatacagatagtgtctatctttatatatctacaatttttcccatatctagctaatgtgagattttagttgcacacccaaccaaatatgtagacatacaaattataataatcttcacaatacaataatatattttatattatatcactgattaatcagtataaaaaattagaaatttgaatgaataataaatattgtctaatatcgcgcaaagtatgaattaattctttagtgttacaatacgatgtaatatgatgagcatgacgttagttttttaatataatccttatatttttggggaaaaaaaagaaaaattccaaaaagggtaaaatattacaatattactatgggccagcccaatcaacatttatacagcc

SEQ ID NO: 322892 - DNA, 1075 bp, Cannabis indica
attatgactaggtacaagatccttatgttacgaccagctacaaaatttttgtattacgatcacgaacaagatcccttgtatttacagctaggtacaagatccttgtattacgaccaggtacaagatcattgtattacgaccaactacaagattcttgtattacgataaactacaagattcatgtattacgaccaactacaagattcttgttgcgagatattgaatgtttgtcaaaataacattctaacaacactaaaatatctcagtttataaatcttgcgatccttatttagatgaggttgtattacaggttgagtcatgagtttatttaacttgtctgacgatatacaattgaacttgtttattaaatagtcaaaaataggtataaaaatatgtgtttgtgtaaaactatcgggtaaagtattagctattatttgaaacagctatatgttccttacgatcattaaaaatagtcgcctattcttgcatgcttagactgtcaatttataaccgttgataatatgtattagcgtccgtttgtaactgacacttatttcatcttgttttacctcggtagcataggcatcggttttataaattgatgataatgctatattcgatcgttttaaatagatgccaaaactattttgtttcttagtagtataatttggcatattaaccaataacatgacaattgtgtgtaattcaaaataaaataaaaaatttaaagtagaaatatattttgattttaaaaagaaattaatagttttctttactacttctatttatataaatgagttataatacctttactagataaaacaaaggtatactttttatttgatagtaggtatgttggtatactattacttttatttaataagggtagttaattaagatcgtttataaaaattttaaaacatcttaatggttttttttaaagtaaatataaaactttattaatttattaagggatattggcggctaaatcacctgaactttacggtttgtaacacttaccacaaaaaccaaatttttggcggctaaactacctaaaccctggttccgttttgct

SEQ ID NO: 322893 - DNA, 2103 bp, Cannabis indica
gttccgcaaaaataaggtgggacccactagaaatcatcgtaggggtttctgtcaagtttcagagtgaaaggatgggacaattgaccttcccaaggtcactccttttttattatttttttattttaaatttaattattattattattttttaagaaagttttttatttatttattattggtttagttattacatgagacagagtagaggtgggcccactctatttccataaatgacctatttcactttttatttcttttatttattttttactttttactttttactctctgcaacctatagtaacgtacacatagtataattgattttgataagactatctatttaaagtcttcttttttttaggaagaaatatatatatattggtttgacttttattctttttctttgacctacttaattgttaggatgtgtttggttgaaaatgagagttaattaaagagtgaattgtttcttaatatttaaattaattatcagttatatataattatttaaatttaattttttattataataatatttaaattatatttttaaaatttttgttaagtgttaagatattatccacgagtcactttattattagtttatttaaataaaaataaaaaatttaataacttgtactaatttaagactgtcaggtagcaggagtttcagaaatataacttaagtattattatagttaaaaattaaacttaaatatttatctataaatagaaattaaatttatatatttatgttgtaaattaatcttaaataaatataaagagtttgatgagatatattatattaccaattataaaatatatttttaatatatttgagggtaattattatcaaaaatatctaaccacttttaaattaccaaatagtaggcattaatacctactattttgtaatagagtactctatgataagatgaaagtaattaaaaatatgattagttgaattaatttaaacaatatagcaaataaaatttgatagaataattattttggcaaatttataatagagtatatttacaaaaataaaataaataattggtaaaatttgagtacttttgttaatagaggattagtatagtattcatatatacacatttgttaaataaaaatatataattatttatcccaaggcttctaataataactttatagcaaataataaaatattttaaaagaattaggcatgtggcattggtcttggtaattataagtattgtttttatatataattatatttaaattaagaataaaataaaaataaataaagaatataccagaagttgacattcttaatttgtacattatccaataaataaacaattaaacttatagtaccttaatattagattatttggccttaattccaatgtacctatgtttttatttgtttaatattaatatgctttgtcaaccatatgccataaactcttttttcatggttttgtgaaatataattttttttattattaaatctttttatttacttctattctttatagtctatagtttatggttaaataataaatagtggtatttatataattacccctataatataaattttttcaagagaagttttatttgcaacacaaaagggtataatgatgaaggagtattttctaaatattacttttgtagttttataagtttgtttaagtaaattaattttaggattaatactattttgggttaaaattggtaattttataaaaaatgatgtttattctaaatatatacatattaaaaacaggaatttaattagtaaattttgcgaaatagaacgttttaaataatatttttattttacaatttatttatttatggaacaaaataagttaattaaaaatctctgaaaaaaagagaatttattcaattgactattattgtttcatttccaatatgtattacaacaaataaatagagagtaaaaaaactcttttttggtagaaaaactacaaagaaagggactcatttttcattattcattattcaaaaaatagaaaaaaatatatatacattatatacacacatttctctctcttctctttatgtatatatatgagagagagagggagagag

SEQ ID NO: 322894 - DNA, 638 bp, Cannabis indica
aaaaaaaaaaagttgatatttctattagagaaatgcatattttgtcagaaaaaatttcttcatatctttacctatgtttgcatcaatttatagtgtttggtttataattatttttttttttttgatgtttgaccgcttgtattttgaaaattaggcactttggggcttgagatgatagataaagttttcacataaacaatgtgacttggtgtgaaaaaataggtttattggggtcaaaacttgccaataatggcctgcagagtcttacaatttctttgggtgtttaatttgcatttggttttgtggaatcacttagcttgcctctgacaaatgtttattatttgctatattattatgctaattatgatttttgtccttaaattttgacatatatcaaattatgttccttgaacttttaaagtcgttaaaaatgtccccagaactattgagattgttggatttaaggacttttgtctaatttcattcaattttactatttcagtggttgtttatgtactaaaccatgctccccaaactttgatatctaccaaatcatacccctcgaactttgacatgtactaaattatggcccctgaactttcatccatgttagactttttaactaaaattagaaaaaa

SEQ ID NO: 322895 - DNA, 796 bp, Cannabis indica
ttttctgcagcaggagataggcagttttgacaaagaagagctcagtacggtctcccgaccacgaccaaaagtcagaatcagcatttggagacaatgggagaccgagaattaaactagcatcccgattattgaacaaatcattgacgacattagaatcccaactacgagtatccacagaaaagagagaattcacattattctccaagagagctggatgtgttgaagtaacaagcctgttgtcagtatcaggcagccatggagttgaaaaaattctagttgtttcaccatctccaataatacgaacagccccttgtccaaccaccttttgagcagcccagatactacgccagacaaagctgggattattttccaattcagctaagaggtaatcgctgttagggaaatatttagctctaaaaatttgtcccaccaaagagtctggtttacacaagagtctccaatcttgtttagcaagcatagcaatattaaaatcatgaagatgtcagaatcccataccaccttccagttttggagttgccattctttcccaagacatccatataataccacgacccttgcttgaattagttttcaaccaaaaacttgccataagcttctcaatatcctcacaaatgccaagcggaattaaaaagacactcatagcataggttggaaatgattggatcacagtcttgagaagaatttccttggcaggtcgagataaaaatttaccatcccaactattgatgtgagacatgaccttattctttaagaagccgagaatagagttcttgtt

SEQ ID NO: 322896 - DNA, 597 bp, Cannabis indica
gttttgaaagagggttatttaactagatatccctacttttagagcataaaccctaacaaacactagcaagtgtcccaagcactctactgtatacatacacagagttcacaaactgttctttctctctttttttcttatctgttctctctctactctctcactctaacaatctcaattctgatacaaatgtatgggagaacaagtatttacagccaacatggcctgagagaaccaagtaacaaacttaacagaataacagaaaaataactaaagaacctaactaactaactaccaagaatataatacatgatcttggatgaacacgtgggactagttctagttagagataatccaacactctccttggccaatttgaacttgatcatgaagttttcacctttaagggcatttttaacttgtacacactttactacgatagatctttattgtgtattttgtttatctacatcagttatagaacttttaacatatgcaaacttatcaaatacatttatggcagggaaatttgaattaatatacttacattaccctatcatttttcccctaaatgcaaagttattaaaattggtcatatat

SEQ ID NO: 322897 - DNA, 1747 bp, Cannabis indica
tttatttaggacataaaattccaacatatggccacctagtcaacggtgtcgtgccacaaatatcttcccttcaaagagtcagagaagagagatatgaataaattatgtcgctatcacaacaattacggtcatgaaaaaaatgagtgtaatcagttgtgagatgagacataattcctaatcagacaaaagcatgctgctctttagccgtatgtacgacccgaagctccagctgggggtaatgcacctttccagcctactcttgttgtaggcaggcttgagattgtgattggaggtccacacctagttgggaattcaagaaaggccttagaaagatatgcgaggcctttgagacatgatccaaaagcaaaagtattagaggttgcagaacgtcctccgaaatctcaacactacaagtgtgatccaatcacatttggagactctgactcgtatcatgtcagctacccttataatgatcccttagttgttgaggtgcaaatagccaacatgatggtagaaagggtgatgatcgatgaaggagcatcctcgaacatcttatttaaacaaaccttgatatggatgggtttgtcacctaaagacttagagacatgcgaacaactaatgtatggcttcagcagagcatgcatagctccatttggtaagatcaaactatcgctcacagctggaactaccccaaggcagaccaccatcatggccacgctcatagtggtggatgtgaagtctccgtacaacgtgatgcttagaaggcaagtcttgtacgaccttcgagctatctcgtcaatataccatttgtctgtcaaatttccaacgatggttggtattgattgtctccttggcaatcaagggactgctcggtagtgttataatgcttcgttaactctcgccaagaagaccccctttgcttctttagccccaagggggaatgatcaaggcctctcccacgaaagcgggagagacaatgaaggaatctgggggtgaaaccacagagaagacggaaacaacacctaaagccacttgaaggtgcgccaagatggggatgacattgacccttattttttggaaatcgacttaagagttggtctgatcgaagaactcgaggaaattcccctcaacacgatgaacccaaccaaggttgtcaagattggaacaaacctggtagaggctttgagcaagattctcatggcttgactaaggagaaatcaagacatttttgcttggtcaaatgaggacatgattgggattgaccccgaggtcatctgtcatgccctaaacatagatagagagaacttcaaacctgtgcaataaaaatgcaggctctttgataaagagcgctctaaagctctcaaagaagaagttgaaagcctacaggagaacaacttcatcagggaagctttctactcggttagggtatccaaccctgttctggtgcctaaactgaatgggaagtggaggaattacgtcaacttcactgaactaaacaaagcattccctaaagattttttcctctaccatgaatagatcaactggtggatgctacgaccaaccataaactcctcacattcatggatgcctattttgggtacaatcaaatcaacatggatgcaccagacgaagagcatactagctttcgaatagacatcgatctttattgctacaaagtaatgcccttttgactcaacaatgcaggtgctacgtatcagagactagtcaaccgtatgtttcatgactt

SEQ ID NO: 322898 - DNA, 691 bp, Cannabis indica
ggagaattgctcaaactaaccgacaaaggtgccaaatgttcattccaaaagatttgtttttgtaattttcctcaaggaataagttgataaataataaaagaataattaattaattagaacatgccttccatgtgctaattaatcaaagatctttatttctagttctaccaaccaaaactcatacaatttttcccctactactacatacccttttcctatttattttattgttttatgttagacattatttatcttttacattggtcatcattatatacttatgatacttcacttttttaatgaatgtgggactttagttgtacacccaacaatttttgcctcctctcaaacaatttctcatatgttcactctccagcaaatagtgttttcactccaatgcgttggagcaccactttctcaagagtttttgctctttcttaggctaacttctctatacaaaacacaccacctatctaattgagcacattcacaaatcttatcgtgagattatttaggctcatctccttttgtttaacattatgagaataattcattcacatgactaactttttgggatccgactttgataccgtcaggacgttggacatcatctatcactacattggtacgatattgtacgcttcaggcctaagctccatacaaatttatttttgggcaccttcctaaaaga

SEQ ID NO: 322899 - DNA, 567 bp, Cannabis indica
tatatatatatatatgttaaaagattacttattttcaatcaactgttatcagattatataatcatcacatttaatttttatttcatatcactagacctataatatattgagcacttcacaaataaaaatgattaaatgacccatttaatttatggattttttttaaaaattccctattgtagaattcttgtaaattcatatatttgaagatttgtctcgaaccagggttttagtcccatcaatctggtaaagattataaggagacacatgcatagaatcttattatttatttactaatttgttgacttttggaaagaaactcttaaaaaagtatgaaaaagtgggacatatattgacaataaaagtaagtttttgaattgcatttggaagcaaaataatcaacaatcttgtcaaagaaatacatggggccataaataaattttggacatatatattgtctaggaaataaatacatggcgccataaattttattttggacgtatataaaaagcgtaaaattactccaaacaataatagaactaaattaaatatacactaaaaattaac

SEQ ID NO: 322900 - DNA, 1478 bp, Cannabis indica
aaaaaaaagtaataagcaatagtaccgtaactatacataaccaataatagtacacgttagaatttgtatatccctctactaagaattagaagtcattatagatagactctaaaccttacacagttacactactagtactatagctagtactgccatttaaacatgatatagtaaacttttgtctcatatgcatgtgactgagtgactcttaacccgtttacatagaacgctttcaaactttgtattttacttcactttaattttgtcttctaattactttctatcgcaactgtgatccacaccagtaaaattttgtggccattgcgcatgtaagaattggaaattttgtgacacaagttacacattttgcttttatttttttggggggtcactactctactccctcggggtctgatcttgatgccctgttttagcttcattaatgaacaagtggccactttattaatcctcatggggaatgcatttactaactaagctcgaggccaagaatattcgcactcttttcttgaaatataacctagctagagctggctcatatacaaatatagcactacatttaaaaggcctctaaatatatataaatatatattgccaaatcattaaaaacatagagagtaaattttatttttgaactttataagattattgttacgcgcattatttagttatattttatgtttttatttttgttcactgtatttttaaaattttataaattaaacaaatttttttaaaaacaatatttaaagttttaaaaatttgatgaaaattaatgtaaaattaaacaaacacgcaatattaaaaataataattgttatctcaattttcgtcctcctgacgtggtagtgcttacatagacaaaacaagtgtcacgtggcagtatagcttaccaataagaaggccacgtgagcacctaagcacgcggagaccccgacacttaaacaggcatcaagcgatagactagcttccacacagaagctggtcggccaccccttgtcagctctatggtcggtcagccttaggactgaatcatggtcgaccatcctgctccctgcaggagtctggccggccaagagaaacgctgtacgattttctctgcacttctacacgtggactacatcatatgggctacgaattgggccttaaaagcataataaaatagttgaataatatatatgctcaagggcattgtggtcttttgtaattaattaattaactatgcaaatatcctaggcttttaacggtcaattgaagttttaggcttcctatataaggccttaactctaacctagaaaaccttatgtaaagcccgcttagttaatttggaaattagcagctgtttatgtttaattacgaaattatttatagctatttaaataatttattactgttatttatggaattcagtagttgcatattttgcatttccggtgtccggtattttggaactcggcgtt

SEQ ID NO: 322901 - DNA, 552 bp, Cannabis indica
ttattacaagtttacttttcttccatttgtaattaaagtttaatttctattctaattttgttagtaatctcgtttaggggattaggatttcttaagtatcttgggtaacgtgcctaatagttagggcgttacaagcctggtctaatagttagttagtgaagtttccatcaacatgccatttccatgttgattctttaggctcttacttctactctttctctcgcttcttctctggctcttactcttctcctaaatctcaagagattttgagagataggcttgtatatttagccacaatgtctgcaagggcttgaccttttatggccactttcagttgatatgtgatctaaaattggtcgagcttgatggcccacttgagtagtcaaccagatgcttcaagctttgcaaaacttgttgcaatggctggtcggtgtacacccttatttggtgggcttagaagtacaaccttagatgtcttaatgctaagcgtaagctgtatgttagcttctccatgagtgggtatcgactttcagcatcaaccaatcttttgtt

SEQ ID NO: 322902 - DNA, 837 bp, Cannabis indica
aaaattcggaataacttacaataaagaaaatagtgtccaaacaatcaatttcacatataaaaaagtcttgcatacaacaaactgtttgaaccatgtttttgaagttgttaaatttttctgaattttttaaaattttgcaaaatgacttaaataattacaacgtacacaaacattaaaaaaatttgacaaaaagattctttgagataccgaaacagaaaggagtgcattgatgcaccccttttaagatggtgcattgtagaattttttattattatagggtgcttctacaatgaacctcattaaaagtgtattgatgccactctaactatcttgccatttattaaaaaattttagtccaattttttttttatagtcgtgtataccacaactttagaagatgcatcgatacactattttttgagggatgcattataaaagtaccataatttatagtattatttagagtatttgcttttacacacaattatcgaacatcaccacaacataaaatggttggcgattttctattataattattaatgtgaaactcgataagtaattatgtcaataataatatttatagatacgtatttagagaattgttaaaggacacctatagtgttcgacgagtacgacttgttttactttaataaatattataaaaaattattgatcacttataaagcgacactttatggtagtggtagatatataccatagcaatacagatattatttgggtttgggtatggacagagacagtggcaaaaccaggcaacacactaaggatgagtcaaataaagtgtatttccacttaatttttgtttttttttagttt

SEQ ID NO: 322903 - DNA, 2242 bp, Cannabis indica
gaagttgtcaggtgggcaacaggatcatgtaccatcatatgtgcgacatgagagtttttcaatccttagagaaaaactatagaatttacaaaaatatcaggatggaatagttatgtctcttcgtttgagtcatatcccggtagttttcccatatctccatcctagtacttcttgaacttatcttcaattgaattacccgcaattgtactggatccacaagttgttggtcatcatttcgatttagttgattacgtaaatctggtgcattacagtttaaatgctcacataggtcagactgcctttagtttaaccgctcgtggagattaggatcgcgacatctttggtcataattactcatggatctagtccttgagtaactttcagattgataacaatgggagtttctcatactttcttgatcactataataacgtcacgatccaccttcgtctcgtgtttgcctatgagctctggttgacctactgtgcctgcggatccttgatcttgatccacctggacatgtgattgaaccagtgtcatgtgactcttcttgcattagccttcttctgaagagatttgacacatgacccctactcaagtacgtgtgtgtactttctatgtcgttgtgagtaggcctttgtggatgccttggaggtcgacctgtcccaagttgatatcgagcatttcttccatcatgttgtggaattttctggtttcctgattgcgtcttcctaacattttcattcatccgagatgattccgatatatcaggttgttcattcccttgctatgcaaatccatgggaagttcctggaatatcatgtcgatgctcttgatttcgtgtatttccagtatttggtggattttctctatccattgggatatcccttgaattcccaggttgttcgtcctaagtatttatggggttccctgaatcttttcttgtctcctgatcctagaacctcggggccttccccatggtcaccttgcagatggatcaggttgagtttgaggagtcgctccctatgtagccctagttgtcgctgcttcccattctagctcgacatacctccgatttgattgagctaggcattgtcgaagttgcctattttctagttccacaagtgggacatatctggttagatcataagcgtctttgctttgctcttctggtggaatctgttcaccagttgagttgaaatctccatcgttccttctagaatggggagtttcagttgcattggttctttgtgatccctgaggtttctttccaaggtgacgggttgtctcctctggctaattttcttcattatgctgagtatcatctgccataaatacagattttgagttgtgtctctaaggaggatatttttgagttttataaaggttctcaatgaaaataccaaactgttaacgcaaatttttgttaacaaaaatattagcctttttataataaatgaactacataattaattatagcaataaataagcaacagaaagtttttaacatggttttgaagttaattcttcatagtccacgagtccatcttattagaaaaagtatttggaatacagaatacaacaatatcagggataattatatcttgcttttctctctctagattttttcatcccaattaccctgggttctatccctaattatagttgtgtagggtaattattcccttgggatctattcattcataactgctcatgaaacgtggatattccccacgtttcactattgtgcatatgggataatcttaaataattgttcaactgccattttgtctttatccatagacagttatgctgactatatcgggtgactctcgctaagtatacatcatccttctttatcatttttgtaggaaaaatgctaagaataaagatacaacacttatcgcagttctctttttgctatttcgaaaggtattagcgaggtaattatttcaacatataaagatcgagatggacgaatattgttgttattctttgaatatactcacgagtatgtgagtcaattaggtgcaagctctttactcacgagcatgtgggtcaattagctgcaagcactttactcacgagtatgtgagttaatgaactgcaagctcttattcacgagtatgtgggtcaatgagttgcaagctctttgtttactcatcttgaacaacattaattatgtattatgttcttcccgagatggacttgttgtctcaccaatcttactcgttaatagtta

SEQ ID NO: 322904 - DNA, 1091 bp, Cannabis indica
atcataattgattctaagttctaaccattaacatgataagtgacacactcaaaaaatatatatataaaaaactctctttgtgattagggtttcttctgcaattgggtgacgacaatggaatcatgccttctgaaatctctgcctagctagggctttgttggctcatctttgggcttggccttggccgagtagattggtaggggctattaggcaatatattctcggatcgtcctgtttatccttctaacacggtaggctcttttttccatttgcttgtccgcgctacttcaaaaacgaattttagaagcagtgttggagaaattcgcaattgttggggttgcaaggattgctaaatgggattaacaactacaaccataagggaccctatggcagcaattattatgtaaggcccttatggctcatgtacaacttcaatattttttttgtaatagccaattcttttatttaaaagttgattttttttcatatattattaagtataaattctatgaaataatcataagtaaaaattacattaaaaaattaaataaatacacatttacattactctaagtaaatatattacactaatattctaaattactctaagtgtctaagggctcattcggtacgacgtattgtattatattgtattgtattggattgcattgttttagtattatttaatacaatactatgtttggtattgacttgtattaatatattatgtaaagttataatatattttcaatacactcgaccccaacaccaactacgagtcgggttcgggtccgtgtctaggattgtgtcctaggtcccgggtcgcggatctgggatccatgtctcgagtcctgagtccgggtctcaaatctaagtctgggtccgggttcgagtctcaggtccgggtctggatctcgggtcccaagtccgggatccaagtttaggttcgggtccgggtctcgggtctaggtcgtaggttcgagtttgagtttgagttcgggtctcgagtctcgggtctaagtctaggtctgggtcccgagtcctgagtttgggtccgaaacctaggtctgagtccaggtccggggtccgaa

SEQ ID NO: 322905 - DNA, 887 bp, Cannabis indica
atctgctcaaaccgtttttatctgccttacttgtttctcctttttaaaatgagaaaatcttatactaacatctcttttgcttctatttttacaattatttttgcaggatacatcttgtacacctgaaatttccataaaactaaattcctggcaccctaaatataatacatcatagcattagcgactacaacatagaattcccttcgaaatttcaaataatggatcttcttgatccacttgacatcatgacatgcattcctactatttaaaatagtcggttaaagttttgttgtcgagtcttataaccgatgcctatgtcattgacgtaaaattgggtggaataggcacagttcaaaaactggctaatatttttctcgactgttgagaatagtgatacaccagctgggaagtgacggctatacatttggcgtcggttctaaactgtccgctataaggagcctgtggtatagtttctctaaatgaaaaggtttttgtattcgttatttcttgatagttgttactggtctcgaaaggagtcttgtggaatgatagtcgagtcccgaagggtcttcctagatgtctatcatgttcacttcgggtccagtcttcaggatacctagtccctcccttgaaagggagttccatctggctagttatccctcttagaatgacaatttcagatagtcaaattcaacctgccttcatcttatctagaagcgtcttcagcaagggtccgtggtccttgagcccgaaagctccttcatgaccccagaggccctggtgcttatcctgacatggagactttgctcaaatgaggagttagctaagttagttgtttctaactcacttcacaacctcgtttcttgcagccactgactttaggatct

SEQ ID NO: 322906 - DNA, 598 bp, Cannabis indica
ctctctcttctctctctctctctcagtctcctctctcggtttccctgttagttcgtcgctgttactagcaagtctcccacaaccacgagacgagggccatttttggcttcaatgaccgcgaaaacttgatgaagaaccagatctcccctctcctaagtttttcatctcctgtctctcttcgttcaccgatagccaggcctagtcctcccaaatctgatcgagcaacaagccaagagctgaaggaggaggaaaaagaagaagaagaagatatgggttcgcattttttcgaactacaagcccatatttgttttttttttaaatactaccattgttaaataaggtttgttattatttttctctgccatttctggagtttcttcggctttctatggaggtggtttggacacggatgaaatgcagttttgaattttcgggttttaatgtaaagaccgcttaatttaaatttagaaattaacagataattagggtttaattacgaaaattatttattgatatttaaataattatttatgatgatctatttgaattcagaatgcattttgtatgtcatatatagaaatttcatatttatgcatgt

SEQ ID NO: 322907 - DNA, 1000 bp, Cannabis indica
ataaaaattagtactttatgtaattattgcttacaaataatacattactttggacttatcaagtgaagcccagcccttgagttagagactgtatgctgacttggcatgttgatcacggtcacaactgttgttcccgtgtcttattattgtgggtaattgattatatattaattacttgatcttcaattatgttgtttcctattttagattgatattattctttgtctaagaattgaagaaagtaatttccttattctacacgaaataataaataggaaactccaactggcttccaagtacatgctgaaaggttcttccaactagacagaattaggattcttccagatacggactagccttggcagaaacacatttgagcgcgaagtgtaattgccttcccggaaggacaagctggtgttgggttcgaccaaatcaaaacttggatgtaagacccaggacaaagataaagatctagagatataccaacttagagaagaaatgtagaataactatggtgaaagatagaagtgtatatttctctaggtcaagtgctacagtgattttcctgttgggcttttatgccataaataaaacccaatttcattataatcttattttctttcaataaagatcagaaatcataccatgacctagtcatatgctttgttcacatgttttatacatgatgatatgtttaatatataagttctattaaatcctgaacatataattattcacaattacagtgatgtcatcacagtggaaagtaattgtgattatatgcttcaaattgtttagtctcacgatttatcagtgcactagatttatactgacataataataagtgaggtagtttacttacactaatatgtggaacttcctttatatggcattagaaaagtatactagtatcggatgtatcggctatacatcagacttgaccgatattgataatagaaaagatatcataaacttactgctatatcttttctaagtcaat

SEQ ID NO: 322908 - DNA, 545 bp, Cannabis indica
tatatatatatataaagaaactgaaggtaatgattttatgacatccaactcaaaaggatgaaaatgaccagacagacagtagacacggttacataaattagtactgtctttgaccattctaagcaaataaataataaaaagaggtgagtattattaaagagaaatgttaaaaagtattattgggtgtttaacagtgcaattaattattaagttaaatataatttaatgtaatttttaaggaatatcgttaattattcataaggcactatctctaaaaggtgttgggcactactagtacctagtagcaatactatgtatcaaactaaaaggtaaataacaacataagtatttaaagttttaaatttgtaagtgacataaacttaatatttattttagtgacataaatactcaatgtttgtaatttcgtcaatacaaattatgttagtatcttacacatgacacatacaaagcccaaattttagattattggatctaggtacaaaaatatgtagtatcagttatttctaaatgttcttttaacaaat

SEQ ID NO: 322909 - DNA, 1517 bp, Cannabis indica
tatatatattatatcctaaacatcttccattttgacctttgagagtttgaaggaagaggtacgggtattagtctctctaagagactcaatcagtaagcaacttgttttatattttttttttattaattctttatttttttttcttcttttctctaatattatgctttccatttgtttcattattgctggtaaataagaggtataaagcaaaattcaaatcttttttcctctgccagcatgagatgcttgctttttattgtttgtatcaagattttaaatttagaacgattttaagtgatgatagcagttaattgtgaacacatttatgattctacagtttaacacattgttctatattgtataaccctttgaaaattttagatgttgagctttggttccatggctttaaatgatttatgatgatcacacacttacttattctatttagatgtgatatactggtacatcatattactaaactgttcatagattgaattgctctcttttaaaatgtatttgttatgtatatctttgtttcaatatttttaatttaaaattcagtgagtacttattattattattattattagtgaaagaaggcttgcattggtttattttaagaacaatgagtttgtaagtgtcattgccattgccaagtcttgatattttaaaacaataattagcataattttctaattatgctattccttgatgccaaatttgaagcttggtataatactcaactgaattttgtcaatttgtccaagtgaacaaggtaaatttgaggaatatttcctagtttaaagatttcaatgctaggtttttgttttttttacatttgagaattagtgttctgtagtttgagttatttatttatttatttttttaattcaatcttttggctatgagttagtaaatttggaaaatattacaacttggttggcgccctttcggttaaaacgtctcgtttttttctctctagtcaagaataaatatatagtatcacattgagttatacacatgatatgccacacatataactcaaataatagcttagatagatttgttttgccttccattagattgcagagcattactataaattataataacaagttcacactaatatacccgcgttataatacatttacttaccaatgtaattagattatataatttacatcggtagatagctgttgctggcttagctatgtttatatggtttgagtttttagtttctttcttgatacatatgcatgacaatattctctctttcaaacaatttgttttaattttagttatggcactatattgtatgtatagtgcaactcttttgaagcttttagctacttcatatttgtcatttaaaatgggtttatgatgtaggatcattaaatttgatattttttttctttacttttagtttatcatgtataatttatgatttgtggatctatctaaaatttttctcaatttctctttccctaacatttttttattattatatatatctcttt

SEQ ID NO: 322910 - DNA, 1136 bp, Cannabis indica
atttatttgtattaataaattgtgtagtaaaattataatattatatgattgatattttattgaccttaattagtctgggcttgatcttgaatttagtggtcataagaataaaaaaagagttcttatttagaatgaaatatggtatttttatatatatataaaaaaaattattttcaaaagacaatttctttttatgctaggtgagccttaagcacatgtttaacctacttatgtcgaagttcagacttgaatttagccaggaccttggccctagataccatccttggctagtagtaccctaatcttggacccagacctataggccttgacactggaacacccagtcctaaactcggactcggactccagccctgaaccaacccaaaccagcttcttcccaaacctctcacaccagaccctgaccctcgagatccccaatccctaacctgggccagccccaaccccgactttgaacaccaacatggacctcgacccttggcaaaatctctgagactagaccctaaccccgcaatccctgacccactcaactaaccccaaacttggacccgaacactaactcaaaccctaaatctcaaccctaaccttaaactggacttaatttgaccctgatcacgaccctaacctgggtctttgactttagcattcgtattgtattaaattttatcatcttaataagtacataattctatctaaacgcatctttatttactataattaaccttttatacggcatgccaaacttaaacttcataatgttagatttatgtaaacgtcgagttagggttggccttgagtaataatggactcaaataatttcttatgtgtgtgttttatttaaagtaataggatgcgagtattattgagtctttgtttacaaaaattttcaaaaatattattttcttaatataaaaaaatataaattaaatattattacattgaacttcaatatttatcttcaataactaattaaattgaaatatttatattttaaattattataaaatgtaacatataataggttgattggaaaagtatataaaaagtgatataatatgtatctttatatattaaaagtgcctatctgacggcatttcttggtttaacattcttggttt

SEQ ID NO: 322911 - DNA, 426 bp, Cannabis indica
cgtactgagtcggctactgggttgcttagcaggctatgtttaggttcagtacatgaatgaggcacaacatggtaggcttaagggttacattagtggcctctcaccctatataccttgtagcccgaagactagtcgctggtattggctaagagtgtgggggttcacatctatggtcaatcaataggttcgctttgaccttcttttccatccaatccatcgaggaccagatatttgcaaacctgggttttgaacagatatctaataaccttttcttttgataaactagaacaaatacaaatgccttgcgtctaaaaacctcatcaactcctttcttctagtgatctgcttaaactcactctttaggatccttgtttacaaaatagtttaaaaattatcgaccaaccaagtaagtgttggaaattattt

SEQ ID NO: 322912 - DNA, 805 bp, Cannabis indica
caaacgcttacagtttttatattttcttatataccactgacatttgcaaaaacacgatttttcagatagaaaatagaatatgaaaggtttgaaaaaaataaaataaataacaacagtaatagaattgaaaataggctttgagaattcagatggaagtgacaagtcgttatccccttgaaaagttgagtttattaaaaaataaaggaaccttacaaaaatattgggttttagacaaatgtttacaatttaatagtcacacgggaaaattattttatattgttctggttttttttttcttttatactgtaaacaccgaatatcaagaacaatgtctccatcttccatacccatgcacataactactacagcaacacgaacatacccagaaaataatcattaatttcggcgagattaagcaaaaacagtgaaatcaatgtcaaataaataattttggcaaaacaactgtaaaacaacactaaaacaataaaaaagattaaaaaaaactaaccatcttatgcacagccttaacaccatgtgcaatagcagctatattaacaagcccaatcctaaaaaatcaaaataaaaaaaactactaaaacaaagctaaaccaacacaaaataaatgtaaaaacaatgaagcagaaataactacttagaaaaacataaaagaaccacacacctcaaaaccctttcaccagtgagctcatcaaatgaatttataggagaattaaagtaaaaaaagcacaaaaataaccattgagaaagaagaagaaatatatttatagcctctatctttcacacctac

SEQ ID NO: 322913 - DNA, 667 bp, Cannabis indica
tttttttttaaaaaagaatccaatttttgttaaagaatcacctaaaagtatcactagtcactattaccctatatctttggaatcaattaaagatacccaactacttttttgttactttcttccccaaatatgagaaaactaactagcaaatgaacccttctaataataactaaatccttggatataaaaaatatgctcattactcaaaagatggaccttgaatacaatcttttaaattgaatcattatatagaaggagaattacattacatgtgtaccaagggtttttaccatttgattttgtaagatgccctaataattgaaaaaaaactaaaggtaaaatactaattcggttgctatatttattacgattatatgattgttttttgtattttattaaatggcaattcaaatatttataaactaggggactaagccgcgcttcgcgcagtgttgtctaatttttgtaatctttatatatattgcaattatattgagtgatataatctaaaatataatattttaatttgtgttattataaacaaagtaatagtattaaaattataaaaataatttactatttttaaaatatatagaaagatagtgattttatgagaaacattaaagattgtaaaattaacaaagaaattacatatacatttataata

SEQ ID NO: 322914 - DNA, 1310 bp, Cannabis indica
tcaataacattgcaaaataaaagactcatctatttttctttcatttagaattatgtagttcataatagctccttcctaccgcaacataaattaaatagagtacttgataatgaagatgagtataataatatgaaaataaaagcatcattaaagatttgcttcagaaatagataactaacacagatttaaaattcaacgacattgcaaaataaaagactcaaacatacgtgaagaagaagaagatcatgcaatgcaaaatccaataaagtgaaaactaattatggtaagatgaatgacattggaaagttgaggtgtaaaatgttgattttccagtggcttgcgctcttgaataaccgcacaagtaacacaataaaaataaacatcaccaagtcctttgcatcttgatggaattcatgaaatatacctttgtcaataattcctaacttcaaatctacaatactaaatacaaatgatcataatgatccactttattttttccttaatcaacatagcatgaacccaaattttttcaaacctactctaatgactaattataatatgataaaaggggaaaaccaacacacaatggaaaccacaggttttatccacaaacaaagaggaattttttttctttccaaagaaaaagagattatcataaacactcatgagcacgaaaatataaagttctactgatatttttagtctaagaaatcgttcttgtatagaagtaatgacaagacgataaaacatatcgatacataaatgtatatttggaaagatatggacagaaaatctgacttcgatgataaaaaggtaaaaggctccagcattggcaccagtctttgcgccatttgatgaggcaaaaagagttcgcgattcagattggagaaaatgagtcacaatgttgtggtaatcggcacatttacaaaactcatcaagattgatcaacgtttgttaaaatgacgaacaagaatctacaggaattttcaaagaaagagaacaaaaatattataagaaagagttgaaatcatattgttattggtaaaagtatgagataatgcagttaataaatatgggagtaatgcctttgctgattaaaaatcctttgctaacagcaaaaaatttcacataacatacatatctcatggtaagcctgagaatcgttgtcctcggccaaggtcttgactcttgtcgcatagtgtaaatgagttagggttttgagagtttagttttatttatatatgtttgaaagttattgggaggatcaaacctactaacatcacatcgttaaatttaatattatatttttt

SEQ ID NO: 322915 - DNA, 875 bp, Cannabis indica
ttttataaaacaatagtaaaatacaaaacagaacaaactaaaaaaagtagaacaactaaaaaataatcgtagaacaacagtgaaaatttaacacaatatactgtataaaacttacacattatttttgcaaaaaaaaaacacagtatttttggaacaaattccgccccacagtaaataaataaaaaaattgaaaattttagtatgtggtgtaaataatccaaaaaattgttcaatcaacccatattttattaaaattaataaaagtaagctcaaataaaaagtcttacaattaaggttagtataagatgtgtatattttatatatttattgaattgtttattaatttttaatttaaatttagtattggtgtgcattattattattgggtgattatataattcaccccttaaaagaggtacaccgatgcacctcttatttgtttcaacattcaacaaaatattatagtctaatatttacaatattagaaaacagtgttcaaacagtctattttacacgcgtataaaataaaagagtcattcgtgcaacaaaatgtttgaaccatgttttcgtcatgttaaattcttttgatttttttaaaattttacagaatgctttaaataactacaacgtacataaccacaaaaaaaaaaatactaaataattcttccaaatgacaaaacagataagagtgtaccgatacactcattttagaagggtgcattataaaattttctaatattatttatttatttatttaaaaaaatagttttagtcttcttgatttagtttatataatcctattaataggattgtacatcattttaaaaaaagaaactatattctaaaaaactaaagaaaaaaaaggttactattta

SEQ ID NO: 322916 - DNA, 660 bp, Cannabis indica
atccaattggatttttaaaatttgcatccgatccgatccaattatgattggatatccgattctattggatcggttggaattggatcggtcggttggaattggatcggtcggttggaattggattggatgactttctgcacacccctaatatgtatgagtgtatacacaataaatatatgtacatttgtgttttatgattaacaatatgtcaattaattgtgactggcttaggctagcttgtatataaactgtttatacataatgtgtgaaaaaaatttggtgttttacaaaaaggcagttttgctgtcctaagaagtgattcctaatatttgtaatagatatgcgtcaactagtagcagtagacatagggtcagtttgacacaaatgtactcggaaaaaaaatgttgtaattgtgttgtaagaaaaatcagttgcaaaaaaatagtgaaaaaaaattgagctaagtaattagtaaattataaattttataatactgtgattttagtaagatctataataataattgttgcccccttgattttcacccaatatacgtggaccaaccgaacagggacacatggatcagataacttataaatatttgctaagtctttgtatgccacaaggaaacacccgtgggcagtaggtccccggaggagg

SEQ ID NO: 322917 - DNA, 620 bp, Cannabis indica
atgatacacaaaataggaaattgaaacaggttgccatattcctcttactcaatcccatgagtatagggattgtcatcgtggttggacttcacgagatcattctgaattagctatgttctaataagtagttcgaaaagcaaaacatgttcctgctcagatagtccaccttccaccctgctcgggtaattagaagttgtacatgcagatgtataatatgaagtctgttcaggacattcatctcggcccagatgcgaggaatgcaggacacatgtcacttgtctatttttccacgtcattgtgaaaaagatgggatagcatttgcccccaagtctacgcaagatgtttgtggtcgcacatggacttcactcggtttggatccttatctgaacgtgtggcacgtgttcgaagtgtcggttgaagacccaatgtgactctgaccaagggtatcttcagttttcagctcatcaatactgactgacatgtacctcgaaccacgccttattgtacgtttcgatggttatccttcaggtaaatgagtgcacaacatacacttttggggggaactcgtggtatttaaaatttgaaatgattactttgcctcactaatctgcttataaata

SEQ ID NO: 322918 - DNA, 707 bp, Cannabis indica
aaaaagaaagttaaaaaatagtatatgggataattctttttttttttaatgtataaaaaatcagaataaatactctcatactacatatttttagagactaaattgttaaatagtaaaaatttagagggtgtttataccaaacaaacactcatttcgtaataaataaaaagttaatataattttggaccacgtgtttaacaaaagttatcgatttgattatctattttgttaaatgacaaaataaatttgatattttttagaataatacaaataggaccgtaagatcaatttttgactaatataaccaacttgaagataattcataacacgaacagaatcaaaaaatataattagttttatcataacacctctatatcgagttattattaagttttattttgataaaaaattagttaaatcactatttagtactattttgaaaaatataaaatacaatttattatttaacaaaataaaaagttcaatcaataacttttaacatatctaaaatagttgtacccttaaagagaattgttaaagggcattattgttgcctaacaccttcctcgatgctagggatgtacattcgtcgatttggtcggtttacattacattttatttaacccaaggtaaagaacgagttacaaaaatctaagtgcaacccgcccaattaaaaaaaaaaaaagtttcaacccacccaatgaatt

SEQ ID NO: 322919 - DNA, 1285 bp, Cannabis indica
taatttacgtgaatcaatataacagtgaaattggattgtaagtggttaactatatttttcagagtatcaattcatttcaataaagtatgcatgaatgtatgtatctcaagaaagatatttcatcactttgtataaagtggtcttaaattaagttattctgatactactttatattcttaaaacaaatgcaatacaaagtcttattcagactcttaggcatacattaggcttccaaaaatagaaacaaagggatattcttaatttattctcattataggaaagctttctttagcattcccaactcgaaatctcctggttcggatggattcaattctggatttttcaaagtgacgtgggctgatattgggaaggatatttgcaaggccaattctgatttttttgtcacaagtaatatgccttcagaacttcactcctccatgatatccttaattcctaagcatgatcacccaactaaggcaatagattacagacctattgcttgtttctccactttatacaagtgtgtttcaaagctactttgttctagactggccaaggttcttcctctactaactaaccagaatcaaggtgcctttgttcaaggcgaatctattgcccacaatgtgatgattttgcaggatcttttgaagaactataacaggaaaaacatctcaccctggtgtgctataaaaattgacatcagtaaggcctatgacacagtaaactgggacttccttgaagacttattggctacctataatctgccccaaggatttattaaatggctgatgacttgcataacatcgacttccaattctattgtcatgaatggaaggatccaggggagttttaaaggtgaaaaagggttgcggcaaggtgatcctctttcacctttactctttgttcttgttatggaatatctaacgagattgcttcagttggcagccaacaacttcagccaaagatttcatccgctttgcaaaaagctaaagctcattaatctttgctttgtagacgatctcatcatcttcagcaagggctcacatcaatccatcacagttcttaaacaagttctaagaggagttcagtaaagcttcggggctgcacatgaacctcgacaagtctcaaatttttcttggtggagttagtcctttggataagcacatcattcttgaagattttaaacttgctgaaggttgtttcccgatgaaatattttgggattcccttgagaccaactaagtagaaagctgaagattgtggcataatcatcaagaagatcactc

SEQ ID NO: 322920 - DNA, 825 bp, Cannabis indica
aaaaaaaaaattatacttattaccttatatttcttgttgtaagtaaaagaaaaaatttaacaaagactttactaggctataaatttattggacaaaaagtaaataaataaataaataaaatatattggggaaatttcatactcaacctatatatatagggatcaaaccttaaacaataatgtactcacactatattgatcttaattacttaattaaggtttacaaaaaaatggtttgtaaggttttcattcttctcactctcttactcacggttgctcttgttcccatcttttcagatgcagcagccagagaccttgttgagacttcccctataaatcaaaaagctggtcagcatgttatacacaaataatttatatataactctgcaagttatatatagtatatttatagtcttttttataaaataattggaaacttgcatgatcaattagtttaaatagtaaaatgtagtactatatatatatagctaggtggtgtactagtagtaaattttgggtgaattaattcttttactagtacatatacatttatttcaaggcaatattagacatttataaatttgttatattaccatttatactaaattttttatgactattaattaattacagaaaaaaatgagaacagaaatgtggaggaccaaaaatctatcattattcatggtggtgcctctgaaattccacctcatgaggggggatatccaggtggagtgattccgggcccaggtggagtgattccaggcccaggaggttatccaggtagagtgcctcctggcccaggaggttatccaggtggagtgattcc

SEQ ID NO: 322921 - DNA, 771 bp, Cannabis indica
atactaatcttacctcactttcgtaattacgtgtaccaataaaactgtgttgaagtattactcaccgattatgagaccctaagtcataatcatacaaaataggtaagcgacccgctaactcactttcgaggacttaagcatagaactagaagttttccaatcgataaatagtgtggcaataccctaaatattgaggaaatacaaaatcctaggcacctaaaaaatacctcagtcggtgaatcggaatcccaaacaatccaacgtttcctagtgttctgcctggggaaacagtttactatttctataggaaatggtggtgtaggaatggtggactgtttcatagtcgaaaaacccaaaactcgatttctcctagccaaatcaatcctagattttaccaaatcttccaaaacacctaataacacgaatatgaacataattcaagcaataaacacatcatcaagtctcataaataaaaattgacattcaaacttgttgggctttgtgccttaaataaaacttatttcaatatgatcaaatttactaattaataaaagatcagaaatctttttatgttgcatggttcacatgatttatttcatgattatatttgatgtataaattatattgagtccagaacatatataaatatatatatttattcatgattatagtgtcatcagcacagtgaaatataatcatgattatatgttcaaaagtttaattctcacaatttttcagttcactggatttagactgacatgataatcggcg

SEQ ID NO: 322922 - DNA, 1107 bp, Cannabis indica
aatagtaaaaataaaaaaataagaaaaattgagaaaagagaaaaatagaaagaatactcatataatccgccacctcacatgccttaacaacaacattatataagtatatagattgtgtagtttaatatttatacattttaagaatatcaagcatatttttttaagcgatgtgagattatagaacctatttggatttttttttttttacgggactctacctgtgacatttaaaaagagaattgttaaagggcaccactggtgtctagcatcctccttagtgtcataccgctattagtgtaattaaatagcgggtcccatataacttaagaaaataagttttaggaaatatcgctaaccaatcatagaatgacacctataaaaggtgttgggcaccactggtactcaataacaatgttcatttaaaaactattataaataacaattaaaaggctcttataatataatgctctcaccataattaattcatactcaaaaataaaaataacactttcactatacaattattgtaatatataacattaatattattatgacacatttcttttttaattttggaaatatttttgtatttaattattgagaataaatagtgtgatgagcctggacctgaggaagggaccaaaccagaccagacccaacttgggtgggattgggaacattaaagccaaattaagatcatgttttctggggtttcagatccccaggtggtccatcaattattatttttattattattattattattattattatacagttcaaaatcaaactccatttttctagaacaaaataatctagctgtcacaatattatataatattacaatttttgggattgacccaaaatgacacaacactgtgttgtgaagatagtcatagtcatagtagagtataacaagttaacccttttcataacttggtcaaacaaaaactacaaaaattatgttatgttatgcttttataatgcatccagttaaaaaagtattaaaaaaatttaacatgtcaaaaaaataaatttttactgcattaaattttggaaaattatctatatactattttttgaatttctgattttttttttaaattt

SEQ ID NO: 322923 - DNA, 1526 bp, Cannabis indica
attgtcaaaaattaagttcagtgtcctagttttaccattttagaaaatacaggatccattttgtcatttaacaaaataaaatatctaatcggtaactttcacaaaacacagggtccaaaatagtatttatcctaaattctatacattgttgcaaaacattaactcttacctagaacccaacacatttaacttgtacaatatgtgagccacatggtagtttcctgcatgaacttaaggtgacacttatttcaaattcaccagcctagtggagtaactcttggaaatcttagctccaagttttggatggctctccatacattttccctttttgttataacgcccaaacttattgtagaacaataattctccatttgaaaaacaagaaattttcatgaattttcattcacttttttctcctaaagaataaaattgcgtatatgaagaggatgaaatgtaatttatgtaaagataaagacatataaatcaagttaacttgccatgaaaatagtaactatagagttctcaatcggataaaaataattcaaatcaacaaaagcatcggtaccaaaaataataatttccaatctctaaaatagtcatatgtgattttaaaacaataatagttattttattttattgcaaattgatctcaattatttttttattaaaaacactctcattcaagtggcaaaagtaaagggctattaagttgaagtaataattatttttccgagattatgttgaagagaacattaatcattaaacatccgtagatatgtatctattgcttctatatcgagcattgctattagtcaccagtggtgcttagtactttctcgacatgtcgcgttgcgattagctagcgatactctctaaaagctactatattaaattatatgggacccgatacttagtttgaccaatagcgatattaacacgtaagaatgtactaggcaccactgataccctttagcatttctccttctatatctataaacctttataaaaaaaaaataacacctacaactgaaataacacctgtcaactatctaatgacatgtgtgataagttgtgttgcatgttaggcttttcataatccatattctttaatgagataacacttatgtattgcatgcttgggcttttcatagctgacgatggacctattatataaagcattcatatgtacacacatttttgatgggctctcaatccacgtcatattatacaaaataattgtaatgcaactattataaaacatcaaaagtcagaatattatttccacgtacgtaaccctatttacaagtttcttcatgatttaatatcaagaaatttaccattagaaatttgaaaaacaacgaaaatacactaggataaatattttattatagtattgatgtaattttttttggattatacttgaattggattgtttgggaactcttgttcaactttttgagatctgcatttacatggatttaaaaattgaagtcaggacattagttttatgcaaattaaattagatt

SEQ ID NO: 322924 - DNA, 672 bp, Cannabis indica
aataactttgaaataaaatttaaaatgaaaaatgagttcagatcagcttctaatatagtgcgtttttattcttcaattatttttaaaaaattttattttaaaacatttgatataagtactttgaggagaggtatagttataagaggctttaaataatgaatcattcaaattaatgattttaaaaataaagttatcattattaataataattcaaaaacattaattatacatcataattaaaaatttaatttgtattttttggtcaaattaaataattacacatactatctcaaaaaaaaaaaaaaaaaaaacttaacacatactatttgactttattataagaatcaaagatattattaataaaacttaacatcagaaatatatctgttttagatattttgaaaaactttaggtactttgatatttgtttttctaagatattttgacatatttaattattagttctttaaaattatgcacagcttgataaggttttctttttttctaaaaaaaaaaaaaaatagaatccttcaaactctgcatactaaattttgtgttaaaagtagctttcttttttttctaactccaataataataatatttaaagggaaatttaattttctatacttacatatacttaatatttttttctaaacacataacatttaatat

SEQ ID NO: 322925 - DNA, 668 bp, Cannabis indica
atattaccctgacttcttgtattacatcgggtatccataaaatactatcatgtgagcccataagtcagattaatcatgtagtggtcaatatgataattttagaaccgcatacaaggaatcttagacacacacataattacttaacatatcactaaaatgcttttctaatcaaaataaaatactataacatgtaaaggcttagtgaactatgagttgagcttatctctgataattattgtacatatattgatggtcattagtggacaacctggtagctctgatactaaaattgtaacacccaattgatttaggcgtgctacaatgcattcttaattactgtgtaacatttggtaattaaaagattttataaaaaatgtgattaatttaaacttttataataaacagtatcagtacaatacatttttaaaatctagaatcccatatatctaaaattttcatacatgtacaaatcaaaagtgtcgcacaacgaccatcaaaataagagtcttagttatcctaaaaatctaactctccaagtcaaactgtctcgatatgtacaatcttcatctagctctagactcaccactgctcagccacaaccttgcctttacctgcacataggatagcatctataagtcgatcgactcagtagaaaaagcataaaaata

SEQ ID NO: 322926 - DNA, 2729 bp, Cannabis indica
tttaaaattaattatttaattttattttattattttcaaaaatatttatttttttatttatttttgaaaattaatttaactttttaattaatttaaattaaataaatcctataaacatctatccagtttgttgcatgtgtgtgtgttttatatattgtttattatcaaaacttattttataaaacctattattgtttgatctaaatttctatggttaacttgttgacagatccaatgatataattttaacataaagttcaattatcgataggtcaaataaataatttgtaataggtaaattttacaatcttctttcatctgtgtataaacctaacatgataggatccatccaaatcagtgtgtgcctatgtgagcctatatgtttgctttgggcttagatgcatatagtggactaggttgctaaaataaaataatcgctattgatagattttatttaggtccaattagtattgggcttattcaatgaataactgttacttaattaaggttaaattcctctcctttgggccttgtgtgagagttagggggccattagtagtgggtacgacatactgaacccaaccctccctcacatgaataaccccaattgtgaaggtccatttgccttgtttgaataactgttgtaggttaattacactagtataacctaataaaattgattagcaacataaataatttcgaaatatatgaaattaatttttcatcagattattttgaaattaattttagaaaaacacacttagtttaatgaaatatattcaaaataaactatatgtatttttctgtatttatttaaattaagaagttataactaattagatttttctgcattcttaattatttgaattttcataaaaatatatttaagttgaaaatcggttattctaactaatttttggatcaacttaaattataattgttatacccgaaattcggctggcacttcaaaagatgacacgcatctaccttggagaatacgaatcaacgaatataatggcaattatgttaaaagatattaaatgaaataactcattaaatgcgatgttgatagaacatatctataactcgctgactgtatagtcgtaagcaagacaaggatgtatgaactattaattcacgtattaaagagaaaccattttgcattagaagacatgatcgaaaggatgacatcgataatgcataagcgaggcatcaacctcgctatgtgtaaaaaggtgttaacaagacatggtgactgttaggacacttagcgtataatttacattatactaactaagtatcacagttggaagaatctgagtgattgatagcgaggcatccatctcactataggaaggcatactcttggtaccttcactaatcagctccagacatcttacaatgagatccactgttccgacaagttagcgctctcagatagaagcagacattcaaatgatgttggctactaaagttcaccttatcaccaagagctgcgattgtcagatggagcgttatgtctttaatcacagaaacgactggatttatattgtcaacctcggaaagatataggaaaagctccagctcgctgctagggttattatgggtattcaagttcccaacgaaatgaccaagcgtatctaaatcaatgttagcattgatccattaaaagcggatgaatcacagatttgtgattttcaaataataaccgtatttatttacgtgggacgtaattaaagcccacaattttggggaaatattgttgtggaatttgaatttgattgtaattaaaggccaccctatgtcactataaataggggcagaatgtattgaaaaatggacaaaaaatctttgagagaaaaaaccctagtttgtatcaaaataatctgaataaaattgactcgtggactatgcagagttaactgcaaaaccacgtaaaaacttggtgttgttcttgctttattattttttcttacattacaactcatttctgtgctaatcctatcacgaaataggcttattatcgttaacgaaaatttgcgttaacagtttggtgctttcattgagagcctacgtgaaaaaagctcagaaaaaatccctcctgaccaaaggaaaaacttttctccatggctgacaacggggaaaataatgatacttatcttgaagagactactcgctgtcctggaaaaaagccaggggcccacggaggcctcccaactcacgaacaacttgatctacacgatcgacacgttcaaggacgaaccaacctaaaggtggccaaaaccacgaaactgggaatgaagtacccaacaatgatggtggcagcactcctagaatttggggtttttatgaccccaatagatacatgctagtagtagagttggaaaatcgccaactcaagcgataatcggtagaggcaaactgacaaaacgttgagttggaacaggaggcagccgcagctagggcggctcaagaaaatgacgcttaaaacaaacctgatcctgcggtaaggaggccacaaggcagacctcatggcacccgaaccagtaggcaagaacaacctggggtgactgaggatgcccataatgatgagcaactaaatgattttagctcatcgtcaagaagagcctcgaagacctcggggacgcacaatcctaagggaatggaaatcgtgatttaccaaaatcttctcacagaaatgcgagtaggaggctgttgggttttatgcc

SEQ ID NO: 322927 - DNA, 1941 bp, Cannabis indica
gtaatccatggggtcatgttgttggccctatcattccatcccgcggtattcagcaaggtgatcctctttcaacatatctgttcattatgtgtgccgaaggacttacggcgcttatgaacaagtttaaggcaaatcggggtattcatgattgtaaggtggctcgtggtgccgcctctataacccacatgctctttgcaaatgacagttttctcttttgttaagccactacggaagctgctatgagtgtcaataccttactccataccttccatttgacttctggacagcaagtaaaattttccaaatcttctgtcttctttagtcctaacactactacccaatctcattctggtatttgctctgtgcttgggatgcttgaagcgtcggatgacaatctttatcttggtttgcctaatattattggtcgaaactaggcctctattcttagtttcttaaagaataaggtcatggctcgtatcaacagttgggatggcaaatttttatcacgagctggcaaggaaattcttcttaagactgtgattcaatccttgccaacctatgctatgagtgtctttttaattcctctaggaatttgtgaggatattgagaagcttatggcaagtttttggtggaaaactacgtcaagcaagggtcgtggtattatatggatgtcctggaaaagaatggcaactccaaagcttgaaggtggtatgggattccgacactttcatgattttaatgttgcaatgcttgctaaacaaggatggagacttttatgtaaaccggactctttggtgggacgaattttcagagctaaatactttcctactagtgactacctctctgccgaattgggaaataatcccagctttgtctggcgtagtgtttgggctgcccaaaatgtggctcgtttaggggtcgtgcgtattattggcaatggtgaaacgaccagaatcctttcaaccttgtggctgcctgatactgaaaacaggcttgtaacttcaactcatcaagctcttctgcataataatgtgagttctctattttctatggagactcgtagctgggattctgatgtcgataaggacttgttcaacaatcgggatgctagtttaattctcggtctccccttatcctcaaatgttgattctgacttttggtcttggtcaagagaccgaactgggctcttttctgtcaaaactgcctacactctgttgtagaagaacaaacctcaggcttctggctctgataattttggattttggcgtaaactgtggcaattgaagatcccacccaaggtcaagaacttgttatggcgtgctatttccgattgtcttcccacctgtcttcaactggtgactaaagacgtaagtatctatgcaatttgcccagtttgtaaggatcaagccgagtctatcatccatcctctcctcaaatgtccttttgctatgtcatgttggcgtacactaggtatcacttatgacccgatacaaccattatcttttggtggctggtttgagaaagcacttacaaatcttgatgaggagattgtttcacggactgctatgctgtgttgggcaatttggaaggcccgtaatcttgttgtatggaagaataaaacatcctcaagaactgaagctattgcatcagcacaaataactctagataattggtgtaacgctcaagaaaacacttccttatcttctttattctttgaaaatagaggagatggagctgagcgttggactaaacttgaggtgaacaaaatcaagataaatgttgatgctgcactctttccacatgattactcttatggattcgggatcgttgctcgagatagctccggtaagctcattgaggccaaatcgtgttattattagtgtgatgtggaggttgagactgatagcatgctcactgtgcaaggcattcgtagtaatcaat

SEQ ID NO: 322928 - DNA, 1975 bp, Cannabis indica
caagtcacggggtacgggttgagtcccagatcccaagtccggaggtgggttctaggtacaggtatgggtctggggtcgggtcccgaatcccgattcatgttctgaggcccaagttctggtctcagtttggtggtgtaattcctgggtctgggtctgggtcccccatctatgatcacgtccgaggtcccggtctgggtccaagttcgtgttggggtttgggttcgggtctcaggtcccgatccgagtccagtcctagtttgggtttgggtccgagttcaggtcccagtcccagtttaagtcagagttttgggttccaagtctgagtttggttcttgggtccctggtctgaccccggtatttaggtctgggtctgggttgggtcccggtctaggtcaaggtctcggtctcgatttaggtcccaagtcacagatctcggtccgggtccaagtctcgatatgggtttttgtctatgtttaggtttaggtatgggtcctgttacagtccaaggtctgggtctcatcccagtccgtgttcgattctgattttgggtctgagatcgggtttggatcccggttcgagtctaggtcttggtacggatcttggtctgggtcctagattcaaacagtgactacgggtcaggatgaagccttaggtcaagattcgggtctcggtcttggatcctggccttgttccagttcgggcacaagtccgagtatgcaccctatgttttggttttggtctgggttcttagttgtgtctagtgtctcgagtttggggtctagttttgggtctcggtcgcagtttcagcccagttttggaccatgtcccccatctaggtttggatccttggtccaggtctgggtctaggttcgggtttggggcccaggtcccccatctaggtcacagttcgattctcaggtcccaagtaacggtccaaatcagggttctagtcccagtccagctttagggctcagtcctagtccaggtctgggtcctagtcttgatctcggtctgggtttgagtctgagtctcgggttcgagtacgagttctggtacgagtctggcccttagtcggggtctgggtataggtctaggtcttggtttgggtttcggtttggttctgggttcgggacttggtctgggtctgggtcttggtctaggttcgggtttttgtacgggttttggttttggtccaagtctcgagtcatgggtgctgcgttccaggttctttgtcgcaggtcttgtcgtaagtctgggtctgggtccaggtatcgatcctagtctaggtgtgggtccgtgttcggttccccgtctagatccagttcttggtctaggtccaattcctgttcaaaggtccttattaaggttcttatttcgatttcgggtctctgtttcgagtcggggtttgagccctagtctggaaatggttccaggtttgggtgctggtacgattccaagatccaaacacagactacgggttgggtccaagccctgggtcatgggtgaagatgtggatcccaatcttggttcctagtctcgttccgattcggatcctgggtcccggtccgtgtttttgtccgggtccgggttggggatcgagaccagggttgggtcttgggtcccattcctagtcctaggccccgattctggttctaatttggggtttgggtccccaatctatgtctgggatctgggtctaggtctgagtctccaatcgcgatccgggtcctccatctgggtctagatccaagtctgtgtctaggttcgggttcgtgtcccgagtccgaattcgagttttgatttgagtccgcatcccacttcaggtctggttctgggtcattttcagattccagttcttggaccgagatcgggtcctagtccttgttaggttttgtgccctaaataaaaccctttacaatctgattagttatcaatataagaaaattgaagtgatttatgtttgcatgaattttac

SEQ ID NO: 322929 - DNA, 557 bp, Cannabis indica
aatctaatcaataaaaaaccagttaaaacatccaatggatggaatcgattcaatctaatacatctattggatcggatcggatcggatgactcaattcaattagattggatcggatggaaaaattcaatatccaataaataattggattggattggatgggtccaaatttattggatgtgatccaatgaacacccctacctataagcctcctctattgtattgaatgattataatactagcattgataattggaaaataataactctaaagaaagtgttttttttttttcattaatatacaactaatctataaaaaaaatacaataacaagaataaatattttattttcattagtattgaagatgtgatacctgatttataaaaatatgaactcataagggaaaaatattgtatactataaatttttgttaggagtatctatattaagacactttttacattagttgtcttgattcaataccctattttgaaattattagtatctttattttatggagaattacctcaaatatttttttttttttttacttttaactt

SEQ ID NO: 322930 - DNA, 646 bp, Cannabis indica
attgcgtgttacagtcccaacacgcttcctcccatgcggcattaaatgcgacttgattgctcgagagagatctgacacatcccggagaggcttcacgtcatgcgagcttcccggagtaccttgtactccgggtgcctcctccgggacccacgctaactgcgcttccttgtggcgcacaaagacttatcaaatgtttacaggttatctgatccacgtgtcctaattcgactagtccacgtattttgggcgaattcaggggcaacacatatcaattcattatctttattaaggcacgtggtcatgacttttaaaagtttgaattatagttcttttttatttttcttgaatagcaatcttaaccagtgttggatataaatatatacaatctctgtatactatgtagaatattaaataaataaaattatttagtaaatataataaattattctatgacaatttattaatttatgaaatatataaaaatgttactaaaatataatttaaataataagatattgtaatagaaagtatatcattaatggtttgtatttgttacatactttagagtaaatacagtttattaaaatagtactttactgaataacaatttattatttttaaaaataaacttaaaagttacttaaat

SEQ ID NO: 322931 - DNA, 1661 bp, Cannabis indica
tgttgtaagcataacaaacatccgtgaaaaaattgaaaataaatattccgacatgtaatttcaggcgtggaggttgtaataggaggttgacactagcactcctcaatttatttatagtttattatacatttttttcttttgaaagatgtatattcaaaaagagcaactacacaagtttaggcaagtccgcctttacaaagacagacgcacaatggggataataacccaaccacaacttattacactttgaagaaatagccaatttggcaagagaatgagcagccttgttgctttggcgccctacgtgattcacggctaggcagtttgtatatgctagggagtctttaatctcttctagcagcgcactccaatctgtgttaacctgactgtagcccttcaagaagttagccacccgaaggcaatctgtttggatgataaaagggacagtcgttgtttggatagccaaattaattcccatccgcaaggccaagacttcagcaagctccaacgagaaatagccctgttgctgctgaatttctgctgctatgacatcgcccgagtggttccttattagagctcccagcccaatcgatgaatctgtgcattttaagcttgcatcacagttgatgcagtagctattagcaggtggtccttcccagccgagaggagggtttgcatgaagttggctgctatgatctttcggggatatgttattcattatgaaatcgatttccagttgagcccattggatccacatctcggcaggaggaaggtaaatgttgagacgtttcgtgtttcttctgttccagattagccaagacataattataaaaaaaaggaagtcttcttttgatacgtggtgctgaatgtggatgagcatgtccaatgtgttgtttccgctttttttgagaattggccaaattgaaaatcgcctccaaatgttttctgctgaggtataaaaccagagactatgatcgattgtctcttctttcacaccacaccaagagcataacggattgatcttcatgccccgatgccttaaaatcacattaacaggtagccaattattgcacattctccagatgaagttcctgatctttgggggggcctcaatcttccatattcctttccaccaattctttgttatctcagtctccgagggacctgctttcatttcatcttttgtagtctctttgtaatcgctcctcacagtatagtttccattcagagtgtaatgccatacaagatcatcatttttgcttgttgagcaaggggctactccaaggatcattggactgtcatccgagtgaaagcaatcttccactatttttgttttccaagaaccatcatcattctttaagtagtctagagtggtcccttgaggcacatttgccttggtgcgcaaagagaatgttgagggacggggaatccatttatcttcattgatgcggatgtctctacctgaaataaccatccaccgaacccctttctctatgattttcctgccccataagatgcttctccacataaatgatctgtagcctcctattttagcctccaaaaaacttgagttggtgtagtagcaagcttttatcacccttgcaagcaatgaatgggggttatttattattttccacccttgtttatgttggaaattattt

SEQ ID NO: 322932 - DNA, 1144 bp, Cannabis indica
cgtttcagattcaagtgtgctggtcaacctaaatagaaattcacacgttgaacggaggccttaaatcacaatcatttaaaatgggtaaacaacttgctaaaaccttttatttctctttgaattttgaaagcgaagatggttttaagttgatttttcatttctttcaaaaaaattgatttttcatgaatttgttttagcatatggttatttatgtttaatttagtttctgagctttaattggtgtagtctgtgagttattttaaggaatttagctattgttggatgaagacatcaagtttgagttcatggaactcaagcttaagctttaatggtaaatttgggattcttgaataaatatgtgatctgcgatgttgaatagatttattttaagtgttatactattctggaagagttgataaagttcagtttaggtttggggcatatttaagtttgaaaactcgaactttaatttactggtgcgaatgggtgaaccagttaaccaaatcttgtaattctagttaaccgtatgggaattttggttaaccaattggggccattttaggtacctcaatttttatgttttattgatatttagggtattgccattctatttatcgataggaaaacttccgattttaagtttaagtcctggaacatgtttaaacaagtcatttaccaatttaccgttgtcatgacatagggcctggaatcatcgaacgttttcccactcaagttggccaacacatctgaatttgaatttgaggtgagaaaagtcaattgtaccacatagcatgtcaacttatgatatggtaattattgtttatatgaaggagttattactctaactagaaatcgctgtcaagttttttacttatcggttgtctcattagataatgatagtaacatcgattgtctcatttgataatgagggttattggttactttatgaagtaacaagaatggtttgtcttattaagtaaatactcatactatgatttcttggaattaaatgttgaatatgtaattcattatgtgacttttattggttgcactactacaaaaatgggttttttcaacgtttttaaatagtcgtttaaagtattcccgtcggtttctataaccatcgcctatacgaccgtcataa

SEQ ID NO: 322933 - DNA, 890 bp, Cannabis indica
tttttttttttttatttgtaattttcatttagttagctctttatcttttaagtttttttttttgtgtaaatctcaaaagttatttttcatttgaattctaattatttgacatgtctatcttgtgatcaatatttgttcaaattgcttgtcctaaaaagtctaccctctctcatttgaatattaatctttacaattctaactccaagtttgtcatctctctcattaaaaaatacttttaatgtctatgagaaaattgaaattgaaacctttaagcttttgaggttttttaatactatatgtgttatggcttgtggtaagaagcggatatagtttggtacacacacgactttagaattataactgaagtagtttgcatagtaattcctaatatttgtgctacgtttaacttgattattcaacttgataatttttttcttttcttgacttgttagggactaactataagttagttggggttgtgattgatggtgaaaaatacatatttattgatttcaaatgtttaattaaattaaattttaataaatattttcaataaataaatgaaacatatttttacaattgaaaatatttaatttgatttattttgcatgaattatattgcattttggtacaaataaaagaaaagaactgtgtgaaagaaagaaatggaaaattggtattgttgcaaaagaatagcccaatttaaaaggaaataacataaggcccaattcgtttcagcctaatcaaagttgtttttcaattaagcttctacgaggcaagcattattcggagttgcatatcttagctgactgagccacatgctttttctttgagaaaatttatatggtatactaatttttgctattttttttacaaaaaatactgtcata

SEQ ID NO: 322934 - DNA, 755 bp, Cannabis indica
ttttgtttttatttaaatcattactatggtttcatatttcaatgattatcactacattgaatattattaattttaaaaaagtatgatattaaaaaaactaaaaactaaaataaaatcagcatacatgacttgacacgtaacatttatctagtatatatatgtatatttctctaatatataactttatggtcctctttttatttatttattttctttcttatttcaaacaatgaccaaaaaccaaaaaatattatagaggcttatggattatacattctaaaggataaaagaaaagtcatttaacaaaaaaagttgtgaatccatcgtaatagtatgtacagctaatctatgcccaaccatattgactgctctagagattgcttgtgttttcttaggctatcctatgggaatgaaagcctataagttgttggatttaaacacaaatacaattttctgctctagagatgtgattttccatgagcaaatctttccattcgtgactgctggaaccatgtctcatgaatcccttgattttttccctagttctgtcactcacaccagcaattctcacatgtcacaaccacctataccacctgatatagaaccagaccaaactaatattgcaccagattcccatgacagcacagaatatcaaaattctgctgcaatcaccaccaatagacccagcagaaattcaaagaggccatcatacttgaatgattatcatgtttttttgtctactaacagtgtttcat

SEQ ID NO: 322935 - DNA, 940 bp, Cannabis indica
tgatcgatttcatagctgattactacaaaaacattgagaagtacccggttcttagccaagttgaaccgggttacctcaaaaaaaggttgcctacatcggcacctttctatccagaatccattgagacgattctgggtgatgtccaggaacacatcgttccaggcataacccactggcaaagccccaactactttgcttacttcccttctagcggtagcattgcgggctttctcggtgaaatgttggccactggcttcaatgtcgtcggattcaactggatgtcgtctccagcagccaccgagctggagagcatagtcatggactggctgggccagatgctcaggcttccaaaatcctttctcttctctggaaatggaggtggtgtcctacaaggaaccacttgcgaagccatcttgtgtacacttgtagctgcacgagatcgaactctcagaatcattggaaatgaaaatattggaaagctagtcgtttattgttctgaccaaacacattgcgctttcaagaaagcggctcagattgctgggatccacccggataattttaaagtcatccccacaactctttcatcttcattttcaatgtctcccaaggcattgagaaacactataactgctgatgttgaggctggactcgttcccatatttctactcgcaactgtcgggacaacgtccacaactgctgttgacccactcggacctctatgtgacgtggcaaaagattacggaatgtgggtccacgtggacgctgcttacgctgggagcatttgtatatgcccagaattccgacacttcatagacggagtagaaggagccaactcattcagtttcaacgcacacaaatggttcttcaccaccttagattgttgttgcctttgggtaaaagaccccacagcattgacacaatcattgtctactgatcctga

SEQ ID NO: 322936 - DNA, 750 bp, Cannabis indica
atgtaaactcattttctattttaaaacatctctattttctttaaatgattctttatatgtagaaaagcattattctttctttaaacataaattaataacatttaaattttattttattaatatgaattatacatattaaaaaatatattgttaaagtgatatcaagaaaatataaacaaaaaataaaaaagcgaatggatagtgggctgtaaaaggttataaaatagaaaaagtaaaattttgattatgtattataaagggtagagtaaaaaagcggttaaaagtgctctaaccaattgctttattgatttccctttattctcttatagattaaaaaaaaaacttactacttagcacttattttgaactgatatttctaatttataaaatattctttaatctttacatggtatcagagcatacaacttggctcatgccaaaacaatatcaacaggaaatagccgaattcaattattatcgacaacaataagaacacatgcatttgttgcctttgctactaacaatgttaatatgcaacattatcatataaaagttttacaccattttaattttttttttttggtaattaacagtataaagattaattatattataaatatactgcatgatttttataaatctgtaaacattgattagacaaataaaaattgtatgggaaattatagtaaatgaccccaaatcataggagtatgttagtttatgtcctcttttcaaaaaaatatagcaaat

SEQ ID NO: 322937 - DNA, 2641 bp, Cannabis indica
atattttgttgtttttgtcttactttttctgttcattgtgatcttcaaaccacaatagaagttaattttaaataatataaataaatggacgattattttatatatatatatattatttttaatttctagagttatagttgtgatttatatatagaagtttaaaatatgctaaatgtcaattcaaatattaataggattgttttattattattttattatatataaataatattttattattttatcaaataaaaataaaagttacccataaatttctcataaaccagaatttcagttatataggcacactttatatagaaatagatatatgagaatttcttttaaatgtcaaaccaggtcacgtgagacttagttttaaggaaataattaataaatattaattcaataacatctctctctcaataacacttgcacatgtaatgtaccaatatattatttccacatttattaaaacttcaaccccaatgttcaaaaattagtaattatttattttagagaaattgtactaaagggtaggacttttaccatgtataatatcagattattaatataatttaatatcgagttttatatattttattttaataaaaattaaagagaactgctaatcaattatatataaaatgtcgcttcatagtaatattagatactttaataccacataacaatattctttatttttatttcttttttatgagaatttaatgtcttaataagatcataaattacacatatatcctttatacatgtatattttattttagtgattttgagtttgaaaaatacttagtctcatataatttaatttaataattattataaaatattgctaactatttacaaaataccacctgtaaaaagtagaaacaccattgatacttaacaataatactctcgaaatttacatatgcatgagtcacatcatttttaataaatacatattattatttgtataattatatattatataacttatttgagttacaactattagaccatctctaatataaaatttaaatgttatgctaaatttaacaataaaagtaaacaaatactatatttacaataatatttattttcttagtactcgtatcacctatttactaataataacctagtagctcttatttatcgtgctcatgtacaataacattttaaaatacaaattatgacaaaaaataaaataaaatctttttaataatcattaataaattaaatatttaaaaattagttaattaatgtcaatattataattaaaaatatatattagtgcttattattaattataaatcacaaaggtgcaataaaaaaagttgtatctactatgtgctaaattttacataatgttatattttgtattaaatttagaatatttttttttggcattttagcacaagatttagtacactattggctcgtttggaacgctgtattaggtcgtattgtattgtattgtattatattaaattgtattttatataatatttttatgtaaaactatatgtgacattaacttttatggacacataaatatataatattttagtataaattaaagtttaacatagtattatataaaatatgatatataatccaatgcaatataatacaatacaatacaatacgacctaatacgacgttccaaacaagctctataagagctaatttttaaaaatgactaaaatacaatacactactattttagcacttaattggaaatttagtcctcttcttaattatatgaaattagaaatttaacattaattaagttgtaactattttcaggttaacattgatcgttttgtagatttatagtacaattagtaactataatgaatatatggttaaaactaatatatagattagaccatttccaacaaattatcttaaaaaaatgctaaattttgcataattaatatattataatatccatttcaaaaaaaatatatatatatattataatatttagcataatatttaaatactgctaaattcaagctatggtatatttggattacaattataataataacaatattaatataattaaaaaatatctattaaaatcttttattataatgataatatttagaccaatattttttgtttttaattttaaggataagggaaaatcaatgacccaatatatagatgtttataaatattggtgagtagctatagctctttaatttgagtaggtcaccaacatcaaccgtaagaagtaataagtaattataataattagggatattattttatatattatgtttaaaatttttttaatttacgatttaagttggtctagtaatttttagggaaaaaaacaggaatattctaaaaatggaaaaatattacaacaatactgtgggccggcccaatgaacatttgtacagcccaaaatgaaaatattacaaaaataccacttgcccttaccttcagccgcacgtcacaaacggagaggatgaatgaagctccatcgatgcagtcggccacgcaaccagaatgaaaccagatcgaacgtaaaacaactgtaaatcccgtcgaatttcaataggaaacgaacaaatccaacgatctaaacagaaatttttttaaaaaaaagagcaggacaaccgtggag

SEQ ID NO: 322938 - DNA, 813 bp, Cannabis indica
aatggtgtatgcttggtgaacgccgggacatggaattattgcattctccacatcgactttattgataaaaattcaatgataatccttgtagaggtaatcggaattctagaccgagaacttgccagtcttcaaatattaccccttcaccattaaacccctagcaactttcaatgacaactcactggtctccagctgaatatacatccaacatggatatctctatagttcccaataataataataaaaaaaaaagaatcaatacaatttgtaaattgaaaatattgataatttagcattacaccaattcgtaaagtaatattgagattgccttttctgaactataatcagtatgtggttatggagctggtagagcggatactttctcaccatgtagtgtacttggttgtggtagagtagagacatgaacaactctttgttgttgtgctttagaagcagaggcaatgtcagcacagtctaattcgtttgattctcttccaacacctgaactagacgcatgtgatgtacccgtaacaccactatgttgggaatgaactatacgtaggagttcagccattttttcttaagctttctattactctcctcagtattacggagtcccttatccatatctaacaatgccttatttccctcattattctttctccttgtagggcatggattgtggaagatagaccgagtaggatgcctcgctggcacatcctgagtaagatattcagcgatccgtgcagagcactcaacacttagtgaattcagctttcacatcatgagtcatcagctcaatccctataactc

SEQ ID NO: 322939 - DNA, 1150 bp, Cannabis indica
ttaataatgatccaacgactaaaagtaagatgatcacatatttaatataactattgaaacttcctccatatgtatatatatacatattaagatagtgtttagttggaacttcaaaaaatataagaataagaatggaagtaaattaaatttaaaatacataaaagaaatgatgaaaaaattataaataattttctcgatcttgttttggaatggtcttttttttcttttacaaaatagaatagtcattccactaaaatgatagaaaaaacattctattaaagtgacatttcaatactttaaaatataaccaaacaaggaataaaaaattattttatcttcattctattccatttcattacctctaaccaaatgctacttaagattaaaattatcaggatgtcgacaacccaaagagtgcaccaccaagtttctctaagttcttctaggctacaagttagagaaatgctaagaggtgactaaagtgccaaacatcacaaaaagatactgatatggtacaatttattatcagatctttaacaaattgagttaataaataatataacaagaaattttaatcacttgtaacgtgtcacattagtacgatattaaacaccttaaaatatcaaatagtaataatcctacaagttaaccaaatgagacttataagtatggatacattttcattggctagatcattcagtattttattttatttggttaatttggatttttcgtctcttgaactttgacatatattattttatctaattttactaaaagatgtctaacgtgaatgaaaattttgagagcatatgttaaaattcaaaaaaaacatgatttggtagatataaaattttaataatttagggaaaatttttaacgacttcaaaaatttaagagaatataatttagaacatgtcaaagttcaaaaattaaaaatcctaaataacttatttttaatttatggaaatattgaggatgtgataatttggatcatggttatcatgctataattttttttctttcgttaaaaatgagagagatgatcatataggactcgtttggaacgtcgtattaggtcgtattgtattgtattgtattatattgaaatgtattttatgtaatatttttatgtaaaactatatgtggt

SEQ ID NO: 322940 - DNA, 856 bp, Cannabis indica
gggaaaaatgaaacaaaatagctctataaatgtaaaatgcttttcctaagaattctttgaaacaatgttataatgataacaaatgttcaattaccaatctacgtggtttagtttaaggaacggcatctttagacaagcaaatgacacatcgtttcatcgaaggtccaatatgtcttttaaacatataaagatcaaaacgcatgtctttctacttggacgacaaacaaaatattatatgagctattaaacgacacaaacttcactctattagtcgttttaccatctacagcaaacattcaaaaagcaaataccatgtcgtttacgaatagcctataaaaacgacagtttttaaaattcgaaggagctatcgtttttcattcgaagtttgttttttgagacttgaattatttctaattctactataacaaaacacagttagcaaattgggcccagttcagtagcactgtagacttgttgaactagctattctaagtgtaaaactgtggtgattatttaataatcaatattggcaattggtaactattctatcttgtcataattaattagcttggtggttaagataatgacatataatgccacccactactctaacaagtagtgacttttgttggttggctattaaacatcttacttttgacaattttttttaaaataaaaattctcgtctgtaaaaggagaaataaaattaaaataatcatcatctatcagacccattctctatatttgtccaccactgtattgtgttggaccaaagttagagcaggcctcaatttatttttcgctatcatgtttaattaattattttatacactttaattttttttttattattatg

SEQ ID NO: 322941 - DNA, 703 bp, Cannabis indica
ttattgttattattattacattgattattttttggtttttttaattttttttctagtgtaactctatttagttataacctcctaattaaaatataatttacttggtcccaagtgtattcttggataaatgttctactgtataatactaaaaaatatactaaacaccaaaagtgttttatataagtagtttaagcgagattttgggttatgtgtcctcaatttctaaaaagagattattcaattattattcactaagtggaattactgcagtgcaaaatcaaaaagagattttgatccaagaccattgataggaaattatttggcctttttgggatagagagatttgaaccctttaaattgacagatttttctcttactaaaaatttcattgttattaatattaacgtgtggaaggactttatttttattctcgtccgatttatcaagtcttcaaaaaatctatcatatgtggagtaattgatttaattaatgaatactcaattcatttttcaacttagaattaattcacaacaattctttgatttttcatgaaaaatcgaagaaatccagattaatgcggccaaactccatttgttagaacaacttccattaagtctctgcatctatcctattctttttaatttattattgctttctgaatccttgtttgttttcagaaaaccgaatttaataaatttttttt

SEQ ID NO: 322942 - DNA, 1172 bp, Cannabis indica
ttaattttatttaaccaaatagaagtaaaagtttaattttaacgtacttaactacaatcctcgtgggatcggcctcactcttggtgaatctattacttgtaaacgatacgtgcacttgcgtgtgcaaaatatcacaacagaagcgctccaagttgacatagttgacaacatgtcaacttgggtgctaagtgcatcaccaggtggtccgggcaccgagtgcctaggtgcttcaaacgggaaatgttctgattctgattcaaatgcctctaacatgtttgtgaaaagtcttattcatgtctaagcacaaagtttgagctatttgcactaaggcagactcaaaaattgaaaccctagataggaatgtcaacctgggcgctgggtgaaaatcttaagcatccgggttgacttctaaggtgttgtttcgtcctatttcaaggttcgagcctcaaacttggattcttcttatttcttaattcagatcactgaaagatggtgagttgaaaacaatttggcgggatctaaacactattatggagtttctaaagtcaacttgagcgcaagactcgagacccctcttatgtcgactgctataaaatattattaaaataatcaaatactaaatagtaagaaatatgattagaatactattttaatttttttttgactattttacctaaaaaagttaaaaaaaaaaaaactatatgattggaggctctaaaacccttaacatctactatttaattatttttgttgtcaccaaatatttatatgcaattaatcgaaccaaccaacgaggaggtttttcagatagacctaaaagcaaatttgatcttcatcgaatttggggatgggcagcagtaaacaactattaacataaatacaatgtataatatttttcagccatttccgaacaagtttctgcgctcacacgttcaactgaaagtcaaatattgatagtacagaaaagaagatatagcaataattattggtatgcactttactgacactttgacataatcttccctatgtactactttttttatggaataattttaactacactcttaccacctcatcccttcactagctaagagagttgttattagacaatttaaagctgtctaatattatatggatgaggcttgcttaataattttttattttatttattt

SEQ ID NO: 322943 - DNA, 628 bp, Cannabis indica
gtaaatccagtgcaccgatgaattagggactcttttgaagcatataatcacagtcacattccactctgttgacatcactgtaattgtgattgactatatgttctggacttaacggattttgtatatattttaaaccataaacattaaaactacatgtaaacataaatgacttctaattttatattgatgacaaatcagattagattgaaatgggttttatttagggcataaaatcccaacagaaacatggaggtatatgtagatgatatgcttgttaagtctaaaaccttcgaggagcacgaccttgatcttaagaatgtcggagccacttattagtgaatggtcaaccaaatgttcaagtaccaactagggagaaacatggatgtatattgttgtgttaaaataagatatacacaagtgcacgtagtcacaaacaagtaatacaatgataagtaaaagagtatcgtctccacagggattgattagaaattaattatgtaaaaatgaatactaaataatttaggtttaataaacaagaagtgatgatgattagtggaaatcaccatggcttgaacaaggtattcacctttgtccaaaattttatttcccctatctctaagcactaagg

SEQ ID NO: 322944 - DNA, 791 bp, Cannabis indica
tagtcttataattgcctgtactgatataatttaatgctgtgaactgcaattttttggaataccatcttgtttaatcagatattcaatcttgtttctgtgcaggtgacccaactcaaaagcgaaatagaaaaggttgacaatgagtatgcccggctattggctgaattacaagaaatagaaaaagtaaagccagaaaagggtgtatgagtttagtatcttatttaaattaacttttaattctttcatttgttaaatcagtgttgtattaatagatggattggtcatacagcttttaataaaagcttaggtagaagagaccaaaattaaaagctgccggccgatatgctttttctctatttttctagttaccggcggctaatgtaaatatcggaagtgaagcttctgtagccagatgagagaatcatgttgtacaacatgtaacatacaattatttcttgtatgaatagaataatcatacaagtaatgcagaaacaaattcacttctcatatgttcttgtttactttattcgtttattatatgtgaagtttttgttcatacgcggcagtttcactttcagtctatgaacaattgacgaattattacttgctaaaaataagtttcatactgaaaattgagattagcttaactagtttgagagttcgtttgatacgttgtattacatcgtattgtattgtatagtattatattgaattgtattttatgcaatatttttatgtaaaaattatatgtggtattaaattttatgggctcctaactatataatatttta

SEQ ID NO: 322945 - DNA, 2224 bp, Cannabis indica
aatttgattgaaatgggttttatttagggcataaaatcccaacacatgaaatttggggcaccaactatcaaatctatgagctatgcgatctatacagaaactatcccaagtataaaattatactttttatccttgaatttaacaagcaaagtacggtcggccctaagcacggtaggcgaccatccacaattattacctcgagatgcttcttctttagcttcccgaggggttgttttcttcaagaagtgcatgcgagtcacatagtccctgtcatccttgtcatcagggacgtgaacctactgccacttagaatacttggggactttgaagtcacaagtagattgtttggtgccgagaagattacaggtcttcagattgatctcgttcaataaaaagtcgactgagcacaacccaaatggaagacctaagagaatcttgtgtcgtttctccatctcgggagttggaataggcctttttgagatcaatgttagtacaataagcaagaataagtaaataccttcaatttataaattgaaaactcaaaaccaagtttttgagaaaaggtaatacttacgtattaagcaaaatgcagttgtattaatgggggaaagaccggatatccagaagaaatcatccttgaattcagttttgttgggtagcctcacgataatcctccgatcattcgtgtgggtctcgaggtaataaaaaccaccggatcctcgcttctttgtgggataggccttcatagaataaaaatataagatcttgagtggagttggacactcccactccatactttgatataagacctttaaataggccaatatcctataagaactcgaaattaactaaaaggggggattccgagataattgaaaaattccttgtagtaatctctcaaagcgagtactgctccagctatgatgtgctcgaggctccaagcacctatcccagacgatccactagtgttacacccctcttctcgaattattctttcagggggaaacaactaaattcccctggaactacagacctaacgcgacatcctttctcgtatttgatgccacataaccttaatacgtcgccaacattatggacctaacctttgatttaataagttcgacctcgaatgtaactgtgggatcttgaggggtcttggatttcagacttgtgaagtcataatttttgaagtttaagtcacctggtgaaaaatcaacagtgactcgagataaaaataagggtctcgctaaaggaataaaagataaaatttggggttcaggccaagttgcatctcacagaaaatgacgtttaccctcgattatttattgcaaaaatcatctacaatgacttgaaatctcgtcctgattggtttttattagatgatctctaatcttggcatcgtttatctcaagaatagttttaagaacataagtttttgattcgaaggaaaaacaaaatttttaggacaatcaatttctaagaattctggggttgtaatttcagtaaaagattgggtcatgtttgtgaacaaatgttatcccagtttctggaaaatctgaatacaatttaatctaagaatttatgaactgaataacctaaacttttccttaaaatcctaaaaattattcaaaccaccaaaacaaaattacctaaaaataaccaaactaaggagataaaggagacaatcaatcacaaaaaccagactacaaataccaaaaagaaaagcataaggaagaagggaatgaaccactcactgttttgatgaagatttctggacaaagaagaacttcgcgattgagattttgatgatcgaatcgatgggttttaagagtctctaagattgaagatgaagtctgatgaaatatgcaaaaaatatgtcaatgacaatgagggcatgcaagttgaaagggaaaataatcgtaatttgtagaagaaatttgaaggtttggaatgcgaaagtggcgaaatgaactgaaactattgttttttatactttgttataaaccactgttatattaagagaaatttgatctaacggatgggaacactgcaaaagagaacagccagagcatttaatgctaatgatgtgcctcgaagttctgaactgccaaaacccaaagcatgcaatttttcaaaaatagggataagacaaaatacccttgtaatcatttaaaaagttatttttttaatttaaaagtacgttttaaggggcaattgttatacc

SEQ ID NO: 322946 - DNA, 1116 bp, Cannabis indica
ttaaaattttaaaataaagtaaaaaacaaataaataaattattttaaaattaattaatttatttattttttttttcttttttatttttttcacaaagccacccttacttttctctctccccttcgtcttcttcattctgtgccaaaacctccataaccaccatagtctgaagctcaaaccgttgtcccctaaaacctccatagccgacccttgcttttctctctccccttcgtcttcttcttcatgaacttagccagcctctttcttgttcatcttcctcattttccttcaacccaacacaaccatcatcaccaccctgagaactccacttctctcaaattcgttcgagctagactacctcaagatcacaacgtcgttcccatacttccctttcacacgccgtccttctcattgcacaaatctaaaatattttgagcaaaataggtgtttagagagaggtttaaaaatgtcaagcctcacccccattttatttcttctcctacaattttcccacaacaagaacaaaaaaaaaaattctcacccacaccatgctcaaatttaagattgggaccaagccgatgtcgctccagagcctatcactgggaggttgaaatttagaggacagtgaaccaattctgggttggtttttgttatcaataaccggagcctaaccaccttgcgaaattgaagggaaccattgtcagatttgggattgctttcagtcatcgacgactgtagccatggttttgatgcgatcaacatgatggtgagtttatgagagatttgtgggtgatgagttagatctgaataataattttttaattaattatatttattgatgctggaaaattgataaattctttgaagaagaagaagaagaagaggaggatcgaggtgggtcctcatcttaacttttggaatcaaactcttttctctgcaattttctttttcaaaagaccatgatgggtttcgttgttagttcaacaaaatcttcattagagtcatcagtattatcttcaacgatttaacactcgctattgcaggtttagaacttttgcaaatgaacttcttataggtcataaaatttggaagaagaaaaaaaaaaaagcaaaaaga

SEQ ID NO: 322947 - DNA, 2632 bp, Cannabis indica
aaaaaagtgttatcaaacacaccctatgcaaatagtttttagattcagtcaaactaattacatattctaacactattatatttaaacagttagttaaccaatcacattttttgaaatatattttcaatcactaaattcagagttttattttagaattatagtttttaaaaaatagaatgttccacactcaagaaccattcagggcagataaattttatactttaatttttattttctcaaaattaagtaatagtaacaaaactttcactttagaaaaagaaaaagaggtgtgaatgctttttttttgtcagaaattaaaaaatactcactaattaattagtagcaatcgatccaagcttacaaatggaataaataataatattcccatgaaaatatatatatatatatatatatttatatatatataaattgaaaatgtaatattaaagtatatttaactatgtggatgccaaaaaatatcttgtggtcccaaaggtaggaactctataaaaaaggatttagattttcaaaatgaatcactagttcccagccacaaaaatattggcaaataatattattatatattaatcataataataatatttaaaaaaattaaattatcccatatactatttttttgataatttttatataagttcctatacaaattttattgtgatttaagttatttagttgtttgctatgtgagttgctacgtaaatttctctaaaactatataaaaaaaatattttaaagtataaaaatgaaaaaactcctaatatttatttagattatacaatattaaatttttatatgggtagtaccaatatactcattttgataagattaatttccaatattgtgttttacattatagtatgtaagattaagggtaaatggcggcaaaacctctaatactttcgttttggtttcactaaatcccaaaatctaaatttctgcgggtaaacccccaaaactagaaaactgttagcaatttaacatttccgtccaaatttagctgttaactgccaagttagattgtccacgtggacacaatatacacgtggcacaattttattggtccacgtaataattatttaaaatataatctagaaatactgtttgatcatcacaaaaaaatgttattataaaatataatcatatgttatataatcatatgattaatataataacatttttttttcatcactaacactttatagttactataaattatggctatatattatatatctttcaatcacaaaaaaaaaaaggttataatcatgaagaaaaaaaaatgtgagtagataggtgtgtaaatgtaatggtgtaaataaatcgggttggatttgataatgatttaatttgatcggaatttgttgttgatctaacctgctctgctctgctaggttatttttctaagttggatctgacgcgatccaaatattcaaatctaacttttttttcttctacaaatttaaatctttgtattaaaacttatgtatgattatatttgattactaaactcaataaaataaataatttacaaaattgatctactagttttaattatcaaactaaattttcttaatatatatttgaagagaggaaaaaaaaaattatcaaaaataagataatttgtttgaggagtttaatttttttttttcaattggtcctagtagatattgttttagatacaaaaaataaaaaaaaaataggataaataaatacaaattttttcaaatataatgttaatatttttcaaaattcatcaccaataaataataatgtagtatgtcaattacttgaaattaatattttttttacttgattcggttttgatctgataagaaatctgtttgttccgattagaaccgtccaccaatttgaggctccgatccgaccgaaaaatctaaattttgccatgcctaattaatggtgtggggtgaagtcttgtatataagaaaaattaaaaataaaccaacaaaatattgctaatattgacaataaattttaattgtgatgaccaaaattgatatttgtaaatttacataagtagtgttatttggtggggagtgtgtgtcaatctttagaaataaaaaaaattggtccatgtatagcgattagctaccaacaaattataatttgatattcatattagattattttaattacaatttgatattcaatattgatatattaaattattttaattaattatttccctaactagagattaaagcatgaaacaccacaaaatttgacaagcataacattatgtcatccaattaattttcatttgttattgttgcgtttttttttttttttgaataaatttgttattgttgtgttgttatttgatgaaatccaaaaaactataattaataattatataaatatgtattttttcaaaatcatttttttttttgaagagtttcaaattcattttaaattagtaagaatgagaaaagttaacaacaataaagaagaaaaactaattgttattattattattattattattattattattattattattattattattattatttttaaaaaagagtgcccttaagcttaaaaaaagtgttgtagcaaaatataaataatatttaatttaattttt

SEQ ID NO: 322948 - DNA, 1211 bp, Cannabis indica
ttaatatacaatccaagtttttttattttcttttttgaatggtatactatagtatagaaaatatatataccataatacaaaatgtatataccaccgagatgacagccgattgcatcgatccgtattccccttatcgtgacatcgtgtcctccactgaaatgacagccaaatttcggatataacaacatgtaaaacatgtccctgtatctgctcaacttgctgaatgcctgacaaagccaatctccagttttcgattcactgatattagagacaaaatgtgtatatatagtttccaaagctacctacactcagtttgatgggggctgtcaaagatactaatagttagttagttagttatcctgtgttagtttttactgttacaagttagttacatctgttacaaactctcttcagtatagtataaatatctgcttgtaattaacacttaataaatcaatacaattcaattctttcaatctttcttttctttttgtttctctcctttcctgttttctggttcacactcatcattagtaaatattactcatgcattaagaataattataattaaactaaaagaattgctaaaaagttgccacacatttttttcgttatgatgccatatttagcatgccaattttaagtttttcatttattatggagagatactgaaaggagtttcctcattttcattcattcgtgatatagattttgactacttttctagaaaatggacataaaatatatttgataggatcttttgtctgtcaatattgatacttaatgtagtgaaaatataaagcttctgcgagagctcaagaatttaagacaaaatgcttaccgaaaaaagaaaaaagaaaagactaaatttaagacgaaactactttatgatttacttttctgtttttggaacacgttgaatgaaaaactaaaagcctttatagctagtaataagagattaacggattaagcttttttgcaaaaggcgaataatttaagagtaacttttgaagttacttatatcaatatgtatatattccatatttctaataagtttaatgtgtaattttgaaaaatgcgatggacattattttatttattatttattatttctgttaaagggcaatggatctgattaagatcaaatctataactatataactatataaattactttttaaccttagttcaatataaatcacattacattt

SEQ ID NO: 322949 - DNA, 1335 bp, Cannabis indica
tttcctcactgatactcttcactactgctacttccaaaccctaaacccgaaacgtcgtcgtcttcgtcttcgtcttcgtcttcctcctcttctatctcatcctctatcttgcatttgtggctcctcttcccctgagctctgttgggttccattttctcagacctaagaataagaaaaagaaaaggtataaacagaaagagagaaaaggaaagagaaaagaaagacacaattatcttttttttagaggaatgaagaaatatatttaagctacacataaatatatataggtagcgaggaataatagacccttgtggaaaaggagaagaggagaagaattatgtatgtgtgtgtgaggaccacaaactccatttcctctctactaaatcaactctctccctttccaaggttaacagtgaagtgttaaaaagctcattacattttaatacgtttttctacattaacaaaaatcagagttaaaagtgtttgataaattttgtctttgttgtaataacagaattttctgcaccactagttttaattcctttttttttttttttttttaacaaaaatttaccgtcttgatttcatttatatatttagtaacctttcgttggattgtattttttttttacccttttgacaagtcataacagttttcctcatactatacactaggaagcccctatagttgtataatttattataataattacgaaaagaaaaagagactactctagtctagagctaattttgttataacttatcataataagctctcctataattgtagaaaaatacaaattaaaaaaaatttagacagttttgtttctaacaactctaataataagcgtaattatcttaattatttctactgttgtacaattggctatagtttatctccaatgttttctgttgcaccatcattttcattgtggggtttctcacctcgagacgtactcaaatctaatccaataatatgcagtgagaattagtaaaagtaaaaaaaaaaataataacatttgtttaacgaataaaagtcgttatcaatttattgacaccagcaaaattataaattttcgtgctaacaaagtttttaactataaatgcatttataagtatataaacatatatcagaacaaaaaaatgtatatataaacataaaacttaaattatgcctcaaaatattatatatgggttactattggttatattttttttatgtggtacaataacaaagattactaacatgtaaaaacactacaaaaaagtagttactaaagtaaacaactttttagtcacaatataaattttttgtgattaaatgtgacttttagt

SEQ ID NO: 322950 - DNA, 1212 bp, Cannabis indica
ttttttttttgggggaaaaaaacttttaaatactttaggatgtggaaatgtcatcctaagtatgatgacaaattaagagaagtgtggaacttgagaatctcgagtagcaaaatgtttcaggttgtctacaagctgaaacaatttaaaggtagattgaaggtgattaataaggaaggattttgtgatttaaagaagcaactttctgttgccaaagctgaactggaagcttttcaaaaccagttgcagcagcagcctcttgaggccaatttacaccagcagtagaaagcagcccgtgagaaattgcttcaaaaacagcaggattatacttcctttttaaaataaaaagccaagatggattggatacaagatggagacacgaattcttccttatttcatgcttgcattaagcatagattgaggcaaaatcgcatactttccattgaaaatcaagagggcagcagaattacagatccaaatcttatcacagcaacttttcttgacttctataaaagcctactgggtgctaatagagctcacaggaagaaggttgaaaggagcattctcaacaaaggtcctctggttacttcggattaggcagattggttattacaggagttcactgaagatgatataaaaaaggttgttttcagtattcctgggaacaaatccccgggtccagatggcttctccagcagcttttaccaagacaattgggagattattagaaatgagatatgtggggctatgaaatcaggtaacatattgaagtaaatcacagtctaccataattactttggtgcctaagattaagtgccctaattttgtcaaagatttcaaaccaattgcttattgcaatgtgatttacaagattgcaaccaagctattgagttctagaatcaataatatcctcccttcaataatatcacagtctcaaggtggtttcattaaagggagatttataggacataatatcttgatttgtcaagatttggtgagacactatggtagaaaggcaaacaagcctagttgcatgatcaaactggacctccaaaaggcttatgatacgattgaatggagctttctagaagagatgctatctggcttgaacttccctgagaaattcattcatttagttatgaattacattacaactccaaaattctctttgatgttcaatggatcgctacatggtttcttcgaagccaagagggg

SEQ ID NO: 322951 - DNA, 629 bp, Cannabis indica
aagacacactactgaattaaagctcccgtctaaatgtagaatgatggcacggacaaagtagacaatgagtaaagcttcaaaagctgacccacactttgctcgactgtttactgcaactagtgtggagcaagcatgactttgtaacaatatagaccaatgtccattcagaagctagtgtgctcttggccaggtggaggcattcttatctgattgtaccccaaataggcttccataaagcttaggatttcatgcccagttgttgcatccacgagctgatcgattcttagaagtggaaaacagtcttttgaacgtgccttattgaggtcggtaaagtcaatacatactcatcgtttattatttggcttgggcaccaatacgaaattagccaccccggctgggtaaaaaacttcaataatgaacttgtttaagcgaagcctttctaccttttcttttagttcttgtgcacgctctttgtccaacaatatcctttttgttagatgagatgaaagtttggatcagtgttgagggcatgagacatgacagttggatcaatcccgaccatgtcctcatgtgaccaagcaaaaatgtcgagatttgctcttagaaattttattaaagctaatttattt

SEQ ID NO: 322952 - DNA, 788 bp, Cannabis indica
aaaattattttaaatactaaaacgaataaagatgtatcagtatattccttttaaaaagtgcattgtagaattccactaatatttctcttattaaatatggtagatggttggtaggtaaagcattagacaattaaacttcataaattgacaaaatattagtattgtattcatttttgaaaaaaaaaaatataggaatttttattcaatataaatgtacttcttaaaatttgtttcatattcagtcttgacgattaatataatatgtgttagtatttggtctctgcaactatatttagttgaatcattgaattgaattgaggatggagagaaacccattccactactaattttttcttctttggttgaaaattccactatatataaatctcttttaattattttattttttgtaatgtctcccatgtttatatatatacaaaaatacataaataaaataaggattgtttgtgttgtcattttcttgttcattttatataatactataattttagttcgttacttgcactataaggtggatacttctacaatgaaccttctaaaatgaatattaagaatagttagttatttatttaaaaattgattattgttaaaaaaatttattctatttcatttatgttatagttattttaaaacatttttataaaaatttttgaagtagattgtaaaattaaaattaaatacacaaagttcaaatagtccattgtacatatttctcaggggtgcagatctctcatatctataggtctactaatactcattctcataaa

SEQ ID NO: 322953 - DNA, 745 bp, Cannabis indica
tacttagactatatttgttaggaaggatggaaagtagaatagaaggaaatgttaggagggatagagaatataaaagatggtgttataccctaattttataaaaaataacaattatgataacattttacctaggcattaaggtggtgaaaccaccatgcctcatcacctcaacttacacctaagagagggcacgaagtcaactcactatcccaaaggtcgagatactcttcattaggacatcatctcggccttttctcaaagatgatcacctcagacttgtttcaaagaccatcatctcagacctaagtggggaggtgacaagcattacctcagccctaggtgtgaaggtgctggaattattttaccaggatcttagatttactaacaagtatgttatttaacaccctaaatatgaacttctaaaacgatatgaaataaacacatataaagtataagaaatcttacagtggttacaacggaatataatgtctccttccacttagatttctaacccttgtatcctttctgtagcagagtatcaccaaaatctgagtccgaatctccttctcttgaaactggattcttcacagccttacacactatgattgagtactacttgatgtgtgtgggcaatcactcttttcactatgtggcttcggtttagaagagaggaagagagagagagaggtttcggctagggttagtgaaggaggctcaaattttatctgaaggaatgagatgcatc

SEQ ID NO: 322954 - DNA, 536 bp, Cannabis indica
agtggaaattaaaatatgggtacctgatcatcagagttaatgaggcaaacaccaacgttgggacggtacccaagaggcagattctccattgttctgctccactaccactgaaaaggagtttaagagaagctttctctctctctctctgtatacctatctgggaataaatgcttagaccattaggaatttcagaagtatatatatttttagaaagaaaaaaaaaagagtttttttgtgggaatgagtgacgctgaccatgacaaaaagtggtgagtcagagcctcagagggtggagttttgcccccacttaagttgcgcacccgtgcgctcccttgccttcggtaccatcatcaaataattactcattagtcgtacgccccaaagtcaaaatctgctgcgcttctttccactcttttaccgttaactcccatggccttttttttttgataactattaaagaattatttaacaaaaacataaaaacaactcaaaaaaattacaaaaatatgattttacggaatttttaatatttttac

SEQ ID NO: 322955 - DNA, 1298 bp, Cannabis indica
tttatgagggtttgttttctttgctgttaaagtccacattcaaatttttattgctaaaaatggcgtcgaagaaaagagtccgtccggtgcagaagaaaaggctgaaaacgacatcatcatcatcatcatcatctgctgaggacagaatttcgagaatacctgatgcactcattctacacatactctcgtttcttcccactgtggatgccgtttccacaagccttctttcaaatcgttggaaacgcatgtggtatttagtccccaacctctctttctccattactgcttctcgttataaatcatcacaggaccaggaaaagttgtgcaattatgtagatagttgtttggaacaccgaaagaaagctatgttttataattgcaattcagtcttaactagttttaagcttcatatggattgctatgaaagaagcaaggatcaccacttagataaatggttagcttttgcggttgagaaaaatgttaaggagttaaatctttgcttgagggtagagaaataggaaggtgtgtactttgacttgatgattctctactccttacctaaaaccttagcagtcaacgcaagatatttgactatttttgagttgaatagggtggagttgaactctgattactcatatagttttccatcattaaaaacattgtcattgacttatgtcaactttgtaagtacatctgtggtagatatgatcttgttgggttctcctttccttgaaaaatgactgataaattattgtttttttatactattagttcaaatctgctccaaatacgtagttcaagcctgaagttcttggaaattagactcgttgaaattcattggattttaaagcaaattgaagccataaatcttgagtcattggaactaaatggtgtttgctttggctcattaaatctctctgtaggcaaggcaattacaaatctctcattgagttgtgattggcgtatgaaagagtcttcttcattgttggagtatttcatttcaaaccttcctctgcttgagaatttgactttggaaaatagtggaaaagggagcttaaagcacataaaactctcgaatcaacacttgaaaagtttcaatgtgaataatccttatgatgatgaaaggactgttatgattgaacaggctccacaattagcatcattttgttatacaggtaatatcaattttagtatttcaatggagtcatacaattctttgaatggaacatttgtaattcttgggcagcatgagaactatgatggagactggtttatcaacatgatgaattttcttatga

SEQ ID NO: 322956 - DNA, 600 bp, Cannabis indica
ttttttttttttatatacaagtaaagtgaattttttatgcctaaaatcataagtatctaaatatgcgtatgtatttatgtggtacatgtgtatatatttatgtgacacgtactacttaggagttcattaaaactgatgtgttgccaacattgtgataaaattgtgtagcttcaattcaacttggcaaattttgtcatttacaaagttttggttgaagaaacaatgacttgaaaaatatattgataatattgtgattacaagtctagttacactatatactataaattgaagctctatcatatataaagtgtatgatttatgttcttttttttttaactgtttagtcttttggattaagctttcatatataatttttggattaagttttgttcaaatttggcattaataaaagggtgaatgacggcaaaacctctaaaacttttattttggtttcacttcacccccaaaactcaaatttgtgcggtaaaatccccaatactcgtattctgttagcaatttaatattttccgtccattttaggtgttaagtgccatgttggactaaacatagtgtacatgtggcacaattttattggtccac

SEQ ID NO: 322957 - DNA, 1061 bp, Cannabis indica
tggcaaggaattcattggggccgccaattattggaagaaggattgcgttataagattggtaatggacacaacgtattggttggtgtggataaatggattccaactcattttaattttaaaccagtcagttatacgggcccaagtaacattccagtttcatcattcatcaatgatcaccgagaatggaatctccctttgcttaatcaacattttcaaccaattgatgtggataaaattgttgcaattccactaagctttttccctagtcaagatcggtatatttggcatcatactacaactggtttgtatactgtaaattctggttttcacttggctgaaaacttagcagaaaaccgagaatcaagtggatcaagcgctcatagggattggtggaaaactttttggggcctaagtctaccatcaaaagtgaagatctttgcttggagagtaatgcaaaatgcactccctatggccactgctctttgcggaaggaaagtaataaattctgccacttgttctttgtgtagtaatgcttgggaatccattggtcatgccatgtttaattgcacaaaggcaaagaaagtatggagggaaactaagttcaaaatagaccataatcatgctcataatatgcacaatggtgattatctcattcacttgtcttcaattcactcaaaacatgactttgaattaattatatgtaccatgtgggctatttggcatgagcgcaacaaggtaactcatgggggtgttccatgatcaagtctcactattgccacttttgcaagcacgcacttggagaaatatgcacggagtagaactaaaaaccggtctgactttcactgcaccagtacagccactgttgctgcaccaattcagcaacaaaatgtacaggttcatccaagtatgccacctacagatcaaagagccagctcgtctactgctgtacatgcagataaccaacattctgaccgtagcttcaacgcttttccctggacaccaccaccagtttttggtctcaaattaaatgttgatgttgctgtaaacacagacttaaaaat

SEQ ID NO: 322958 - DNA, 1123 bp, Cannabis indica
attgctaacatcgagttgtgtcacacgccagtttgaagtcacagccaatgataatacagtgcgaaccgtgactggttttacaacaggagaaaaagtctcctcatagtcgattcctggggcttgcaagtacccttttgcaactaatctggatttactatccaatgaaccatcagaattcaacttgatcctgtgtacccacttgttatcgattatgtgcatgccttgttgtcgtagaactaatgtccaggtgccagcttttttaagagcatgatactcagtctgcattgaactgaaccatctaggatctttgagggcagcttgtagagactttggttcagagggcaacaatgactcaggtaaaggatgctttgttgccagaaatgctttgggcttgacaatgccattctgagatcgggtaaccattggatgagtcctgggagcaacattgtgttctgagacaatagtggatggtaaggaggaggtattggtttgagtgaggtttggtaaaggtgggtctgctatggtggtgttggtttctgttagagcagggacttgtggttctgcagaagaggtgatattggagttattcaagagaggagaatgctcagggatagttggtaagggctgtatgtgatgttcagagatacttggtaaaatctgtgttggattttcagatattggtggtacaaaggagtgattctcgggtattggaacaggggaggccaccattgtctcagtagcagtgttgaaagaggcagtagaatcaatgttagtgcaaggtgtagtaaaaaaacttgcagtaggagaaaattgattacaagtggcagaatgtacctctgatttgttgatgttatgagacttgccagggtataaatgttcattaaaaatgacatttctggcaataaacagtctaccattcttgttttcacacaaatagcctttgtgtattagagagtatcccaagaataaacactgctcagatctgaagtccatcttgtgtgaattgtagggtctcaaatgaggccagcaagcacagccaaagggttttaagatagagtaatctggtttagtgtggaacagacattcataaggacttaagttaccaagaacaggtgtgggtaac

SEQ ID NO: 322959 - DNA, 2090 bp, Cannabis indica
attttttttttattgactagccaaatagacccctcatgcgtcttctatcacactttgaaacaaaggtcttgtttgactggtcacgaaaaaaaatcaattttttactctttaatgtttaatttgttggaactaaaccaggtaaaaggaaaactctgaacgttctctttcaactgcacacgaagggccctcttcctctctagttctatctccgtccagcagcccatacgagtgacttttttccaacgacggacaaccaatggagttcagatctgagttctgccattcgtaacctctaggtattgttccatctccttctttgttttttttaatgctgattttgttcttcatatatcttggatctctatcattctctaactgaggttagaggtttgtggcggttaattaatcacagggcatttgagtttgtggtgtcgacgacggttcatggtgattgtcgatggtggtttgtggttgttgagtgtttattattcttatagtagtgattattttgggttttgttgtagtgatctgtatatgttacggaaaaaaaaaattgtaaagcaatggattttttttatctgaaaaatatatgtattaatttttttttttggaagaaatgtgaaattgtaaagcaatagattgacaatagattttacatctgattattttttgatatttttatttattttttgtcatttattaagctatttttagcctctttgtcgaattatttttagagttaattttctattatattgttactttttagaatagaattatgtttgacacatttcagaaaacaatgatctataaaatagaggaaattttgtaagaaaataaagctcaaacttcaagcctaaattcgactatattctgatcaaatatttgaaaaagtcaaaacattaaagttttatatctctttttcagctttccaacgcattttgaatcagcccatttgaggtttgaatgtgaaagtaatatatattttactaagagaggttgaagcaaaacattgaattttggtcgcgacgagcctgattttcagtcgcgaccagaagtattatggttgcgacaaaaaatggacagaatgggtgctttttgacttactacagtcactgcgactagacagttcgtgactagactgtttgtggtcccaatgacggctccgtacgggacatggacaactttttcttttcttaatatttttgggctgaaaaactctattttaattaaaggggttcgtgaatttagaggaacattcagaaaaaaaaaaaaaaaccctaaaaaacaaaaggagaagactcttggagcgagcgtgacaatccgatcgagttcaccatctagtttctttttagtttaatcatggatttgaatgttgagattatgaattgatttcctaatttagggatatgatgaatgttggataacacaatacgtttttacagttgtacaaaacttttctaaaataagtgttttgcagcgatagaatcacactctgcagtaaaaaattaggaaactttccaaataggtcaaagatcataatttggattgtaatacatacaatataaaaattatacaatctattatattcatagcaaaaccaaaaaatacaactaggaaaagagagtttttttttttaaaaaaaaaaataactcatttaattaaattttccgtaaagagaattatttcttctcttttattaaaacttttctaaatgaaaatgatagccattaaaaaagccattaaaaagcaactaaacaataaaaaaaaaaaaacaatattttattctcataaaatatttacaataaattaaaaaatattttcacaactatattattaaaaaaacattttacatatactataggaaaattctataatgcatccccttaaaagggatgtattgaaacatctctatatgttttagaatccaaaataattttttactcaatttttttttcttatggtcatgtaaattattgttatttaagatatcctgcaaaattttaagaaattcggaaaagtttaacacgctgaaaactacgttcaaaatagtgtattgcacgagtgacaattttattttatacgcgtgt

SEQ ID NO: 322960 - DNA, 619 bp, Cannabis indica
gattacattgaaacagagttttatttagggcataaaacccaacatctacctctatctctctctctctctcatcaagaacacaaagcttcaagttttagtatagtatcagagttatggcttccaatcaaccaaaagcaccaaaaaaatgcttaaccgacaacaccagtactagctctagaagctcctccaaatgccttaccaaacaaaaacttacttccactaaatctcaaactcaatcagtcgaattacacattgtggagatctatattcttgcggctgttcgaggttacactcttgagggctatctccttggcgaaattccaccactacaatagtttcttgcaagtaacattcacatccctgcatttcagcaatagtttcgttttgatcaattcattatgcaatggttatgaattcaatatctaaggcaatgtcattaaatatttgaagggtagaatggtaaatttgtcccttctcgatgtagatcatctatagctatttggattagaacgatggataatttatagtatatctatatcttgctacatatagagcgttctatataattaagagtgcaatttcaaatctatagtggtgcaataggttagagaatgtactt

SEQ ID NO: 322961 - DNA, 621 bp, Cannabis indica
gggtctaagtttaggtccatggttcaagttctcgatctgtgttagttagggtatctgggcaaaaattaaaaaaaaaatgttaggaaaaaaaatatttttaaaaattaaaaataatatttgcaagttttttattttctaattatttgaaactcaatttttgaaaaattgtttttgaaaaatttggctaaaagttatctatgttataaaataatataaaatatgagaaaaaaaaagaagatgaggagagaaagagaaattaaatgagaaattaattgtttatttcaatgaggtgaatttttatttatacaaagatatgactaaatgaatgtaataaaggaaaatacaaatgatgataattaatttagtgatttggaaataaataatatttcataacactccttgaaaggccaaaaaaaaccccaaaaaaaacattgttgaaaaacttgttcaaaagaaaaaaaaaatgcagtgtaaactaactcaccctcatttaggccttcgtggagatcttctaatcgacgaattccaatcttgtatgtcgtattctcaaatgttgatgctggtgataaatttgtgaataagtctacaagattgatactcgattgaatatgttggacacca

SEQ ID NO: 322962 - DNA, 748 bp, Cannabis indica
ttcatggcaacgcatgcagaggctgtcgagttggtaaagaggggcgtctccgacgtcggaggaaagagcttcgacgacggagccaacatccactatttgatttttgggttcggccataggaatgaaaataatgtgtgtgaaatttgagattggttgtgttaattgtgtagtagaagaagtagttgttatagtcttctaggttagagaaaacactagaactttcatttcaaacctttctttttaactcactttcatttagtggttataatatttaaattaagttttaagtaaatatttgtaattagttcatgttattaattttttttaaaaaaaaaaaagtttgaatacattcatagaaaataatgacttaatatctaatagttatgtacttactaaaatttcaaaaatataatttatgtattatttgcaactgaaaattaaacttaaaaatttatgttagaaattactcttaattatataagaaaacatttggcaaccattaaagtactccctatagagtttttttactctatcttttaaaatacattatcaaaactttattttctttattatagagcacacttttacattacatcatttgaaacatatcaaacactcatttttatcttccaaaactaaagagatatcttaattacaagctccaagaatttaacacatacaatcatttatgtcatatctttatatattaaaagtgtctatctaacggcaattcttggtttaacagaat

SEQ ID NO: 322963 - DNA, 1444 bp, Cannabis indica
tctagtttaatactaggaaaaatattcttattttgaattgtaccaaaattaattattaaagagtaatttgcggcaaaaaaacttaagttttactttgagtagcagataaatatctaagttatatttttggcggtaagaaaaccttctgttagagttttggatgttcagtaggtacttggccgttaaaggcaggtaagtgtccacttgtcatcttctcattggtcaaaatgtattaatttttatttttaataaaaatattatttaaatatttaaaacaaaaattaaaaagccatttaaatatataaaaattaaagaaaactagataaaaaaatcaattttttgttgaagaaatataatgttaaaacacatttaaagtacaaaaatcattaaactaatatagtgaaattaattaaaactttttaataaaaaaatatacctccatcttcaccaaaccgaaaacccagaaattaatctgaccaaactccattgtcggacctctgcgaacatcccagacgaagctccatcacatttaccgacgtccacaaaccctgcttctcattgtctctttaaatctcgatcccatccctatcactctataataacaaaagggaaggggaaaaatacatatctcactttaatcatctctagagtgcggcgacgaggacttctaaggttaggctcgcgagggctcgaagaaggtctgtaatggcgaaagacgggatagaggatgtggctggaatctgggtgctttagatttggttatgcaattttgaaaaatcttttgtttgagttttcttattgtttctgtcagatctaatggctttaatatctaaaaaatatttcttatatttgaggcttcatcttgcacttgaattcgtctcctgaatcagatctggtgctacgaagagaacacttgaaacttccttagagatccaatgacggtcgggatcactcctccgagggcattccgaaacttcagcaaacgatcagagtcgacagtgtaccaacgactgaatgtctgatatgaattaatttatttgatttatggtatactcagttatttttttgtgttgtattatgcacatgaactgctagttatagatttgagtaattttagaatttattttttaaatttttgttttttagttatttgttgtatgtttttatttattaatgtggcttctgtaagttttcgtttctttgttttctgctgcatattgaaaaaagaaagaagaagagatgataatggtggaagatgaataggacgtacgatatacatttagtaatttaggtttttcttttctattgaataattagtaaaaaaatttagaatgaataattagtaatttaggttgtaagaaaactttagttttaagttttacttttttaaatacttaaatatatataaaattttatagtatatttttctttttttttaatatta

SEQ ID NO: 322964 - DNA, 431 bp, Cannabis indica
tttttttttttctggctaggtcatgatcaataaagtgaagaactaaaccctcaaaatttttgatgtacattaaagataaaatttaatatatggtatattttatctaaatatatataagttgtgtactttgtgtttttaatatataatgcttatataatactttgtattttaaaatcatatatttgataccttaaaattaaagttatttcataaaattttattaatgcaattaaattatctttaattttataaattctaaattcaaatttcattatttgattacatatacgaaaactatataataaaaaaatatctttagtaacaaccttttaattattacaacataaaatttttgtgattaaatgcgatttttaatcacaacaaaacattacctgtgactaaaacatagtattttgtaacgtccccgcttc

SEQ ID NO: 322965 - DNA, 984 bp, Cannabis indica
atattgacagtggaaaatatattataaacttactgttatatttattctaatttagtatcacttaattgatcatatatcaatttaatctcaatcttgagatggttaaactttaagctaatatcaattttcccctacttaatgtaaattttctatagaggatcattgattattgtgatcgaaacaatagataacacatagcatatctatacatgtatatagagtattttttgtaattaagagttcaattctgaatagtgaagtcacaaggagcttgatttcataagttcatggtcctcgcaatatttgggataatatcatattgtgtctcaataaattgatttatttaatcaattaaaatttaaaaattgacttagttaaatatgagaatttttcactaagttgggtcaaatggagaacaaaaaaggatatatgtttatgtgttaattatgaaaaattagtgtcaaaattaataaattatatttaaagtttcaatttataattattaaaaattgaataaggtttcaaatataatataaaaaaatttaaccattatttatttatttatttaattaaggttatatataattatgaaaactttcaagtacggattcatatattatatagaatataattataataattaattaattaattaataataataataatttttatttaattatatgataataataggaattagagatggaaattgggcggttaatgtacggggaatgcaatccccgcccccatccccgctacctatttataccctcatccccgccccatccccgtctaataaccaacggattcgaggtaggggaatacccatcggttatggggaacccatcgggtatacattaaggtaaaatagaaaaaaaaaaaattaaaataattgaaaaaaataaattaaaccaatattctcacaaatatttattatgcattcataattcataaaagataaaagataaacctacctaaaaa

SEQ ID NO: 322966 - DNA, 2167 bp, Cannabis indica
tgattatattgaatgggtttattaggcacaaaacccaacactaacgtcaccctcgaggcagagttaatagagtcgaaggtgtgaactatctcaagctacgtaggcgattcactaatgacctgtggaatcgagtatgggtgagactgtcgggttaggtcagtacgagccgatgaatttagttgttacccacctgtgcgtcttacaggcgagacctctgagggggccagtggcgagaccagtacaagtagctcgactggtataggcgcttggagccttgagcacatcaggcaggggcaataatccccctttgtgattatttcaaggactttgtaaactacctcgggcttgccccatttcaactaaatcctttctcctacaaaatacttgcaaggttgagggttctgtacaaaatcctgaattgggagggccccactccctatgaaatagagtatctttactctgttaaagtcattccagcgaggaagaatgccgtaggaggctatatcggcactcactttggcgagcccaaaatcattgtggatttgccaaagaaaacatccttcaaggacaacttcttttggacaactcgcctctccccaattggcacaacaactttccatataatttgtaagtgattgcttgcattagacttggttaaattaatccatgtcttttattttaagttatctaatacaagttttttttgtttttgacagctctttcgaaaagacctacccctacccctgagatggccaatcgatgcaggctcttgttgactcttccttacggccttaggtcatgcaattttcttctaaacgaggtcaatttgagatctgtggatctcttgactgacaaggagtttacttgtgattacaagtgtcccaattattcttcttggcagtaggttcctgtcccaaacgaggagaaagctcgagatcgcgtggctcaggcacattactttagaacactgtccctcaggatgccggtgaaggatcatcccaaggtaatcaatgtggttggtcacccacattgcttagggttgagcataacactctagtcacattccgagatagcctctttaacttttatatttggcaccccctccttgtagatcgcataacacataggtttgtatagttggtatcccagattccatgttcaaattagttgtaatgagtcatactacagttagccgagcaatatgggagcatgacaaataggacaagtcacctagacgcgagttgggatttagaaccagttgatccctttgatatatttaggatcacaggttgtagggatattagtggatactatggtccttctaccccatcttctagtgatacctcatcttctattgactatggtaaattccttaggcagaatattatggctaaaactccccttttacttatctttaattaatgctaacatttttatcttgtcttgcagaaatgcattttgaggatgttatgcaaaggaaagggaagaagagagtgacaattcaagggctccttctgatgtcgaggtggagcctcttaaaaggccaaggaaaaccaccactaataaaaagaagaaagcttcttagccctttaacctcaaggtccccgagactgaaactcaggatcaaactcctccttcggtcaccgcaagtaccaatgagcctctcctaaaagaaactcacgcctctgcctcttcgagccaggccattgaaacactattttttgaggcaggaaagactagctcagagttcacccaagagtttggagctgcttgcttgcgccagttcaatgctctccttctccatgattgggatttaaccaatcatggggattttgaaggaatgcttacaaggggcttgtctcataccctcttagtaagtttcttcaccctaatctgcttacgtcttttatttctcttcttcttcctccttgttttttatacatctttgtttgtgaatgtccagatttctttcatctcttttgccgcctggcgacgggcatggaaaagataaaatacctggagaacgaggtccagaactcactaggccaacgtgaggtagttgtcaagaaatggagtgatgctcaataggaaattaatcacctcaccaaagaagctgagaggatgaagaagagccttaaagatgtcgagaaggcgacaaaggccaaaa

SEQ ID NO: 322967 - DNA, 1409 bp, Cannabis indica
tactatttcagtgattgtttatgtactaaaccgtgctccctagactttgatatctaccaaattatgcccctcgaactttgacatgtactaaattatggtccctgaactttcatccatgttagacttttttactaaaattagaaaaaagtccttaaatccgacaatcttaattgttcagggggcatttttaacgaccttaaaagttcagggggcatgatttggtacatgtcaaagttcaaggggcaaaaatctgtcaagcatttgtgtgtgaaagtgtaagcactcaacattgcctaatttgtgaaatagactttttctaagtatttgtaaccaaaggagacgttgtcaaactacctcaacagtagccatttttaatggtagcatatcatctacataacacctaattacatattactatcttactcagtgacgactttcacacattaaagtaggttgctctattctttcaatggaacttaaacacacattttctttttattttattttcgaaaatggtagcttacataatactaattgaagtactcaaatattcctaggagtgaaatatttttcctgaactaaacctgtatgaaaatattgtaccaaaaattagcaataaaaataataatatgcaattcagtttgaaactttcttttggaacaaaaaaaaaaaagacaacaacattatatacatcaagtcaaagcaaaatatcaagaaccatcaagaatagattattaaacggtacaaacccctaaggacttccttagagaaataaagcgaactgaattaagaacattagtaaaaaatctttaatgtgcttgcttgtttcaacatatttcaagacaagaattttatttttcacaagctctctagtgtaagtgtgacaagtgtgtgaatgagacaatatgtagtaattacaactgatctataacttttcatcacacaattcccatcgttttgaagcacgaaataatcatcatgatttttttttacaaataagtcttactcataaaattgacttacactgattaaattaaccttaagtccatcaaccaaaagaatattttcaacattgatagtccctcgcattttagagtaccactaccaagcaccttaccagaaacactatcttcaaatgcgacttcaccatttttcaaatgtttaaagtcagtgagcatgtgctcattgcttgttatgtgtctagaacacccactagaacacccactatcaaaatacatactgttagaattatgagtattatgacaagtaaagttagcaagacatttagattcttttttattaactcaaatatttctggaaaaacttccttttctcaaactattttgtttataaaaattagattttaaaaaaattattcatggtaaagcacttaggtcgaatgtgacctt

SEQ ID NO: 322968 - DNA, 992 bp, Cannabis indica
tttgatatagttgtattattagggtcaaaaattgaaactttcctataaaaatgcaaaatttgtaataataaattaataaaatgatgcttgtacgtattcattaattaattattatacctaatgttaatgcattatttaattactaatattatattataatttttaaaaacatacgaggtgagaatataataagatgcataaaagatatttttgctagttattaatttggtgaaaataattctaaaggaaaaatatatattttgtttaaataatttaaattatataaaataaatatttgttgagaaatataaaaatatgtttaaaagaaaaaattaaacttatttttaaggtatttttatatagtataggtgtgtagagtagtagtaaacgtgtaaaattatgtaagtttgacaaaaattgaataattgaatggtaggtgggtacttgtatattaatataatagttcatgaaatttcaaactaggtgaggaatatagggaagagataaagaatcaatcaaattattttcaaaataattagattcctcttaattataattaaagaatctgtttaaataattaaataaacaatataacatatattgtttatttattaaatgataattaattacccatccaaaatctaaatctactctaacaatatactgtacaaaccatgaaaatcaaccctagttgtaattattaaaatacttaaaattattattaattgtatattttttgggaaaaatttacacaatacatctaaaaacaattttttttatatatatttttatagatatttttatttatatttttatgcattttttttttacatattcacttttttttttaaagtattaatgctactttcatgtttcttttatctataaataacataaaacaacatttgtattgttgttaaaataaatcacgttgctttcctgtagcagcagcgtcaaacaacaatttttgtaaaacaatgaaaaaataaagg

SEQ ID NO: 322969 - DNA, 630 bp, Cannabis indica
tctcctaaaatgcactcttcgagtcagtgccaaactccaattgaaccaaagttctatttactcattctatatcccataatagctatacaattacatatttatagtgattcacacccttagcaaattactaataaactcctacactatttcatagtgtaacaaattctaatttctaacactctcctcaaaatgaaatgtatatgtctccaattacatcttgcctttgagaagcttgaactgatttgaaaatagaagctttgttagaatatctgtaacttgttcattgctttatacattgttggtttatttgatctttttttgcacgttctctcttactaagtggcagtgtatttcaatatgcttagtcatctacatttgtttttatgcgttgagcagctttgttaacacaatgcaaaattgcaggatcttcatgtttgactttgaattcttcaagccactacaaaaaatagttatttttagtgataatattttagtctcaacgtaatttttctgtgactaaatgtgacttttgaccacaaaaaagattatttatggctaaaatattgtatttagatacaatttgtcagtaatttagttttagtcccaacaagtattgtgactaaaaataca

SEQ ID NO: 322970 - DNA, 713 bp, Cannabis indica
ctactaatttattagcataaattttaattttgtaataaatggataaataagtgtaatttattaattacagagatttatatagcatgtgtggatatatatgagttattggtgaaataaaaatatttttaggtttggtgactttagagaatcgatcaggggctaaaatattataacagatttaattagtgactttaatgggaatgttatgacaaattgatagtgtaagcattatggtaattagaagtatttatggtttgacctagcccaaaagtagagatttcttagtggctaaaaaatgatatgataattattattagtaaagtttttatttataatattaataatattattaatatattattattatataagtgataagttttaattaatttatatatattggtgactattcaatggttacataaagacttgtatttataatatttatgtgctttgtgaagtttggaatgatttggttaggtgtggagctattttggagggattaaagttgaggaaaatcgtatttcagactgttcaaaaatggaattctagatggtactaatcggaattccatttggtcagttttcgagaaaagctgaattttatattttggccataacttttcactcggggtgtccattttagactttgtattatctaactaataaataatataaatgacaattttatttagtaattaattataattatta

SEQ ID NO: 322971 - DNA, 492 bp, Cannabis indica
aaaaaagttaaaaaaatagtacatggagtaattccccaaaaaagaattgatatttgccttggtaatctttttattattgtttttgaaaggaggattgtcttgatttaaaaaaacaaataataaaataaaagaggatgtttgtcatagtatttaaggagatacaaaatgaaatcatctgcacttgtccacaaaatgtttcatcacttttagatctaacaatcacgctttagattagaagagtcttatgcaattaggtttgagaactttagataccacattttttataagatgattataatagctagtatggtggatttgttatataaaaaaaaaattaagtaccgattcgggttaattataaataagaataatttctaaattataattagttatacattttcaaaatctcgtattaacaacctagcttctatataaaaataattacatcttaataaaatatatacatatattttgtaaatttatttacgtaaa

SEQ ID NO: 322972 - DNA, 1946 bp, Cannabis indica
gatgccgaaacaagttaagggtggatcagtacatcccttaaaggtacattgtagaatcacccataaataattatctctatccaaaattagactaagtttccattttaagaataacgtgttacactttcgtttcattattattatatttattaaaattttaggtatactattatcatactaacaacaatattacacttggctttctattagccacacttttattttctctttttacacaatattatatataattttttatttaatgtgatttagttagaaatattaataaaaaaaaatacacctttttcaaaagatttttttttaccatacttaaaagttttgtttttcttttttaagccaaaaatagcctcatttcaagaattttctataggtcattaacatatattattttctctctttttttactatctttttttacattttttttttatgaaaataaaatcaaacaaagttgattatatatagctcatacaaaataataataagctcattcaaagccgtttacaataaaatagaataaaaactattaataaattttttttatttaatatattaaatctaaataatttttattttttaagaaataataaatactctttaatttggttaaaaaaatgaattttaagtaaaatataaagtaattaatgaagtacactttttcaaaaagagataaaaaattaccttaccaaaaaattaatttttaaaccaaaaatagtctcatttgaaggattttctataggttattgtgtttattaaaaactatatccaataaaaaataattatacaaacatgattttttataaaaacatcattaattattattagtaagattatttcatatattattttttaattttttttttttaaatttacagtttgaattgctttaataattaaaccaataatttttatatggattattatgtaaattttaattataatttaaattgttctattaattattatatttcgtaaattaaaaaaataataataataaatataaaaaaattatgagtaaatttttttttacctgcaataatgtcggccccaccgctgataaacttagaaatactatgcacaacaacatcggctccaagccgagccggagacaaaaccatcggcgcaaaagtattatcaacaaccacagtcacacccatcgcgtgagctacacgactaagctcaggaatatcagcaacagcaagagtgggattagaaacactctcgaaataaagcaccttcgtctttccctcaacgatcgcgtgtctcacactctccacatcactaacatcaacgaaagtggtggtaatattacaaactcgaggtaaaaagtgtgtgagaagagcgtgggtcccaccgtaaagagtcctcgaagcgacgacgttttggccattacttactaattgcatcaaaacagaggaaatcgcagccataccacttgaggtacagtaagcagcatcggtgccttctaaagctgccatctggcgcccaagatttaggaccgttggattaaagtgacggctgtagatgaagaaatctctgtcggcgcctaattctccggcgaacattcgccgcatcgtttcaggttccattaccgtgaaagttgctgatgcttcgattgacatgtttacgccgccgtgttcgccgaattcgtggcgtgctccggctagtgccgccgctggatcttggtcggcctttgtagtggggaacagcattgattttttggtggtgtaatcgaagccgtctacgccgtcgtgtacggcggcggatcgtttcttggttgtgaggaattgagtttcggccattatagagagagagagagagagaattgagattttgggttaatgggaaatgttttgtgcatggaaatttgggtatttatatatgaaatttatgtacgattattttttttttagaataagtatttt

SEQ ID NO: 322973 - DNA, 1553 bp, Cannabis indica
tattttttagaaattttgaggggaccagggccaccccaactacacacctgcctataccatttatataatttttcataagctaacagaaataattaaaacaaactatcaaataagaattaatcttgactagtgtaataaattattttattacctaccgatttaaaatatttagctactaaatttgactcacacaattacatagctaatacttctattaataaataaaaaaattgaatttgctaccaaattatggtagctaaacaaaattaatagacaaaaacattaaatcattttgctactaataaatattttttgctgcaaaaaatttaatagcaaataatgtacatttgctaccgaaatttttggtagttgaacacttttagcgaccaggattcagctacgaacaagctaccaaaaattttggcagcgtaaagttttttcgctaccaaaaagatattattggctaccaaaaattttgtaggtaaaagacatttttcttgtagcactgggtcttggattggtagtcgtcagttgattggtggtctttggttggaggtgcggtggttgacaactgccggttgccagtgtctttgtgtgcgtggaaagtagagagcgagagagacatatagaatagaggaatagaaagaggagagctgagttatgagagaagtatttttgggtttaataaaaaagtgacctatctaactaattttaatatatttatatttaatgtactaattttatcctaatgtatgtgtaaagtcttttttttttttggcaatttaagtgtcaaaatattttttatttattgtgtgatttctttatgcaattaaactgatttgatctccttgatattgtgtctttattgctcttttctttcaaaggaaagaatcattttttagctacatttttcttattttggaaacttcttgtaagagaagaaattctcttatggaaaattaattttatttggaaactttgaccatttattttcctccttattatgatcgattttgtcttgataagatcagatcaagcacactgtttttggcaggaatgaagtccatgttcatgatcgggcacctatttggcaagtttcttttctggtctggtttgctgctgcagaaacctgattctgatgctgcaaaataggattttttttatgacagtttgtacagttgtggaatcgattttgtggttatctctagggttgctatgttctataaatagaacctagagagcagtcaatcagttcaactttcttgctttcattttttgcatatttttcttttgtgaagagagtgttctttatgtgagaacctagttgttcatctaggttttagtgtttatatatttgttcttatactggtcttagagtcggttagaacaacttgtttgaacaaaataaatgtctttgggagaagacttgtcaagtcttactttgggaggaagtaagcactcacacattaaaaacgaaaggagttcgatgtttgatggtggttctgaaatcagattcgtgaagtgtattataaaggattacgacaaagatttag

SEQ ID NO: 322974 - DNA, 789 bp, Cannabis indica
tcccaagtacttatcatgagtagtcattgatgtcaaccctaatactctcagaaccccatcttgatacacctgttgtacattcgaactaaaagtgatagtagacttctcaaagtttatcttctgactagatgtaacctcataagttagaaggatacactttataattccagtatcaactctattagccctaccaaacacaaggctattatccacaaaaaataagtgagtaactcgaggtcctatcctagaacacctaaactccatcagattagatctggcctctatagaacaacgaggacaatgattctgcacaaaaaagtaataaataaggagataaaggacacccctttcgtaaccctcttgttggaatcactcaacctttaggacgaccattgattaaaaaagtttactctagtgtcgtcacacaatccataataaccctaatccaaccctcaataaaaccaaattgtcgcatcatactggctaagaacctccattccacccaaccacatgctttactcatgtcaagcttgagcgccataaatcctcttctggagttatttcttttaaacaatgaataaagtagctcaaaactaaccataatgttgccatttatcgagcatcctgggacaaatgcactttagaaagaagagatgggggccaagaacatttttcatcctcagtgataaagcttttgtaacaatttatacattacattacattacaaaaagcaataggtcgatactctttaaccaatcttggtttttttacttttggtatcaacaccac

SEQ ID NO: 322975 - DNA, 485 bp, Cannabis indica
acacgcatatatttataattataattattagtataattgagtatcgaacattgttattaagcattagtgctgttcaatatcatcactagataacgtcttgcgaatgaatgatgatattctataataactattaaatgaaaccataaacgaccaagttttaattgaatcaataaaaatgtaacaaaacttatgaacaaaaaagaaacttgtttaactacttatgaaatatttattattttttttgagtgtacttatgaaatatttatttagtttgtaataaacttaataattttaagattttgttttgtaatcgctttgtaaacaatattgcccataaccttgccaaataatttaagacaaaaatttagtaactaaagtttttagaattttctgtaagactttaatttattttaacttcaattcgatttaataataaggctaattaggatttttgtcccttaaactttgacatgtactaaataatg

SEQ ID NO: 322976 - DNA, 1080 bp, Cannabis indica
aaatattatgaatgataagaacataatatatatatgaaattaataataaatatataaaaacatatacatacatatataatatatagatatatagataaaaagaaaaaggaaaccaaatgattcttgaaattgtttcagtcagatgagtatatatataaatatatagtgtatcgtgactttgaaacaattcaagaactttaacaaaatacttacattgggtcttaggcagagactcatgcttgaagcttgggcagagactcgtgctgataacgtgttataaaataatataaagtagatgagaagaaagaagaagaagatgaagagagaaagagaaagtgaatgagaatttctgagttgtttattccaatggggtgaacccctatttatacaaatacaagagtgagatattaagaaactaagaaaaagggaaactaaggaaaagaggaatgttgattacaattcatggtaataaataaaagatttggacatccacataattattaatatttataacattttaattatttatttgtattttttctttacattgggattcaaattagctatgatgtatttgtttgggcatcatccatatttggtatattaaggtgtctaatattatacttgcagtaattttttttatattatttattaaattaaaatatataaaatctaatatcatggtgtttggtagcctaaaatgccattttttttatttgtttggatatggaataaaacataagaatggaatcacagaaataggaataggcataagaatgagatgaattaaatttactatgcatataaaatataggataaatactaattactattttagattttatgttttgtaaaagttataaattaaaccatctattttgttaaatgacaaggaaattttaatttttggccttaataatacaagccatatcaaaatttatacccttccttcatttgtacaaatttagtccattaattacatgaacttcccatttaccctttttttttaaaaaaaaataataataaaatagctaaaatctgaaattgatatttctctctctcttccctcttccctctctc

SEQ ID NO: 322977 - DNA, 802 bp, Cannabis indica
agatgggttattatataaatttgttatcaaaacatcaatgacagaatttatggacaagtggaggaaccagagagagaaacataaacagaaagaaaggaagttagcttataggcacaaatacaatggcacaccaacttgcttttgttatgcttttatgggccccttaattcgaagaaagccaaggtaacatggccaagtcaaagctttggctgtgacacaaaacaatctgatcaaatattatctgttggattttatatttattaaaaaaaaattcttcgatttctgcaatttgaatgatctgtattttttttttctttccttttgattttgtccctttcccattgatagtttaaaaaaaaaaagagaaggatttacaattttgtgctttcatgccattaactctaatgatattctgtaattgaataaaatgctactaaaacgtaattattatagaaattacagtaatttttttgttcacaaaaatataattatattatgaaaaattatttgtgtccaaatcactatattaattatcacatttaatgctttattgtattttcgtttattacatattaatttagttcctcattcctttagtcaatactattgtataaatatggattcaccctattggaataaacgaagaaattctcattcattttctttttatctctatatcatcatcttattcttcttcttttcttcttatctattttaagggtaagttgaaaaatactatttttattcaattaatcaaatttacatctaattttatatttaattgaaacatacctctttttat

SEQ ID NO: 322978 - DNA, 580 bp, Cannabis indica
ttaaattaaaaaaataaaaaactgattaaaaaagttttaccaaactcaccatatgttaaccctatgtttgatggaagagaagtaaagtggatttaattgtccaaaaatatatttataacatcgtcctggtaaatttttgaaaaatttaaaataatttatagtgtcaaaaataagtttaaaattttttaaatacgtgtggtaaattaaaatatcaagaagtactctattattgtatggtaaaaaaaattacgtgtttgatattataactataacaaatatcatcataataaaaactagaaaaatatttcagcaacaattttcggacatgaaagttgaaaaagagattgaaataggtgattgatagtagcatatatttatttggttaggaaaaaaaaaaatttgtactagaagaaaaaaagtgagaggatctcaccaaaatatttaaattttatttttactactgtaaattatttagaatttttaaaaaatttattgatgatctgaaataataattacgacatacaccattataaaaaattagactaaatatttctccaaaataccaaaaaataaaaaaaaa

SEQ ID NO: 322979 - DNA, 1068 bp, Cannabis indica
tcattcattccattttttcagaatatttctattcagtccaaccatgaaaaatcataatatttccattcactgagtatattgttttaaatcgtatccatgtggcatctctcttgtagtcatttggtatagtacttccaaattctgctttttacattcaactcaagccaatttgagtttcagtttcaactgattttcttggcaatgaatgggcactacacttaaaatattacccaatagtacaattaattgcctcattacattacatatccaacctaagccaatataaattgataaatatgcagtaatgagaatttactaaaaaaagtgattaaaaacttatgatagaggagatttcttagtgtgttgactgttgaaattccaagttgtttttcactgtacaagaatgaatgagaacaacatcaatcaaacggtcttgaaattattaaacgacattaattgatttgtcgtacaaaaaagaaaacacttacacttgctttcagtgaaaccacaggagttttgttgattccattgttacttctttccttaaccaaagcaaaggcacatttgcatgtgaaagataaaacgacaactccaagagtaagcaccactatggactcaatcaccaatgctgaccccaaagctgcattcattaactcaaagtaagaaatctagtcctcttccaatgcttaattggccaacccgagctctcgcgatgccatatttgttttcgctacaaaatgtggcattgcgagctagctgctgggaaattagaattggatcacaaacacagcaaatttatttgaaatccctactcaccatgagatacaaatgaactcattggccttcttctaataagattaacattagcctctgtgtataaaggcattgaagcattttcagtacaatctgggtaacacccataatttcccatgtcatttactgtcactgataaaactgccccatggtatccaccctacacccaaaacaaaacaaaacaaaactagagttaatactaatctagcttttatatatatatatatatatatatatatatttaacttggtacaa

SEQ ID NO: 322980 - DNA, 1649 bp, Cannabis indica
aactgcatgagggccaagttgattttggaaagccagttgatggacgacttcaacttgtccaatgttacttgccctcatattcgaagccttgaaaccgagaaagtgctctaagaggacatcatcttttccatagaagacaaatacaacatatacaaattcaagaaggaacaagagctggcctatatcaatgctcaggctgcctcggggaggatcctctgagaggaggccgggaaggaacaagtccctattcgccctaagtttcctttctcggtcgccaactctagcgctcttgatgccagcacttctagaacttgtaagtctccgttgattattcatcacgtcccttctattcaagattatgctggcctaaggtcaatggaattttacagtcagttgcataggtttcaaatgccccattaaagatggggttacaatgccaaaagtttttatttttccaaccttagtcatttattgggtcggtcccggatgggttctggacctcccgtaccaatcctcttggaccattctttatacctgacttcaaattggttcctcccctcagatagcattctaggggatgacgacaccagtcttttaatatatacctttgctagtgcaaaattaaatcattagggtaggactagtttcactatgttactcttgcttgcatggttttctgacaatattctgattcctttgttaatttttgaacagcaaaaccaatggatgacctcttagatgccctcgcctacacacacaaccttgaagctggcttgcccgagccacgtaatgtggtggtgactctgggatgaccttctactgaacttcttgagaactaaggtgtcttgatttacgaggaagaagaagaagaaggagaaatcatccctccccttaaccgtaagcataaagggaagatggtggcgacagagccttttaagaaaccgaggagggtggatactcctacctcccagcactgactcagggattccttcagaggttgatgagtatcatgcacctccatgtattatcttcactcccgttcattttgacgaggaaagggttcagctctgaatcgcccaatacaagtacgccttggggaatataccaacggaaatacgaaggcgcaggccatgaggaaattgctaagggatttctaggatgagtcttttagaggtgagtatgccggagacgtctgggatttgaatttggatcctttgacagactggtttaagcgcttcatggggcctagcctagctccttttgcttcataaatgataagtcattttgccgtccactaacctaacttcccattaagagatatgcggcatgctcttctacaaaccccatgtatcaaattcaggacatgagcgtggcgcttactgtagtaagttatcacctttcaaatttcttatgcctcttttctctttacttctctaagcttttttttatacaaggctctaacttttccctattggatgctagattgttgcagaggttggtcgtctttcaaagactttgatcaaccacgggtttaccatgtttgagtttggtggcacggaggaggtgatgaagagtctctgggagtcagaggagcagaagaaggtgattcaagacaaagcccaaaggaaggagtgttgggttttatgccc

SEQ ID NO: 322981 - DNA, 1234 bp, Cannabis indica
cccaaccaaacgcctcctaataacacagaaaataaagaaataaacaccaatgtatatactggttcaaatttgatagatcgatgtgatctatggcggtactccagttctggaacaccatgtcttctttattgattgagcaataacaggtacaatacaatcaagaaggattctctattgagttctctcatagtgtttcaactctcacactcttacccaagaatcttcttcatatacaaaagattctttttacaaaatccaaacccaatctctctcttttctctgtacctctcaatcttttccctcacttactctcaatctcaatctgaaccatattctaaaataacaagccaaggtgctatatttatagtcttaggattaagatcctaaagtcggtcgctgcaataatggaagttgttaagttagttaggcagtaactaacttaaccaactttcctttgagcaagatctccagcataagccttagtgcatcccgaaacgtatgtgaccttgcaggatcatggaccaaaggcactcagtgaaggagcttccagataggacagagcttgttggagttgactattcaaaactgcctttccaggaggaacaactggccatcaagaattccattacggagaagggctagattttcttgaagacccttcctggaaagacaaggaagcctttcagcttctgtaagtgaacagctttccaggaatgacttttggagacctttttatttggaggaactatactacaattttacctagttacttcaaattaaaattatgacgatgatgaagaaagaatgcatccatcatggttgatgtttcaagaatctcagtatactaacttctgaggttgatcaagttcaagaaatgcttgaacttgttattagttaagatcttagtcccaacattagtaggattaaccagtccttcttctatcttctctcttatcccatagagtcttatatctatatattttctcttttgaagataaattgggttcttacaaagatgaatggatgactggctatattaatacacagtcactctccctttgatttgtttcatttcataaagaattccccgaagccataatgcttccttgaatgcttccgtagtctccatgaattctgcttctgtggtggaaagagcaacaacggactgtaactgggcctttcagcttatacagttctagtttgtcaagaaaatgtaggaagtggttgattttct

SEQ ID NO: 322982 - DNA, 1360 bp, Cannabis indica
ttttggtggaatgactattcaatttttaaaatggaaggaaagactattctaatacaagattagaaaaaatttaataatttttgttatcaatttttttatgtcatttttaaattttaattgcattttattcctattcctatattttaattccttccgactaaacgccacctaacctcccaagttctaacctaacattacaaaaactaaagtttgagtttagtatattgaacattacattactaaaacaacaagcaaaattttaagtgaatcatagttagctaattaatattgactatttagttggaaggaatggaatgtaggaatatgaatggaattaaatttaaaatgtataaaaaattggaatgatatttcttttattttaaaatggaatagtcattctactaaaatgatgaaaaatttattagattgacattctaatattttaaaatgcaaccaaacaaaagaatagaatatacattgtttcattttcattctattgcattttattacctccaacaaaacgccacctaagtaagaacttgagtggaaacaaggtttagccatatagcaaaaatgaaaacaaggctaaagcttgattctttccctaattttgcttgttctttttgtcactagctagaacttgtttcagggcatacagtaagaacttacactcatataacatagaaattagattacccaaataaaagataaacaaaaaaggatgaaagtaaagttttttttagtaacccaaatgaacaccaaacaaaactgagccccaattgatttccataaaaaacaaatctttttcatcttgatttcatttttcactcattagtgatggaacccagcagtgatttttaaggcttcttttgattttaaggtagttgaaaacattagagcaagtaaaaacttgttactcatcccaaaacacaggtaaaaatcccatctttttatcaggagaaaatcaatcatggcttacataaaaagcttttctttcatgaaatttcggttcttattgaaaaaagatgaaatataaacatgggaattgggaaatgatgagagagattttggtgaaaccttagtgtggcagtggttgtggtgagtacccattagctggattttcttctgtcaattcttcattgccgtgtctgtatgtatcatcatctgggcaaaggagtggaaacgatgaccagagaaaaagctactgaagctattgtttacttatacgaggtaatggcatattctgtattattatattattttaggctaattatgatttttgccctgaactttaacatgtaccaaatgattcctcctgaacttttaaggccattgaaaatgcccctgaattattgagatt

SEQ ID NO: 322983 - DNA, 914 bp, Cannabis indica
tccacattactagagcggtcattacaacatccaagtgttgggagagtctataacgagcaatgggtaccaagttaaaattcaatataacctttcatcttcagaataatagtcaatctgagagaactatttagatacctgagggtatgttacgggcatgtgtattagactttgaggattcttaggataagtatctccctctgattgagttctcatacaataatagttattagagtagtattggtgtagcaccatacaaaatgctttatgaaagaaaatgtcattcacccattcattgggatgaagttggtgaatggaggtacctaggacctaatgcagttcaaggaacgagtgaggctaggaaagattcgagttcgtgtgtttactttacagagtagacaaaagagctacgctaatccaaatcatagaatattgaattccaggttgggaatttcgtctttcttcgggtgttcccaatgaaaggagctcgtaaattggaaagaaaaaagagttacgtcccagatttaccggtttatttgagtttttggaaagggtaggtcaagtagcttatcagttatccatacccctgctttatttagactgcacaatatgtatttcaatgtttcagaggtatgagccaaatacgatccatatgagtcaaatacgatccatatactgagttacgaggatattaaacttcaaacagacttgtcatatgaggaacaatcaatccaaattttttaacagctaagagaaagtgttgcaaattaagactattctgctagttaaggagctgtggatgaacaacaagattgaaaaggcgacctgggagttagggtcgtagatgtgggagatgtgtaacgtccccgcttcaagcctcgattgggtccttacacccacggaatgaatggctctta

SEQ ID NO: 322984 - DNA, 1406 bp, Cannabis indica
gctgccttggatggattatcgttggggtgaaatttgaccatatggatcaataggcggcatgtttcccctatggcatttaagggtgttagatcgtacgacctgggctttagacgcgtgtcatcccagggcttctccttttttaatttcccttatccctagctattggatcatttggtccggtacacaaggacatgcatgctctgtatgatagcatatcgtgggagacaacctctgacgtcgtacttaaaaaagatcaagtcaccaggtctgtagtctgacacgtataggcgaggcttccatgggctaaaggcgtagcccagtttaacgtgtcttaaaatgccttggcctctctgggaaaatccatatttttctcgggagcagatggctttggttcctggaatggagggagactttgggtaacaaataccccccgtgctgctattagtaagggaactccctatcatggaaaattcttcctgcaaagttggtgcctttatcttcctggagcataaattgagaaaattggtcagctaataactcttcagcctaccttgatcaaaatccacgtgtcatatttgtgaaaatacggataacaatgtgggttccatcattcaaggtcttcttctcacagtctctcctctcttctttcagtttggcagctggtgtcaagggcaactagctctctatttcacgtagagtcgtgtgtaagctgatttatattgaagcctccttattcagtcacacgttccctatgagtatgagtattgttaggatgctcagtacgagatctagctgtagtggttacttgagggttgcctgaacgtgggtttggaacccggggtggacatggggtcctaactcgctctcttccatcaaatttagcctgtagagctcgcatttgttcttccattgttgtgtactatgctgtcgtaagctggataatgccttcagagactactactggtgtgataggtgggaagtggctcactatagccactggtgtcgttgtttcccctgcatgaccaggagtttctgggaataagctgacggggtgacgttggtccgtcccacacctccaatgactgtatcaattgaatttgttccatcccttgggagaggaacattcatggttcaaacattaaaagatcccttgttgttatttccattcgtctggttggcatccatgatgattttcttccaaaatcaaaaacctatttcccacagacggcgccaaatattgtcgaaggaatttggacaacaccaaaaagtaaataaataataaatatcaaaaagaaaaacgagtactcgacttagaatatagagtatttgttagagactgcccacacaatagagcgaaaatggaaaaatataatgaacacaaagaagtatatgttggaatttatttt

SEQ ID NO: 322985 - DNA, 929 bp, Cannabis indica
tgaggcatcagaattagaatcaagaaagtttatttttgagcacctagggccctaaggccccgagcaccctagcgcccaggttgacaatttgtcaatctgggggccttctaagtatcagatcgatgatcagacttttatatcttctttgtcttcataaaaaaatagggatggagaagaaataacactttctggatgccaaaaacaaggcttagcgcccaagttaacattttttcaactttggccaatttcgatgatgtttttcaagaaatcttccaatcatcttcttcattttcaaaaaatattgagattcaactatttttggggaccaaacgaaatttctaaagggccataagtgggacctagtgcccaggttgacaatattgtcaacctgggttgtttccaatcaagtttaccaaaaagtgttaagagatgcttcaggtggttgggataatgtgttaatccgatccattttttccctcatgaagttgaagctatcctttccattcattggtcctcactagatgtgcttgataaaataatatggaattttgagaattcaggttggtattttgttaaaagtggttattggcttggcctttgcaatatggtcgctcctcgttcttcttcgtatggtggtttgtttggttggtggataaagatatggtctcttgatctttctccaaagattggactatttacttgactagcgtcccataattggattcctacaaaaatcaatctagctcgtcatggtctgttaagtaagaatggcaaattggggttttatcgcggatcggatcggggccccgacccgatggggcattcccgccccggtacaatcgaatcaatattcgggtctttgccccgccccgccccgccccagttaggtttttttcgggtcggggatgacccgatccgctaatgcaata

SEQ ID NO: 322986 - DNA, 1856 bp, Cannabis indica
ggaaactagggatgttccaaaagacgaacaaaagaataatcaagcacctcgttgaggagtacctcaaagaccccaaggatttacgaatcaggggaatgaaaataattacgtgccagaatcttctcgtagaaacgagacataaggcagcccagaactagggaacaggagatcccttgtataacgagagaaatcctgagacaaaacccaggacaagtgggttaccaccgagacacccccatcgttcttcttgaattgatagggaggaggcgtacacgtaccccagtggggggtgtatctaaccattcccgaaggagaaggcctgtgcaggatgaggaaagttctagctcgggacatacaagatcctgagagcacagtcacaaaggcatacacgaggaggagatagacctcgccataatgatgatcgagaaagtattagtaatacgaggagctatcaatctgagagttactcaaatacaaggtctatgagcagccatgaacgaagacatccagatcttcgtgaatgtttaaattagagacaacccgatttacgcgagcacttagatcaaaatgcacctgatttacaccaacaactcaatgctaatcgaaaacaagaggatccaatccaattgcaaatcatcaagttagaaaataaattccggagataccaagatggggaatatgggaaactgcctggttatgactcagatgaagaacccgagcctttccatccagacattatgaactatgaatttccccagggattcaaaaaccctcacgtctcgctgtacaatgggacttcagacccagtcgctcacctcaacaattttaataccataatgcgagtcaacaatgtctcaaataacttacgttgtatcatattcgctagctcgttgactagggcatcgagtagctggttcaataagtttacccatcattcaattacttcttgggaacaactgtctaaggatttcaagaaacaatttcaggcaacaagagatagacgacctgaagcatcatcccttactaacgtaaagcaacaacctggtgagtcacttaaggcttacttaagtcgtttcagtactgccgacgctaaagttagaaacttgaacgacaatattcaacttactgctcttcaagcagggatcacgactgacctctaaatagctggagacgagctatgggatgacttacaaggttgccaggtgagaaacatcaatgagttaaatgaaagaactcaagtgttcgtacggaaagaggaagcgaggaacgagatgaaattgttaaaaactggcttgggaagtaaacccagcactgtcgcagcaagcactgtctcgacaaaggctgaccatccaggtggctctaacaccaagagaaaagatgactctagagaatcagccaaagataagaagaaacaaaaaaagcacgataagtatgtgccgaattatactgtttatactgagcttaatgaaactcgaaagaacatttttctctcaaatgagcatagggttgcattttgtaagcctaagccaatgagacatgcgacacacaaaagagatacaataaaattctaccgatttcataaggacatagggcatacaacggaagaatttcgttagttgaaagacgagatagagagtcttatctcgtgcgattattttcaatagtatgtaagacgacaaggtaatggacaaaactagccaaatctgcccaataacccgggcaaccaaagattacaacctcctcctgtagagggagaggacatattagtcatatcgagatggccacatctcgctggaaaaagtagtaattgattttaattaatcaattataattctaaaattagactatgtcttttt

SEQ ID NO: 322987 - DNA, 1367 bp, Cannabis indica
taatgtggtgttactcatagtaacaataactcccccaaatattacaaaaagaagacaatttgccatatgttacatattaatttgttatacatatttaatctatacattatattattgataaataatagaacatataatgtttctacaaactactttaaaaaaatgtattgatgcactttttacttgttttgacattcagaaaaatttattaatttaattttttttataatatacattatagtaattgaagatattctataaaattttgaaaaattcgaaataatttacaatatagaaaataatattaataatacctaatatgtacttaataaatattacaaactgtattatatttaaactgagaaactaaattttaataaaaaaaagtatcacatcactatagattaaattattataataagatttattttactttggtttttcacatttatcacatgcattaatttgaagtcacactttgtataatataatctctctctttcatgtgatcaatctgaacaaattaaaatgtcatttgtactatttagaatccaaagagtgcatcattgagatattgagactctttagaaacctaactagtgtaatagtgagtatgaaagagaggatatgttttatgatctgaaataatttgaagggtttaatttttaattttttctcccaaaattaaacatatatatcaactcatcactcatcagtcatgctaatcaattaattagaatcaagttaatattattctcacttttgtaatctcaaatatgtagactatttttcttgaaagcaaatttatttcagataatattgtgattttgtttaagatcatacattatttaaaaaaagataaaatatagacgcaatggtttatggctttaaaattagacatgactaaagcatatgataagatggagtgggaatatcttcgagttgtgttgttgcatatgggttttgatggtagatggattaacttaattatgacttgtgttgaatcgatctcttataagtttatccatgttggtcgtgaaatgggtctagtggtactgtctcatggtattcgacaaggggatcctatatcaccatatttatttattttatgtggtgaacgtttttctcctttgttgaagaagtataaggccagcgaatggaaagattcatgggtgtgaggttgctacggggctcctatcgaaaaaactttaaggttggatagttttttccaagtaaattgatagttgggggagttttgccgcaaattactcttaaattttttatttttattttgtaaaatatggccatgtaggataattttttaatgacctgtcattgccacgtgggcaaaattaggatttaacgag

SEQ ID NO: 322988 - DNA, 1637 bp, Cannabis indica
aataaaaaaaaaaaaaaaattggaataaggacattgactaacatagtcttatgatttagggtcatttgctatatttttttgaaaagaggacataaactaacatactcctatgatttggggccatttactataatttcccttaatattatcttcagtaataatataatatgatgattacatgaaataaatctcataaaaaaatacatgaaattaactataaactttttatatgttgtcctaattttcaagatttactgtatatgactcctgcaaaaaaataaatatgttaataatgaaagtataatttaattaataaatttaaaaataaaaacaattaccatattcagatttacatcattattttgatcatttatggtgattagtttagttcttgtgcgtaaaaaaaattatcaaaataatataacaaaatattattaattgatgtatagacttatgtaataagagattaatttttataccttgtttgttaatcgccaaccaactttgagtacagacaaatacctccaaagtagtaggatgaagtcttgctcaatgtggacttaggtgtctaccaccagtactgaatgagaactctaaagcaacaatgctaaccgacacaacaaatatgtctctagcaatcatgttcaacacacgatatttggatcccgttatcttccaatagttgcatatatcaaagaattcatcagtcttgtgtaacacttggtcatctaaatagagatttaactctcactttttattcattgcaccaggtgaagctctaacatataagtcagaggtagatagatgatcttgtattgaagaagatgatgacgcatccacttgtgaattgctttcactcaaagtaggacatttagatttgtactcattgaaagatgatcacaaagcctgcgcacctttctaatttcaacctcctattaatcatctccatagagttgaggaaaataaaattggagcaacaaaaatttgtatctaggatccaaaatcatttcaatagtcataatcccatgaatctcttcctaatactttcgaaaattaaatattttttgagttgccatatccttaataaataactcatttgatgtcattccttctttaatttttctcttaattttacacatcttcagaaagaatagattggcagttggatacttggttccaaaaaataactctatcacctcatgaaaaactttcagcctttcacataacttttgagctctaatccaatcatcttctgatggcaaacatttatactttggatcatgaagctttgctcgctcgaacattattttgtacaataaagttgtctttatcattaagtatgttgaattccatctagtaacaaaatcaagagacaactttttagtacatttcacccaaggtgacgagcattctcctcaaatttttcataccattttcgtatgccggaccaataagcgatactgtctcgaatcttattaatgttatcaccaatattaacagacaaaccatctctaacaattaaatttaaaatatacgcacagcaacacatgtgaagcagctttccattcaaaataaagcaactaggatcaaatttttgcttcaaaagtagaatcattgcatcattagtggatgcatta

SEQ ID NO: 322989 - DNA, 1096 bp, Cannabis indica
gactcatttatatattaatacttataacttttgagattatagctattaaccatagtactatcattccctgagaaaaatataaactccaaatgaatcaataataacttccatttcattccattcttttttgaatggtttaatttcatgtgtatatatacttaccaatagagatagtgatggttcttaaagcaatcattcgaaaacgacccaaaggagaatcataaagaaaagcccccgtgatgggtgtaaaattggacatggctccccacatttcatatcattttttgttcgctctggtggccacatgaaagtggtactcattccttaagtaatttatcatatttgcatggagtccaatgctggcaagcttttcaaatgtttcgtttgctgcattggagagagaggagcaaaatcaaaatgtaggacacatttagcttttcacatttatgtatatggtccaatacatttagttcttttaggacactatttaacattcaatgtaggattgaaccagaagcatcaaaagagatcaagattattacagtttttgttcgcaatgtgttgataactgatgacttcccaacattgggatatcccacaaatcccacagaaattgcttgcctgtcactcttcaagcgaggaaattgtcttaaaactgagagaagagaagccttcaaaaacaaaattaaaactaaaattaggtgatgaattgatagaatcaagccacagttaacatagtaaattgtatttaataaaattattaatatgcagatatactatagctaccttgccaaatgacttgttgacgctagcatgaaaagcaagagttggatattccttggatagtaccctcagccatccttttgttttcacgtttattttccatctgagttatgacgtatttgatataaggtctggtttgaatttaattacaattgagaaaaatggataagatatgtatatcaatttttaagattgggagttagggcatatgaagctaaatgttcattgaatacttgtaattagttcgccaaatacaaagtgcacagctaatactaattaattagttaggctttaaatcgatgtgtatagtaca

SEQ ID NO: 322990 - DNA, 1717 bp, Cannabis indica
gtgttgctgctgctgctgctgctgctgctgctggtaatctccatctgaaggtggtgaggtgatgtctgtggtggtggttgtagtggtatgggtgttaaaccatctggaagatgtgattgaaaattttgcaacaagatctgagggatcccatattgtaaactagcccatgaactaccaatcaatggattttactccttgttgcaatattcattcatatttactttttgtttgattattgaacttctctgaattttattaatagttgcttttttatagatttgatttttgtatgtatagcttagtaaattgttggtacttgtgaatttcatttttgtttttcattttattactaaattatatttaatcttttgtattataaagtagtacttttttcaaaaaagttaaaatttggtttgtgccttatgatgggaacttctttgttgcattaattttattttgagcctccatcttttctgctcccacaactgttggtgcgcaccatcatctacaaaaaagaacagagtgtttgtaattgctttacaacctctataaattaaggttgtgtttggttggaggtaatgaaatggaatggaatgaaaatgaatcaaattttcttccattggttgcattggaattccattctaaaatggaaggcaagaccagtttgttggtgatgatgatgatgatgatgacttgtgtttgctgttagtgctggtgatggctgacagtggtggttgaagtggtggtgtttaaaccttgaaggtgtgattggttcttaatgaaatttctcgcattgatatctgagggcatttgtggttcttaaacattgaatcgtctcttaccttacttccaaaaatatatatatataatatatatatatattatttttgggttataaactgatatgatgtcaaaatgaagaattatgtgcttttgcccggtgatggaaaactcatttcgtgaatcagtgatatcctctcattctagatgtatgtatatgtgtatgtatgtatgtatttccctctctctctccaggtaatatatctatttgaatgaaaatgtcttatgctgcaatgaccagttatgctatgagatcttagggctttctttgtctattcatctcctcttaattcattatcttataatgttctattgttgaaatttttttgagtcattttgcttcttgaattaccaactattcttactgtggttttttctttctgctcccaccattcattatcttttggttgaggtggtgattagggtttagggttatggtgaatgccaatggtagtggttgaagtggttttatgatctgattgcattgtctgagggctttgatattgctgttttactgtaatattttttgtgttttggtactcaattaatcagaaggtgattcttgttttaatctaaatcaatctgactaataaacttgtggatacttttactatctttggtttttgatgaattttcattgatgaaattcataactataaaatcttttttgtttcctatcattggtttttaatgaattttcaattttcatctttatgttaaaatattgtttatttggttatgtttacatgtattttgccctgtgatggaaaaactcattgtgggaatgagtctctttacacctcgactctctctctctctttttatatatatatatctttctatatatatatatttatatatatataatatatatgtt

SEQ ID NO: 322991 - DNA, 1553 bp, Cannabis indica
gattaatagataaaaaaaaaaaacattcctcaacttatcccaaatatatatggatcaagttagagttgaccaattaatattagtttactaaaatatcattacaagtagttaaagtgttttaagaataaaatacattgaagggtaaaacagaaatttatccctacttgatgtagatcatctatagaggatctttgaatatttggattgaaacaatatgtgattcaaagcgcatctatttttggtatatttagtgttctatgtaattaggaatgcaattccgaatctatagtggagttaggaggaaataataagttaaaaaatttacttggtaaattttgaatctacttgttgggagcttgattatatggtccctacactaattgggataatattattttgtagtcccaatttattgatttaattaatcaattagaattctaaataacactatgtcttgtttgtgaatttttcactaaacaaaggcttatttgagaagaaaagaagatttaggatttgtttattattaattaaaagaatctgcaatgtattattaataaataatttaaatgataatgttatttgataattaattataattattaaatagatagaattgacatttatggagttagaattaaaatatggcatttgtgaaaagaaagatgagttaaataaaatggcaaaattgaaatcttaaggcccattaagggttcagcctaggtggatcaataaagctataaatagataagtatagctcttatttttagatgactctattatcctttgttagacaaaatagaaagagagtcactatctatttcgaattccctcttcctcttcctcaaataattcgaagcctatggtgaattgagagtgtgctcactcatgtcaaagcaatacctagcatagtgaggaagactgtgtctaaccaaattgaaggagagaagatccaagttcagatcttgataatgctctgctacagacaggaatcaagggctagagatctgaatagaatgagtcattatattccgctatcatcaatgtaaggatttgttaatctcttaagtgtttatttcattgttttaagaaaatcatatttaggatattagattatagtctataatgaaacatacatgttagtaaatctaaatcctagtaaaataaatttcaacacaaagaagccagaaggcataagaagactaagcacaagcgctaagatggaactagagtttgagtggagatcagagggttgtgccagtgacacttagtagtcatgtgagcttacgaagctcacgaggggtgctagagttttcatgaaggccagagggttgcatcgttagaacttaatacatcaagggagcctggaagggtgtgatgctagtgggaatcagttggatggttgagtggacagtgcatgcatatagaaatcaaaaggggtgctatatgagagagttgactcgagagtcacatcttgtgggatgcactttttgatggtatggtgagcatgaagagttgggaaattaggcattcacgtgtgggcatgttgtcgagga

SEQ ID NO: 322992 - DNA, 1035 bp, Cannabis indica
accacggaatacattattccgtgaaagtacatcacgggacaaaatcatatccctatttatatattcctctaaattaatattttgatagactttgatattaaagagagttttttaatctgttttttattaagatattttccccttattataatgtataattgctgaagatcaattcaacatatccaacacatacatacggatgcacaccctcaccctcaccctcacagccgtacatcgagatgatccaggaaacgaatttgtacaacacatgtatatatatttattattgataaatatgtcgacattcttagacttttatccataggattcaagtacttatattattgaaatcaattgtttcatttaattattgctgtgacttacatagtattattgaagaactcattattgtccctttaaacaaaaattaaaaaaaatcattttattgttgtatttttcttttatttatacgctttataaatgattatcattaagtatttttttttaaaaaattaaattaaatataatcaattatttaaatttaagttttaaacaaaactcttgttaaaaataatatttataaataatttttttatatttaaatacctattataattattttaacagttaaaccatttaattataatatttactcgaattttaaagacgatgatatgtcaagagtagcaacatgtggtacaaaaatactaagactaaattaatgaagaatatataaagtcacgaccgttggtcatgaccgttaggatggaaattagacggtcacccttacccctagcttgagttaggtgggcgtctccaagaaggaaaaacgatggactaacaccttcgtaagcggaatgaacaatcaccacgcacccacatgccaagttaatctagggagtatatactactacccctacctcaaatgcaatgattttcatggggttagtctaggggtacaccccttaccctctagagggttagtctaggggaatacccctaccccctacactctcatggtacaagtcatgcatt

SEQ ID NO: 322993 - DNA, 1138 bp, Cannabis indica
aacaaaaatgaaaataaaaaaaagcaacaaaaaagaacaaaaacaacagtataaaaaacatcttcaaaatcatacaacataatatatataaaaaaaaactaaaaataaaaataaaaaagctaagatgaaagaaaaattgcatttgctccattgaaggttaccgtggggaagacgatgacgtgtcacgtcattatgttcccatttcaaaaataacgttatttttgtaaaaagttacctaatttagtatattcctaaaaaaatcccattagactaactagttaagcaacaacttcaggtctcacgaaatagaattctatcccaaaaaaaaacaaaagaaaacttcaatggtgtgcgacactgctacatagtaacatagttgcgagctctgtaaatacgtgagtggtaatttggtttggtcgtgtcgtgctataaaaaaatacagattgtattctgtctttgttaatatttttaaaaagtaaacccatcaaagttggtagacttgtattttcgtattgtatcgtcttttactcgggccaactcatttttcttaagtaaaccggtctattttttttagagattattttacaaatacacaaaaacaataaaaaaaattataaaagtaaagttgcacgaatttttaaatatttttacaatttttatgattttatttatcgaaaatacgatatgttgatgtatttttatgctgtactcttattaatttatcattgattttttgttatttgtatgttattttttattattattttaatgtaattttcttattacttttatgtacttttattattgttttcatattgattttatggaatactgtaaaaatataaaatatatatatttgaacataaaaatataattttttttctaagattttatgtaacttttttttatgtgatgtgacgcgtggaaccaagatatccaaaaaaaaaaaaaattttctcgagactcgtgctaacataatcaaccgccgtttcgtaaagtattgctgcatgccatccacaaagaaaaataattcccacgattttttttaatttacaaataatcttaaataaatataacgtatataatcataaaaaagagtaaatttgcggtcataaatacctaagtttaacttctagtt

SEQ ID NO: 322994 - DNA, 1795 bp, Cannabis indica
ataaaggtatgattaattctatcattcaaactgccaagcataaagaaatcttttaccattccacagacctgtgcaccaacaatggtccaatatttcctgtagaagattcccgagaatccatccggaccaggtgctttaaggaaatgcatcgcaaacacaactttgcgaacttcttcatcagatggaattctgcaaatcagatcattttcctcctctatataccagtcgaaaacaaagactccagctcatcatcaatccgaggctgctgggactcgaaaacctctctgaatttcttctgaaaatactctccaatatcagtacgattttggagccatctaccatcatcattctcgacgctaagaatcttgttccttctcctccaaataactgttgaagcatgaaaaaatttcgtgttaccatccccatccctaagccaatcttcccttgatttttgcttccaaattctctcaagcctttgttcctaatccaaaatctccagctggatacttgcttcttgggccaaattttgatctgtgggagccatattctgaatggatgtgagacgatgcttaagattacgcaccttttcatcgcattggccacaaacatttctgttccatagtttaagattctcctttattggtcagagctgattctcccgtcccaccatagtattgcttccaagaacgatccacaacatcatggcaacccgtatgagaagtccacactttgagaaaacgaaaaggataatgtaatttttccaccacacaccaactatctaggagaatcggagcgtgatcagaaccaacaatcgacatattcgtgacttttgcctcagggtgtgaggtacaccaatccacattagccagggctcgatcaagtcgcttgcggactctattgctacctctgcgagagttatgccacgtacacttgacaccatcacaccccaagtccactccccgtgtcgacaacagaaactccttaagcagatcaccttctcgcgtcttaaatttgcttcccccaactttctcattttcattgagaattacatttagatcgccaataacaacccatggttcattacagtccgccaccttctccgtaaacaatctccaaaactcctccttagaatccgaataaggggttccatatacgcagaacaaatgccatttgcaaaaaccacgggattctggaaaaatcacattaaagcctgtctccatatttgttatatgttgaatatcaacccccatgcgccaagcaaagcaaaacccacctcctattccaacagagggtgtacaaacactattattaaaacccaatcgattcagaatattcaccataaaatcctcccccaccttagtctctgataaaaacatcatatccacattagtatccctcaggagacctcggagggtcctctccgccgtgggtctacgaagcccacggcaattccacgataagcacctcatgaggaaggtgggggcatgcttgaggccgcctcctcgccttcgccaaaattctgtccacctataaaaggaatcgtccgtattgaaagtcagtactatttccaaattaccttgaatattatcacccaaattggaagccttcaatcagctccttctagttttaactccagaagatctctgtcccgtactcagcctccccacatccttggttttggctttcctgtttcttccttttgataccactttcggagtttcaattgttcccatcaaaatttaccctcaccactcaagctcctccaacctcgcattccactgcttcccgctcctct

SEQ ID NO: 322995 - DNA, 470 bp, Cannabis indica
aaaactaatattttattttaattttagggtttgaaaattgaaaaaattaaaatttggggaaaaatcccacaaaatttaggtttttgggtgtggctgcccaggagggctgcacatgcagccttgagaggctgcaaatggcccagggcgcgtgcggacgggagaagctgcagcctcccttgagcggcaaacataggcggatgtagggtttctctcggcgtgcacgcaggatctcatgtctaaagaaacaggcgtgacacgccttgagacaagggatgtgactgaattgcgagcgcgtactggggtcttgtccgagatgctggtgagcgtaagcacccattctcgacaccattaaacccgattttcaaaaatttataactctctcaatttttatcggaatcgagttttgtaaaaacgaaaattgcttaatttttcacaaggaatccaaataaatattttcaaaatgaaaataa

SEQ ID NO: 322996 - DNA, 1309 bp, Cannabis indica
ggctgacatggaatcggaactggctagagagttttaaggaaatcacttggaatatcatggaaggagggtggtgcaccaaacttgagtgactacttccctttgcttaagaagattgaccctttgggtataaggcgtcgaatgaagattcacttcagtagaatatttcaacttattgagggaattatcaaccaaaggtcgaagcaaagggagtgttcggactctgttaagaatgctgacgtattggatacccttctggacatcatggaaggaaacaacaaccaaatcaatcgacaccagatactacatttgttattggtaatcaaatgttctattttatgctctgctgaatgatttggcttctcaaattgagtatatgtttgtttttatgatttgtatgttttttttgactttggaatttcatcgaacaggctctgttcgtggcgggtacagaaacgacagctgccgctcttcaatgggcaatggcggccctacttcgtaacccagaaatcttatccaaagccagagcagaactcgaccaagtcgtcggaaaaggaaacccagttgaggaatctgacgtttctcggctaccttacttacaagccgtaataaaagaaacacttcgactatacgcatcgggcgcattcttgcttcctcgtaaagccgaaagagatgtcgaaatcaatggcttcacaatcccaaagggtgctcaaatattggtaaacatatgggctataagcagagataaagagacgtgggatgagccagaattgtttaagccagagagattcattgggtcagaagtggacgttaaaggaaggaactttgagctgataccattcggaggtggcagaagaatatgtcctggactgcctttggcgatgaggatgttgcctttaacattgggaacccttatccactcttttgaatggaagcttgaaaatgggcttaaaccagaggaagttgatatggaagataagtgtggaatcactctccaaatggctcaccccttaagagctattccaagtcttgcataatcttaatattggttcatatatataccagtgcacgtcattcttcagctattgatgtaatttttctatatttatattttttagcatatataagattattcatatatataggaagaggtttcaatggttacatttttattgtaaccatcatggttacatttttttaagccattggattaatattaaatggttgtgattaatttggaaattaaataaaaataaataataaataacttgtaacctgaaagtgacctaatcatttatttccttataaaact

SEQ ID NO: 322997 - DNA, 1325 bp, Cannabis indica
ttttttttttttagttttcttctaatttttcaagttttatcttcaatattctggttttattctataatcctcttacaaatttgtactttatttgctcccttcattccaatttttttttcaaatttttatcgttacctacctactttgaacttccatatggatccactcactgacaaaatgaaacccactatcacaatgcaatatttgcatactgggaatcatttccataacacgatatttgctggtgagtcttcatcttttccaattgtccaatttgcacctgctctgctcaacaactcctccactcagttcaacttctggcaaaccttctaataaggcaggcctttatagttcctctaattgtgatctcaaagacaattactctaatatgtctaagatttacaccccaataacagcattggttaagtcgactaacccctatgccatatatccaccaactcaccaaacagtgcagactcaccatgtaataccctaccagtttaggcgtgatacagtgcttgttataattattgtgcaacctttgctaatcatagggtttatcaaaagtgataaaatttaagctttaataaataaacatatattgtattacatttataaaatttgggatcctgtatctatatttttcaactgtacataatcaaaagatgttgcacagcggctacaaaatcgtgagtcgtagttgttatgaagatccaacactcctgttcgaactgtcttgatatgtacaatcttcatcaaactaaaatctcactgtcgttcaacaacagatttgcctttaattacctgcacataacatagcatctgtgagtcgacagactcagtaaaaaaaaacataaaatataaatatataaccgacctacgactaagtgcccatacacctatcaacaggtcataaaccatgtcaaacatgtataattgagtctcaaacgttcttgaccatagtacaattgaccataataccacatgcactcagtactctagtactgttggtagcatcaatccatactataagtacaactagtcataatactacatgcactcagtactctagcatactagtgttggtagcacttgttcatgctttcgaaagtataaccaaccataataccacatgcacttagtaatcaggcgtactattgttggtagcattggttcatactttctgaattgcgaaacacatacattcgcgataccaagatgcaatcatatatacaccaactattgttctaacagatatgtcatacatctggcaaacataaagtatttttgttttagacaaattttataaaaattgcatgctttgg

SEQ ID NO: 322998 - DNA, 770 bp, Cannabis indica
tttttttttttttttggattgggacatcttggaccaaacccaatcaagaaaaaaagggctatatatgtacatcctattgtttgtggtcatcatcttgttcgtttacgattttcttagatccactacaagaaatgtcacttctgtcagtatatttttgtgttgataaaagtttagtattgcgatagtaaaatgaaatttacttctgatgtgttggtaaattaacgttggaaatagaatttttgccagaagaaaatgaaaagtgttggcaaaaatgacttttctcagcgtgtaaatacgttggtaaaaattagattttagccactgtaaatgtgcgctgatcaaattttgacatttttgccaggacagtttgtgaaatgcgctagtaaaagttactggtaaaagtgatatttcctgtagtggtccattgacaaaatatcgcatcaacaatcttcaattaatgttgtttgatggtttgatgctcattaattttaacatttttaagatgtaaatttgcattttgttaatattagagcatctctagtggagatccaaattggtaatctattactaaaatatagcatatttttgctctaattgtgtgccaaaagtttattcaaatttgttacacaacaaaaattgattaaaatttggattacaatatgacttgatataaactttgcgtcatcataaatgtactatatttatatttatattgtttttaatattttattactaaatttagttattgtattatattatagggatttttt

SEQ ID NO: 322999 - DNA, 1648 bp, Cannabis indica
aaaaaaaaaaaaaagtcaaaaacgacataccgtacgccgaggatcaacttcagcgacagaaagagcaattttcagggcttccatggaaggtttcagaacgacagggaattcgtctggcctggtcgctttagacaagttagggttcatggtctcgaagcatatgatttggtcaaagcaatcagcgattccaagccgatccatggccttcatcgcgtgaatccgatccgagtttgtgaaaatctgaattaaattaaattaattccaaattagaaagttaattacttgtttcttcaagtttctttttcttatatttctgtttagcttacgatttttctctgggagatactgtttaacaagtttcgtagttgagggtctgctttgataagatcatacggcaatcttccgtgtacgacactaacaaattgcaaggaagaagaaaacaaaaatgttagctcaaattttgtaagaaaagagttcttttttttaagattaagctaattaattatatatacatacctatgataatcatcggcatcaacgttgtatcccaacacctgtaccaaatgtacagcttaattttattaggaaaattgcaaaaacaaattattataaaagtagacagacaaataaataaattttaaaggaaaaagtttggaaaagatgaatttattacccttaaaccagcaagagtactgccataagttttgaaaagctcaactctgagagtcgcagcttgagtctctgagaatccacatttctccacaagaaaatctaaaaaaaaaaaatgaaaataattattaagcattacaaattgatcacctaaatttctatatttatttattattatattatttaccttcaatgtttctcttaagagcaccagataatccagtatttccagggtacaaagtatcatccaaatctgttaattccgaacaaaaaataaattattttgatcataaataaacgaaatttcatgaaaggagattagtttttgtttttttacaaaatatatatattttttatgagaattaatttaccgaagaggatagtgtcaaaagaactggaatcgcgaactgagttaccaaaaactaccatattagcttaaattaagaagatttagggaaattacaacagagaaactgtaatccaagaagaaagcaaagatgaaatgggtttttttttttttgtttaacagaagcaaaatgttgttaagggacgaaggcttttagaacttagagaagagaggtatttatttataggcccaaaaagaggtggtggataaagatgtcacgttttgaaaaatatcacgctgactcaccattctaaccacgtattttgtcgttttgtgtaatccgagtagtgtgggccacgcggcatggtccaataggctcaattcggggaagtagtgttcattgacagaagtacccctcgttcctcaatgtgttttttgatctgtacaagtggatattcggtaatcggtattttaggagtggtaaaaattgtggtatatttgatacaaaaattaattttgtggtaaatttatattgaattttagttttgtcctctaatgaataattgtaaaattttaatgtaaaatttaatatttattaaaaaaataaaaattaataactttataatcaatttt

SEQ ID NO: 323000 - DNA, 872 bp, Cannabis indica
tgttttttggatttttataattaatatggccaagtttagcatgtcacaaatcagtggtgtacgttcttgatagcttaatggcaagtgaacacaggggttagggtataacaattatcagtggatcgaaatccttgcaaaatacattgattatcatcattaagtacataacaatgatcactgtcaaatgagatagtatacccttggtcacaaatttgactaatgctaagtaaattagccgttagtcctttagctaacatcacatttttttaatatgggcaacccttcaaaattgagagttcccattccaacgattttccagctaagccattgccaaaagtgacttccccacactgcataggcctgatgttaatcaaaaagtcattgtcacctgtcatatgtctagagcaaccaccatcaaaataccacatttaagaagcaacacttttatcagaaaaatcagctagaaattttttcttaatccatttttattttatacctctatgtttcttttgagatttttcaaaatttccaaaataatttattttgtacatattctgcaaggtgaaacatttaggtctgatatgacccttcctaccacaaaaatgacaaatagacaaaaatctccttacctgtgatcttactctttttgtagttcctaaagacgttgcttctacaaatacagcatctgtagtgatagtctttgaatctgctccatcaaccttcaaatttgcaacatcaggatagtttgttggaacactagattttacaaatttagtgatttcagaacttccaataccatctgatccaatgccagcaaaacctctttgacctgcattctgagcttcttcaaaaatagaagatccaggattaag

SEQ ID NO: 323001 - DNA, 705 bp, Cannabis indica
tgtgtacattaaatcaaaatataaaatagtaagtttagaatgtatacctcttgaaaactatcagggtattgttcttgagtaggttttggacaagattggatcgaagagaaagaattctctcattctcctactagtaataattttcaaggggataacctaggtttggatttggtgaatggtagtggctttgaagatgtttcgcgaagagaagtactattttaattaggcatctcgtccaacaaaaggtgacccgtgttcgagattgcagtcctcttgaaatggaaaatgttgatgaccttgtgggggactaaagtaaaaaaaaggaaatgttatcaggtcaattacatggaaggggaggtctcgacagggaatgtgcaagtgattagtgaggatctcagatcccaagagattgccagaccgcacctatgtaagaagcgatcacataagtcgatgagccttgttgcctttgaaaaggacagtggttactttgatgatacattgggtatgtctgtggaataccaaattcaaccagacaatgataatccaataggtgaacaattcctagagctttctagttcaatttctcttattttggatgcaaatgttggggaaggtagaaattgttcttaaataaactatggaaaagaaggattttccattggtcggggaggcaggcctttgttggaatttattttaccaggatct

SEQ ID NO: 323002 - DNA, 1326 bp, Cannabis indica
aaaaatatattataatgtatatttatatgacgataaaaataaacccgaccttatgtaatggtctaaactgtctaatgtttaaactggtcctatatataatgtgtgcagatgtagcatcatcaagcactgagatttgacatagatttatatatccctatacttatatataaagatggccaggtgcaaagtataatccctatagtctttctcattaattattattattcataaaacaaatatcttaagttaacaaaaccaaatatataatatgagtgttgttattgagtatcagttatatttaatacttttcacaggtagtgtcctataattagttagtcatattctttaaaaactattttttaagttatatgagacctaatacttaattatactaatagcactataatacagaagaaaatattaagtaattgcattttaacaattctcatatattattattattattattattattattattattattattatttgatccttctttgactttgagtgattgatatttgggatattgggatgtatcattcatttgttattggcatccattacactttatatataaagttaatagtttacacaaaaatatacatttaaggctgtgatgagtctgacgatgtaagcacagaaataatatattgaatataatttatataaagaagattgttattgagcactaatagtacttagtatttttaaacatattgtcttacaattagttagtgatactctttaaaagttattatattaaactatatatatgagagtactcgatacttaattaaactaatatcaataataccttttagcatttctcttatataaaatatgatgtacggatggagtcttgtttccccactaacgcttagcagcaagccattactacaatatatattctgatcatatatattaggcttatttgtatcgtaggtccttaaactatataaattttagtaagttggtcttcaaattttattttttgacaaattaatctcaaaactatataagttttagcaagttggtccccaaactttatattttggtaaattaatccctaaacttttatttctttagcaacattaagttctcattattagatattgatatttttattatttattttacttactttaatttatatttttgtgttaaattcaaataatttgatttttttaattttaatactttgagaaaaataattatattaatattttgatctattatattaatattaatattttaatactttaatttgttatattcatatacattaataataagaaaaaaaaagataaatactagcggaca

SEQ ID NO: 323003 - DNA, 981 bp, Cannabis indica
agattaagctggtacaaagtttaaggtttcccaatacagttggaattggcccattcaatttgtttgactctaggcccaaaacttgcaacttcatcaaactcccaacttcagatggaatcttaccagagattttattatgacccatctgtaaagtggtgagattttgacattgtccccaagtacttgaaacatggccaatgaattggttgttgtttaaaaaaatggaatcaagatgtgggtgaacaccaaaggcattggtgatgttgcatgtgaatcgattccaatcaagccttaacctttttaatttggtgtaattcctcaggcacttgggcaatggtcctgtaaagtagttgttgtttacactcaaatattttagattgaacccactacacaaaccttgaggcaactgtccaaagaaattgttgtttgcaagcagaacgaagctcaaattaggattgtcccagtgaaattattgctaagaacagagaacacctccaagttactcaaccttgaaatattaactggcaagtctcctgatagttggttgatgcttacatcaaaagttgacaagagatttagatttccaatcactggtgggatggttccaactagattgttgttgaaaagttgcacactgttgaggtttttgagtttccatagagaagctggaataggacctgtgagatggttatcagaaagatccaatcttttaagtttcctcatgtttccaatctctgaaggaattgaaccagtgaaattatttttaaaaatgaataattcctctaagttacttagctttgaaatattaaatggtagggctcctgatagttggttggtatttacataaaaaaacatgaggcttttaaggttccacatagaggttggaattggaccagtgagattattataagaaagatccaacattttaagttgtaatagatttttggttttgccaatagaagatggaatacttccactaaa

SEQ ID NO: 323004 - DNA, 764 bp, Cannabis indica
atttatatttgaatttgttataaatttaaatcaaattagatattatctattattttaaaggattaaataaaagtttgtttataaccttatatatgatatatatatcactataataaataaccttaaaaataagagaatatagtaatactttcagagagaaaataagattgaacgttttcactctcactctctctctctacttgcgcatctctctcttcaactcacaagcgccatacatattgtagtgtggtgtgagttttgtgatcatccctatctcatcacaatatctcatgagttgagaatatacagtgattatataattatactcacctaatagaatccaatagccttctctatttttgagtattgaggctattttggaagattttgatgtgagactcttcagcaagttcttagattagatgttgataaaaatacgaaaagatatcgaggatcccctgataagctacaagaggtattgtctctcttttcattaatctagatttaatttgtatatattatgttgagatccttaggcttatgactcatattagattaaattatttttaatcaaatctgctcctgcttttctaattcaaatatggaccataaaaactaacaattggtatgagagttatcttcataactatattgattatatactgtgttaggtaattatgtatttatatacatatgttgatatataatgaatagatggatttaactttttatgcatgaacgtgaatcattaattatatggtaaa

SEQ ID NO: 323005 - DNA, 1534 bp, Cannabis indica
agtaaaaaaaaaacatgtgttgttgagaatagggtcttgttgttgtgtaaataaagcaacaaatatatgaataaatcaaaaaaatagcaatgaatgaatgatgagaatatgagtgagtgagttattggttggttattttgaagaagtttttggccaaacaaacttagcatattagagcgtttttaatagtagcattcttttaaaagtgttatatatgttgggtactgctgttatgacatttagcagttagttggaggaaggtttagatacttggtgtgtggctgagagtttggaagtggccatgatgttacggtcaatttggaaggtcaggaatgacatggtatggaattctaaacagccaacatgtgaagaaatgttgcatttagcaaaaaataaactttgtggactggtataatgcttaaaaagaagacatggattctcctattgatgccaatagaaatcgaaaatgagcattggacactcccgagatttcaaccaaatcaaagtaaatatcgatggcgcactttttgctggtgagaggagatacgacataggattggttgctcgttcttcagatggagcaattattcagacaacaaatatgaataaggttggtacatttcagccccatgaagtagaagctattggaataaagaggctttgagttggattaagaatatgggttggactaatgtgattgttgagtcggattgtttgagagtgattaatgatttaaaaaagaataaaactatggcctctccctatggccatattatttctgattgtaaggctttgttggccgatgttagtagtgtttcttttcattttgttaagcggtatgctaataaggttgtgcacgttctagcacgatcttctcttgttgaggttgaccgtacttttagtagcgttactttacctactgtaattgcttcactgattttggaagacttgaattaatgaagtttcttcatgattattcaaaaaaaaaaagtgttatatatcttcacattatctaaaaatataatattttattttatttttctttcacattatttttggcacccttacttttaaaaatactccagtgatatagcacattttaagaatgttataattatgatctcacacattattatatataattttttttattaaattattatgtatattgcacatttaatttttgttttttttaaaaaaaaaaatatagcatcaatgtcattgtataacatcaatgcaaattttcagaatagtatattttttatctccaatagtacaacatctatatattttgtcacctaagtattccacctcatattttctaaaatgctactattagggatgctcttagcaatagatggtttgaactcaaacctcaattcttaatccacttatttattttacttgggaaacttacaaaaatattgatttttttcccctatctttataaaaatactgtcagaaggcagaaatttcttttttactgtcttggccaatttttttttttcttttatactgtaaactccaaaaaaaa

SEQ ID NO: 323006 - DNA, 1484 bp, Cannabis indica
caaacaattttgattaatctaattaataaaataaaaagagtggctgacatatattccatattccatcttccaaattccaatacaagtaagcaaccacgtgtaattatttttacaattatttattgtgtggttttttttcttaattaattattaaaatacttatttaattatctttcattgtctcaattaactttttcctctttggtggtcttgcttacgtgtcaactggctttaagttagataaagacaaaccgaagttaccaggatagtacctaaaaatctacatatcacaatcacacctctactcactttctcttttccttttgatttttattgatataacacttaaattaatttctttttctttaaatattaaaataaatagactaaaacccaacatgtgtcatattatgactagtgaatttttaaaatctaaccccgtttattagaagataagtgtaaaaaaggtgaatctcgtattacaatcttttaattaatttttgtgttagaaaataaatatgaaaatatttttttcaaaaaaaaaaaaaatttataatggtgttcattatagttacaacattaatcctataaattttttaaaattttttgaatagtttactgtagcaaaaataagtttgaacacgtgtagtaaattgaaatattaagaactctattttcgatactgtaaactattcgaattttttaaaaaatttacaaaattaatatagtaactataacaaatactgctaattaaaaaaaaaaaagaaaattagcatataatttttaggcttaaaaattgattaagcaattgtaataagaggttataattagtattcatcaatatattaatagtatttaatatcatttaagaattcatatatcaagttctatataatttaatttaataatcatggtagaatattactagctattaacttcattagaatattaaggccgctaataacttatagcatgcccttattaaagattatgatgataaaattaaaaatgatatggtacatacatagagaattgataaaagcatgcgtgattccgaatataagcaggttagacttatgtttagggcttacatagcctaagagttcataaaaatctcctttttaaaattatatattttttattaattttgaaaaatatcacattttactctaaataagagcctaaatatattttatttcctatggccgactaaattttaggatcggtctggctaaaaagcactactggtacctagcacttccttcagtgtcatatcatataattaagtattgagttccatataaattaagaaaataacttatatagaatattgctaaccaaaaagcattatttattggaagtgttaagtaccacggatgtctaataacaattagagatggaaattggatggttaatgtacgggaaatgcaatccccgcccccatccccgctacctatttataccccatccccgccccatccccg

SEQ ID NO: 323007 - DNA, 1277 bp, Cannabis indica
ggtaaaataattctaacaataaccctatcaagttgcattagaacacaacccagctcttgtccagatgcataacattaaaccacaaaattttcctagtctgatggtagtgctagcaccggggctgtgatcaattgctgcttcagttcttggaaatttgcttcacacttttctgtccatataaaatgttgattcttcatagttaactcttttaagggcagtgaaatcttgtaaaaccccttaataaaccggtgataataaccagttaaacccaaaaaaacttctaaatttagtgatcgtctttggcctcgcccaacccttgacagatttaatatttcctagatcaaccgtgatcccatccttactgacaatagacacttgagatagctagaattctttcttaaacttggcatagagcttatgttctcgtaatcgttacaaaaaaatttgtagatgctgctcatgctttgtttctaattgagagtacacaaggatgtcatcgatatatactataacacatatatcgaggaaatccttgaataccctattcattaggtccataaaagttattggagcattggttagtccaaaagacataactgagaattcataatggccatacctagtacgaaagttagtttttagaatatcctcctctcaaattctcaactggtgatagcccaatcggatatcaatcttagagaagactatcttttcctgaaggtgatcaaataaattgtcaatcctaggtatatggtacttattcttgatagtcaacttgattaattcttagtagtcaatacatatgtgaagtgatacatctttccttttaacaaacaacactggacctgatccccaaggtgacacactgggttaggaaaaccctaggtcaagcatcccctaaagttgaatatttatttttttgagtttcgcaagagccattctacaagctgtcatacaaactagctccgctccaagtgctaagtcaattatgaagtctacttcccattgcagtagtaaacacgaaagttcttcaggaaatatctctagaaattcttgaaccattttgatgtcttcaggccgaattgattcaagttgagtggtgtccaacaccactattaaaaaccctaaggatatacctcctataacaagtctttggcttgcaataccaatctagctcattgaaattcaaagatccctaaaattgattccacaaacacaaatggttcttcggccttaggttggaagatcaccatctatcgcttatagtcaacactcgc

SEQ ID NO: 323008 - DNA, 837 bp, Cannabis indica
aatttaatatatataaaaatttggaggtcaaaatttttaattaaactatgtaattaattgaattatagatgattaattaatatgggaaaaaattatgggaaggatgagtaaatttaattggaccgttaacttgtttatataacattgcaagttgagctaataatttgtcttgtggtcctacattcattataagctagtgaggcatttcttgtactttttgagtcaacactctttattttattttatttttctcaaaagtcaacattgattgttctcttgcttttataaggataagatatagtaaaaggtattcgtgttgcgaggggtgtgggttgtactattttttcaaatcatgcggtttttataattttttaaattgcaactgcaccgcaagatcttaagactgcaaaaattacactgcgaaaatatagtgcatgtgcggtgcaatttgaataatttacactatcatcattatcaaacattttaatgaaaatttaaaaatcaatctaataaaattttaacaatacaaaaaaattattattaaagttttaatataataacatatatactaatcatcaagttatttattgaattgtctctaaaacataatacactatacacataaattatacaaatatatgttcttatatagaaaaaatataaaagttatattaatgtggtacagtttaaatcacaattattaaatttaaaacttcaaattgcactgtatcgtgaagtttagtaaaaaaaacaaactataatcccactataaaaaaatgggtaaataccattttagaccccgtgttttgtaaaagttacagattggaccctgtgttt

SEQ ID NO: 323009 - DNA, 1382 bp, Cannabis indica
acttacaatatattaccgacttgtatctaagcactcatacattcctttgggctacaattagtcactgtgaaaactagttgcctctgagattgtgatgcaatcgacaagaaaatgacagagcagactatgcaaaattttcatttctcttgcttattccattgccaaactttcttcctattggagaaagacaaaattggtggtcgggtctcccaagttgtatttgaccatcaatctaaccttataacacatacaatattcttgaattagaaaaagaaaaaaagaattaggaattaattattcaacttttcaaaaatatcaacttggtaagggggggtatcttgggtgaaggaaaaagacaaaggaaaaagagtgagttaatgaataagtatgatgatgatgatgagcatggaggatggaaaaaggtggtagtagtaatagtagtagtagtagttgttgttgtagtctttttttgtagttcgaaaaacgcgtaaaagggaaggaaaagttataaagagaaaaaagacttgttgtttgaacaaagaagagaagagaagagagagcgtgcgtcactaataaaaaggcttttaagaatatatataaatataaatatatacattatgatgatgatgatggtgatgatgaagaatcatttttcggtttctacaagacttgttttcttttctttctttctttctagttttaactttgttttgcttaaccaaaaagtagtggtatagtagtgttgttgtttttcttgcagtatcaaaagttgtaaaaagttttggccaaattaataaacaaatattgtttgtttttgtatcatcatcatcattaacctatatacctatctttttcttcttactataagtataatcccatattgagttttttaataaggtaatgggatatgtattatcactttttaggatgattaatataaaagttctatttctcaatatatatatatatatataggtgttgggaaaaaaagaaagtgttatactagtaagtgtaaatgtattataagagtattttgtaatatatatgtataaaaaattattattggtataatttaatataacgagaaagtaaatatttggctttaaaattattacgaattaatgtgacattttcaaatatcacgaaattgtaagaaattttaattttttataaatttaaaactaaactagaccaattatgcttgaactaaacaaatccaattcatgagaagagattattaatttggtttaaaattatggtttgtattaggggcgttcataaaatatttaatccaatacaatatgtatgattcaatctaattcaatccccaaagtgtggatatttgtacttgttcggatcagattggattggaaaatctaaaa

SEQ ID NO: 323010 - DNA, 524 bp, Cannabis indica
aaaaaaaaaaaaaaactaatagcgatttatatcacttcatatttcgatcattcattttgtttggtcaaaaatgacaatgaaaaacaaatgattaaccttattttaaacttataggctatagctatgagaatatcttttcgatgacttctttgttaattaattacttatgtttgagtgaaataattcagattattttaaacaaatttgtaaggcataggtgttcaatggataattttcttttgtattttttttttttaattttgaaaaaagaaaggacaaatttaaacacttcacctaactagtgtaactcttctctgctttattttttaaaattacaccattaaaattactattttttcttatgtcactatacacttttataatacaccatacatcaatttttttttaaaattatatcacaaaaatacttacttttttactaattttatttataatttatttattttaaagtatataatattaatatatacacatatcttatataaaaataattattaatactc

SEQ ID NO: 323011 - DNA, 923 bp, Cannabis indica
tcaaaaccttttttttattttatattatattattaacatcgagttccacccctaatattttgttccgctaataatattagaaccatttcgagtgaaaaaattccaagattaattatgaacattattaagcatttaggccctgggactaattaggccttgagactaattaggccttgagactaattaggccctaggtagcaattatgtatatttttaatttttttagactcctaagttaggtaggtccaaaactgatgccaagacagccttagcttaggctggggccaaatgtattaggattctttattggcattactcaaatgacactttacattgtgtttaaaaatgccaaaacgagtataaaacgtcatttgaacaatgccaataaaaaatcttaatacatttaaacacaatatataagataaaaagaaataaatatttataagtgatcgattataattaataataaatattattatttatataaatatactcacgtgagcttatattatagttcttgaggagaagaccataaccataaaaatgtgcctcatgtcaagaaaaatgataactcgaatgatatgaacttgtttctgcacctatattatcatatcaaaataattaataaatatattatatataaatttaaatatatatgttatataatatataattgatattatttacgtaccatggaattctcatctatatattataattttctttaattgtttatcgagctttaagtaagaaattagttgaatatttttattagaatgatataattgtaataagataataatattatgctaattactacctacatataaatcaatctttaaaaatgacatttgttattatattataaagagtgctaaaaagacaccaagaggagagagggtagaagattcacattaagaaat

SEQ ID NO: 323012 - DNA, 892 bp, Cannabis indica
tcacgaaatgcccatgttatagtcaacaatcatggtatggttactaggtctaaggttggtatctataagcctataaggtttttatggcttccaaagaacctctaaatttgcagaatgctttacacgatcccaaatggtttcaagaaatgcaagaggagaatacaccttgaaaaagaacaaaacatggactctagtactaccaccaacagctagaaaggtaataggctgtaaatggatttataaattgaaagaaaattcaaatggcagtgtcaacaaatataaagctaggcttgttgctaagggatttctccaaacctatggctttgattttcatgagacttttagtcttgttgtcaaacacactactcaaggtgatcttaatagttgctctctttaccaattggtttatgcatcagcttgatattgcttttctcaacgggtagttacaagaagaagtttatatgatccagtcttctagctttgaagaccccgatcatcctaatatggtttgtaaattgcacaaaactctctgtgacgtgaagcaagtcgctggaggcttgtagcaagcccttagaggcttgtttgacaagcttagttctacactcatttcatatggttttgacaatgctcgagcaggtcattctctttttataaggatgaaagatcaacacactacttatgttttagtgtatgttaattatatcatcattacaagtagctctcaaactgtggttactgaattgattatttttctgcaatccaaatttgctctcaaagacattaaaactctcaaactattttctaggaatacaagtgcttcctacaacaaatggtctgtaggatatattttaccaggatctagatttactaacaagtatgtttcattaacatc

SEQ ID NO: 323013 - DNA, 652 bp, Cannabis indica
ccacctaacttgccaaaaaaggactttacagaatataattggatcccaacatgtgctaatttggcaaaaaggggcgtggctttggataatatttgtcaacgttgtactggacatgtggttgaaacggctgctcatgcgttgtgggaatgcaaatgtagcaaggagttctgggtggtgagtgggttgaaggatgaaatgaaacaaataaagggagaagacgtgctgtcctatctgatgaggttggctcggctgtgggatagaagcaggtttgagttctttttagtaattacctggaacgtttggaacgttaggaatcatgttattcatggtgggaagtcacccggggctggggatatggtggattggtgtaggaattttttgactgattttcaaggagaggcggctgctggtgggagtcgggttcgacgggaaaaggcgaaatggggggcacctgatctgggttcagtgaagctgaacgtcgatgctggtgttaaaaatggagggggagtctcggggctgggttgtgttgcccgtgatcatggggggagggtgcaatatgctgctgctacagtaatcaatagagagattactcccctgcaattagagttgcaggctattttgttgggactgcagattggaatacaacgaaaat

SEQ ID NO: 323014 - DNA, 841 bp, Cannabis indica
agttcagatgatttagccgccaacatccctaaaaaaagtcactttctattctattttatactccaattaaaggcaacatttagttggaagaaatcaaaacaaaccaataaaaataggaatataaatttttaaaagatgaaataaaattaatgcatacaaaaaataaaagacttattaatttttttttattgatttgataaaaaattgttccattttaaaaagaaaatacaccaaaattgtgaaaaaatcattctattgaaatgacacattttaatattaaagtcaatgaaattagctcagtagtaagagggctagaaaaaagggagagcaactcaatacccctaaactatttatattacgtaatattcttaagctacattaaacaataaaaaaaacctttcaatattttaaaatgtagtcaattaagtgaaaaaaagaaaattgattcatttctatttctatttagttggattagtccgacataatgtaccataaatgtgattagcaaaaagaattaaaatatatatatgatcagaaaaaaaaaaatagagacagagatagaaatagagaagatagggcccctggcactagttagggacacattgcttatagggtttcaaatccttcacatgttaccctgacccaccaatctctataattaaccatgcagctacccaagtttagttttttggccttcttcgaatattagccactaatgtactcattatatatctattctcgtgtctgtataacagaattcttagtttatgagaaattattgggtgactttttttttaaataaaaaaaataacaaattattagatgttgccacgtaaagggt

SEQ ID NO: 323015 - DNA, 1267 bp, Cannabis indica
catcagatgaatgtttcaatcagacaaaataattgttagcaaattgtttatgcaactataatgcaactgttataaaacattaaaaatcaaaacaatatttccacgtacgtaactctatctacatgtctctttataagttaatatgaacaaattcaccattagaaatttagaaaacaacaaaaatacaccaggataaatattttactataatattgatgttattttttttgggttatacttgagttggattgtttgggaactgtagttaaactttttgagatatgcatttcatggatctaaaaattgaagttagtacattagtattatgcaaattaaattgaattttaagatgaattttagtttcgtattagtttttctatactttttttttcatgaattcaaaacagtccttgttttgattgattctcatcgtcttctcaggtgaagtcaccagaattaatggtggttctctttctggttgaatttttgttttgactgcattgggttgttgcgtggttgcgcaatggttgcccagaaagcatggatcttgggttgaaggtatgtgtaagtgacatttgtgtaaaaaaaattggttgtatatttgttttttagccagctagaagtattttttgtaatattgttactgttttgggttaaaattgaaaaaaattcattttataatataattttgtaatataatttaaatgattatttataagtattatttttcaattaggatcaaaagttaagtgtgagttttgatcactcaaattataaatattacatatgtgtcacagtctagcactgggaccatgtcacaactacttttaaacaaccccgtaattgaaaactttgaacaaatcaaatgtttaattatgctatttattatcagaaatgctaaagggcactagtggtgcctaacaccctcctatatgtcaatattgctattggtccaattaagtatcaggtccatataatttaatataatagcttttatggagtatcggtagacaattgcaacgcaacatgtcgcaaagttttatatatagattcctagaacccatgttggaccaattaggacatattcaaagtcgtttcactcataaaattataaaatgatataaagacaaataatggaaagcaacaaaaaaaaaagttatgtgagtgcaatgataccatggtgacatattcaaaggctagcttggtggtgagggagggatgggaaaaagggagaggtcatgggttcgaacccaggacctttaagcta

SEQ ID NO: 323016 - DNA, 1446 bp, Cannabis indica
ttggaaggtttgtaaattttattaaacacccctattaatatttatatatatttcgtcgttttttatatataaaaaaagcatttggaactttttatgattcacaaataataatttttgatgaacagaaaagggaaagaatcttcgaaggtggtttttgacacacacactaaaaaacaaaaatggtgccattttgatataaatatattttttttgaattctagcataattcctaaactgcgtattaaattaaattattaataatacagccaacagaattgaaagtcatattcagtttctttccttaaaaaagaatctattcatatgcagctgttgcactcatcaaacaaaaaacaaatctcttttgtgtgcaataccactcaacacaaaagaaaagaaaagaaaatggagattaaggggtcaagggaatggaactttggtgtggaggaagaagagcaaggcaacaccgcttcagccgtcacagtccggggagttctcaatatcttgtaccaaaatataagaaaagatgataataacacacctgtggatgtggtcatccctattggccatggtgacccttctaacttcccttgctttcgcactccccccactgctgaagatgccgttgtcaacgccctccgttcagccaactttaactcctattcctacaccaatggtctcccatccgctagaaagtactgctgaatttctccattcatccattactaacattttatcaccttattttggaccatttatactaacgactttttgagtattgaaatgtaacagggctattgcagagtacctatcccaggatcttccaaacaagttaaccgtggatgatgtttttgtcacacttggatgcatacaagctatagaaatgataataacagcccttgctcgtcctggtgccaatgttctttttccaaggccgggatttccctactatgaagcccgggctgcctcgagcaagcttgaagttcgtcactatgaccttattcccgaacaaggatgggaggttgatcttcaacatgttgaagctctttcggatgagaacactgttgccatggtcgtgattaatcctggaaatccatgtggaagtgtttacaatgcccagcatttggagaaggttaattggtcaaaatattcacactgttggaattgtgattttctgataaacttctctcaaaatttgttgtgtattgtgttagattgcagagacggcaaggaagcttagatttgttgtggttgctgatgaagtttatgctcatatttgttttggaagtacaccatttattcctatgggagtttatgcatccattgtacctgttctaacgctcggctctatatcaaagagattgggtgtacctggttggcgtcttggttggattgtgacaaatgatcctgatggcatcctcaaaaaaatctggggtcctctctctctct

SEQ ID NO: 323017 - DNA, 1039 bp, Cannabis indica
acccattttccaaacaaaattaactctctaaaatatcctcaataatgacaagtagacaaaaaagcctcatatgtaaacactttagagccatcctgctgactcaacacattaaatataagttatcaaaccaaaaaaaaaaaaaaaaacacattaaatataatgtcttaaatctaaattagacaaaaatgtttatgactacattaatatcggttgtacattttaatttaataaagggaattagcaacacactcatttagtatcatatcaaaaaaaaatatgtttggcattatttttaataatatttatttagtattttatattttgaaattatatatatttcctactttaaaattaaatttaattattactattttattaacttaactaaataaaataattaatttaattatttagttaactaaataatttttcagtttaaataattaaattaaattttaaaatttataaaattaaagatattaacgtattgataaaattttaatatattaacaagctagagtatcaaatttatatttagataaaatacaagatattaaataagtagatactctttaataaataatataataaattgtttaccatttaaagtacctaataggccaatagtaatggtttttttttttttgacgaagcaattaaaaattaaaaccattcaagaatataaatgaacggggaacacaaaatacctctttaatactaagatagtttcattctttaaccgaatgacaaagataaaacgtcttgtatgaatatgatactgagtcttttaagtattcttttttatatgtgcttaaattcataattaagttttgatatgaattattttggccttgtactcataaaacagaaaaatgaaattatactctttacaatatatcaaataaatgaaattatactcttacaatatatcaaataaatgaatgtgatattaataaaattcacatgatttgaacatatatagtttgtccaatatttatcattagtgttaaagtgagattagataataaagtggatctcc

SEQ ID NO: 323018 - DNA, 1307 bp, Cannabis indica
tgatgttgatttcttcgtcacaaataaaggttgaatttgagaagtttttatgctacgagattgaggatgttaattctattatagtgctgagaatactccatgtatgttatttgactctttaaatatttgaggtttaaccttttcatcaataaaactactctcattttcaggaaaaaaaattcaaacaaaaaggtgataatataaatatatattggggaatttatgtgtatatattatttaatatagagcataccattttattctaaaattataaataatttatagtattagaaaattagctttaaaacaacttatttcacaagcatatagaatagacttcaaaacaacttatttcatattttcagtatatctaaatcatttaaatttctcaaaaatttataaaattatttaaataactgcctatgtataaaaaaatagattgttaaatatccatgtgtggagaatatgaaaatgacttgttttattacataaaattgattcttaacatcctaattattcaaaattttacaaaaacttatttaagagaccctaaataattacactataaatatataattaaaaaaaagttttattataatacttttacatgtcaaatataaagagtgaggccaaaagacattcctttacaaaaaaaatttcttatatatgtataggtggtgagtccactgtgggttggtggtaaaaaggtcttatttttaaaagttacatgcacaaaattgtcaatttttgggtaccagatgagatgaagatgagatgagatggggggcaataaaaaggtgaaatgaaataaagataaggcatgtatatgggttgatttgtactcactcaaacctaataaataaggctttgcctaagaagtggtccttcttacagctcatacttgtttggtgtctttatttatgttattaaatttattttctttgtttttttttaaatgatgccctcttttgcaactaattttctttgcatgcttttaaccttgattttagcaattaggaaatgaggactatttttgtggggtactttattagataatttgtctcaaataatcatgtggagggattttgaggatggtatgatacactaatgggaaagtttgcatgtaattgcaatcatggtatatcaacatcattattatcatagactacaactactcaactcaaccatcatttaaattgttttatatatatatatatatatataaaaaaattaacttttaagttataacccatttattaacaaatcataaaaatacatatcattattattattatcatcattattga

SEQ ID NO: 323019 - DNA, 638 bp, Cannabis indica
aacattaaatgttatttctgatctatattaataaggaaatctgattatattgaaatgagttttatttagggcataaaacccaacaaaaaatccagtctggtttaatggttttcggggtaaggattttcacaacaaggctgaagcttttagattggggttctggacggatgaaaacgttgtcaaactcatggattaaagctttttcttcggtaagagggatgataagatatgggttttcagaggatgtagacatggctgggtgcatgcacgtgagatggtagaaaaagagaaggaaatgtagggaaggtgacaggtaacaattatggaaaaacaacaaatttatccacttatagcaaatttaaaatttatgttgaactagattagtaggatcataatcccacatattatctaattaacccataatataattataaacccaaattatttaccattaggcttatcgagatattatactggacaacccattaacacattgtagacagcatggatgtcgacgctaaaaaagtcttgcatttgaatagcggataatggtggttcccgcatggttagaggaagttcaattatgccgaaacttacgacatgtaacaccctaactaacataggcgtattacgtgatt

SEQ ID NO: 323020 - DNA, 2070 bp, Cannabis indica
ttaataaagtataataagtattataataataacaccaaatattttacgtgattttgcagttaaatctgcatactccacgagtctaccttattcaagatatttttgagtatttaatacaatatacaattgatagtatttctgtatttctctcaaagattttccgtccctttttctgtagaatctgcctctatttataggaatataggttgacagttatttacattttaaattcaaattataaccgctccatgaaacgtggaaattgatcacgtttcatttaaacacgtgtagataacaattggtaaccacataactgcttattattcttatcttcaaagatagtagatgttgatttggacaatagcacctcgcttaactcgtagatggtcaaatgttgagttggacaatcatatgtcttccagcaatgtcatgagcactagtgtactgagcaaacttaagaactgctctttgactataaggcatcacaggctggataatcatgtcttgcatatttcaaatttgttaaacacttaacgtatttttcacattataattgtctagtctgatgtcccatccaacaacaaccgatccgatgcgattggagttttaaaatttacacccgatctgatccaatcatgattggatatccgattctattagatcgattgggattagatcagttgggatcatttggttgtaattagattggatgactttctgcacactcctagttcatggacataaagctaaaccagccaaggaactttccacttttgcagcaaactatatgcacaacttccactttgcccaagctatatattgcctagaaaacagagcaaccacacaactttctccttcggctgctgaaccagtttcgtgggcacctccaagggttaggagcctcaagctaaacgttgatgcagacgtcaatatcgacaataaaattactggtgttggggctatagttcgagactcctctagcaatgttactgctgctctttctaagcaaatcattagtaacttcaaatctcaagaaatggaggcgctagcaatgtttcatagcttaaattgggctcttcaacatcaattacctatagctcaagttgaaacaaatgttctacgggtctcgaatgctttgtgtaaactttcatcttcaatttcttcctttcatgatttaattatggatatttctagtcttttgtcatttttctctaatgtgaatgtatctcatgtcaagcgtacaactaatatggatgttcacaggttgtcaaaatttactttaggggtggatgaagtttgcttttggtcgtattgtattcctccacctatgaactctgttatacatgaattatccttttaatttgtactgtagtcaattagagtactaatatgaattaaacactacatatttttttaaaagaaaaaaaatcttattaaagttctatagttgatcctattatacacgaccatttttaaaataagcaaaacaagattatgaaaaaggagctcaccaataatttcaaacatcttaagactatcaatattctcaaaatacttaaagtctatacagctaatattttgatattcttcaaggctaagatccacaagtgataaatttgactattaaaatattattttacttaatgttattccttttagttttataacttaggggtcgtttggtaacacttttgttttctaattttttaatcacaaaatgaaagtaaaatttttgtttttaaaaattttgtttttgaaaaacaaaaattcgttatgtagctacttttatcttttaattttaaaatcagaaaacaaaagtgtgttctgtaaaatttatttttcttttttatttttttattttatttaagccgggtataggtttggggtcgagttcgggttcgggtcagaggccgagttcagcgcagggccgtggggggagaatttgggttcgggtctcgttggagtctaaatattgattaagaaaaaaattgtttaaaaaaatattgaaagtgatttttcttttttaaaattttgattctcaattaaaaaattaaaaagtgaaaatagttt

SEQ ID NO: 323021 - DNA, 1519 bp, Cannabis indica
taccacttatccaaggtgtaagcatatctatcgctgattatcatgcctggctaaatccagtgaactgacaaatcaaggaattaaaaagaaaaactttcgaacatacaaatatgattatattccactgtgctgacaacactataatcatgtataaataaatatgttctgcaatataaaatactatttctgatctttattaatagtaaatctgatttatattgaaatgagttttatttagggcataaatcccaacaaactcccacttgcactaatataaaacaaaagtgcatttcaaataatctcaacaccttgacacacaaatcaactgtagtatgtagtgtactctttgaataggatctgacaggttgaatgaacacaaccttttctccaccattacatttccttaatcacaaaatactctatattgtgaaattcctctctatatgtcaactcctctagggatactggattctttactattgtaaactactttttgtgttagtcaggaagtaacactagttaagaaatgttggaaaaatgccaaaaatatatagaactttccttagactgaataagtatctttcctgcaacttgaacatccagtctctctctggtagacttagagattttagatagggttttacacttctccaaaatcaccactccacccccagagtaatcaccatctcatcaggaaactttgaagcactaaggcaggtctagaaatccgatttggtgtagtttaagagtattaaatatatacccttatcgaataacatatagttcctcttcttacaatattggctttttggaacagggccatgacctggaccctgacccgaacccagaactggacccaacctcggaccctaatcgagattgaaacccggacttgaaccttgccctgtacctaaataaggacccgaacccaaactcggaccgaaaatcgacctgaacccgtaccccgtgacttgaaactagaaccaaaactagatgcagatcgacctagaccaaaacccaaaactataactggatcaagacccggactcgaacacagaccaaccctgggattgggtccctaacctgaatcctaacccgaaccgcgactcgggacccgaacccaaacctgaacttagacccgaacatggaaaaggactcgggacccagaattgggatcgaggtccaaaactgcagccaagtctcggtcccagacctagaacgagacctagaccgcgacctaggacatgaatcgaaaccagaatgggacctgtgattgggatccaaatcttgtaccgggatttgggaaccggggcttggacaagacccatagtcggtaggagaaggacctaaagatggaccaggacctggacccaacctagaccaaggacttgaaaccaaaagttgaatcataacatgaccaggaacttggaagaggactgggactgtgattgggacccggaactagactagaacccagccccaaaactcgggctcgaacccagtgttgggttttatgccc

SEQ ID NO: 323022 - DNA, 1187 bp, Cannabis indica
ataaaaataacatgaaaatattagaatattataatgatgaataattaaataaccttttttaaatatgaataaaaattaataattaaataaatatctgagaatattgtgttaattaatcaactttagagttatgaattgaaacccattcatcgggatgttaattattcttcctctagtctcttcagtgaagttgtaaccaaaactaaaattttataatcatttgaaagtagtctgtactcacttgaggttgccacacttttcaaattttgcagacaaaccttcattctataagttcttaaaccttcattgttgtatgcattaaattttccggtaagataaatgatagacacattgagaatttaataattggtaaattagtaaaaaaaaaaaattagaataagaaataataattcccttctcattaataaaaatcattattaattttctattcttcttagtattacattctacaaactctaatatttatcttccaactatatagtatctagtaatttaagttcggtaaagaaaagaactaaaattaaaaaaaaagttaagatgtaaattaaattatgaaattaagaaaaatatattaggatatatatagagtttagtaactgaattaaaaaaaatgaagtgatccattttttaaatgtgatatatttattattttttaaaatatatatatatagagtttagtaactgaaataaaaattgaagttattatcttttaaaacgttgatttgttatctcattttctgtcactatgacgtggcagaatacacgagtgacacgtgtcctgcattccttgcatctgggcggagatgagtatccagaatagacttgaagtaacacatctggacgtataacctctatttaccctaacagggtaaaaggctgattacccaagtaagaatgagtttggctttccgagcaactcaccaagacttggctacttcaaaatgatctcgtgaggtataagcacgaagacaatccctacaatcgtgggattgagtcagaggaatatggcaacctgttctaatttcctattttgtgtatcataatcatgtaatgaatattatttcctattttatacattgtaattaaaagggaaaccctccctcatgcattaagctcttataaatagtgatctagcttcactgagaaagggattgaaagaattgctt

SEQ ID NO: 323023 - DNA, 1097 bp, Cannabis indica
tcaattcactttaggggtactatgccaagttgtgcatgccccctaaaatgtttgggtgcctagcgggctatttttatattgttgatggagattttttggactttttaaagcttttggttgaaaagattgttggggatttgatacgtcttcaacgtaacttctcggagtcaagaatttcttgaagtttgttaacgcccactctagttttcacctctaatcttgaaagtgaaaccattactgagttgtagtgcgattttagccttcctatatggaagccaaactccgctacacaattctacatggttctcacaggaaggtgtatttctactgtgcgtgaaagatcgttgggggttcgatacgacttaaaccttccttcccatagagaagaattgcttgaagtttgttgaacgcgcactatcattttcacatctaatctttatagtgaaaccatttcttgaattgtagtgcaacttcagccttcctgcgcagaagctaaattctgccacacaattcaacatggtaatcataggtacgtttgtttctaccgtgcatgaatgaccgctaggggtttgatacgtcttcaaccttctttctcggagggaagcattgcttgaagtctgttgaacaccaactagggttttcacctcaaatattgaaagtgaaaccattgcttgaattgtagtgcgacttcagccttcctgcaaggatgccaaagtccgtcgcacaattcaacatggttcttacagccacgtgtatttctaccatacgtgaaagatcgttaagggttcaatacgtcttgaagaattgcttgaagtttgttgaacaccaactatggttttgacctttaatcttgaaagtgaaaccattgcttgatttgtagtgtgacttcaaccttcctgcatagaagtcgaagtccaccgcccaatttaacaaggttctcacaggcatgtatatttgtatcgtgcgtgaaagattattggcggtttgatacgtctttaaccttccttcccaaagggaagaatttcttgtagtctattgaatgcccaccgtagtttttgttggaatttattttaacaggaccttagatctactcacaa

SEQ ID NO: 323024 - DNA, 1144 bp, Cannabis indica
ccctcaaatgtcgatctgaccaaaaaggaagatgggctaccagaaatctggaccaccattaacgaatcaaattcctctgagaagagacaagttccaactcaacccactaatctaaagttcaaagaaagaaggattgatgtacgaatctgccacaaaatgataattacattccaacatgtcatttttgcaataggaaaggtcacatttgtcccaagtgctataaattgaagaactacttgaaagcaatgattaatcgaccaaatagttttcctcaactaaataaatctcatgggcgcaaacctcgtcgataatggaaaaaaaagtctaaacaaagtccaaatgttggattggtggtgaagctggctatgtctgcctttgttgaagggcagtggtattttgacagtggatgctctcaccacatgactgggaataaaaaattgctagtttactacaaagaggacaaggagggggccgtgacatttggtgatggtaacaaagggcatattactggtaaaggtgatgtaaacctgaatggagtggctcagttaactgatgtactgtacgtaaaaggactcaaagccaatctcatcagcattggtcaattgtgtgacgacaacctctcagtaagttttactaaaactcagtgcttagtttcatctaatgggtgtgttgtcttcacatgaataggactgtagatcagtgatatggagtatgcaataccattgtgtgcaatcgaactttcttggataaacttgatttatggcactacaagctagggcacttgaactatagagaccttcaaagactggtgaagcttcaagcagtaaggggaattcctaacatgaaggtatccaaggagagaatttgtggaccatgtcaacttgcgagataacataacccatcacatcctcccatcaatagacttctcacttcacgcgtgttggaactgatgcatttggacttgatggggccaatgcaaaattaaagtctcagtggaaaaagatatgtagtggtcttggtggatgactactctcggtttacatgggttgagttccttagagagaaatctgagacatttggattcttctctgccttgatattgagactacaaactgagaaagactccaaagttggaaaagtattt

SEQ ID NO: 323025 - DNA, 1043 bp, Cannabis indica
caattcccaagtttcataaatcttgcctaataattttcttcgggtgctacctgttgtgcgcatgtggaactaaaaaagaattatttaagaagttaatcgtattatcaagtggtttagacacgagatatttgaacataaacaatcatttttattcattaattggtctttgttgatgtgaaacttacataaattgattctacaagcttacataataaaaggtctacttctagatatcaaatggctacccctacttgacatgcaaagcagaggccaccattgaagaacgatgggcagccacactaacaaggtcgtgggcactagctcttttaactaactctaaagatgagttggtagaactactactattgagtagcattctctaagctagtcactattagtacttgcaaagaagctctccattccagtatcgtggtaggagaaccaactccacgttctcgttataccttcccagcttgtaggcttccttacttgttatctctgtaatttgtaggggccttctcgattcggtccaaacactcttactgctggatctttggtgttcaagaacactcttcggagcaccaggtctcctatgaagatttcttgtccttgacttgtttttgaattaccttgtaaccttttgctggtaggcttgcagctttaggttggcttgatctcttctttcctctattttttccagggattctaccagtaggatcttgtttgtatcttgatcataggttgtcctcatgtgagacgttggcactaactctacaagcaacatcgcctcatagccataagctagagcgaatggagtttttctagtggtcgtcttcttggtagtcttgtgcgaccatagaacttctgggagcaattcaggccaattgtcatttgcctcttcaaggtgtccttgagggtctttttgatagcttctacctacccattttcttgaggatgggccatggtagagaagtttttaatgatgtcatgtctgttgcaaaaatcagtgtgcatgtcacttcaaactactttccattgtctga

SEQ ID NO: 323026 - DNA, 1526 bp, Cannabis indica
ttgaaactagctgaaagcacttagagttgctgaagaaaaattcaaaccctagctggttctatgggtttcgaaaatgagagagagtttgagagtgaaaatgtaacttctgataattttcttattttcttgaataaatgagataatagcttaattttattcagattaacttatcccacaaaaagacaaaacacaacttggtaaaaatgaacattttgccccttcatactaaaaatcactaaaggtcactaaggggtattttgggaaattctaaaatcccaaccattcccgacattcccaatgtctaactatatagtcccgctatactaaaaaaaatactaagatgtgattctaatagccaaacaccgcattccaatgttgtcgggcacagaacatgcaaaattatgaaattcctatatatgacataaaaatgcagtctgaattaaaataaatcatcataaataaataattcaatactaataaataattttcataattaagccctaattatctactaatttctaaattaaggctaagcggtctttacaatatgatactgagaaaagaacttacatacaaattttattatttttctctattactattaaaaattaatgttaatgatccttttacatactttatattacctttagactaattagatactacattgaattcaaatatgaatgattggattaatagatattgattttttttattaaacaaggcagacttttttttttttaaatagagcaaaacaaaaatatttagaaaatattgatatagaaatgtaataaaacaacagtaaaacaaccttaatacaatcataaataatgaaaaaaaaatgaactagtaacaaatatatatattcaatcctaaataatgaaacaaataaaaaaaatcaaataagacactaaacattgaaaaataagaaaacctaaacacaaatatctacaaataaaaataaaagaaacaaaaaccctaaaaaatacaaaaacaaccaaattaccatatgaactttggacatctctaaatattcattctcatggtcaacgtatgaatcagaatcttccactagtggtcaaggacgtttggatttcctcttcttcgttgatttaccatctgattttttgtttggtagcaaaaagtgaggtaggactaggagttttgtctttgaaatttctctttttcatggttgatcgagttaatattttttgagatttttgtgggttttttgacaactggggaagaagaatttgacgagtaacaaccatagtgaaggaagaagaagtgaatttataggacaaaaaagacaataaatggggggggggggattgtagaggaaaaatagagtttgaaaacaaaagaaaatctgaacaaaattgaagaataaccaactagaaaaccattcctcaccaaaaacacacactataaacatgtgtgaatttttaaacaaaacaatataagaaaataaataaagaaataataataataataataaaaaagatgaataagagagagagagagag

SEQ ID NO: 323027 - DNA, 1505 bp, Cannabis indica
aatacttttatttctttattgatatttaaaagataaagattacattgaaatagagttttatttagggcatacaacccaacaggcaaaacacgagaagccagtgtaattaggttggatccagtgggggttagggagttcaatttcccctaaatgtttatggctgaggtagtggcctaagaggtagggcacgcagttggggtgacgttaacctgtcgtaggcagcccaggattaggaacatacgtttgctgaaatgcaagccaagattaatgaataagatgtaaaaatccagcgtctaagatagtaagatactctaacaatgcctaccactgaggtgcaaatggctccttcccctgttatgcaagtaggaccagttgttgttggcaatcgtatagaaccactctatgagagattccgtaagcaatcacctctaatctttttgggaggtttggacgttatgaagccaagcaatggctaatagtttttaacagactacttaattttatgggagtcactgacaataacagagtgacttgtgctaccttccagttctaggaggatgccatagttttatgggacatggtgtccctcacctgagatgtcactataattacataggaagaatttcaagaattatttgatgcaaagtactataatgaagtagtttgtagtgcaaagagaaaataattaatgcagttgacccgaaaagagaacatgacagttacagagtatacaacacagtttgatagattggctaggatggcctcagcaatagtgctaactgattttagtaagaaagaaaaatatctagatgggttgaattccaagatcaaacacaatttaatgatccaaacagatgataaaactacttatgctgacatggtagggaagacactacgagctgagggcacaatggagtgtactcaagagccctgagggactcctagtgttggtagggcgactactcttcctacctctagttacggtaggggtgtttgtgactcaacctctgatcaaaaaagaaaggctccattttcatctggtggctcaaaccagaacaagaggttctagaggaaccaatgtcttggtatagatagagtggatctgaaaaccaatacacttacccagaatgcccccattgtaagacgcatcatctgggcgagtgtagagttcaaggatgtttctagtttagagtaactggacattacaaaagagtgtgcccatagttaaagaaagaggagcaaaagacaaaagcaaagccccctccaacaagggtgtttactcttacccaggctgatgctgaagctagttctttagttgtcacaagttagcttttagttaacaacttttattgcactatattattttattctagagccatacattcttatgtgacgaccaaaataattgataaattgggtaggttgtgcgatagtgatgaaatagggtttggaaccctactgccaggcagagaaatagttctctccaaaaggtggattaggtctat

SEQ ID NO: 323028 - DNA, 594 bp, Cannabis indica
attaataaattaatatcatataatatatgccaaacttataattaattaattttacatttatattttgaaaataaaaaatttctcgacacattttctttttaagtgctatataaatacgacttttagcggcatatttcatgtgaaacatcattataaatatttttattgacattttcattatttttaatggttggtttcgcgtaaaatattattagaagtcatttttctctgaatatattttggaggagatgaagctatatacaaatatttaatgctatgattacatttaaatcttacattagaaagtttttaattaattaattaattaattatattaattatgttgcatatatatttatgcttaatcttggtgtagataactaactatacaaaggacatagaggagatggattccatgagcaaaacagaatacttgctcttaattagaaggtaattagcaattaattttattaattaattattaaattaacagaatataatatatatattttgattactatgtcatttcaagctattttaatattatactagatgagagttacgtggcgagccacgtaaatattagttttatat

SEQ ID NO: 323029 - DNA, 1456 bp, Cannabis indica
caacataaaatgtgatttctgttctttattaattagtaaatctgattatattgaaatgagttttatttagggtacaaaatccaacaatatgtccaataggggtgtccgattgtagttcaattttgaggtcagtgtggaggacccgatgtggatccaataaagcagatagtgtatccgatagttattcagctttaaggtctgtttgaagactcgattgggttagatataagtctaatagttgtctaattggattctaaaattactcatgttcatgaattctatttggaggaccgattagggttgatatgggtccgattagattctatatatggccgatattactcaattttgtgaattatttatcctgtctgtttttttttgttactagtgtttttttatgtttgtggatgacatgttcaactgtttttgtgttcattatgtataatggtgtttaggagatggtagagattggatttataaccaagaataatgtgtgtatcgattctagtccaacaccaagtattgttaagaatactcgtagcaaggttgggactttcattccaaaaacaaatctggaggtattggcaaccgatgtgttacctaaattaaacattatgatgtcaaaagctgacatcgtttgaaatttgattccttcaccatttcccataattggagttccacatattttgatttaatccttggattgtaaaaaatgtcaccatgtcaagtgacacagcctgtgtaatgcactgaaactggaagtataaggcttgaaggtcttgaactgaaaaaaaatacaagaaaatgcaagttaaacattctgtagcaaagcatcggacaaacatcagagggatatcggaccaacatcgaactcaatcgtccgatgttgagggatatcaaatcaacaaagataaaaaaatataataacaatcagaccacctattgggcccaccatcgtcctctatcagacctacgggtactctatcaaaaaataaaaaataaaaaaaatgcaataacaatcagacccctttcatcctctgtcggaccaataataattttgttttaaacaacaaataatgtataaaaatcgggcccccatcgtcctccatcggacaaacaaacattctaaaacaataacaatttataaatattggacccaccatcgacccccatcgtcctctatcgaatatacaaacactctatcaaaatataaaaatttacaatttacatcgggctaacattggcccttcatcttcaacctccaaacaatacattgcatcggacatgtatcgagttagcatcagaccaacatcagacttgtcctaaaaacccaaatttcacctgagaatatagatctaaccccaaaattttctaaatctaaaccaaactcacaaatcacaacaaaaattcaataaacctataaatttctaccctaaatcgaatctataaatccaaa

SEQ ID NO: 323030 - DNA, 1310 bp, Cannabis indica
tttcttcatttgatacaagggctttgatggatgcaagaggttgactttatcccagtagaaattttaaagagaaaattagtgtctggctatatgacgttaacgacagcgctcttaggaggcacctcaagttttacagttattttttttaatttgagatatttgtggtttttatttttatttttgtcttttattttgttttagtatttgtttttatgtaatacacaaaccgtgcaaagtgtgaaaactcaaactcaaaaaagagggcaattttgttccagtggtcgcgacgagcattttacgcatcacgatggggcttcgtggaaggtctatcaaagctcctattcggccatacgaccagtcaccatcgtcacacccatactaatgggggttcaagtaagttcttctggctttgagttttatgtcacattggggacaatgtagattttaagtttgggggagggacataatttttttaaaatttattgttgtttgtttttgttttgtgtgttaagtgagacaatgatatttgattgattgaactgctgacgtgtgcttgttgaaaaactatttatcgatgtaaattatcaatatttggagagtatcatttttgttctacttgggtttgtggaatgtttgcttggaatggaatagaacttgcatggcttattttcttgaggcaaaatccttgataactgtttcttggaaaatgatttaggcaattttttttgaactggttgagcctttcaagcctactcttataattttatccctagtatacccaatttgagccttagcttgttctaaaaatcttaaccacttaattaagcttaatttgttcctattttctactttaattctcaatgtcaattattatgtcataagcttttaaataagtttggaggagtgaagtgttatgagttgaattagtttggaagtgggagattgaggaaagttatgtaatgtgaaagtatcttcatcaccactagaaggaaaaaaataatatatacaacaaaaaaaaagaaaaaaaaatatatccaaaagaaaagaaaagtataaattcttagaaaaagtgatgttgaactcgaaattagcaatgctcaatcttttaaaatttctttgggtaaatactgggaaatgtggatttatgtgggtgcttgtttggttagagtgtgcttatggtataatacatcctaaataatttttcttatctacctcttacctaagccatgacattacaacctagaaagtgttggaaattattataccaggatcttagatctactcacaagtatgttttattaacaccctaa

SEQ ID NO: 323031 - DNA, 854 bp, Cannabis indica
tctatgttttcgtaggaggatcgtggggatacttgcatatatcctgatatatgtgggttaaaaccgttcattggtcatgcgtagtgcgagtcgtatgaatgcgattagacttggtcgtattcccatcatctcgctgagtttggttcacgcgaggttcgtacttgaggggtctctcattgacatctttgctttcctcggggaaagtgagtacacgtgtcttttaagtaggagtcgggtctcgagtttataggtgagaaaaatctcactataacaaaaaaataatgttagtcttaggtgtttgttacgttcttgttgggagagttaatttagatcgatacttgacctcacgttttaagttattttttaattgttgatgtattatttcaatgcaattcatatatatatatatacataaattattgtctcaaacaatagtatagacattactttgtccaattttcattttgaattaattacctaagtaatgatttgaatacataaaaaatatatacattttttatggagtggtgtataattatattaattttaattataggtaccagacataaaaagaataattataaattgaaattaaattattgttagttgtatggttgaaatatatatatttgagcttaagtatatctttatatattaaaagtgcctatctaacggtatttcttggtttaacattcttggtttaacagaatatacttaaaaataaaagaatattctgttaaatttaacgattaggtttgatctcccgttaaaaaataaacccaataattaaaccaaaaaattaaacaatcttttaaataaacaatcttttaaatattaataatctctttttaaat

SEQ ID NO: 323032 - DNA, 781 bp, Cannabis indica
tttttcaaagtatataatagtaacttgtactaataggcatgcttttaaaagtaagtgaaagctggttaaagaaaactgaattttaaaggtggatgaatgttatgttatgttagttttgaagaatattttcacccaaattaagtgaaataaattgataaatatttaaaaaaatcaaagtaaataaatatgaaaaagaatacctgttgtagttgggtttgggtgttatcgaagaaaagagaaggtaagtggatttgtttagtgatttgtgaagcccaccgtgagcttcctgccaacaccctctgcattttaactctttgatataatcttttcaacaaatcacaataataattagaacaagaacaagaacaagaagaagaagacaattcaattgaaacccatattgtacttctatatatcaaaaaagtcataatatctatacaaaacacaaaatgacaaaatgaaaggacttgtttttatcttgtatttttttatttacaattttttttataatatatatttttttataaattttttttatatataatatccttttttttacattgtttttttacaaatttagtggattttttttatcacaataccactacttttatcacatccttcagcattttttggtgaatgacaattatttaacatgtagaaatgattcttttaactaggtgattgttacgtgccaaagccacgtagtgttagttttatttaatattttagttttttattttaattaataattaaaatagtataattatttgaacgattt

SEQ ID NO: 323033 - DNA, 1899 bp, Cannabis indica
ttttttttttttttttaaagctagtgtttcattcttaattcaattattatttgaaacttaatgaaaatttaaacaaactattgttctattagattgtttttacatgcattgcatttatatttagctatatttttagttataatttttgttatgtatattttttcaaattttattaattaaaagaaactacttattaatttttttaattttttttttaaaaaataatatttaaagtcttaaaaatttgagaaaaataaatataaagtttaagaatattaaaattgacaatattctcaatattaaaaataacaataacaaaataataatgttacaaataatacattaatatttatatatatttaaatcaatctaaaattagtataagttttaattaacttacaataaataatattaatatttatatatatttataaaactaatcctaacactaacactgttaaattttacgaaatatttttatattcttgaaatatctgttaaaccaacaaaaatcattaaataaccatattttatatataaaaatttatttatttttcttgccttttattatatctaaataatttataacaactagttaattaagtataaaacttttactgtgattttgtagtttcaaatttaaatttcaatttcaccctatatttttttatttttattctattttctcattattaattaagtttattatttttttttacaacttttaattagttttaaatttgaattctaataattattgggttagatattttcttattttttatttctatttttaatttatcatttattgttaggtttttaaaaaataaattattcaattttattaattgtaatcaacttaaataatattatgcattccattcagtacatctccctcatagaagattagaattagaaaaacgaatgaattaatcagttacctaactcttagatcgtttgacaaaaaaaataaataaaatattacaacattaccgtttactttaagaatacttgtattcaatttcatcaaccactagaagacacaataatataaattatacagcaggtcattcaaacttgccctaacccggggcaaaatttgacccgttcgattttttatagaacaaacttgccccgctgaccgattttgataatcttgctagatttatataaatatgaaaatttaataaagagacctggatataggagttcttggtgtagctatatgttccatttccaccgttcattgggtgtgattctgtcattgcatctttgcaaatattgttcattgtatcaacttgtccaattatgttacctgcgatcgatgttcattagcttctaattatttatatggtatatattatatacatttataacgagtttactaaaatatttatttttattttaaattaaatgtgcataataaaagtgttatatttttttaaacattacaattcaaatttaaactcactacacatatttttcttatcttttatcttacattaaatgtgtctatataacataattttctttttaatattacaattcaaaattaaatgcgcacatttaaaaaatatctttttattattattttttttacccaaaacaatatatttatattattatttaaaaaaacataaaaaatagaagaagcttataatatttaaaattaaaagtattatggtaattaaattaaaattataattaacaacaaattataaaaaaaaattatttatcgaataacatcgacacacacaataaaaaaaacaaaatttaattttgcaactaaaaaataaaaactgagtataactaatactagcattgcacataatattaacctagtatttatgtatatatattctatataaaatgtggctaataacagaattcttggtttat

SEQ ID NO: 323034 - DNA, 1032 bp, Cannabis indica
atcggaactccaacccgctccaatgaaatggatctttctggcatgcctaccctaaataaaaagttcctaaacttactcatgtaactctaatgaccatccatcgcatcttttatcgtcaccgatttaaaatcatatagaattaatgtaaatttcttctttagcataaataatatatttaataaaatctctgaaatttaattttctgaaaatcaaactcacaatacatatatattcatacataatcatcaaataataaaaataaatgctaattagtgaaatatagagttcggaatgattatttaacaaaatacttatcatattcctgctaaatatataaagggggcaaactatataatttttctaaccaactatgtagctagatatagtactgatgaagagttacataggtatatttatttatttctgattgtacggttcgcaacatgaacgatcttattgaagcagggatggctttgttattagattgttaatttagagtcacaataacaagtactccattgagccagttgtagcttactttatcctaatgctgatgagtaatcttctttcattctactaatattatttcattgaccaattaggataacctcttccttatctacaattccttggttataaagtaacacattctattgaaatgtatattttcttttaaatttcggataaacaaatagttcctattcgtaataatattcaattaaataatgacctctacaaaagggcacaaacattcaacttgtgcacttgactcatcatggtcatcatttatctctttttaatatgagaaatgttaaaatttagtagtggctagcacttctccataatatattactattagtgtaattaaatatcaaattttatataatttaagaaaatatcgttaaataactattgagcactatctgtaaatatagtgctatatacactagtgtctatattacaatactgttttaatattgatattcaaataagttttgcaaactcttaaaaaaaaaaaaaaaaaaacaaaaa

SEQ ID NO: 323035 - DNA, 814 bp, Cannabis indica
acgatacaaagtcaattttccagatccaaaataaagactataacctagtctatccaaaatagatatagaaatcaaattcctcctaatagagggtaaataagcagcatcatgaaactccaaaaatgcatagtattcagtttcagtctaataatccccaaaaattcaactcttactttagtatcatctcccatgtatacatactcctccaacctactctgccttcttcgacttgtcacttgtcactgcctgcaagaagttcgtaacatgaattgtatctccagtatctaaccaccaagtgtttgagggagcatcaataatattggattctcaagaaaccatcacaagacaattacctttcttctctaagtgagctttgtgctttggacaatcagctttcttatgcccgaaacattgacaaaagttacacttctctttgaaaaactcattcttgtgaccagttgaagatgatcttgcttgtccatttcccttaggattggtcactaaagttattggatgtgaactctctcttgtgagaattgtttttatttataaccatggagatacttcttgctcttccctttttcatgtccttttcttccttggcaagaatagaagtcatctcttcaatggtctattactccttttcagcattgtagcttgatctaatcgaatcaaattgagaaggaacggttccataaaaaatcacaccatgtaatcttcaccaagatccaatcccatacccttaagcttttggtaaaatccatgagcttgtcgatatgggatctaatatcacatgtatcagcataattagtgc

SEQ ID NO: 323036 - DNA, 1822 bp, Cannabis indica
gatttctttgataaccatctttaagaatttaagctcatgaagttttgtttcatcaacattattatttttcccaaacacttgtcttacctcagcttgcgccttctccattgatgtcggatttttcaacaactctaacattgtccactccacaactacagatgatgtttcacttcctccaatgaacatgtcctgaaataatgttaataacttatcgtaagtattttcgccacacacatgcatgcaaaaatagttatacacactactactatttacttctttcattaccattttcatggcctgcataattagtgtaagtcataaaaaagttgtagggatttttcatgaccattaaagctggacgtgaaaagtatactaatcataaaaagtgtaaggaaacgtattgtataataattttttatttagcattaaaaaaatgtgaaagagaattttatgaccagctttgacggtcataatgaccctttttcgtagtgacaataataattaagttataacatatatataataattaataacttaccaagatgattgctgtgatgtttaaaggctctagtggaattgttagctcatcactaccttgaagatccaaaagaacatccaagaaacccttggttttttttgtataatgattaacattctcttgttctctatcatttttatgttcatttacgatgctatcaagaattgtttccattaatttaatcttcttttccaaactaggccctgagcgactaatccaatgcaaccatttttgtgaagggaatgcttcagtgacactgaaaccggcagcgatctttagaacttcttcaacagctgatataaaggctctttgttctttacatttcttaccaaagactgctcttgcagtgatgttatatgttagtgtggatattttctcactaagattgaaagactctccttcttttgaatgcacgtattgaattaaatcaaacacttcttcttctcgaatagatcgaaaagattggactcgtctagggcttaacaattgttctgcacaaatcttcctcatttgtctccaataatcaccatagtgtgcaaaaataatatctataccataatactttccagcaatgagaagaaaaggcctttcaaaaaagttgagatcatgagttttcatcatctctttcgcaatctcgggtgaagaaacaacaatgtgaggaacttcaccgagttgaaggtgcatcaatggtccatattgcttagccaaatccctcaaccggtgatgcgggagagaagagcttataaggttgtgtagatttccaatgagaggtagcttcattggccctggtggtaactttgttgttaaggaaacattgcttgttatgctggctttatcatgataggtttttgatgatgccttcataatcaatgagatgattattataagaagaaatgtgagaaggaataagatagatggaaagaggtactccatgatataaattagagatgaataatggaaaagatttagtgagtgagagaacataagagattatgtatgcgaaacaatatatgcatatgaaactactactcagtttgatcatatatatacatgcaagttctccatgctaattaattattattaatgaaatgtatcattaagatgcatggaaaaattaaacaaagaaaatgagactgagaaaataattctaattatagaaaagaagtatattacatgtgccatatgatgatgagatagctcatagctaggatgccataaatcatggcaaattaattaagtgcatgggaagattataatttgtcagtatacaattaattaatatta

SEQ ID NO: 323037 - DNA, 848 bp, Cannabis indica
taagtaattgttaaaaaaaaaaattaaaagaaaactatgtatatttcttattgcccatgaaaataaatatataatatactctgatgttaaacaatcttagttaatacaaaatacaatttatattattatgaaataaaatcttaagagctaaggaagatatttcttgaaaattttaattttataactatattatgtcatttttattagaatatagtatatcatctctaggggcttctaaatgtttatatatatacaattaaattattgttatgaagttcataataacactttcttagtcacattatgatttttctaatagcaattttatctactcatagcaacttataaataagcatcataagagacttcatattattgttggtgtattttaatatcgggtctcatctattttaatgtaataaataatataaaaaattattaactaattatagagtgtcatgtcgatatgatattaaacacctaaagataccaaatagcaatactcatataaaaattgaaaaatactaaaagatagtagtgctcatagtattataagtaaaattaaatatcaaatcccacattaataaatttaataattattataaagtatcattagctatttgtaaagtgacatctcttaacaatgctagataccactataatctaagagaaatacttaaagacacccatggtgtctagtattattgtaaggtgtaatatgttattggtataattcaatatcaggtctcacttattttactttaataaagattgggctaattaggatttttaccccttgaacttttaagatgtaacgccccgatattttgccttattttacaaaaata

SEQ ID NO: 323038 - DNA, 2015 bp, Cannabis indica
tcataattaatcacaatcaactgataatttccaaattgactaagcggactttacagtaaagattgacgaaattgaagctgggaatcaacagaggtgttaggggagaaaaggatagaggatttctctattaactaattggcccgtagctctgttgtaaagattgagaatgacattgagggcattactggatcgagagttgacttgggagaaaagcatgctatcatcagcaaacaaaaggtgagaccggggttgagcgcccctgcagatctgaattccagagaaattagcctttgtctcttgcagtcgaatagcagcagaaagaccctcagcaattaagaggaagagatagggagataaaggatccccttggcgaataccacgggtagaatggaaggtgttagtgaggaagccatttatggataacctaaactggacagtagaaagacatcacattataagagaaataaaaggagtagggaaaccaatatgatcaagcaattgatttaggaaagaccactcaactctgtcaaaagccttttccatgtcaagcttaatagctgcccaaccaatcttccccgatcgtctagaatgaaatggcatgaataagctcattggcaagaaggatgttatccgtaaattggcgcccctgaagaaaagcactttgattgatactgataatggaatgaaggacaagccttaaacgatttgcaatgactttggataggcatttgtagatggtattgcaaagactaatcggtcaaaaatcacggacaagtttgggatttttcttttttgggatgagaacaattatagtttgattaatttgggagatgtccccctgtttgttaagaatttggagtacggctctggtgaaatctttcccaagagtggaccaattaattttgtagaaaaatgagttgagaccatcagggccaggagccttgtcacccgaaaggctaaataaggcttgtttaacttcagtctcagtgaaaggttcagcaagaaaagcaacttgatgaggggaaagcctgttagaaatcccttgaagaagagagtttacagccatatcacacacaccttgagaagtaaaaagagaagtatagaagtgaaggaattgggaagttatagtagtagaatcatgggaagtggatccaccagggagagtgatttgacgaatgagattgttcttttttcgagcagaggcacggtggtgaaaaaattttgtatttttatccccagcacgcagccagtcgactcgagaacgctgtttccaataaacttcctccttaaggagaagaccatccaatctagattgaagagtagcaacttgaaagatagattgggggtcggatgggaatcattcaacaggttgttgagagccgcctgagtacgggatatttggaacttaataggatgctgagatttactccaagtcctaatatccgaaatacagtgagattgcttgtccaggaaagattgcaaaggtgttaaagagaggttctgggaattggcccaagaagaattgacaatggtagcaaaggaagggtctttgagccagtgatttttgaaatgaaaccgagtggatcggagattgctgaaatttgggtcctgaagcatgatcttaagggccctatgatcagagccatataaacctaggtggaaaagagtagcttgagggaacaaattagtccaaagctgattggaggtgcaccaatccagacgctcaaggatcgtaccatgcctccacgtgaatttaggcccaatatgagggagaggaatatgattgtatttgttcaaaaaagagtgaaaagactgcatagcatgagaagggggagagtgatgcgtgtcctgtcgttaacagagagataatcattgaaatcacccataactaaccaaggcaaaagaggagcagtatcaaataaacgattaagtaaagtccaagtaacaaatttttgatcagcataaggagaaccataataaccagaaaagtgccagtctttaccattaaaattatt

SEQ ID NO: 323039 - DNA, 1692 bp, Cannabis indica
gccccgaggagttcggtaatagcctactccccttgatttgtattgacttaagaacaaagaatgcagtgattcttctcttagagttcttacaatgatatctctgagtatatactcttagataagttttttcgaccctttgcctagtgagaatagatcactatttatagggcataagcttgagggaaagtttcccttctgtttacaatgtttataattggtaagactacacatcaaatacagaatacactgattaagagatttgaacatcttgccatatctctgtgatataatcccaaagttatagggattgcttctgtgattcacgatgcaagtgttaaagtttctaagtgttggcatgctgttcggaccgtctactgctcgaccaggaaggttttgtccatgcagatatgtgtggtgttctattcggcatatctctttcgagagaaaacgtgaagtcgattccacgtgtcaccagtacgtgatgccacgtcagaatgccaaaattgggataacatttacccccaagtttgtacgagacttccgaagttacgtgtagacttcatccgagctgcctttgcatttgaatgggtgacacatgttaggtgcgtctattcgtgatttgatgtgaggctgaccaagcgtctcttcagttttcgtctaattaatgctctgacttaattagtacctcaaaccccagtttttctcctcacgctttgacggttacacttgattaattttgatttcctaatatttgcttttgggggggggggaaattgaagcgtctgaggcatctcgaaatgattatttcttttcacctgattgcctataaataagactggattttcttcataattttactttactgacttctctactaaacaaactcagagcaaaaaaggatttttactccaagtctgttgtgagatttccaccaaaggcattcgagcagctttgtctggactacagttaggcgtcaaacagtgagtaagttttcaatctcctcctcttttaactttgcatgtttaacttctgagtttccattgtagaatatacatgcgttcttgacttgttgtagaagatagatagaaaatctaggttcaaaactttgtgattttctctataatagtcagtacggcttcatagtctatgacgtttgcctttaaccacacattgtttgtctttcaccttgctcattcgaagcttcgtgaaatttaaccctaaacccaaaaatttcaaacttttaggttttgacttgatttttgtacatttttttttatccttttaatctattgagtactcctatttggcatatttgtctgtttactgttcgatatcccggccaaacacacatctcgtgtgttgtcttttgtagaggaaccctggtgagttttagggaagcgaataccgaatcgaccaggacttgcttaaacttctgtacgaggatcatcctcatcttcgcgccagtcagtcctcttcgagtgacgtactttctagctcaagctttaaagattgagaggtgagtagtgatcgttctcctactccagaacccgtagttgttgtcgagtgaatttcgcaacaccaaattatatgatattactagtgacaagaagcaatttacgtgaaagaacaagtgcgagtattcaacctagaatggcgagtactcaactgggaatgagaaatgattaacaaaaa

SEQ ID NO: 323040 - DNA, 804 bp, Cannabis indica
cgtggagattcttcaattccatgcatgattaaagtatttacaaaattctgaaggttctattcctaaatgtatttacaaaatagttatagaaccatcagagttgttgctcaaattctcaacccaagagggcgtcttgacaaaaatttttgctagaaaatcaatttagaagctcaatttttaaaatttttccataagtcccataaaatttagagataacctggataaatatatatatatatatatatatttacaaattatatgtatatatgccaatcagaatcttccatcattattttttttcacgagttgtttatatggcaattgaattgattgttatataaaaaaaaaaatctgtaatagtctaaaatgaccaatatatattacaagaaatattggatcggcctatatttatacagcctaacaaaaaaacagaaacccaataacacaacaaataaataaagtaattaatataaaagtaagtacaaaaccatatacttatcaaaaaaaaaaaaagtacaaaaccatatgctaaaagtaattcttttaaatattaaaattaaacagtataaccaaaacacataaaataaataaaagacaaagataaataggacaaaaaaataaagacaaattcattaataaaaaattgcacatttatacattaataataacaatgcaacttaaaagctactgttttgaagattattaaaatatggtaaaaactaaaataaaaagtcactaatttagatactacatatgacttttttcactttacactctcagcagaacactttcatacttttgttg

SEQ ID NO: 323041 - DNA, 681 bp, Cannabis indica
aactcatttgattacaaactatggctcacaaagagcagacatctatacatgtaaattttgagaaaaattataatccactaaccaatctatatccttttgatctacacttttgggcattacacaagtaattctattttttactaaccacttaatttcttgcactactatcttcaaatcagtatcctctttgcactagtattttttgttccttgcgtaccatattttgtacactgcagcagctacacatgcagtatagcatttcttcttgaattttctttgttttgctctattaatccccctcaggatgctcggcagtaaattattctttgactcccatcccagacaatttttcaattcttgcaggcagtgttgtgcatatctacattcgaaaaacagatgacacatattctctgcggcaatatcacatagcaggcagtttgtatccactgcaatgttgaatttctgcaatctatcccgagtcctcagctttttttgtacagcaatccataacacaaagttatgttttggtacatttagtttactccaaatctgcttgctgaggtgaaagttcctctgttcctgcatcattattttataaatagcagatatttgaaactctgatgttgtaaattgagtaggagggataacttgtttcaccaactcctttatgcacactactct

SEQ ID NO: 323042 - DNA, 1555 bp, Cannabis indica
aatttcagttatataggcacactttatatagaatagatatatatatatatgtgtgtgggtgtgtaaaggtgcttccacaatgcacaccttaaaatgagtataccgatacacacgtatctgttttggcattcagaagaatattttattataatttttttttaagtcgtgtactatagttatttaagatattctgtaaaattttaaaaaattcagaataatttacaatatagaaaataatgttcaaaccgcctattttatatgcgtataaaacaaaaaatcatgtaggaaatttacgactaaatgtgcaaaattaaatcaataaaactctaaacaatcaaacgattagcaatgacaagattaacaaattaagaacaacgatcaaaggaaaaacaaactaaataaatctagaacaataaatgcagaaaacaaaaaagttaacaccaagatatatactggtccagttcgatagattgatgtgatctatgactctacttcagttctggaacaccaccaatccttctttattgattgagtaagaataagtacaatatagtcgagacgaaattctctgttgagttctcacaaagtgcttcaactctcacacttacacctaagaatcttcttcatcttcagaagattcttcttacaaaacttaaacccaatctctcatattaatcttttctctctcaaactctcgatctcatctctttgagttcttaatctcgtcccttctaaataacaaagtcaaggtggtatatataggctaaggattaagatcctaaagtcagtggctgcaagaaacgaggttgttaagttagttataacttaatcaactcatctttgagcgaagtctccacgtcagcttaagtatcagagcctccaagaacacaggtgagctctcagactcacggaccgaggacactagctgaagacgcttctagataggatatagcctgctggagttgactatcctgatctaccaatccaggagtgacaactagtcagctcgaattcctttccaaaagaggactagctatcttggagactgaactcgtagtggatatgatagtcatctgggaactcccatccggactcgactatcattctataagactccttttgggactagaaatcgcgggtgaataaatttctaaaagtgatgtttgcatagaccttttcatttggagaaactataccacaagtcacgcgtgtaatatataatttagaccttattttcagcgtgtcaaatgtttctaaatttatcaaatttagtaagatatcttatataattataatatacacaactataaaaaaaaatggactaaaaataaataaaagtgtacgtgtattataaaaattttcaacatatgaaaaactattttgatagtgttacggttaaaattgaacaaaaaatggaaaacaaatgctattgaaattctttcaaaaaaaaaaaatgctattgaaatcgtttatcatgccaagtcaatattaatgggaaatttacatagtatattaacttttgctatttttttacaaaaatactgtcaggcggaat

SEQ ID NO: 323043 - DNA, 1201 bp, Cannabis indica
tatttgtgaagagatggatatcactagaaagaacatgggatttttggaaaattaaggtaatgatattctattttttgggatgttatttttcatttttttttcctgtgattgtaatttttatgacttgtaatttattttcctaatggtatataatttttcaactactatctatgtataatgccacattattaatttaacagtcaactttagtcaattttaacagaattagatagaaggattatactattccaactgatatattttagggggtatttttaactacacttataaattaaggggcatcatagtatagtgtcataagtacagggactaaaaaagctaattattctttattttattactaactatattttatttttatttttttcgaaatggggccctgagcggtagggggcctaaggcggccgcctctttcgtcttaactcaggaccggccctgctcacactcttctatgatagtaataatatatgaaaaattcataagtatgttattgaaaaagattatagtataaaccttaaaagattcattttggtatttttttttatttgtgatgtaacttaggcattctatctaatcttctataatgagattgctctctatctcttggagcattcaaaacaagactaaaaacacaatctcaatagaacgaaacacattagagaaaaattattcatcaacattactactttaacacattaccacaacaactatcaaatacataatccttcatgaaaaaaaaaattaagattaaaaaactttcttaaagaatttatcagaacaactatttcaaattagattgtgtactataaaattaccctacattttttgtgtgaatattagtaattatggtgttcataggggacaattttgaaataatccaacttacatggtacatacataaacgtttctcgtgagtcataagatatatgtgtcatatcatgtgttacattatttaatacaccatgacactcaaagtaacacaaaaaagagaacaacagtgttattaagcactattgtacttagtattacctagactgatgtttttgttaggccaaaattagtctaagtttcgagttatattttcggttagttttcactctttgtttctagttttagggctattttacacttgattcttttgtttcaggtccttgtgtgtttaaagaaagtatgtacaaga

SEQ ID NO: 323044 - DNA, 778 bp, Cannabis indica
tatatatatatatctactataaaaatgctattgtttttaatacatttaattatattaaaatagtatttattccattactaaaatcttattataaggttataccttagtagctacttgatagcaaaattgactttcctataaaaatgctctgtcttatatgtttatttaaaatgttactgtttagtaagtaattaattagtgatatgttaaccattagtcaagaccctttcaaataataataataagttaagatgcatatctagctgtatgtgatatttggcaacataaatgtgatctgtagtaagatcaaatattggcttaaaaaattagttggcaaacgaataattattctctatttcttcttctttgtgttaatttgaaatatatatgtgttcatatgatgaatgagtgaatatatttatagttgagtagggtcaatctagtggaaaaaatttcacacgtacctaagattattcattattaagagtcaaagatgcttggccaaccaaattaatgactacatgacatgtgaacaacacacacaaatattttatttatatatgacatgtgtgggacatatatattgtagcagggtgagttttgcccccaccggtagaattaaatcatatttttttatatataatatacattaattataattatttaagatatgatactttgataaaattagttaatgttttgttaatatatcaagtatgttatggaggaattaaggtgtcgtttggtaatacttttgttttttaattttttaatcaca

SEQ ID NO: 323045 - DNA, 1286 bp, Cannabis indica
tctattctacaattagtcaagaacagtcaaagttcatggtaagaaatcaagaaaacaatgcatatattcattagcactcatttaaaagcaaagggataaaggacttactcactgtttgaagctttcttgatctgcttggaggatagcatcaaaggatttctaggctagtggacaggaattttttctctggttctttgagaaaaaaaatagctaaaaggatgctcaaaatccttaatccccttttataggcctccgaaaaaaggaggataaatcatttaaaatttgaatatttgggttttccccccaacagtgaatgttagtactcattacaagaagtacaaccatcacacatgcagtatcattcaaccttttatcatgctttgttatcttttttaaaaataaatattttctcttaagtctaaatgattgcacatgtaaatattcgagcttgttacttacatatgctttgtacgggtgtataattgccctccaagtgattgagcaaaattatgactcttggtcacttgtatttcacaagttcaattttgtctatccagctactaggtttaggcaaaccctttgtacgcatttttaatggtaattacataacttgctatataaaagagataaagtggacacaattagaatgataattaatatctttattcatttatcagtctaactgtgttgttaccgtagtaatgtacatttattgaattataaaagctattacatgatcaaactgatcattagctaactaaaacataaaacaattgaacaatatattccgtccaaaagacattgctcaagagcaacgatttctgaacatactatactttaggggttgtcattcgacctgagtaccagttgtttttctaaacctttgagtgaggtccactcagaaggccacctagtttagagtaagtgttcgagcatcgtgcactttgggtggtcatcagaccttgtacacttattggtagtattttcttagatgttcactgttgcaataccttggtactagaacttgtttcatgcttttatcatacaaaccaagtttgtatgctccagagtttgtaacttctgttacttgatatggtccttcctaattaggtttcagcaggacagctgcaatgtcttttgtgtttaagaacactcttctgaggaccatatcacccacaaagaatgttcttgccctcacttgcttgttgaagtagtgagctaccttttgttgatgagccacaagctttaggtttgttgaagctcttttttcttcgatttcatcaagt

SEQ ID NO: 323046 - DNA, 764 bp, Cannabis indica
aattaatcaattaattaatttaagacttagagttctcttcttgctatggttaaataaatgctaatgtattaatttcagaattaattaatttgagataatctcacttgtgggtccagcatataatataaatggtacaaaattagagatgcataccggaaggagaattggcctagagtactctcctatcccatctccatctccattttcgttaagaattttaatttttattcacgtttacttcctatcgagaatgggtggggcaggatagaactagaaatcctctaataataaaataaaatttataataaaaatttaaatataactacataaaaattaaaatattacacattaattattattcaataaactaattattatctaaaaccaacttaaaattcattatactaatatactagtaaaatataaacataaattataaattattattagaaacataaaataaaatatcaaacgggttcccgtcgggacggggagtgtcgtctccgcccccgccccatttaacattcttatgagaaaaatgtgtatccccaataaaaatatatcccttgctattttttgatatgtaaaaaattataattttattgtttttttaatgatgatctatattttaattagtgaagatatattttgtaaatttttaaaaaatttggtacaacttataatagaaagtaattttttttcttattatttcttttttttttttgaaatcaaaagaaagtagagtttaaattgtctattttggg

SEQ ID NO: 323047 - DNA, 1209 bp, Cannabis indica
agggcataaaacccaacaatctttgtgatttttgagagccccatttagtaggaacgagtaacattgcacaaaagatttacacaaaccaagtaaagaaccaatctttagcttttgcactagaattgacaaaacgagctaagactagggagcctctaataactttcactaacgacaatacgatgcaaatgagatttccccatgagaatccactagtgataactatttagctcgcgaataaaagggtgaatcaagttttagtggataatgggagcttagtcaacattttgtataaagaaactttaaagaaaataagattagaaggaataattctaaaaccatgcatggttaatttatgcagattcacaggggatagcatcgcaagtttggaaacagtagagctccccataacaatgggacacccgcctttgtcaatgactctaatacaagagtttttggtggttgaccttccctcgatctataacttaatcatgggttgcccaacactgacaggactgggggcaattagtctaaaaaaacatatatcattaaaattcccaactcataatggagtaggaactgtaaaagacgaccaattattagcacgagaatgttataatattgagttgagggaaagaactaagtctcatcaaatgatggttgtggtaactgaggaaattgaaaaagaagaggaggatttggacccaagaatgggtgaagagcaatctcagttcgaactgattgaggagttgtaagagatattactcaaccccaatgaccctaccaaagttgtcaaaattggtaaagggttaggggaaaagttgaagtagcaactaatatactttttaatggaaaatcaagattaattttcccttattttgttcagcttagtgtacatgataaatcgggacatacttttcaatactttttttgtttctttttatctttggacgagtccttggactcatctttcctttttccatgtggttcgtggcttttgctcatgtttgtaatgttttttcttgcattgcttaagctgggtttatttctcgagccatcttttaatacttttaatatagatcgagcttcctcctttctaacatagacaagagcccattcattaaattcatttattgacttgacagggtgtccttgcaaatcatctcataacttgcctccagcagtggacaaatcagtggttattgttagccc

SEQ ID NO: 323048 - DNA, 669 bp, Cannabis indica
ataagtactttattttactaatttattttgcatggatttctttctctctctctctctctcttttttttaattgggattttgaatttgcaaggttaagaaggttttgataataaattgtgggctgtttttattctaagggaagaaggcaatttcctagttatgagttatacagatcttattctttgatctttgaatgaattatactggtcatcttatatatctatatatgtatatgattgtggcaatgtgccacacaatttccatatatgttactacgttttcccagtcaatggtttatgatccaaacacatattttattcatttcaataattcatatttaaggatggttccaacttagaaagtagaaacctcctaaaactattggtttgttttgagtgtttgatctgtaatgaatatgcaatttcaaacagagatgtaatgcataatgcaccttttgttttaggtgatagactactggtaacttcgttcaagattttatttaaacactggttatttaaacctcaaaaaaaacttgggcgcaccaacaattgaatagtcataccaatttatgttcgtggccaatatagttccttattttggagggatgatttttatcatatatttaagatgtagttaactttgatttttattaaattttttaaaaaaaaa

SEQ ID NO: 323049 - DNA, 1559 bp, Cannabis indica
tagaaaaattatgaaaataaaatcaaaataagtattgaaatcaacataaattaatgtgacgaaaacattaaaaaatttattaagagtaattttaaaaattatttaagtttatattttctttaataatggggtgtattatttatcattttatggggtacaaatagaattgaggaaattacactccatactctttttatattgtcctcttttatttttaccctcttttttaaagtctattatttttacctctttttttaaacattataccaattttgtccctgtcacttcaagatactctccatgtgactctcttatgtcagggtattttgggtacaatacatataaaaagaggcatgtttcaaataaatataaaattaaaggtaaatttgattaattgattaataaaagaggtatttttcaacttaccacaatagaattccccttttaaaaatatgaggaaattacactgtatacaagcccggccctaagttaagacggactaggcccacgcgtagagcctactaattttaggggtccaaataaaaaaatacattttaaaaatatatataaaataatttttaaaaatactattgatttttataataagggctaatttttattttttttttatctatgactcatttcaattttggatcggccttgaatgtataccattttttattttttattttaattcttacttttattttattactccttaatttacatcgagttttataagtcataatcttattatgtgtattagaaactctaattttaataaattatgtaaagttatgtttggtactttgattataaaaaaaagtatttataagttatatttagtaaaaatttggtaaataccattttggaccatatattttgcaaaagttactaattgaactacttattttgttaaatgataaaatgaaccctgtatttttcaaaatagtacaaatatgatcctgaattaattttttgtcaaaataaaatttaataataattcgatctaaaattgttatgacaaaactacttatattttctaaatctgttcgtgttaggaattatttttaaattagttatattaaaaaaaattatcaaaaattaaactcacaaccttatttttaccattttaaaaaatacaacattattcattttattaagaaaatagaaagtataattagtaactttatagtcctatttaacggtaaaaaaattattaaaattatttgatttgatttgatttgattttttttttaagagagagtggtttattttgtctggcgcctttttcgtacgatggaggaaagaaccaatctccggcttggaaacgaggtcaaaatgcagtcgaatcaccagttcatgacgtctgaggatcatggtaaactcagaaatttgattttcctctgtaatttcaatccgtatttgtcaaaattggttatcattatcaattgggattacttaaaatggtaactattgttttcattcattattgctttctttttcatttgtttcaaaactccattaacaacacattttctcatactcttggccccata

SEQ ID NO: 323050 - DNA, 1352 bp, Cannabis indica
taataatgatatttgttgtagtgctagttgaacactctaattttttatagatgaaacactattttcacaaagatagatataaaagtataagactagaagagatgaagaatgtttggctgctctctaggtcttatttatagaatatagaaaccctagagacagacacgtttacaaagttgtacaagactttcctaaaaaaatccctaatttgtttagattcaaattttactggtgcatatcgagaaacttttcaaaaaggatcaagatcatgatttggtcttcaatacctgcaaataaatattattttatttgttatatacataacaaaatcaaaattaaaaaagttaatttttccaaaaataagaaactttccataaaagagaattcattctcttgtaaacaagtttcctaaacaaaagatatcaactgtaaaaaaaaaaaaagcaatcaaagccacaaaattaaaacaagaaaatcaatatataattcacaataaattaaataatatttgacaactaaattataaaaaaaaaaaaaaaagacctaataatctccccctttgacactttaaataatcaagcgctattaggatttggtgggggtgatttttgtgacgttgtgtttgattttttcagatctggttttatgcacaagggtattaatgctactaatttggtgcttatcccaaaaatcacaaattctaaaaagaaacaaccagtttaggcctatctctctttgttatgttacgtacaaggtcatttctaagattattgctaataaaattaaactggttcttcctagattgatttgcccaactcaagctgcttttgttccaggtagaaatattcaagataacaatgtgattagtcaagagataatccactctttcaagaggaagaaaggaaatgaaagtttttttgccattaagattgatcttattaaggcctatgacaaactgagctggagtttcattgatgctgtgttggagagttttgaggcccttaggatctttcacaactgggtcaatcagtgtatcttaaattctacctttaatgtgtgtctcaatggaggtcaagctgggagaattctcccttcctgtggcatcgccaaggtgatcttctttccccttatctcttcatttgggttgtaaaaattctttcaagacttttagaaagctcgattgaaaagggtaacatcaaaggtgtaagactgagcaagggaagccttgccctctctcaaattttcttcgttgacgatattattctggtcgagcgtgccaatatggtagatctaacaccctaactagcataggcgtgttgacgtgattttgaacgtactgtgcagctcgttgc

SEQ ID NO: 323051 - DNA, 617 bp, Cannabis indica
atttaatcaatctcttattttagtccttgtattattttacaatagagttgtaataaatcttgattttctttgttataaaatctctaacaatagttaatagtatcgagaatctttcgattgtaccataaaagtaacccatttgtttcaatgaacccacataagatttagaattgaagacaaaactgaacaaaacccttttttccgttagatttcaggtcaataattacaatttttttaatataataaaaagttgattgcagattatttaaatgaagaaagatgtaataataattaggattaaagaccgtgttatgcagctgatgtaaacaactaattaattaactatctagtaattaaaaaaatggatatacaattaagtatataccacagtatataatcaatcaaactcgatgacaaaattaacaacgtgtatatcggtgccatcgtaaaatccatcgtccaaaattaattacaatgtttatatataattttgacattgttgagcaaaagcaaataatggtttcgacggtatgctacatacttcataattattattccttataaacggcatctagtatatagcttatatacacaatatatatatattagtattaata

SEQ ID NO: 323052 - DNA, 616 bp, Cannabis indica
acgattgtttcgtccgggtacgtctacctaattaaatagacatatgtatatatacgtgatttgcatgcatgcatgcatgtttgtatatataaattataattgtacgtatatatatgttgatgaatatatgaatgcatgtgtgtgtgcagggctgtgatgcatcaatcttgatcgatccattaaacagtgatgacaatacgacagagaagagtgctactccaaatcgatcggtgacaggatatgaagtaattgatgaaattaaagaaaggcttgaatatgaatgccctggagctcaaatttcatgtgctgacattgttgccttaacagctcgagatgctgtttcttaccccgtaagttattaagcatatatacttaatatcaattagtaataattaattaaaattagtatatatataacaatctgaatttgcagaacaaaaagcctctatggccggtgttcacagggaggagagacggaagagtgtcactagccactgaagcatcaagggacttgccttccgcatcatctaacttcaccactctttctaaactctttgcaagatttaatcttgatgaaactgatctcgttgccttatctggtatatatatatacata

SEQ ID NO: 323053 - DNA, 1776 bp, Cannabis indica
gattgggtggttagacatgccggtaattatattggtaagtttgtcaaatctgatccaaaaaactttattggaatttggcgagattatcttcgtgtgcgggtcacatttgacataaacaaacctttaaagagacgcatgaagttgattaaacaagatggctcttggctttggaccacatttaaatatgaacatgttcctacgttctgttttatatgcggtttcattggccattcggataggttctgtccaaggagatttgatcctcagtttgatccaaatgtcaaaccttatggtgagtggatgaaagctcctacaaggaagaagaattacctcatcggggctcaatggttacgttcagggcgtgaggaagaagaaggcggtgctgctggcagtggacagcctcgaagtatggcagagatgcgagaatcaatcaatcctactctagtgcgatttgatggagataatcctggaggtaatgggggagcaattcgggtagctaatcaaggaggatataaaggaaagaatattatggatagtaatgagaatcatggcaataaagatcaccaggtggatatttttattgacgatcctgtgcttattttgaataataaaagaaggcgtactgttaagaaaattttaaaggagtctcatgaagtggaagatgatactatgggcagtatggaggatttgaatgatagcctaaaaaacgattcacaggtgggccttggtgcacaggcccaccagtcattatcagtatattggcttggaattgccatgggcttgggaacccatgggctaatcaattcttaaaggatttagttatccaaaagcagcccaaagttgtttttctttgtgaaactttgtcaaagtctgaaggtttggagagcacacgtgtgtctttgggttttgagggggtgttttcagtcgatgctagaggaaaaagtggggttgttgctatgttgtggcgtgatagtagtgatgtcaagttactgggttatggggggaattatattgatgttgaaatcattgagaatgatgggaaaaaatggcgcctcactggtctttatggagagccaaactgaagccttcggagaaacacttggggatcaaattcggtctctaaaagacaactattctttgccttggtgtgttattggggatctcaacaatgttacttctcaatcggataagaggggtggtcttccatatcctaattggctcattgaaggatttgggaatatgttggaggagtgtaatttattcgacatggagttaggtggatatccttacacttgggagaagggacgtggtactagtgcttggattgaggttcggattgatagggctttagtctctcaaacttggcttgatgctttcctacttgctaaattgattaatcttgaagtatcaacctcggaccactgcccgattcagctgacacttgatgttgttaagaaaaaagagttacacaagaggtttcggtttgagaatttatggctcagggagccggtgtgtttgcaaattattcgtgatacctgggaggcttctgcaggcagtcctgtaatggagaagatacgtagctgtggtgcaaacttactggtgtgggggaaagactattcaggcaactttaaagctcgtattcgggactgtaaaaacgagattaaaaggtggaagcatggtagggaggttgcttcggttcagaattataaaaatgcagaaaattggctgcaagaggtgttgattcagaaggagatattttggcgccagcgatcgaaa

SEQ ID NO: 323054 - DNA, 1707 bp, Cannabis indica
attgtttatagtgatgatgaagatacttgcgatattaataatgaaaataatgtaactattaatgatgatgatgattctgatgacttgtagactttaagtattgtaatatttaaaccctccattaattaaatgaactacatgttccttttgttaataagatgattaattaattatttttatattaataaatatagcttgtatgcgtagaatggctgatgcaagtgcaggtaacagtaagaaaagcagagttacggaaaagtacaagggaaaaaatattaaagatgaactggccaaacagcctacgggacataagttaaaatttaaatattatacggggatagggacctctataaatgactatgaaaaattatgtcaagttggttgttcgcaatacaattcctatgaacaagttcaattttgaggacgttgacgaaggggtcatttagactatcaaggatagactagtggtaactttcaattttttattgtaatagatcaaacaaaatatctatcctacaaaaaaaaatatatatgattttaatgtttatttttttcggactaaatttgagctcccaactgagaatcctatgttcgaggactgcagtcttaaatcaatgtcaaaagggctacgtgattggagagcagacacaaaaaaggtatggaaggataatactgagaaatatggagaggaagaagcgactaggagatcacgtctagatgtggtcaaactggaagtctgggcagaggttattgcatactggaaagacctaaaacaacaagtataaaaattaaagttgtaaaattgaatctccattaaattatgttttttttgcttatgttgctaaaaataaatttacagtaaattataggcaagagccaaacaaaatgtgaaaacccgagcccaaatgaagattcaaggtggatgggggtctaagaccatagtcggccacatcattagcgaggtatgatgttgtcagtagatttgtctgaaaattgatattttttgaatactatatttctaatattttgtattgtataaaagtaggctgatcccaagacgggggaacttccgagtgctgcgaacacttttcaaaagttccagaacaagaacaacaaatggcgcgatgaacacacacaacaactgtatgtaagtaattttatatctttaataaaattattctatatttaaatatttctattcaactctaactgtttgttcaaattttttgtaggccaaaatggttaagattagtgaaactcaactcgagccgatcaatgtccccttccagtacaatatcgacccacccagtttcccacagacatgcttgttatgacacatgtaatgcgtgagcggtaacgcaacttgaggggactgggccagttgctgaggcttagggcgggggccaaaagggtaactgtcagggtaggtccctccatccaacctactttcactcaagaggaatatgaggctctgaagcgaagggtggaagagtagtaaaggaacaagtgacaacaacaaatgatgtagactcaaaatcaaaccttgagcacattttagtaataactgatgcatctggctggtgtcgttcaagaattcaacatgcccctgattgctctgattccaccatttcgacctcctggcactgggtattcttcacaggctgctcctctgtaacaccctaactaacataggcgtattacgtgatt

SEQ ID NO: 323055 - DNA, 1122 bp, Cannabis indica
gcatagcatgtaaactgggtatgaaaaatagagtcaaaagagaccccacgttttcattaaaatttaccaaaagaaacaaccgaagagaagtgaagtgaatgtgaaatcaacctgggtgaagaatgaaaactatatataagggaattgcacaaacttcatgttgtacagcaaaaccaaaaattataactcttgcatatattttctattttgtatgtagcaattgttgtcttatacagatggaaaaagcaaaaacacaaacaaaaaaaaaacaaatcaaacccagtacaaaaatggcacctattgtgtatgtaacgctatactgttggtcaaaaaatcgtatgtgctataaaagcagcgaggaacaagtgtgggagtgtaagcgtggaacagctgagttttggtttggactaaacaagtgctctgtgagtgaaagaacctatccgttgttgtctggacacgtatgtatgtggacgggtgatgactatatctccggaaaagaattattaacaaaaaaaaatatattatgagagatttagggctatttgctgaagaagagttattttctgagatgcattaatgatgcctttgctctcggcatctaataaaacctctgtcataattgcagccgcatgccctcgcggctcctctgagggcctcctcaacatgaatacctacacatctcataaccgaaaacaaccatgactcccaaatttcaaagaaactaaaattgctagaatataaaatatatcaatacactagcaggtaagagcaacaccaatacaaaaattgccacaggaaataaaatagctatagaatgtgtgtacacattttgcttgtaaatatgaagtattaagcaacgttctttctgttacataataaacatcccaacctcaagtgtaggagaaaccatgttagtctcatgactgataataactacacatgcaagtgacatgagaacgtgaattgacagcagatgtcaaggaaacaacagcaaactttaaagcctggacctcaccacattgctttaaaagtttccatggaatataaggaaattaaatttacacgactttcctttgaacaaattgaaaaagagaattgaaaaacttaaaaaacagccatttc

SEQ ID NO: 323056 - DNA, 631 bp, Cannabis indica
tttctgctaaacaacttgtacactgttcttgtattagtaattattataaatatagatctctaagataagtagttggctaagtttttttggccatatttttaaagctctagctgtttctctcgtttcttcttcttcctcttttcctttctactattgataagcttctacatggtatcaatcaacattgatctctgtctctgatggcctcaattgataaaagaacatctacctctggtgttcatgtcgattctctaaatcacggtgctcccactgttacgactttaatggctactccggtgacttggaatccgttctctcattcactcattgcctcgctcacaatcaagctcgaccgtacaaaccttcttgcatggaaatcacaagagtatcccactattattggatacaatcttgataagattctctttactagtgttccgcctgcacaactttttcaccgatgagacaaatgttagaatattttttatatggtaacacatcaaataaaatatttgatttgatttataaaatacaattaattatttaataatcaatttatatattctaattatggtcatatttaattacttaatatttttgttactcgatttaattttcaaaattaattatt

SEQ ID NO: 323057 - DNA, 1385 bp, Cannabis indica
ttgacttaagatcaaggagaaagattccctttcttatagctcttacaataatatctttgaatatataattcttagataatagtatagtcttagattagctgcttttcgaccgacccattgcccagtgaatatgcatcactatttatagggctaggaagcttgaggaggaagagtttcctttctcgttacaatgcgtataaacagaaagatcgtgggatcaatgctgaatgcaaggatcgtgggattgaggctgaatacactgatagtgggatcgtgtgtatgccatatccacgtaagttgatccctgagttatagggattgagctgattactcatgatgcgaaagctaaattcgctaagtgttgattgcctgcgtggatcgctgaataccttgctttgggcatgccagcgaggcatcctgctcagcctatcttcccgagcagatgtcccaagtggactccacgtgtcaccattctcgtgatgccatgtcagagtgcaaaacttgggataacagagaccatgcttagcgctaggaatgtagagaacactgcccatactgccctcatctttgggttgcaaactaaccttgatgatcttaggaagaagctgcaggaggctcttgatggccaacaggccattaggaaggagtatgtcaacctatcctttgaacttacctatgagttctagttgcacaacacttgagctaaactgtcgtacatgggcagtacggcttttatggagagaacattggcccgtagaaaggcactgtttgagatcttgatggagacagaccaggttgctgcctattgagagcggccatcattgaggacacgtgatgaggagttggcctacacgctacccaacatggtgatgatggggctagcttggactctgtggatcttgatctcgcgactctagattcagctccttctgcccctgcacacatttaaacaacatttttattaacaccattcagcattatattagtatcacacaaacaatattttcatgttctgcatagcctgtggcttttcatggcctatggcctttcggctttcgaacattactctcttttgtgtttcatgtggcatgtggcctttttggaactttactttcgtgtcctatgtggcatgaggcctttttagaacactactttcatgtcctatgtggcctgaggcctttttagaacatttactttatttttagccccagggccttcacgtttgtatctttggccataagcgctctattttttaacacaactagtatttggccctgttgacctcgcttttagccaacgacagtgagtctagtttagtaagcgataagtaatttatagcgattgatatatagtacagcaatgtaaagacacaaaaattttataga

SEQ ID NO: 323058 - DNA, 734 bp, Cannabis indica
aattttattttatttttaaatgtaaaataataaaaatatttcataattattgctatatataaatatatcaataaaattataaaaatagtataaaaataaataataaaattatacatttataattatataaattttacattatattaaatttgtcatatataaattgatttgacaatttgtcattttgtctggttgtttttttgttatgattttatttttttatttttgctttttcatgaataatcttttttatatttttttttgcttattcatttattaataatattaatagaagattattattttgtattttaagatatcacaatacacatatatgatattttataattagttaatatttttttttttcatattatttattaaattaaaatttgtgagacttgataataaaatacaccaataaaggtatgccattattatggtatttagcacatcccttaatatttccttattaatatgtacatatctttattcattttaattagaatttaactttttattcaattatacataattttgtaagctttttattttcacttgttgtgtaccgcgtagttaaagtttttttatagttcttattgttttttgtattttctcaaactaaataagactatattaataattagtgtgtgtattttgtcatgtttgtaccgagtattaatacttttatctttttttttttaatctcactttcttttatttctttttttttt

SEQ ID NO: 323059 - DNA, 1128 bp, Cannabis indica
agtatatgagataattcccctacattttatttctgtttaaaataaaataataacatatacttaacattatattaattaataattatagatttaaaaatagtaatattttatatttgctatgttcatggttataagaattaaaaaaatgaaattaacacatctcaattatctctaattacataattactatataactacataattaaataatattttaagcctttttacaaaaacaaaaaaataaaataaataaatactttgagctttataattactatgaattacacttagagatgaaaattgggtgagtaataagcgaataaggcacctcctaatcctgtcccaattttctatttatgcccatcattctcgccctcaccccgctcaattcccaatgaatatagggtggataaatctccattaggtatgagaattcattggatacccattaaaattaaaattaaaacaataataataagaagaaaataatgtaataaaattcaaaatgaaaacaaaaaacaaggtattaactataaactaaacaaatattctatccattaaaaagcttttattacacagtgaattaagaaagaataataatcaactttgtaagtataactaataaatttaatacataataattagaaaattgtatgaaaactttaaaaactatatattttggtcgaatataggatgagtagtatcacccctccctgacctgccccaaatccgtttcaggtatataaacaccccacacccgttctattattcattaaggcaagtaagctctgctctattcgacatgagtacccgttcccacgagtcaaatttccatcactaattacacttaatttcaattacatactaattttccaaacacactcaatgtaatagtttgatttgtgaggaaaaataaagggaaagaactaaataaaaataccaattatgtttaataattaaatattttaataatttgactaaataatattattttattttacatagaggataaagattctaacttggacctctccgaccaataaatagctaaaataggtaaaaaaaaaaattgaaaaactatacattaaaaatcctaatattttatacctaaaccaatacatttcaaaa

SEQ ID NO: 323060 - DNA, 1614 bp, Cannabis indica
gaagaaaaaaatgcaaaaaacgatagtcgtgagagaagacgacgatgggagctcccgaccggggttctaggtttgtatattcgacaacatgggttatggttcagggttcaacgctgaagtgttagagagttagagtgagggagttagagtgaaacagttagagagaaatttttttttttgaaatataagggtatttttggaaggaaaaaaattaaaagtatagatatactatttctaattatgtggtatattaaaacacatttaagtatattaaactaaattttctttttaaaatatataataatttattttaaatatataacattaattacacacacatacacatataaaataaacaaaaaattaataaaataagtttaaaaagagatgtaaaatatattatacatcacttgatgtatagcatattgtggtcattctcttttctattttaaagaatgagttattttaaaagaactaagaacatcttcagtgcaaaatgtaatttatgctaaatttagctacatttagtctactttttataattgtgcttcaatgcacaatgaatgaaataactaaaaaaaaagttaataagtaattaatgtttattgaaaatgcaaatacaattaatttattttattttctttatgaataattttcttttagtgttgcaaattttgagcttaaaatgtaaattaaaatgaatagagtttttttaattaataaatgtaatattgaatgttaagatagttgtttaccgagatttttagcaactaaatatttttagagcttaagaaatgaacaacaaaataaatagtaagctaacaaatgagagatttttacgtggtcatgcgttaactatccttagtccacgagtctattttattaggcacatcagtcggtaactgcttatacaaataaaaatacaatggactggaactcctttcccccgtgtttctcttaaagaagaggaaacttagtaggaatattctggattttttttagatgtaatacttaatacaaatgtttgcaaagaatggtgaagaatgagtttttttctgtctctggaaaaagtcctcatttctctcgtgcttttcaggggcattgatacgccaacttctcttcatgtgcgggcatggattaatcatccttgggcgaagttcgaccgttggattggtaggtggcattttttccatatgacatttaagggtgtcagatcgtacaggctggacctcctacgcgtgtcgtcccagagcctttcctttttgaatttcccttatccctagtcgttggatcatttggtcaggtacgatgagacacgcatgctctgtacgatagtgtgttgtgggggataacttttgacgtcttacttgaaaaagcttggttattaagtccgtagtctgacatgtataggtagatgtgaagaccgcttagctttaatttggaaattagcagataattagggctttattatgaaaatcatttattaatattaaattaattatttatgatgatttatttgaattcagaatgtatttttatgtcacatatagaaatttcataattttgcatattttggtgcccgacaacattggaacgcggtgtatggcttcttga

SEQ ID NO: 323061 - DNA, 2013 bp, Cannabis indica
aaacccaacattttattatatattctataagctttaccatgtgttgaataccctacaaaagttccaacatcgaatttggcatcaaaattttcaatgttgtcctttagtttcaaaaatataacatttacatccaaagactctaaaacagcaaaggttgggttttcttcctttccaaagctcttaaggagttatatttatgttgggtctaatgaaaaaatgattcaaaatatagcaagaggtattggccaaaaaaaattttggtagtgatatttcatttagtattgacctagccatttcttgaattgttctactttcctttcgacaactctatttttttgtagagttcttggagctgaaaagttatggttaaaatcatgttcaccacaaaataattttaaggtatcattgtcaaactcaccaccagatcactcctaatggaggcaatagaatagccttttttattttgcacactcttacaaaatttaacaaaattttttaaaacatcacttttgagtgtcaagaaagtaacccatgtaaatcttgaaaaatcatcaataatcacaaatgcataatatttactatcaagactagaaattctaaaaggaccaaataaattaatatgaagcaattataaatgtctagtggttgaaatctctttcttgaaatgaaaaaatattttaatttgtttttcaaatcggcatgcatcacaaagtttatctttgataaaaggaatagatgtcaaacaaataacaagattttttctaactaatttggaaatagaatccatactatcatattctaatctcctcgccacaaccaagaattatcattcataacagttaaatatttatttttgctattaaaagattcaacatcaataacatacatgttattctttctttctccaacaaaaataacttcattagttgaagcattctcaatggagcattttgagaatttaaaaacaacacgaaaatatttatcacataattggctaatgctaatcaagttatgtttaaggttgtcaacaagaagcatattttcaatacaaggagaatatacattactaatatcaccaatacccaagatttttccttttgaattatctctaaatgtaacaaatccactttccttacttttaaagcttgaaaatcttgaagggtcaccggtcatgtgctttgaacatccattatctaagaaccatagaattttgttcttctttgttggttcctacaaaattaaacatgcttgttgacttttggtacccacatatctttgggtccttttttgttagttctagaaccctttggtactcatttagtcttacctagatgtgtatatttctttacatgacaatatgagatagtatgatcatcttggttaccatatgtacatgtaaagtgaggtagactagatggttttataaaaaagtttctcaaaaacttgtttttactaggatcatagcccatgccactttttgcaaaatcgcatgattaacttcctagcataagttcataaccttctttgcctctggtaaatatatatatgtcatttttaggcttttcacattagcatgtacgccaataatttctttcttatatgaggagcaagtagcacattgagatttaggtaaaagtttcttttatttaatttcaaaatcttaatttcttttagtaacatgttagtcttttctctaagggtttggtttttagtaaaaaatttaccaaaatcaccaaataattccttaaatgaattagataactcatcatgtgacatatctaagttatcatcatcatttttactatcacaatcactttggctagaaattctgaccccatcatcaagcgtcatcatgcacatgttagctacttaattcttctccccatttttggagtcctcctcgtcattattgagccaatccgccaacattttctttcctttgcatttgttcttctttctcattaggcaatacatttcatgtgttcgagcttcttattgggttttatgccctaa

SEQ ID NO: 323062 - DNA, 512 bp, Cannabis indica
tcaatagttcaaggagaatttttaacggccaaaaaaaggtacagggggcatgatttggtatatgtcaaaggttcgggggggggggggggggaatcataattaattagcctaaatttgttatattctactttctttctatttttgtttttagagtggtatcccttcaaatctatgtatatacataaatatatatcaattatgtatattttttatcgaacaatgttggacatgacgtaagtaataaaattaaaactatgcatgttgtggttaatcctcactcttaaaacaggttgttacaacactaataatgtccaagaacataatttaaaactaaaataaaaatcaaaacttgaacttaattgaaaaatagataaagaaaatttagcttgatattgaatgtatgatggatctttattcaataggaataatcagtagtacacaatagaataagtctaagattacaacttaacacagtaaagaattacaaaaaaatgtctcacattgaggaaaat

SEQ ID NO: 323063 - DNA, 853 bp, Cannabis indica
ttttaattaatttttttttatatctaaatgggttttcaataaaaaaaaataattgattctttaaatcacttaattaattttaaaatttgatttctttttttttttattttcttaatcattaaaaatgatttttgtttaagatgtaaattaaatttttaagaattacaataaaaaaaaaatattaaatctttctcttttttatttaaagagaatacgatttgataattatcaaaatttgtgaagcaaaatcactaatttacaaaaagacattagtattcaaatagaataataagataaaaccaaaccaaaaacaaataatatattttaaagccactattagtgttaaaaattcaaaaaataaaattattaattattctaaaaaaaaaataacaattcatatttaatataaataacttcaataactttataataacttataatttttttaactaatttacttgttttttatgtagtatttatttttttttctttagaatatatgtaatatttgtatataatgtacattttaataatgtaataaatatgatttcattgacctcaattagaaaatagtgaataaatcaaaaaaaagaaaatagtgaataaatagtttctccctaaaaaaaaaaaaagaataaatagtttcaataaacattacagcacgtagagagagagatagaaagaaaattaaaaagagaaaattggcaaatttagagaaaagaaagagaaatcagaatcagaaaaagaaaatattacagagtgtggccgttcaaacggccaactccacctcaacctcaacatctggttggcgctcaatgtcatcaattcaccatttttctctctctctctacaa

SEQ ID NO: 323064 - DNA, 1432 bp, Cannabis indica
attatgcaaaataattttaaattatataaaaaatataaatagtatatcatgtcgctatagaaaagctccaaattatatatgtatacattttgatagatttttttttatctattttggcacctagaaagagtttttagtctattttttatgaccatatacgtgttatagttatttatgataattataaatttttttgaaaaatttaataatttacaatatcgaaaataaaattaaaacaattacttaccatgagtataacaaaaaaattgttacatgcaactaaaaatttttaacgttatttttaacatcatatactattcataatttttaaaaatttacaggtgatctttaataactacaacgtataagattataaaaaaaaaattaaactaagaatctctcatttatgccaaaacagataagagtctaccattttcctctaaaaaaataagataaaaatttacccaaatatccttttaaaatagtctaaaactataattataattttgcccacatctttttaaagaaggccctaggtagctagtttaaaagatctttcaaagatctataacatgagcaagcatgtatatatataataatatatatttatggaatggattttataccataccttataagtactacatcacatgggcaaggacatggggtaaagttcatcaaattaaaatgttctaagtatatacatattaattgataaaaataataatagtgttatgcagatgtgatgtgccaaccctaggatgactcaaaaagaaacaaagaaaaaaaaatgtcaaatagaaaattgagcatatcaagcaagagatagtttggtttggtctttaaagggacccctttcatgtgcaaaagctatgtaggtggacaagtatgtttttttttaaaaaaaatacctttacacattatagaattaacattttaggttgaaattatactttttaatttttaaactcagttgtcctgtcacacttaaactaacctttatgtaattaatattttgtgattgaaattatatttgttgagtttcaaactcaattctatacctaagctaatcttttcatattgtagaattaaaattatgtgattgaaattatttttagtgagtttcgaatccagtttacccgttaaatctaaactttgatcgaatacagctttttgaaattttcatattttggagtagatttaatcactactagttagtagtagtagactttgcaattttaataataatgaaaaaaatggtggaaggatatatggtgatttcaaaattgggacaactaacttgaaattattaataaaccaagattttcatttgaattatagtagctagctagataggtcatagttgagtatagcttgaccaatggacaaaagaaccatatgtactacaaagactaagagcatgtttggtatt

SEQ ID NO: 323065 - DNA, 1039 bp, Cannabis indica
ttttttttttttaattatttgtttttgttgtacatttatgaaagaatcccattataaaactttcttttttctcatcaacatctttacatgtcacttgagaacacattatacaatacaaaaataataagcaacaaagagtagggtagaaaactttatgcaaatttctctttaattgttcctgttctttcgtttgatgttattattcacataaaacttaaagctacaatttcattattatagtttcgtggttgttgctctagcaatgataaatactagttcaatgacgtaggaaaataatcacttgtgccctttaaaattccttctatataattttaataatccattaagccaccaatcagtattggatataactcatttactagtatgctcatcgtacttgtctttattttccagatagcatagactttgattcctattgtagtcttttgattttttaccacttcagtttatcttatttgctaatcactcttctggttcctgttcctccaatactcatttcaatcaagtttacttaattatgagattagctagttttacataataactctttttctacttttgtgagacattgctatagtggtgaagtttgaatctgtaatgccattagattctgatagttatgttcaatgattgcttcttctaatatactagccctctgaggtatcacataacttcatacttatcataccattgattattccagccatattcattaactgtatattgcagtcctcttttattcgtcaaaacatatcccaacttcttaattgtacctctaaaacttctaaatctcttaaacatacattccaatactgattatttacttaagactataccatatatgtattaaaacatagaaagcacactaatatatgtattcaaacttatgtccaaacatagtccttgccataccatgaaattcttcaatatatgttactttggtcctaattatgtctcacttttctcctgtctctaagtgaagctttcctaaccttttctcattgagctatactccaca

SEQ ID NO: 323066 - DNA, 1332 bp, Cannabis indica
aataaaataaaaaaaaaattgaaagttgacaaaatatttgattagtttttcaaaatttctagattattttattaaaaatatcatagttttaaatttcaaataaggtcatttcataaaattatttaaataataaaaatataaaatatctggccttaaatttaaaaataagataaataatcaaaattttaaaaaataaacaattaagcaaaaaaagatgtagatattatattttttaggttaaaaagcgggaaaggtctctatgaaagaagtcttctcaaacccggctaaagcacttcaaggatacaccagtccagggtacgcctttgacccacagaggttcagcccactcgtgtgaggctacaaacccaatgatcaggctttttcatgtatgatgttagaggttgtcccccacgacacaatatcatgcaaagcatgcgtgtcttgtgtactgggctaaatgttccaacatctaagagcaagggaaattcaaatgagaattgccctgaggtgacacgcgtctgaagcctagcctgtacagccggtacaatctgacacccataaaaactacatgggaaatacgccacctaccaatccaacgataggatttcatccctacagtgatccatccaattgtggcccatgcaaaagagttagcctataaatacctcacaaatagcacaaagaaagggactttttttttgggatggagacctttggatcaaagacttaatcttcgtcattctaaacaaacacatttttgtaaccccactatgaactcttgaatattccaactaagcttcctcttcttcaagaggaacacggtggaatagagaaaaagtccattgtatttctatttgtattaagaaaaaaattgataatatcctaaccatcaaatatcttattttttaaattgtttatttttgttatatttaattcattaaattataaaattaagaatataatattagaaatatctaaattttaaattaagatattgtattatattatcttattagatatttaattaatttaaattatttaaataaactgaaaatttgaaaattggttagatatttgaattttagttagaattttaggatatttagaagatttgttagattttaaatatttttaaatattttctaataacctaaattttaaattctagttaagatatattttaattttaaaatagaaatatcttaacctagtttccagttatgtattacatgtttgttatgtttatttatttatttatttattaaattttttttataaacctattatttatttgatctaaattgctatgattaacttgttgacagatccaat

SEQ ID NO: 323067 - DNA, 559 bp, Cannabis indica
tgttgatataggtagtacaaatcaattcatttaagtcttcttcaactgtgtagtctcatacttatactgtctcagaatcatcccacttgaccttcctcaggcaatgtgagattgcacagcttacccgatattttctcttacggatcacgagactactgactgttacaattatagtttattttaacttcttgaagctagcaaaaatcaaatataaaatgacaataaacatacaaaatattagctttaaaaatacaaatttaatccaaaaatttgtcattactatctaagtataaagtttcgcatagattcttaaattgcattaaattagtcactgatcaatattacattaacaaattatttataataatagtaaaccaaatagaatgaagtacatttataattatgatctatataattttaagggttaaagggtaaaaatttaaagtttcattacttaaagtaaaaacattatctttgagagtgtttgtaagtgtcatgttttgtgtggcaaattagatattgcttttgttcagtatttgttgtctctaacatctgttct

SEQ ID NO: 323068 - DNA, 1612 bp, Cannabis indica
tccaccgtggcacttaactgtgtatttttcgacggaggtgtgcagagtaaaacggaactagagtttaggtagtttagccgaacaaaaattctagtttttgtggttaagtgttacaaaccgtaaagttcaagtgatttagccgccaatatccctacttttaattttatttaaacaaacttgaaaattatacaaaatgtataacaaattaataaatttatttaatttagctaagagtaatttgtggcataacctccatacgtgtttagtatattgcaactaacctccaattctaaaattttagtggtaaaacgccctaaactcgtgttctgttagcagttaaatatttatatctatttttagctgttaactgctatgttagactactcacgtggacacagtgtagacgtggaataatattattggtccatgtgtatattttttaaataaaattttttaaaaataaattaatttaaaatttaaaataaatcttaatttttttttaaaaaaaaaaataaaattttttctttctccttctttcttttttttctttttttagaaaaccctaattttctaagaagcacaaaccagcaccctttgtctgtctacagcctactcacaaaccatcaccctctttcacagttgtttgttgttcctccgatcaccgatcaccgtcttcttgaactaggaccacgacggaggtccttgctcctagaaacccccaccccaccactcactatattctctcactcgcctgtgcacgcaccaacaccagaaggagaagagcaccgataatcattctcttcctcgaacggctcgggaagccattcgtggcttccattttcgccgtggatggacggagacaaccctccggcgttgggtcgagctaaacgtagagatagaaagaaagaaagaaatcagatggtggtttggggttggccgtggatggacggagacaatcaggttagagtttttgggtcacggggattattcaaatggtggtttggcttccattttggccgtggatgggtttttgaggtggtcgaatgggtggctgtgagataatgaacagagggagagaggtgcgatattgaacacggggagaaggtgggagatgtagctgagagggagagggtgcgataattttaggtttcaaaattaggattttttttttgagtttttaatttaattatgttttatatttttttttatttcaaaatttatttattttcctaatttcaaattatttttaaattattttattttttaaaataattatttatatggaccaataaaattgggtcacgtgtacactatgtatacgtagacattccaacatgaaagttaacaactaaaatagatgaaaatgttaaactgctaatagaacacaaatttagagggttttaccaccaaaattttaaaattgaaagttagttgcaataaactaaacacttatggagattatgctgcaaattactctttagctaataactcaactttaaatttgggtttttttagagaattaaatttagttatttggtttatattatatataaaaggtaattttatagttttttttttaatttattacgtaaaatattgttgcccctaattt

SEQ ID NO: 323069 - DNA, 938 bp, Cannabis indica
agggagtctatatatggaggtttaatgtaattcaatttattattgaaattgaagccacaggaagaactgaagaacctcgtgaagtgttattcaataagccttgggttttgtttggaatgtgtgcacactaacattttttcacatttttatacttaaattctggtttagtatgctgtattgtattatattgtgttagattgtattagtattatttaatataatactatatttgatattgactaatattaaaaagttgtgtaaaaaaatctatttttaataaactcgaccctaacaacaacttcaggttaggccgggtccagttttggtctcgatccgggttcgcgtctagatcccatgtctaggtccgggtcggagttcggattcgaatctgggttacgggtccgggtctggggtttgggtcctagttcgggtccgaatctcgagttcagtccgggttcgtatctgggtcttgggttcgagtacgagtctgggtccggatcggagatcgtggttgacctcgtatcttttgtaaatattataatacaagttaatgtagaccatttgttatatattaaataatacaacttatattgtattaacatttttttgttataataattaatataatacattgttttatttaaataaagtcttatttattatttaatacaatacaaccctcacccaaataatttatatatttatacaaaacaaacatgatcctttaatatatattgttaatcatccaacaaatatataaacatgtccatatatataagatacttatgttacattaaatgtgaatatataaccgtagaaaaatttgactaattatgtatttattggaccaaattttttttaaacctaaacaattcaatattggtaaaatatgtatttttttttcttaaaaccccattctacctctctcatttgaacaa

SEQ ID NO: 323070 - DNA, 877 bp, Cannabis indica
tttttgttaactaaaaaagtgggataaaaggtcccctttcttgtagtggatcttatatttgagaatttaatttagttgtttcttgtgaaagaggtaaaattatttttaacaatatcatatatgctaccgccaagtgattaatagttgagacttttgatcacttgttacatgacataacttttaaagacaaaaatatgaattgaaaacttcttcttttattcaaataattactgccctgaggcctacatggaaattatagtagtaaaataaaaagtaaagaaaaataaaaaggagcctcaccaccccagtttactaatagtgtcaacacaggtggtcagcattccatgctcttaggattcttgttccatctagtctcttttaatgataagttccctcaccaattttgtctataacttcatatgggccttcctaatttggttctaagatccccacctgggctcttgagaggcggggaatgctcttctcaaaataaggaaaccaattttgaattttctgctcttaactttagagttgaaattcttggaaattttgctttgatacatctggagttggatcagtgattattctctgttgacttcccttttagtcaacgacaatgagtctttttaataagcaataaacgatatgtcgtaatgaatatataataaaacaataataagacacaggaattttatagaggttcagccccgagcagttcgataatagcctaatcctcgttatttgtattgacttaagaacaaggaagaatgtaaagcccgcttagttaatttggaaattagcagttatttatattaattatgaaattatttatagccatttaaataatttattattgttatttatggaattcagatat

SEQ ID NO: 323071 - DNA, 803 bp, Cannabis indica
agagtttccctaagtgtccatgtccatatgagggaggaaatgacttttaggacaaaggtccttgagccttggtcaagctttttgtgtgttattcttcttcttcttctctagttttcttgtaatcttgatgaaatatttctattgtatttttgagtattttgattgtaatcctcctattctctcttgtaatgagaacgtttccaacagattaaaccataattaaccacattattttatatcacatgacaagttttatgagttgtggatgagctgagtagatgtaattagttatttaattaatttgttacattcactattataaaaatagactttaatgactcactttgagggactctaaaactatttactcaccttttattgtatgtcactaatgggggagactagaaagatagtattattagtgaccctcagtgcgtaaaccctattagagtctctcaacacgtggcaatgtatacttttagagtcaaactatatcaaactgtaaaagtagcagtaacccgcgaagtgcatcactgtatgcttttctttttattattattattttttatatatagttgcactaaaacaattgaacaacctgcgaaaccaagagctagccttgtcagatcgcgatcaagaataatttactaattaccgcttactttagaaaatgaaacatacacatattcaactatcagactactaacatgattcctaataggcttttcttataacatactaataaaataaactactaaagcaataaaggcttactgaaccatgagtctgttggaaattatttt

SEQ ID NO: 323072 - DNA, 856 bp, Cannabis indica
tttttattattatttttttcagccgattgaactaccctagctcatataatttaaaaataagagattttttttaattaaataaaaaaattaagcataaaaattcaaaattttttaatattacctattcatgagtaatacccattaaagtacactcatatatattaaaacatattactaattacattgcaccctctctaataatttttttttcaattactttataatattaattaatattatcttttatataaattttacatacattattttttttttgttgatggatttttaattgatagatgctcatgaattctatttatattttcacaataaaaaaaatatttttaatagattttatttttaaatcttttgactatagtacatgcaagatttttactagtatactaaatattccttggggcaatgaaacattaatttaattataaaaatactgttatagtgtgatatttttcacttagaaagtcgagattaggctcccataagaatgacacgtggactcacatccctcgagggttgctgagctgttagaagaggacctctcaagaataaacttcgcctgaaccaagctcaccgagatgatgtgacgtccttgacagagtctagtagcattattacgcctcagatgacgtaggagcaagaaggacgtgctgaagtctcgcatataccaagatatatgcgatgtctatgaagacttctcctgcgatttagtaaagatcgactctttacttagagagctggtccgaatgacctaatgtgatcgatgacccgataaggactcgtacgtcctgagttgtcgacacaaacaaggtatccatatattgttgggttttatgcc

SEQ ID NO: 323073 - DNA, 783 bp, Cannabis indica
tttatgagttaacgaaagtaataataacatgtgtaagagaattataatattgaatatttttatctccaaaaataaagatataatattaaatatttatgcaataatttatcctttaatttatgtatttatattctacattttccttttctgttggctatacctacatagactggaaaattagtccattggaggctgtattatattaattaagccttttaaaaccaatgtctaacttctgtgcagtctgcattgtaacaaatagaatatgaaaacgatgtcaactctaaattgtagagtcggatgatggaatacaaaatccattattattttatcttatatatttttagaagaattcctaactccattattaaatggataaaatatttgttttgggtcaaatatgctggccttgtgatacttccaatccaagtgtctaattctgtcccattttcaaacttccaaagcaccaacctcaagtcaagattattgggacgtactagccagcatcctttagtaattaagcctgaactccctcccgtatatgcaatccaaattagataatgagaaaatgtcagctgataattaattttgtcgaaaaagctatagtaaggaaaaaaaaatggttccattttatagaggtcatggtgccacccattaaagaaattaaaagcataatctggcccaaaacaaaatttagactttttttttaagggattgtttcacaaaaacacaaataataaaaaaaattacaaaaatacagttttatggaattttaaatatttt

SEQ ID NO: 323074 - DNA, 1966 bp, Cannabis indica
gcacaagcatgctatatttacactaaaagagttacaagaaagtaattgtactaatagcttgatagggaatgcacaattgtacggcaacattgaaatttttgaatatcaagcagatctctaaattagacgaagcagccactctgcccatggactaatagcttgatagggtaatgccccggtagtttagttttacaaagatcttttctctaaacatggcatctggcatgatttgacgtgtgtcgaaacacccgaacaaaatgccatggctgagagaaaacgccagcatttaattgaatgttgcccgagctttatttttccaagccaagatgccaattaagttttggtccgaatgcatacttacttctgcctatttgataaatatgacaccaactcctctcttgggaaacaaaactccctatgaactccctttttgagaaacaacctgattatcatcatcttagatcctttggttgtctcgcatttgcatctaccttgatggctcataagaccaaattctctcctagatactgaacctgtgtttttataggatacctccaaggtgtcaaagggtacaagctttatgatttaaatactaatcaatgttttatttcaagaaatgttgtgtttcatgagaatatttttccatttcacaaacttaatactaatgacagtaatcttgatccttttactcaaattgttttaccacattctatgattaatgacaccccctatttgtgagtatcccacagattatactgagcacactccaactacttctcatgtgcatgaaacaaatgaaaaggacttagaagagcaaacaggccccacgccttcttcatctgcagaaacttgcaccactgctgctcaaaacactgcagcaacacgaaactcttcccaagatgcaccgagaagatcacagagacaaacaaggccaccatctcatttaagggatttcgagtgttattcacttattcaggacacttcctcaacccctcatcctatcaataaagtcatatcttattcgaatttatctgacacatacaaagtttttatcctttcagtgtcttctgtcaaagaatcgaaatcatattttgaagccattcaaattgttggttggctaaaagctatggaatgtgagcttaaggctcttacaacaaaacttggactatcgttccattaccagaaaacaaaagagccataggatgtcgatgggtctacaagactaaatataatagcgacggcagttgcacaagggtatacgcaacaagaagggttggatttctttgatactttttctccagttgctaaaatggttacccttaaattacttttagctgtttccactgtcaaaaactggcatattctacaattagacattaataacgccttccttaatggagacctcaatgaagaggtctgcatgtgtataccacaaggtctaactctcccttctactcttaatgtagaaagtaacctggtatgcaaattgcataagtcgatatacgggctcaaacaatcttctaggcagtggtataagaagttatcagacgctcttatgcaagagggattcaaacaatcataggcagattatacgctcttcaccagaggaactgatgagactttcattgctcttctcatatacgtggatgatattgttattactggacccaatatcaacattctccacgatctacaaagctcattacatcgcaaattcaagctcaaagcactaggaaaactgaaatactttctcggttttgaagttgctcatgctcaagatggactctttctttctcaaagaaaatatacactttaattacttgaagattcaggttatatgagcagtaagcctagcaagaccccaatggaccccaaattgaagctcgacaatgaaaatggagaagccttggacaacccctctcattatcgacaacttgttgggaaacttttgtacttaaccttgtct

SEQ ID NO: 323075 - DNA, 788 bp, Cannabis indica
aggctagctcttttagaagataataaacaacttccacattccctcacatttattttttaaacatgcttttattacatacataaaaagtttacaacttacaactcaaccattacataatttaaactaaacccaaaaaaaaaaaacattacaaaataaataaaaaaaaaagaaagaaaaacaagagagaaataaggtgacgaggttgagagaatcaaatccaagtatctaatgggctcgtttatgttttcgttccctcggccttgctttgtatcgcttgcccagtctccttagttttctggcccacatacgccgccgagtcctgcacgcgccgcctagcgtagtccgccgcctccggaagcgccgtagaaggcgtcatcctgatccggcgaagataattggccagccaagacagtgacgagaggcccgtgataccgaaggcaccggaagtcaagaatccagttacagcggtggcaatgacgaaggcggcggggactaaaacagggctgaagatgacgaagaccggcgtggagagggcgaggccgaggagagttccggctaatgtgagtccggctaggaggaggaggattccgccgagagggacgagggtgacgacggtgagaatttgctgagctgatggaccactttcggggaggaagcttttcatggcatcgcttggggtttggtgttgttgctgctgctgttggccgtattgggttctctggtagtccgccattgatgaaggtagtgagagaaaaagaagagagagatgaggggttgtttgttgtggc

SEQ ID NO: 323076 - DNA, 1648 bp, Cannabis indica
tagggcagctatagtatatttatttgagaaatcttaaggtgacagtattacacgaggttaaaattattattggtgcattttaacattatgttctatatattttaaacttaataaatgatatagaacgccacatcttagggtggagctaatggggacatgtgggtcatttgtgctgcctcaaatttttattaattatatttatatatatttatgaatatttcacattttgtctccaaaaaattcatattttttatttatatcttcatagattttttaatctccctaaaatttatgttttcttatttctatcctcataaaatttatatattttatttttactcatacataattttatttttatccccaaaaaaattatatttttctcaattaaaattatatttttcaatattattagtacttaaaattttatttttgtggctggttctatcaatggtcatatcgatatattttaaggtattaaataataatattctttttatttatatatgtaaatatttattattgattgatttaatatatgaatattaactgcctacataaatatgagggatcgatcattacaaacgataagaaaagaggaagatcttatatatttgccaatgccagccttgaattaagcgggaacagcacgtcataagttgggatagttggtaggctatattttgaacgatctaaataaattaaaaaacaaaaaacaaatacatacatatatagctaaatcaatacacatatataagtataccatgtcatatataatatacatatatacatacattcactatatgtgtctaaatactgtttataggcaataagatcatgcatgagtacttgcaaataaatgtatatattaattaattaattattatataaaatcaagcatgtacgttatatatatttatccaaaatagttaatattatactatcattaattcatgtccatatatatatataataaaactcatgaataatgtagtatgtctacattatgtacattcgtacgtgtctgaatattattatgtgatattgatcccacccctgacacaacacatgtcctaataatattatgttgagcttttcatccaaaatttattatatatatacataatgtattgggaatttattatatggtatactacaggggtagtataccatatatatatatgtaagaaattatatatttttatatgaccgatatgtatattttaattataattatgcaggacctttcactatatagtttttgaaaaatttagatatatgtgcatgagctttacatgatgtgtatacatgttaaataagctaaggcctggccacgcccataatcaacagaaagtccaccttaggatcggaaataggttatgggcaaaaataattttttaagctcatactatatatatatagataaatgatattttaaaaattattaaaaaattatatatattttgtaaaaattattttttttatttagactcctaaaatgaataggccctaggctgggacccaacccgcctatgcctagggccagccctaatccacctacaatttaagagattccacctcaaaactatatagtaatagaggaaattacacttagtatgggattttaaaagttcttatgataaatatg

SEQ ID NO: 323077 - DNA, 1207 bp, Cannabis indica
taattcaacctagaatatcattctgaaacgcgaaaatgtgtacggattttcacataaatcacgtaacaatgagttgaaatcagcataaaacggctcaggtggaagatttcgtaaatcatagaactatgccactggaacgtaccaaacagtatactacaaggatatagtggcggcggcggttgtgatgaagagagtgaccgtgtcggagggtgatgaacggtagtgaccggcgaggctgtgagagggcggggtgagagactagggctaatgaagtaattctaaagattagggtatttgtcttcgatttgttaggcctggccgggctggctcatccaatttaaggcccagttcaatgtcatcattcaatggggaattttcatatgggaatttagggtaagagtttatttttgtatggcataaataaataatactatatggttatgggttttttattttttctacatttatataggtttttttatgctattttttgtaaaaaaaaggtagaaattttatatttgtaaaacaacaataagttttgctggaaaagtcgtcggcaccggaaaagtcgtcggcgctggaaaagttagtgtcgccgaaaaagttgctcgaataattacagtcaccgaaaaaattaccgtcactaaaaaagttattaaagtcaccagaagtagatgtctcaaatataactaaaaatataatcggttccatgaataaaaactaataactcaaatcggttgtaattgaaatataaccggttatgtaacataataaataaaaataaataacataaaataacttaaacaagttataattaaaatagaaccagttctacaatagtgttataatgaataaaaaccaataacacgaaataattcaaaatcggttataactaaaataaaaccggatatataacataatgaatacaaacaagtaacatacaaaaattcaaaccgattacaattaaaaaaatagaggagaaatcaattcctaaaatactaaaacataaattaaaaacaaaactagttctacaataaaaaacctcataacacataatacctcataaaatagattataattttaaaaaaaaatggagattaatttcaaaaaatattgaggcataaatatgaaaagaatcaattccataacaaaataaataaacataaataataacacacaataactcaaatgtaatataaagaaaccg

SEQ ID NO: 323078 - DNA, 1871 bp, Cannabis indica
tgaccaaatggatgttacaactacttgcttgcatggagatatagaggaagaaatctttagggagcagcctaaggggtttgaagttaaaggcaaagaagaaatggtctgtaagttgattaagtccttatatggactcaaacaggcccctagacaatggaatagaaagtttgatgcttttatgataaagcatgaattcaacagaagttatcatgatacttgtctatactacaagggaagcactataaaaaaatgtcatctatctacttttgtatgtaaatgacatgcttattataagccaagaaagatctaaggttgacatagtaaaaaaactactcaaaacagaatttgaaatgaaagatcttggtaatggtaccaagatccttgtaatatctatcttaagagatagagataaggaaaagctgattcttagataggaggactacattgagaagatcttagagaagttttctatgaaggatgccaaagctgttaagcaacctataaccagccagtatactctatccaaagaataatgccctaaaactgaaaagaagttgaagctatgaaagatgtaccctattcaaatgcagtggggtctgtcatgtatcttatggtaagaagaagaccatatataggttatgctatgagtgtgcttagtaaatacatggaaaatcaaggaaaagttcactagttggccatgaaaggggtattcagatacttacttgggacaactaaagtaggtctggtctataagagacaaaatgtaagtactataatagaagggtacagtgactcggactatgctggggacagagacaacagaagatctacatctgcctattttttcttgctaggagaaaattgtgttagctggaaagtccagctacaacctgctgtgacactctcaacaacagaagttgaatatgttgccacaatagaagatatcaaggaatctatctagctaaaagggctaatgactgaacttaagctacttaaaggagtacctacagtataaatagacagtcaaagctgtatatttctatgcaaaaaccctatgtttcatgatagaacaaaacatatagggatcaaatatcactttatacgagataaagtgactcaaggggaagtagaagtagaaaaggtacctaataaagacaacccagcaaacattggatactaaaattgtgactctttataagttcatacaatgtatgaacttattaagaattggccctgaagactaagagtaggacctatcaagctagaaatcttagagataaacaaacactacattagaactggttataagatgaattcaggtggaaattgttgagtgagttccacttataaccagtccttatacatattatccacatcagcatacaacaacaaataacagaaaacaagatcaaacctaggtggctttgcctctacaagaccaagaaccagaagttaattacaactgttttgtaactaacttcctgttgggattttatgccttaaataaaacacatttcaatctaatctgattataagattagaagtcatttatgtttacatgtagttttcatgtttatggtttaatatatacaaaatctgttaagtcctagacatatagtcattcacaattacagtgatgtcaacacagtggaatgtgattgtgattatatgcttcaaaagacattggccctgattcatcagtgcactgaatttacactgatgtgataatcagcggacctggaccggaactgggacccggaccgaacccaaacccggtacccgagactcaggacccgaaaccagacccagacccggacttgggactcggacccagactcgctcgggacttggacccggacctagacccagac

SEQ ID NO: 323079 - DNA, 582 bp, Cannabis indica
ataatcagcttcttaccagagataaaatgatatggttttaaatttttttagaagttctagactgtctgatttgtggcttggccttggaatcacatgagcatttattctttctgtgtgagttttcctaaagagtgttggataagatttttgactggttgggctatagggcttggcttagggattgtaagggctagaatgacaagttagcttcgaaaaccaaagggctattgcattttagacaggtgtctatcttggttgcctccatttacaatatttggagaaacaacaataaatgtgtctttgagggcgagaaatgctaaagggcaccagtggtgtctagcaccatcctatgtgttaatatcgctattagtccaattaattatcgagtctcatataatttaatataatagcttttaggaagtatcgctagtcaatcgcaacgcgacatgtcaagaaagtactaagcattactggtagggctgctctaactctattgatcataatggttcgaatataagaatagcttgttagtataggttgcaaaaatgtaactaatagaaaaaggttcttgtaaagaaagtg

SEQ ID NO: 323080 - DNA, 652 bp, Cannabis indica
tcaacaccaatctccaacccgaacccatacccggaacccggatccgaacccaagcccaaacgcgagacccgaaccaacacccggacacggacccagatccgaactcggaccgggacccagactcggaacctgaacctaagacccagaccctgacccagaacccgaaacccgaaacctaaaaccggacccagacctcgacccgattgccagacccaaaccccgacccgggacccaaactcagaccaggacccaaacccggactcggacccgagatccagacccggacccggactcgagcctcgaacctcgacccgattgtcggaccccgaccccgacccgggacctaaacccaaaccaggacccgaacccggactcgaattcggacacgagacctaggacctgggacccagactagggacccagacccaagatccgggactcaaacccgagacccggacccgagacccagacccgggacccgaaactcggaccccgaactcggacccagacctagaaccagacccggacccatagctggtgttggggtcgagtgtattgaaaatatattataactttacacaaataattaatacaagtcaatatgaaatatagtattgtattaaataatactaatataatataatacaacaca

SEQ ID NO: 323081 - DNA, 457 bp, Cannabis indica
agatcctggtaaaataaattccaacagaaagttcaaatttggttcttggagactttgaatatggatcttgaagtcttcaactaaagcgtgagctttgataccatttgatgtgaatttaattcacattgaacttgctgttataatcaataataacttataagaaccaaaatattcaaacataaaatagaattaaatactcaaaccataaaataaacaagaaaattggaacttagcttaaaatccatgacagcaaaaagaatgtgttctttactaactttcagcacactaaaattagagtctcaaacttaattacacttatcaatggtgtacaacaccagttacaataattcttcacactggagagtcaggatcagatacaccaaaaatccttttaaatccctccttcacacaccaaatttttaaaaacagagtacaactcgagagagagagagagaga

SEQ ID NO: 323082 - DNA, 887 bp, Cannabis indica
aatgtacttttgtaactctgattgtcttaggtcggctagtgaaaaggacttgtaatagtttgtaaaatatttttttgggatccaaaatatatcatttttgattgtaaagtttaaagttatttcaagttttattttcattccgttttagataaaagtttaattttcacgggcttagctttccagtaatcccagtttagggaattagggtttcataattaggtgtcgtgacatgcctaattgtgagcatctaaagtatttatgtgatatatgacgcctagaatacacattgcagctaccccttatcattcccttccatcttactgtttcttaacccccaaaggaaaaatcatcaataatcattatatacatacacataaagggacactaatcaataaaccaacgaatctatataaacaacctagtgctaattacaattacactgaaaccataatttcactatagctactacatcccatcccttattaatcactaacctaaaagaacaatccacacgaaaaatacatacataaatacatgcacacacacatatattgtataaaagaaacaaaagaacacgcccaaagaaaaacatgctagccagaataaaccaaacaaactaaaaaaattcatacataaagagaccaacccagaaaatataacaaaagtcaagtaattttatcagatgaatgaataaagaaatttttacgtcaaaaatataaaatacaatctttattacactaatatcactatacgatattcaacttttttactcttctttttctattactattttaccacatgcacattcattccatgcattggtacacgtgctgacctatgacccatatcaatcaaccatccatcatttatcttcttttttttttttt

SEQ ID NO: 323083 - DNA, 1922 bp, Cannabis indica
aacaaaaaataatttttaaaatttttaaaaaacaagtcacgtttggttagtgatttttaaaaacaatattgaccaaaagtgaattggtttttaaaacagaaaataacattttgttgttttcaaaattcttgttttttgtaactttgttttctgaaaactgtttttaaaaaacaaagccaaacaagccaaattgtttttaaaaacaattttctgtttttaaaaataaaaaacagttttttagttatgatgccaaacatgtacttagtctgtgtaactcttacggtgggaagttttttttttctttaagggtgggaagttaatctctataatctagaataaaaagaaacaaaaaacaaaaataaaataaaaaaaaatagttttattaatatcaagttggcacaaaaattaattgttaatttttgcaatagtaagcaataattttagggctcatttaataaattgtataacagtcgtattatattgaatatttagataaaacaatgtattatattaattattacgaccaaaaatgttaatacaatgtaactaaggtattaaactttacaataggaacaaatgtgtaagagtaatcaataccttatttttgattgtagcctttggctatcaatcgtgctttgaatcattcaatagtaccatcagcattgtattttattgtatatcacttatagtcaatggcatgatgaccatcaagaagagttacgacaattcaagtgtcgttggcttttagggcatcggtttcagtatccataactttctgccaaatagggtctttagctgccattttgtaactgaaaggtttaataaccggatgggtaacaaagatcgttgctcaatagtgatcttttaacttatcataagataaatgttggttaatagaatgagcagtgaaagaagagcagtagttcggaaacataatcagaaaatgttttggtttagatactagtctacctgttttagacataacaagtgaacttggatgaatatccctgggtgtggatggagcttcatcatgaatggaggccgatgtgtgatccatagtaggaggcaaatcattgggtatatccctcttgtgggatgaagattgatcatcatcaggaactggttcgttctccacgagtagaatgtggtactgtcctaaagaaggcaacaaagaatatgagaatagttcattaatggaagaaggagaaataatgtccgaaagagaaaaaaatattttcatgaaagtaaacatttctagagtgaataaatgttggaattttataccctaaataaaaactaatttcattgtaatcttatttactttcaataaagatcagaaatcatatcctaacctagtcatatgttttgctcacatgttttatacatgattatagatttaatatataatttctattaacttttgaacatatagttattcacaattacaatgatgccatcacaatggaaagtaattgtgattatatgctttaaattattaagtctcacgatttattagtgcactgaatttatattgatgtgataatcagttataaggtttacttatacttagctgagtgaaatatcttttctaaggtattagtaaagtaaaccaggattagatgtatcgattttacatcggactagaccgatattgacagtggaaaagatatcataaatttattgttatatcttttcctagtcaatatcacataattgatcatagatcatttgatcatttgacttattcgtaactatcttaccatggaactagcttaatacttatatcttgggaacttggaagtgcaattgagtaggagtgctaatcatagatatagacatctatagcttctatgtctattagaagtaaaatgactgtttccttagaggttggcctaatgcgataaatgatataggcctcattt

SEQ ID NO: 323084 - DNA, 990 bp, Cannabis indica
cccccacaaagtaaaaatcctgaatccgtcactctatatatgcattcatatctccctttcgaataaattcaacaaagaagctgagaaattatgccataaattaattcttttctgtttgggaatattatttagtccttttactggattatgcttatatatatataaatatattttggatcagatcataattgaaaaagcacagccactccaaaaaatttgatttttagttacaacaaaaattacaactaaaaataaaaaatattgtgaccaaaaatttaagttatgattttttttttatgacgagattatgactaaaaaataagtagctaaaagtttcattagttactataaaaataacactgtgactaataatcgttgtaagtaatagttgttaagatgttaacacaattagtcacaactaaatatcctttagccacaaattatttatctttggtgacaatatttattatcactaatttttatttagtgacaaattttgttgtcactaatatttttttaattagccacaacttaaatatttttaaccataatttttattatcactaatacatattaagacaacaaaaaattgtaactaatatttttttagttacaacaaaaatttggagctcctccctagaatttactagccaagtggcggcactgtttaactgaagctagcatggcaagatttctctccatgaacaaaaggtcttctttgaatgattggccaaccagagggagatatgagaatcatgaatcgtgaatggcagaaatgagagagagagagaaatcaattgagaagtgagagagagaagaaataggaagtaggaatttgattaaaaaggctacaaaatatgtgacagccagtagtcccgtgatacgtaagggaaaataccgggtaagctgtgcaatcccacatcgcctggggaatgtcaagtgggatgattcagagactgtgtaagtatgggactacacagttgaagagag

SEQ ID NO: 323085 - DNA, 932 bp, Cannabis indica
tataatatttttaattgtgagtaccgattcaaaatttcatttttttaactcttaatgacacaaataaaagtaaattaatattttaaagtcttagtttttttaattattttaaaatgccacgtcactgcctcatacttctcctttatatatatagataaatttgaaatgtagtaattaatattattattatttgaaaaaattattaaattatttttattttgaattgcaatacattacacatgtataacagtttatattaatggagtgaaacttaaaaaaaaatctataacaaagcacgaagttcataccttattatttatgttatgcataccaacctttttcataggttcaaaggaatgttgttgggtgtagggaggtcaaccacaaaattatattgatatatattccaaaatcattgatgaacttatttcgtttggaagatttataaacgagacaaaaacatacctaaatttcttgtcgaatcttctgttctatatatataaatgcatatgtgtgatttctttttttcgtaaaacatatatatatatatatatattctatgatacagttatcttataatgtaaggtgggcatgcattaagctatcttcattattttctccctacccttcaaatcaatctcagcgttataaatattattgtttacgtgtgcatatacatactgtaatatcttcgtcttgatagtgatcatcaccccaaataatttgtattcatatgaaagtgataagacacattgaaaaatgtgattatgtgagagaaaaataaaaagtgataagacaaattgataatgtgattatgaaattgagatagacggtattgtattatattgagtgcgattatatatcataattttatataatattatgttaaaatttaatttatactaaaatattagaggaaattatactctata

SEQ ID NO: 323086 - DNA, 636 bp, Cannabis indica
ggaactaatgctcatatttagaatgatttttaataatttttggacgaccacactagtagcacttatctcagtgattagtccaattaattaaaattttatatgaattaaatgctatatattaattttataatagtgctagatatattgagaagatattcaaacattaaggtaggtatgttgagtattttatttagcataattttataaaatttcacaaaactattcataaaatattcataaaacgtttataaaatgaataaaacataagcatttttgtgatttgacataagaaagcctgagatcggaactaatgctcatatttagaacgattttaataatttttgtacgaccacactataggagcacttatctcagtgattgtctactgtgttaatagtaaaattactaggtagaatccaatacctaatgtcttcgtgaaaatataattttatataattagggagtagccacgattttaatatgtaaattatatattaattaaaattcatcttaatggacataacttataattaattatatatgtgtaataattttaccccacagaaattttattatatttattttctccaatatatatcccactaagaaataatattctaaacttacccatgtgat

SEQ ID NO: 323087 - DNA, 424 bp, Cannabis indica
gctcctttgaattggggaagaaccaaccaacccacaaataacaacttcacatcataccaaataggtatactacaaaacaacaaattaactcaatattcaatattatattattttttttttcttagatatataatatgatgaattattttaagaaaaaaacttacaactctaaagcaggttgcatgaccatttcaacaagagtaagaaaagagtataaaatccaataagcaagccattgttcatcatctagttttgatgtactctccaatgctaaaaccgatgcatacctatataattttaagtacaaaacacaaaccccatatatcaaaatcattaatttactaaagaaaaaaaaatgatttaataagaaaacttacaagggataaatcaatgacaaacttggcctgcaaaagataatatcaaa

SEQ ID NO: 323088 - DNA, 887 bp, Cannabis indica
tcgttctctttctcttttttttttaggttttagaatgtcactagcgatttcctctgaaccgccatttttctaggttgcatttttggtgacttttgtcttaagactatgctaggaacttttaggcttagggttcatagaaatcgcagtgttccccatctctttccttttccttgttctattaatatgtcaaggatttagaatcattgatttttttcctcacctagatcaagaagggtccttttcccagcagttaggggacctccattcccctttctgatttagggtttaatgtgggggataactgctaggtttcttatatttcatatgagtaaagttctttgggaccttcataagtatgatttctatggatttgaccaagaaattctcaagctcctctcagaagcgaccatgtcaaattctaaactgccatccaatgatacccctatttgtacttctatcccagccacaacagtccaaaggttcgtccctttggatgttgttatggaaggcccattgccctacacttgtccttgatgtgcactcatcaattggagaagatcgtagctgagaacaggatcaagccaacttgttctgaagtgtaccatcatttgccaaaggatgaagaaatgcccaatcacaattataactgtcttggagcatggagcgagacccatcttatgttaagagccatgttcccgcttaaataatattttattgactttttagtttttgttggactagccccatatcaactaattcttcaagcttatcgcctgctctcacaccttttcattttctatgctgtcaggggttggcccactctgaatgtaaagaccgcttagtttaatttggaaattagctgttaatcacgtttaattatgaaatta

SEQ ID NO: 323089 - DNA, 885 bp, Cannabis indica
actaaacttcaagcttttacttaatttatttagctcgaaagtagagaaactatctctgattgcaataaaataaaataaaataaaatttaaggctaattaggatttttgcaccttgaactattgagattgttggatttaaggattatttttccaattttagtaaaaaagtctaacatggatgaaaattcagaaagcatgatttagtacatgtcaaagttcgagggtcacgatttggtagatatcaaagtctggggagcatgatttagtacataaacaacactgaaatagtaaaattgaatgaaattagacaaaagtccttaaatctaacaatctcaatagttcatgggtatttttaacggccttaaaagttcaggaggcatgatttggtacatgtcaaaattcaggggcaaaaatcctaattatactaagtcaataatcacgtaaacctactactattcaaatattatgattagaaataatactaacgcaataataaaatttaactcgatttaactataaacgaaacttcaaaaataatataaaatcataccttaaatccaaaattttgagttaaatatgatggtgtgtcttggtcaaagaagtgatgatggtatgggggtgacttgattcttggagatgatgcttaaacaagagataagatggagaatatagtagctttggtctagagagcacaagagggtgagagcataggcagcctaaagggtgttgaaggaggggttttactgtcatatatatatagtagttaaatagaacatgtaacgtccccgcttcaagcctccattgggtccttacacccacggataatggctcttatacacgggaaccccactctggctgcttcctggattgatgactggccctaca

SEQ ID NO: 323090 - DNA, 869 bp, Cannabis indica
tatctgttcgcattaagcattgtcttcaagttggttagtattaaaaaaaaagttgtcaaaaattaagctcagggtcctatttttactattttagaaaatacaaggtccattttgtcatttaacaaaacgcaaggtctaatctgtaacttttgcaaaacacagagtccaaaatagtatttaccctaataaaaagctaccactataaaaaaaacagctacttttagtgacaattttttagtcacaacataatttttttgtgactaaatatgacttttggccacaacaaaaaacttgtgactaaaacatagtatttaggcactagttgtcactaatttacttttagttacaacaagtattgtgactaaacccacatttagtcacaacaaattataatttttgtgactaatacatttagccacggacattttagtcacaacacatgaatgagaattaataattagtcacaacttttttacttttagtcacaaattttgttgtgactaaaagtaagattttttgtagtatacgaattgttcagattacgtttaaagttatagtccataatgtttcttaaatcagacttatatttataatagttaactcttattaattaaatcatatttaattctttaaataaataaatatatataacaaaaaatttaattactgatatttatgaaaaaaaaatctcaattttttttttttgataaacctcaaaagttgcattaatgagaattaagagaccatgggtggtcattacaaaagactaggggtgttcgcggtgcgggtagtgcaatttttgactattttttcaaactaacccgtatatgcgattttttcaattttccaaaccacacctgcaccgcgaa

SEQ ID NO: 323091 - DNA, 2589 bp, Cannabis indica
gagtggaaagaaaaccaaaagaatgatcaaatcacagtaacacaatgagactaaaatattggatttcaagcttagagagatgtccttttttaactttctctgtaccagttcactcagaacaatcctcttagcttaaaagacctttctattctaactatcttttgtttacaatctgaattcataattttaaggttgtacttttatattaaaaaatttaggaaaattctcagaggtatgattgatttcattcctaaaattgaaaaaaaaaaggactaaatatacatggaagtcaacagataagataagtataaactttgacttatttttactgtttggataactattatattgtttactgagattttcgaaaaccgatttattgtatgtgaaagctaaagaaattaatcaaagataaagaaaataacaataagaatttttatgtagtttgggtattactaatacttagtacacgagtcaagattattactttaaggctagaaaagttttaagatttacaagaatgtatgaattctagatttttccttagtaattgaggaatcagtttctaaccctttgcatgaagagttcttcgtgtgttcatagtgtatagatttcacattcatttctatttctctactaatgagataattacaagtaacctattaatttagacttatctagtgaagcccgacccataagacacttggtatatgctgatgtgaatgccacatcatattggtagttgcctaaactatgcccaatctttatggagaataaagaaacatttaatgcttgattgctaattactatctttctatatttagcaaaatatgatcttctattcaagatccttgggcagcctacacttctttctagacctagaaatagcacggtgcaacaaaggcatctctatcacacaaaggccattcactctacaactcttacaagaaaatggctgccttggcattaaaccagtatcaactcctatggaacctaataacaaacttaacaatgagtttgaaaaactccttgccaaccccacacaatatggaagtctaattggcaaactcatacatctaaccataacgagaccatatatttttttttgtcaattaattaatccaatatcttcaagcaccaagtgaaccccatctccaagcagcccatcacatactacaatacttgaaaggaacacctggccaaggactcttcttctatgcctcaacacctgaaccaatacaccttcaagcttttgcaaatgctaactggggggcatgcttggatactaggcgatctatctcaggctattgtgtcttccttggcaaatctctcatctccaggaagtccaaaaagcaacacacggtatctcgctcctctgctgaagcagaatacagagtaatggctaatgcagcctgtgaactaactagcttggctccattctattcttcacgactttggcatacaaaacaggctcccatcaactttattctgcgacaacaatgcagccatttacatatcataaaaccccgtctaccatgagcgtactaaacacgtagaaatcgacagtcaccacacccaagaaaaggtcaacaatggtaccatcaaaatgaatcacattgcatccaagtctaacatagctgacatcctcacgaaacctctctttcccactcatttccacaatattgtctccaagatgaatatcaaaaacctttacatttcatcttgagggggcttataagacttaagaggctaagttagtcatgttagttatgttagttatatgttgttactgttagttatattcagtttagttggttatgagctgaatcgactttactctctatataaacatatatatttgtcattgtaatttaattgaataaacattttaatatcaatgaaaatcaaattcattctttataactaattatggtaaaggtaacataatgctagttttgggtgttttgctgccaaaatttatattttgagagttattagttagcgaacagaaaatattgagggttaagctgtaatttactcaaaaataaatatactatacaacaaattgtgtataccaacaactcacaataacctataaaaaaatcaacgtaactttaaaataaaaataattttaacaaaattaatataaaataccatgatatttaaatgatatgctttaaaatcttaaaaatatacatatatatatactagtaaaaatttacgtgcgaggcaccgtttaatctcgaaagataagtagtttgtaagtgttttatatggtatagatcaccctaatggtggcgaccatatttgacttgcaaattacgaaacaatggtagaagctcataagatagaatagccttgactctcgcctaaacgggacaacgctggattctaatcttgatcaaataaaaggttgctagaatgtttaacattttagatgagctgacaactatattcaatggatggtagctttgactctcgcctaaacgggacactgatatcagtttgttgaaaaaccttggaaattatttaggattgaatttttttaagtattttctcatatcattcctacttgctatgtgcttataa

SEQ ID NO: 323092 - DNA, 576 bp, Cannabis indica
atatatatagaaacaaagttctgatcagtcaataatattaaaaatagttgaaaaacggtaaattagtaaaagttatataatcacaaattcaaggctaattattattatttgaataattaatgtacttacttatcattaacaataactaaaacaaaggaatgactagtgtatattcagattaaaaaaaaaagtaaaaacactagtacaagtgagtagtactactacactagtacttatccccaaaatacaaattaacaaacaaaattaagtagagtaaaaatgtattcttcttcttctaataataataataataaagtttggtaggattagggcatactaattaagcttacaattaatagggttggtgtatatatagttttgtttttgtttttttttttatttgtaaggaagttggtgtatatagttggacgactaggaacttcaatttttttttatatataatataattaaaaattagttctatattatatatatagggatatgattttgtccgtcgatgtactttcacggaatgtattccgtagtgcattagatgggtctcagggtacattaaat

SEQ ID NO: 323093 - DNA, 918 bp, Cannabis indica
tacggacaaaaaatatgggaacacagacttacaaagaaaaatttgaagggaaactcagaaaacaagtcttttttttaaaaaaatcatatatatttataaacataaaaaacaatcgtataattttcactttgtacttttaatggtattattgatattacttttttaagaccaaattcaatatttctcttgtgtttccttttctacttttaataaaggaaaatttataaaaatattaaaatttgaattaatttttacaaaaatattattacacggaaatctttttaaaaataaaatatttttataaaacaaatagtagaacacaaaacaaaataactaaaaacaacgaacaactaaaaaataacagtagaataacaatggaaccttaacacaatacacagtataaaacttacacaatatctttgaaaaaaattccttcccacagtataaaaataaaaaaaattagaaatttcagtatgtggtgtataatccctttaataaacaggttcgagctttttttagttattctaggatccatcgacacgatttttttttgaatttcgaatagtttttaagatcttatatttttaattacaagtaatctcaccacaatttttcccttttccttctttttgagttattttttttttttttttgacaaatatcactacaatttatggagtagattaacaacctttttaattgatagctagccatacctttaactcctatatttttagaagaaattagacttgatattctttttatataatcctcttttatttttaccctcttttttaaagtctattatttttacctctttttttaaacattgtactaattttgttcctgtcacttcaagatactctccacgtgactctcttatgtcagggtatttgggtacaatacatataaaaagag

SEQ ID NO: 323094 - DNA, 1170 bp, Cannabis indica
atagcacgaaaagcctcggccatctcagctgcttctgctccaagaatggagaagtcgaagtctggcaccttggataaagtcgtgtaaatgtagtaaaaaacaacttgttcgtactgtttcttcccattttccttctcggtctccaaatcgcgagtcaattcctcaacttttgactgagaaatgttggccttggtctctgcctgctctttggttttttggaggtctttgatgtctttatccttagagttcgcctcttgcttcaactttttcacattctcctggagaagagcgacctgcttcttcagtagatggacttcttttgagccagcgacgaacgcccacgagaacacagtcattaactgcgtggcaagttctgcacccagtgacatcatctcctcagtaggaatccctcaaccctcgacacgaattcatcgttcacaaacttgtcttgaagggtcacgatgtcgcttgctctgatggcggggtagatcatgactttcttccccttatcctgagaaggcctaacctccttttttgaagagtcgcgacaatgtcactcttcctcttcgacgggatgatgggagaggtcgtcgcagtcccaattttgggtttgcggttgcgaattggagcttgcttcaggaaagtcatttctgcgaagacaaaaacattaagataagtataaatgtgttatgttatattatagatatatgcgatgatttacctgatgttggttgagaagtttatttggatagacgcttgtctattctctccttttgcttcttagaaggctccttgtacactggctcccaatgaaggttggcatcctcagggattagcttatgttctcgcagctttatagtcgtgcacaaaaattgccaattaggatcttgaacggttaggctactgagaagttcagcaaccttttgcgggcgggatccagaacaggtcgagccggtctatctgcgactaataagaagcaaatattaacgacttcataaggtaacacaaatataagctaagtgttgagatatgcgacgtactaggtcaatggttgaaatctatcctaacccctggtacattgaatatataaaaccacttagatttccaattgcccatattagaaaccatgccttctagcacgttaattttagaagtggcccacttgctgaa

SEQ ID NO: 323095 - DNA, 613 bp, Cannabis indica
ttagatcacatttaatgaatttggacccaacccaatccaatcgatccaatctaattatttatatattaaattttgtcaactgattcaatccaattatttattagatgttagattttttaactaatccaatctaatcaaattgactcaactgattcgaatatcagttcaaaccattagatgcattgactagttatctattgaattggatcgaatttattcaatttttttaatctactatttaggttaaattcattgaaaagaaaatgataaaataagctcaatttaaaacttatttttcatagtgataaaacacaaaaatcacaaatatatataataatattagtccaacttaacttttatgatcacataatcaaaatataccaatataatacaagtttaatttaatttatatgataatgctatcataatccatatacgtcttagcatatatctataacctctataaaaatgagaataattttgggctttccactaagtaaattactcaattagcctttactagatattaaattacaagaaaaaaaattcattattttaataaccacaaaataaataaataaataattttcctaataacaaccaaatatacaca

SEQ ID NO: 323096 - DNA, 1135 bp, Cannabis indica
ataaagaggttaaggctcaatggaagcaagtgattgaaagctttccaaacaaagtgttttatcttaggaagcatctttgtagtccaaactattttccaccaatatttaacgagttagaagaagaaggaaaataaagtgttgaattagcaagatagtaggccgaattgacagtgagatttccacaaagatgatgtccccaaatgagacagtcctctctagcaggatcgacagggattctaagaataaaagtaactacatcttttgagaaataagaattgagtttatcaacatcccataatccctcctttttaatgaaaaaaagattgtatcctcaggaggagaaagatcatttttataagatacaaccctcaaatctaggatccaattcagactagtgatttgaatagatttaccatttcccacctttcaaattaaacccttgagaggagttccctaccctagagcagacttctccaagtgaaagaatggtcgtggccaaggaaagcatggagaaagtcattatttttaaaatatttggctttaaggagagtagccagaagggaatcgagattagtaaagatccaccatgcctgcttggcatccatggcttgattgtggtgaacaatagtacgaaaactaagacccctaaaaaatttggacttacgaagaagggactattttttctaatgaattttcctatgattattccccaaagagccacacaaaaaattagccatgagcttctcaaactgcccacaagtagatagaggaagtctgaagcataacatggcataagaacagatagcctggataaccgctttaagaaggatttccttaccagctctaaaaaatagcttattattccaaacagaaagattactattagctttttggagaagattgtagaacgaggatttttttgagtgaaaaaaaatactagggcacaccaaggtatttattaataaaaggtttatcatcaagaccaagagaatcaaggaaaaaagttctgtcatgcacactagtgtttgaagcctctatcacagtattcgatttctaaggtaaaaacttttactgtctcttaatgtcggggttttatgtaggattttcgtatgtttttattttcgtttttcagaga

SEQ ID NO: 323097 - DNA, 570 bp, Cannabis indica
tccttcctctcttcgtttaaatttttaatttatactcctcgttattttttagctcaatattgtaaaaaaagccaaatataatatacttggaattttttttccatcaatttaagtttattctaaattctagaaaaacaataaagaatgttatatttatatatcattaaattattatttgcgtgcctctactttgaaaataaaaattattctgtatctttctgatctacaaacttttgaaaggaaaaaaagaaaagcataaaattacaacatataaaacaaaatagtgcttttttgatattgtgtgtctgcatagataagagtaggaactgtttttcttttttctttggtggtacaataaggtccctactctgatttttttagaaaaaagtctcaaaattattgagcttctacatgatgattattatcatctaggagtattgtgcaccacaccattaattgtgaatattcaaaaatatatctacatataactcaaataatagtatatatagggaaatttgattttctatgcttagaaaatcaaaaaatttgatttttaaaccaataattaaa

SEQ ID NO: 323098 - DNA, 698 bp, Cannabis indica
gaaacaaaactgaaaagataatgaaaaaaagaaggaaaaaaaatatagggaaagcacgaattgataggcgtcaatcaactgacatgtgtagacacttcagttgcatttaaagagtgatattatgtgtacagtatgtgtaaatagtaaaattgcaacgaaaaaaaacttaaattgtacaaatgtaactactgccgcgtgggagtatatatataataaaaaaaccattttgtatttttaatgtaaaaatttcttttaaaatcaattttattcagatgataaagtagagctctttctttatatcccttcaacaaattattgaaaccactcccaaattaattaaatttagtatttttaaatttccccctttttggctgcctactcattactgtatggttttgtataaaggtgttcattgaaccacatttaatatttttagacatattcagatctgatctaatcatatattagatgttagattttatcacccgatctgatctaattgatttcagtcatccaatcgatccaacatccattaaatgttggattggatcggttttatccgttgaatgtatttcacatatatttattgatttaatttgggttattcaatattttacactaatattttttgaatcgggatccattcaatattataggtccagtatgtattagattggattgcataaaatctaatttaa

SEQ ID NO: 323099 - DNA, 573 bp, Cannabis indica
aacttattggttactatcttttctttttctctacagggaccgcagctgctgaataaaactgggacatgtgattatgtaagtgctattgatttaatagagttatttttgtagttttctttttcttggggcgggggtggttgggggggaagaagaaactttaatgcacaaaaattattttgatagctcctcctggaaatcactttttcattctattgagaagaacataacctccagcttatgtggaaatcatttgtatgccgggaatattagtgataatttttcatcaaatactgatgcaattgttaataactttttactagatgttcaaactcgtatgccagtatatttctaactcatcctggttagtttcttaattagctataatctgcttttgtacccagctttaacttggatgatacagttagggagtctaagaatattatttaactagacctatcccagttgtattttacagaattttttattcagtttgtgcacttatataatttatccacttttgtatggatcagcttctagctaaaacttttattagtgttttgctatatattgttt

SEQ ID NO: 323100 - DNA, 863 bp, Cannabis indica
aaatgaaaaaaaaaaaggaaagataaaatctatacaaaattcccactcctttaataaaaagaaacctaaaattaaaataaaaactagattaatacccctaatataaaaacacctactgctcgattcatcccctcccccattcttcctttctgtcattgtcgactcatccctccccctattcttcccttctgccattgttgcacagtcgaagaagaaaatgaagagggctccacatcccaagtgctcttgtcaacacccagcagtgatcaaaactttgtggacagatgcaaactcaagaagaagattcgcgatgtgtcgtcgtcatagggcgagttgtaaattttttctttattcttcttttttttccttgttggtctgctcgactcctcttcttggtctccaatagtggttttttttttccactactggttggtgggtgttattttttagagtgggttgacccaccaatgtgtgaaagggcttcaaaggtggtttctaggctgctacgtaaaattagaaggtttgaaggagaaatttcaatcatttcaagatcaaatattgatgagcattattacttgaacagtgtggaaaatatagatgagcaatttttgcttaacaatatgggaaaaattaattacatggagagttttaatgggaatagcaaaggatctaaaagaaaagatttgcactagtagaattttgatcataagtgttgtttttgtcattgttctcttttgtttcatgtcatgagtgttgtttggatcccaatgaaatattaggaatatatatcagaatgtttgaaaatatattgttccatgtaatttaaggatatgtttatttcttgaaaatataatagtttttta

SEQ ID NO: 323101 - DNA, 957 bp, Cannabis indica
tttttaaaataaatataattaaatattattataatatgtataaagtttttattgtatacaagcagtcctatcgtaaaaatatacactttatattttaatgaccacatgatccaaaatcaatggtcaaaaaagcttccctaccggtagaaaacttatgctaagtcttaccataattttgccctatacatatctacagtatataattattttgaaatttaatattacaaacaccaagcttacaagaccaatttgaatcttaaattatataatatatatatatatccattaatgagagaaagtgaaatccaaataataagaaaaaaaataaacatttctgaacaaacccaaatacaattcttagcataactcgtctaactctagaatagatgactctaactttaatttgaatcttcatcagctcacaacagtcaatggcactttttggaagcctgccacaatgtgggttacccatatttcacaaaagagcattactattgggcatcagtagtgcctaacacccttgagacatgtcactttgtgattgactagcgatacttcctaaaagttattatattaaactatatgggacccgatactaaattagatcaatagcgatattagttattatattaaactatatgggacccgatactaaattagatcaatagcgatattgacacgtaagaaggtgattggcactactggtgcgttttaatatttctcttcacgaaactccaacgaaggatgggaaagccagacaattatgatttttttgctaataagaactagggctgaacatcgggcgggtttaccgggtttcgggttggcaagtttcgggttcacgggtttcgggttcaaaaaattgaaaccgaacccggacccgaatagggcatgggttggcgggttggcgagtttcggttggtcaggtttagcgggttggcgggttgacccggtcaa

SEQ ID NO: 323102 - DNA, 844 bp, Cannabis indica
tgctaataaggttgttcattgtgtcgctagagggttttgttacttgtcatattgctaatttggtgagcttatgctctttttgctcttaagactattgtatcttctgagtatttttgaataaaatcgccatctttgattaaaaaaataaaaagattatattagacaaaatcagacaatatatatcattgatattactctttttataaatgatctatacatgcaagaagacaatatggacatattatttagttatatatatatttgcatattgatcttacttcaaaatgcttataaaagagaatacaataaataatgctcacaaatcatttgtcaacaaccaaacaaaaagaaaaaaaagctcacaaatcatgtcagctttccaaataaattgataacaaaaatatatcaaaaaacaaagaaagataagaatatgatcaaagtgataacaagacaaaagtacgcacccatttattagtacatggaatacatatctagaagttataaaagcaaaagctttacaaattagaaaagagagcatatatattaattaatagatatataaatatatcgtatatatttttatagaccaaacttctttggtgggaaaggtgtatatgttggattaaaaatcctaagtgggcacatatgtataatgtatatgctattataaagtgtgatacaaaattaagtgaccaattatgttatgggtatcaaaagggtattaaagtgtcatggaattaatgtgtagataccataagctaatttataatttgttgaggggccaaattataaatacccaagagttattctaagatgattctataaataggtaatggtccccaag

SEQ ID NO: 323103 - DNA, 1074 bp, Cannabis indica
aacagccataccgcgaccacaacttacgtcactttcaaagggtatgccacaactccaacacttgacaagtttctcaccagttcttggtagaggagaaggaggtaataccgaacaatttcactcgtcaactgaggcagacgcgtatatcgagaataaaacgaggattaccagcattcaaatgcgaagcgatggtaatcgtatgaaaagtctcatcgtcgattacgaatcaacgatggtaggtaaacacacggacatttatgggaaagacgaaggaaggtcatgcggtaaacttgtgttggaacatgatcattttatcaaggaaatttcggcattatacgattctcatgagcttcatggtcttcgcatcactctagatgatgatagagttcttgacactcttggagatcgatcatcgaatgtgtttagtaaattttttgacaagctctttcaccctacacatttaacaaggtttccactccccagtggtagtttcactgtgggatttaagggttcacattcagatgtgatccacaacatccaactcatctatggggggttccagccagccaaatggtcacccttctaaattggttgattgtattaattgtctgtccacgtacgtgttggtcactatatatatagtttgtccatatattatgtggtcctattcttatatatggaatatataaagattatatatatgtgaactaatatttacccatgaataaaagatatggatgtatttggtctctctatatcacaaatatgtatacatataaactaattagaagataattaacaccttcgatttggaccgaaacttatggaataaattaaaatttttagggctcgtttggtacattattacgtcgtattatattgtattgtatcgtattaaattcgattatatatcatatttttatataatattatgttaaactttaatttataataaaatattatatatttatgtactcatgcatacaagtcaataccacatatagttttacataaaatattattgtatgaaatataatttaatataatactatacaatacaatacgatataatac

SEQ ID NO: 323104 - DNA, 1170 bp, Cannabis indica
tttgcaagggagtgggcgttgctattgcactgacggggaacatgcagcaaagaaggtttggggaatctggagaggaaggatcttatctgcaaaatgagagtagacaatggggagtaatcttgccaattaccattcaccttggagacaaggttaaggaaatcggaaaaaataaatcttgggatcaaattggaagtcatacaccactggaggccttcataaagagcttgagcttcagcaaatattggagaagaggcacctgacttgaaaatctttgaagacttttgaatgtgaaataggccctgcatgaaaaccaggcctatacctgtagctggtgcatcaatactcaaggcagcatcaacaaaaagagcaagagtggttgcttgaaggaggtgagtcaagtcagctgaggaaggggaccgagacatagtggaggcagaggagtgaatttgagcttacttgtattcctgcagataacttgaaacaaaatcttgaacattatcagttacactgggtttttgaaaaagatgagaattccttatattccatatctgccaaattaaaccaaaaatagggggaggtcatccttgggaagtaaattgaggctgtgaagataaaaatctctgatgtctagcctgcggtgatcaacaaaaaaactgcttgaacttggagtgatgccaaatgttttttactctggtacagttaagaagagaatgagagagcaactctgcacttcccccacaataagagcagcgagaggttggaatggcatgcttgtgaaaaaggttgaggcacaaggaagaagatggttaaaagccttccaggtgaaatgcttaattttgggaggaaggtttgaagtccagagggttttccaccaatctttaaaagggttagggtcagaagaagagggagaagtagtgagaacagaggactgggcaaggtgataagaagaattgacagtgagaatgccagagtgatgaaatccccaaatgagagaatcaatggatccaatatccaaaggaattgtgagaacaacattggcttgataggcagggagaaaatgctgcaatttttctgtattccaagatctgtcaaggttaacaaaaaggaaaacaatagatagagaaggatcaatgggatgaagaatggttggatgggagatttgggggatcc

SEQ ID NO: 323105 - DNA, 600 bp, Cannabis indica
acacaaacacaaaaattgggtaatttacattaaatagcataataacataaatgatattaaatatatttccaagatatacatttcataattattaattaatctcatacataaaccttaattatttaataattcaaggtattaaccatatgcggtctttacagccactgtcactaaacggaacacgccgcttgaccttcattgttaggaaaactttcgacacaagttaccaaatacaaatctccgtcttgtaccaccgtaattatcaaagggatataccaccttactatcacaatatcaagtcttttaatacaaggcatcatacagatcttcaatcgtgaggttacaccgaggctcctcatgctttaagatgattcagaaaattcatttgcatagctaatgttgggatctagataccacttgttggctcttgtatttctaccttatcgggttgtcacctcactttgactcccacaattgcggaattgagacaaagagagaaaatgttttattttgtgaaatgtaaaaaaattctgcaatatgatatcagagctgcaatattggggcctgttataactatgtcgtcaacatagacaagcaatg

SEQ ID NO: 323106 - DNA, 1495 bp, Cannabis indica
aagtaattttaaagagtaacactttgtaattacttgaaaaaaaatgattcactttattcataactgaagttcaaaacatttgatcacaaatgtgagttacaatcattttattactggtagtagggtcgcaaatgttccatgttctagtagtttttatcagaaaggcatttgtaaaattatgcatgccatttatcagtattagagttgagccaatttgtaaaccccaattcccactatcttttcaatcaagctctaattttctcaagatttgcttcaatgcccctcgcgttgactatgaatccctgaaattttcctaaaaggaaactccaaagggacactttttcaggttaagttttatattgtacttccttaatgtttcgaagcactccgcgagctctgaggtatggaaaacaatcccttgggcacgccttattcagatcagaaaagtcaatacaagttctccaacaacaagattggctatccacgagggataaaacacttcgcatataaagtcgttgaccaacaacttatccacttactgtttgagtgcctcttgtctctcgaaatcatagggtctcctcttctgtctcttttctgggtaatttgtatcgacatttaaatgatggctgataatttaggatcaatccctatcatatctctgtggcttcagacaaactgatccaggtttgcccttgaaaaacttaatagatgctatttcagttgttcatccaggttcttcccaacgtaaacacactttgtgggatttcctgggtccagaacaatttctttcgattcttcaattggtttcaataagcttcttgcatctagaatttgaggatcaagatcttcacccttcttctcactttcttctgtcaagaccgccatcagctggtgaccgacttttctgtgttgtagctctatacgatagcattcgtgagccagcatctgattaccttccactactcccacacccattggtgtctaaaacttcagggatatgtgcttgatcgaactaactgtccctagtttgattagtgctggatgaccaccagtatattgtaagttgatggtgagtcgacaaccaaaaagtctcacataatggtggacaaaggtacctcacccaaggtcaatttgagctcgactattccttggctggcgacattattgccaataaatctacagagatttaccatacaaggtctcaatttagcttctttgagccccatcttctttagtgtttccttgttggcgagctggatagcgatcaacactgggtcaaagtgagagtatctcacgttctcttgatattctttcaaaaatataatcgcaggctcttcatctactcctgcagtatgcagtcctcctgagataattaggcctctccttcaacaggaggaggttgtaatccttggtcgcttgggttgttgggtggattgggctggttatgtacattgccctgcccttttacatattgcttgaagtggcctcgcgcgat

SEQ ID NO: 323107 - DNA, 1095 bp, Cannabis indica
aactaaattttgaaaatttagggttcttaaaaacaaccttaaaaatatttagcatttaaaattcaaaaatgaaaactaatttaaaatatctaggtttatttgaattatttttatcaaattaaattaaatatcaaataagataaatgatttgaaaaatatctttaatatcatcttctaatcttataatttaataaaattaaaataataaaataaaacaattttaaaatagatgtggttgcataattattattttaagaataaaataataaataaataataattatcctaattatatgtcaaaatatcttaaattaagcatttgattaaagactctgaagttctttattgtgagtattaaagtcaaaatttcattaaagtttatcaatattattagttgaaaacgtttatctaaatcgttaacgagttcagaccattatcaagagtatattaaattttatatttattttttctaaatttttaaaactttaataaatatataaatactcttattatttttgtttaaaaaaaatagtattattgttttctttcattcaaactaggaaacaacccgcgcttcgcgtgcagttatattttatttattgatatttaagatataaaaatatatcaaatattttaaaaatttaaaatttctgatataatatttttaataatatgagtaattattttactaaactttttatagaagaaaaaaattcaagcattttttgaatgaaaatcttgtgactttgttttttttttttttttttttttttttttgaaatgacatattaaatttataatcgctcttcttttaaaaaaatataatcgcactatttatatttaaaatcatgtatcgaaagtatcacgtaacttcatttttttaagcaaaaaaaaagaacttcatttttttttaaaatgagatatattttaaataaatttatactaatattttatttattgataattaagttataaaatatacaaaatttaaaatagttgaggatccaactagttttggaataaggatccaactggttttgttggaaaatttttaccaggatctagatttactaacaagtatgtttcattaacatc

SEQ ID NO: 323108 - DNA, 1159 bp, Cannabis indica
acacagttccaaatatagaagttgtattgactatccctaaactcaactaaggttgtatgctcaactctaagtacagtaggggaccatctacaagtacgaaagttattaccttgggtggcatcttcttcagcttccaaaggggctatatattcaaataatgggtgcgagcagtataatccttgtcttccttgtcagcaagaatggtaacttgttatcaatctgaatacattaggactttgaagtctccagtagattgtttgctgctgagaagagcgcaggccttcaagttgttctcgtgcaactagaagtcagttgctcgcaacccaaaaggaagaccaagaagaatcttatgcctcctttcaatttctggagttggaacaagcctccttggaattgctatcaatacaacacaaacaaatgagtaagataaagccaacatttattaaaattaaaactcaaaaccaagtttttgagaaaaggtaatacttacatatgatacaaaatgtagttgtgttgacgggggagagacatgatgtccaaaagaattcatcattgaattatttcttgttgggtagcctcaaaatgatcctttgatcatttgtgtgggtcttgagataataaaaaccacctgctccttgcttccttgcgggacaggccttcacgaagtagaaataaagaatttctagtggggttgggcactcccacttcacaatgtgatataaagctgttaaactgaccaatattctgtacgaatttggtaccagctggaaaggaacaataccaaggtagttacaaaactccttgaaatagtccttgagagggcgtactgctccagctcttatatgctcgaggccccaagtgcctatccgagatggctcgctagtgctacaaccttcttctcaaaccactcgttcaggaggaaagcaactaaactctgccacagagacggatctaactcggcatccttgttcatatttgatgccacacgattttaacacttcactaacataagatcctatggatttgactctagaattgatcaattcagcctcgaaggtgactgtagggtcttgaggggtctttgatttgcgcgatttctaagccataatttcaaaatctaagtcacctagtgaaaaagcaacagtgactggaggtaaaa

SEQ ID NO: 323109 - DNA, 622 bp, Cannabis indica
tactattattattattattaattcttttcagttttctaattgtttaatttattacgaaaaaaggctccttattcgtcaatgaaaatctgggttaacaaatataatatatgttcattctaaaaatatggagttaacttgtaaaaaaactctccttaaactttgtcactaaaatatcatgcctcctgtatttatatggatgttaaatatacattttaaattttagacaattatggaaagttagtattatgtaatattttgtcaattttcttagttatcttacaaatatgaaatagtattgtctaatttagttcttacctaagcaaatcgaaataaaattaaattcaagagaatgtatttgattttcactataaattagcttcatcatatttttcatttatttttttaaaaaatttaatcactttttttattttttagcccttataaatttgatatttgcacaagtgaaaaaatttaacagaaattttaatttttactaattaataaaattaagaagtattttgacaacgttaatattaacgtaaatggtagctctatttgcaacccataaaataataaatacactctattattaaaaaaaaatatatacttaatttttttaaaa

SEQ ID NO: 323110 - DNA, 1137 bp, Cannabis indica
tccccatccccatttagatggataatctctgcaccattataggtgagtacttgcgagcccggtcccggcttgaccctaaaaatacatagtcctaaggctagttaaattttaaggccctcacttttagaagtatatataaataatattggaaaagattgtcatgagatttaaacccacactattgtgtaatgtgtcatacactcatcacaacccaccaaactatgaatacttgttgtttataatacacttaattttacttaaataaaaacataatgagacttttcattttttattggggtttttacactacatactgaaattttcaacttttttacttttttattgtgaggcggaatttttttcaaaaataatgtggtttttttcaaaaattctatgtaagttttatactgtgtactgtattaaattttcactgttgtgtcacaattattttttagttgttatactgttattttaattattccgttttgttgttttatagttattttatataaaaaaatatttttgtaaaaaaaaattgtgtgattgtaaaattataaccttttgccaaaattcaatttttgtaaaaattcctttttattttgccctcggaaaagtatgggcgcatgcctagggccctagcctgcctatggctagggtcggctcgggcacggctccaactctatccccattagaaacatgtgcatccatcctatcatttctagtctctttccttcctaccaaacataacctaaagattataattttttttttttttattatatatatatagattaataaattgaaagggatataatttacagagattaattaggtgaaaaataataataataataaagaaaaaagaccaaaaattggtggtaggatcttagaagctcacaaccaaatccaataaccaaagtcaccaacccatcccttcagtcaatcttcatcaccatcatcatcatcatcatcatcttcaattcacgataacccaatttcaattctctatctttatctgtacaatttctgttttcccattttacccttctgatccttctaattccctgtaataccctcttcttcttcttccttcgactatggcggtctcccgtttactcctttctataacagttttta

SEQ ID NO: 323111 - DNA, 1277 bp, Cannabis indica
ccaatctctatcaatactcttgatcttttttaggcatttacccatctatccgaatctttagtgtccattttgttcttcaacatacggctcgggttaactcttgacttttgccaaatagcttcatttcgggctctccataaattgtacaccagtcctactacagcagcagcaagaacatcttcttgaactttgacagcttagatctcccaatcaacctaaagagatgctgaaggttgctggtttgagcatgacaatccaccaaattcttcacctcctgtagggactggccagccacactacattcgaaaataggtgctgacaagattcacatgcaattcacacaagctacaaataccatgaacttgaacaccaaaccgcagcagcccatcttgattcttcagcctattaagcattgccaaccaagctataacactatgtttaggagtgtttagccttgaccaagcttctttgcaccagtacagtcgggttgatgagggtaaaaacagtttgttacctgctgtaacactgtatttatgcttctgaaaaccagcagggtccaccaaagttctaagttgatatttgagggctaccatcttcttccaataccaactagagtgtatagaaggagagtagtcccaccaatcttggttcttaatatatacactatgaacgcacctaagccacaaactctcttgattatttgaaatagcccatatgtacttacagattgcagctttgttccacacttctaagttcttgatccctagccctccagcagccttgggttgacaaatgctactccaagctacagaccatgcagcctggaacatggcttgacctttcaacaaaaaagctctacagatggcttctatggacctcaatactttctttagaagaatcatcatttgactccagtaggcctgtatatagcaatgagaactgagttaataagagtgatcctccgagcaaaaagagagattcctaattctggcagtcattttctcaactaagatatcacattctttccttgagatcttttttcccacaaatttgaattcccagatacgtgaatggcatctcctgccttatgaaccctgaaatttgcacaatgtcggttcacttcacaaggctgcatgttactacagtatatggcagttttgctggcatttgggtataaaccagatgtgagggagaatgtttttagagcctgtagcatgaataggacactcatgaaatccccatgacaaaataataagactttgggttttatgccctaa

SEQ ID NO: 323112 - DNA, 1470 bp, Cannabis indica
gtcctagtttggggcccaattcttgggtctgggtcccccatctatattcaggtcctaggtcccggtccaggtccaagttcgtgttctggttccagttcgggtgttgactcccggtctaagaccacgtcacgtcttgggttcgggtcacagttcgggtcccagtcctagtgtgggtccaagtattgggtcccaggtctgagcctggttcttaggtccttggtccggccctagcttttgggtctgggtccgggtcctggtctgggtccaggtccgatcttggtttaggtcccaagtcataggtcccggtgtgggtccaagtctcgacatgggttctggtgtgagtttggctctggatcctggtctgggttcaggtccgggtataggtacagatttgggtccgagtactggattcaaacactgactacgggttaggtcgaaaccttaagtccagattcggattttggtcttgttctagttggactcccgatagtaaggtccttggttttgggtctagggtcgggtcccgtatcttgattctggggtcgagttttgggtctcactgccggttttgggacctagttttaggtccaactcccccatctatgtctggatccttggtctaggtttgggtctaggttcaggttttggggccaagttccccatctaggtacagatcataggtcccggtctaggtccagattcaggttcgggtttggatactgagttttggttcgagtctaggttctagtacgggtttgagtttgagtttgggtccaggtcctggtctgagtccaggtccttattcaggtcgaggtcggggtctcgatctggatcccagtcaaggtctaagtcctaaaccaggtttttgtctaggtttgggtccgggtttatgtccttagtctgggtcaaggttcgagtctggatccggttccgggtctgggtactaggttccaatctcagtgtgggtatgggtctgggcccgtgtcgaggttagggtttagggtttagggttttgagtttagtgtttagggatttagggattagggtttagggctttgggtttaggggtaagtgtaaagagtttaggatttagggtttaaggtttacggtttagggtagggtccgcttccagttccggttccaattttgtgtcacatggtacgatttaaggttcgggtgcgggtctgggtccgagtactggtttgggtctaggtttgtgtttgggttcaggtccaagtcctggtcccaaatccaaacgccaaccacatgtcgagtccagttcgaattcttgtcagaaaaaaaaatatttttttattatttatttattttcgaaattattaaattaaattaaattaatttaaaattaaataaaccctatatccaactatccaacttgttgaagatgtataagttttatattgtttgattgtaaaacaagttttataaaacctattattgcttgatctaaat

SEQ ID NO: 323113 - DNA, 541 bp, Cannabis indica
attctagaacacattatttgtcgctttggtatctagaaaatgattttctcagataacaacactccatttactggaaaagcaaccaagaaattcttggaagactatcaaatttttcatgggaagttaactaagtactacccacaaggaaatggcattgctgaggcgtttaataaattattattgcgggtcttaagtcgcatggagcataacagtcctacaatatggcagaggttatccgtttagctctatgggcctatcacacttcaaaacgagggtctatagggttcacaccattttctttgctttatggatcagaagcagtattacctgccgaaatagctgatgtgttggaaggtagtgtgaacagtttggttttcataaaaaatggttatgaaatagttagcttagtttttgtgaaaggttatgaaataagcatcttagttttcatggaaggttatgaaataagcagcctttgttttttttttttttttttttttttttttttttttattttttagtaacgtaacgttaacgaaataag

SEQ ID NO: 323114 - DNA, 677 bp, Cannabis indica
atattgtgtaatcttttcatttcttctacctttcttatatgtatataatatagtgtatatatatatattatatattatgtgttgtaatatttatttaatctctttgttggtcattgtattatattgcaatagagttgtaatatcttgatttccttttataaaatctctaaaaataatcacttattttatatcttttccatataatgtctaagtttcctaataaattgttttagagaaattattttatatactattttttaatttagcttttaaatttataatttgtgttgttttgctagtttatctatgtagtttttatgtaggttgttatgtgaattttagttgtgatttaagttacttgttaattactatgtaggttgctatataaatttttataaaaaaaaaaagagaaatttgcagcaaaattcttttatattttagttttatttacttataactctcttatttattttttttttgtggcaaagtacctctttaaatttacttttttcttgcaaatttaagttttaagatagatattaccgttaaataccaattaaattactactgtatatcgacttcgaggttttactgttacatgtacacaggtatatataatggtcatccagttgatatttaacggtaatatttaactggcgtgtcaaatttgaaaagaa

SEQ ID NO: 323115 - DNA, 3342 bp, Cannabis indica
ttttccctttgagtgaacccctatttataggaataggatggtggttactcaatcttatcttagtgaaaaggtacaattgatgggtagttattgcccacgtttcacatataactgaatatttggataagtataaataacttctttatatttaaaatataaaaagaggtctttaaagtagtatttgacttggttagatcatgttatttgaaggcaggtgcaccgttgctgtgtaatatgaggcaatacattgctgcatgtgtattacaaggtgattcatcactggtgtgtattatgaggtgattaatcactactgtgtattacgaggtgattcatcactactgtgtattacgaggtgattgatcactactgtgtattacgaggtgattcatcactgttgtgtattaggaggcgatttatcactgctgtgtattacgaggtgatttatcactgctgtgtattaggaggtgattcatcactgatgtgtataacgaggtcattcatcactgttgtgtattacgaggtcattcatcactgctgtgtattatgatgtgattcatcactgctgtgtattaggaggtgattcatcactggctttgtattaagagcagctacaagatctttgttgtgagatgttgaatatttatcgaataaaaacccgaaaaaactgaaatacctcacttaatgaactttgtgatccttatttagatgagatcacctcataggttgagtcgtcaaatttttttggacctgtccctcaatgtatttattgtgagaatttcttgtttatgccacgtggcattcaattcaacttattcattaaatagtccaaaaaatgggtataacaattacctcctaaattagttttttgtggtttatacaaagcttacttattataagttgccttcccattcttttttggcaccattacaagcagctcgtttgtgtttgtcatgatatatgcatgatagagtaggtgttacgacctgaagcatgtgagtatgtactacgaccaaatgcatgggagtctgtattatgaccagatgcatggaagtgtgtactacgaccagatgcatgggagtgtgtactacaactagatgcatgggagtgtgtactacgaccggatgcattgggagtatgtactatgaccagatacatagaagtgtgtactacgaccaaatgcataggagtctgtaatacgaccaaatgcatgggagtatgtactacgctcagatgcatgggagtatgtactatgaccagatgcagaggagtatgtactacgaccagatgcattgggagtgtgtactacgaccaaatgcatgggagtatgtacttcaaccagatgcatgggagtgtgtactgtgactaaaagcatgggagtatctactacgactagatgcatgggagtatgtattacgactagaaatattacgagtatatactacgaccaaatatgcttatttaaacttttaagtataatgagctcaaaatattacttaaacatgacgaataagcaattgtaatacatattctcatttaactttcctattttctaatttttttcttttatatgtaactagtttacctttcctgttctggaccaggtttattagatactagtttatgcatattttcaaagttttatgtgaaaagtttcatcataatatggtttttccatatctataacgaaattcaaagttattttctttttctggttgcgaccagtttagaagttttcttcttcaatccatgtctataataaaaattgaagttatcttctttttctggttgtgaccagattagaagttttacttcttcataagtactgtgagttgttctctatcgattatctccatttcttctatgagtaaacttattgggtcatctttaagcagattgagtcatctttatctatgagcacaattatctacgagcaaatttatctttgatcacaattatctacaagaaaaattatcatgattacaataatctatgagcatagtaatctacgagcatagttatctacgagcacagctatctacgactatatttatctgtgatcatagttacttatgagcatagttatactacgagcacagttatcgagcacagttatctacaagttagattttaatctataatcacagtttatctataatcacaggttatctacaagcacagttatctacaagcacaattatctacaagtagatttatctgtgatcatagtgatctacgagtatagttatctacgagtacaattatctatgagtagatttatttgtgatcatagttatctgtgagcatagacatctacaagtagatttatctgtgatcatagttatctacgagcacagttctctacgagtagatttatctatatatgatcatagttatctacgagcatagatatcataagcacagttatctacgagtagatttatatgggatcatagttatctacgagtagatttatctgtgatcatagttatctacgagtagatttatctgtgctcatagtcatctacgagcacaattatctacaagtagatttatctgtgatcctagttatctacgagtatagttatatacgaacacatttatctacgtgtagatttatctgtgatcgtagttatctacgagcacagttatctacaagtagattcgtctttgatcataattatctacgagcacagttatctacgagtagatttatctatgatcatagttatctacgtgtatattgtgtttggggctgtgaacaaataagattttttcctttcatcacttgatcacaatttggctttagaaattatatatataaatgctttgacaactacttgaatagacagtaagtgaacaacttaaacacttcgtattatttaggcaaataaaatatcttacacgttgacactatttaacatttctctcatacatataaatatatgtattcattctatatatatatatatgaatatacatacatatagtctttctctcatatatatatatgaatatatgtatatattttatttatgcccttttagtggctaaagacttatatatacttcacatatataattataatattatataaagtaggcaagaactttaaagttactttctgcatgctttgatgatgattactagaggaagattccactagactctcaattttaaccaatttcattgttgagattgtgaggatgatgaatctgactctcttcctcttaaatctcttgagacttcattctctcaatcaaaagaccaaactgttgacccaatttttttgtcaacttaatctaagaagattattaattgaagaataaattcaagaaaagaaga

SEQ ID NO: 323116 - DNA, 1298 bp, Cannabis indica
aacttttttcatggtcagaaaaaacagatctttgtctcaacgtttaaaatgcaaaccctcaaagcgaaaaggcttgttaatgtcagcagtagaaccagaacattcatcggtagtagtcatagcagatagaacgtcttaaaattgttgagtaaactgctagcaaaataaaagaggaacaatattaccgaatgaagaattctgggttgagtcgcggactatgtcgctctctttaagacgttcgcggcactacccaggagtgtgcaagcagtcaaaatttgtcggtcgtccctaggataaaacagcccagtcgaacataatatcggaactctattgcacgatagagtaccgtcgaaattaaacacccaaaaccgactactgctcgaaaatataaatatgtattatagtagtatataaatatatcgtataatttttcaaagtgaaaaaagatatttttcttccactgttcagtcgcattttataggcaatgcattgaaagtagtaacgggaagaaatatgttactagaagggaacgttagaacagatcgtgggaacgatgcacaaaatcaagaaacctttgtttacttcggctcggcacggcacggcacggtcagtcggacggacggcagcgacggcgcgagcgtgtgagtcctcacccatgcgcacaaaactgggtactccttggggcccaaacccatatctaaaacttgcactagttatacacttcaaatgaagtatttctatcccatgtgaactcttactcacacactttattttttgtaatatttcacaaggttccaacaggatggtataacaatgattgtgcaataggatttcaataatttagtattatttattattattattatttttggtgaaaatagaaaaagttcaagtgatactgtcgattatttttaggatttcaataatattgtttgatagtttttggatgcttccgatagtttagctgaactttggctctatttcgtttgtgttattttttattgaaattttgcaataaatatttttgatagttttgtgatatactatcaactatttttcgataagtttgctgactcaaaactaaatgaatacatcctcacaacaccatgattacccacaacgtctaaggggtctcggaggtcaccccaagatgacaattgacaccccctcatgttgggtctcgaaggtgtcacccccaagtattagcttctatccttgaaggtagttaacggccatgtcacactctcgggagaccctcatcgtcagtggctagtttaaatattcaaatcccacaaaaa

SEQ ID NO: 323117 - DNA, 430 bp, Cannabis indica
aaattccagtatttttgtaagtttcccatctattatggctattcaaactgatctaggaacttggtctatataatcataagaaattaataacttatgttgataaggaaatttgagaaaatagttgggtatacactctcactcaataaatgtttgggtcatggtaatgagtttgtctaataattcagtttttatggttggatcaaacgattggatgagagcaaatctaacctttttcttttaaataaagtcaaaagaaaaaaaaaacataataataataagctattattcttgattaaggttttttaattttgtctaatagtaagactatttgttggtattagggttatatatcggtcggtttgggcggtttatcttatatattttctaacccaatctaaagttcaggttgctaaaatttaagtgcaatccg

SEQ ID NO: 323118 - DNA, 1177 bp, Cannabis indica
aaaaaatttctaataagataaaaatgttaaaactaacatgttcctaatcttaaaattttaattaataaaatatatttcaaaaataacaaatttttaaaagaaaaacatggttagcgaatttggaaatttgaacaagattatttaaaaaaaatattttaatattaaagtaagatcattcaaatttaataaaaaatgtaatatttgatcttataattaaaataaataaactaatctaaaatttcaaaaataaccataaggctatttttgtgagaaatcatattttcaaaattcaaagcctactaatatctagaactaattttaattaattgaaaaaattcattttattcttacaattagatttttaactaaaaattcagattctacacaaaattctaccagaattggcttttgtttcagtgaaaaatgatttttgaatcaaaagatatgaagaaaataaaattagtgcacaggggtatgcattgcgcgcgcggaatggggtgtttggccgagtatcaaggctgcatacaacgtacttgaccgagggagcttggcatgatacgaattcagacatcccatgtccgagtttcctcggtcaagctgtctgaaatcgcgtggaaatgtcggcgtttccctaggtgcgcgcgcgtgtatgtgcatcaacttgagatattttcattcaaattcaaaaaatcataactaattcataaaaatctaattaggttctgtaaaagcctaaatttcttaatttttcgtctactttctggtaaaaaaattccagatcgaaataaaaactatttctacaacatacattgcgatttctaaactatcaccaaataagcacataaaccacgcccattgaagcggtacgtgagctgggttcaaaatgtcatgagacagttcagtccatatccggtgtggtcgttagagcattgagagaacctttccctagtaagagaggaccaggaaggacgcacctctagtgtaccaattatcgtgcacacggtaaacgctgggtagccaagtgtggagcggataattgctgaaagcatctaagtagtaagcccaccgcaagatgagtgctctcctattccgacttccccagagtcttcagtaggacagccaagacagcaatgggttttctgcccctgcgggggtggagcgacagaagttttgagaa

SEQ ID NO: 323119 - DNA, 963 bp, Cannabis indica
accaatctactgagatggtgttggacagatctctgcgtcaacagagaaaactatataaaaacatagatgaacatgaaagatacacagcataatagaaaattggattaaagctatgaggaaaaatttttatatttcttaattaattaagttattattatgctcaaagtatatgttatttgttacatcatgctatgaacacattttttattttttatataggtgtttattaatatattataataatttgtggaagtttaatttccaatcgtaatattttttttctttaaatggctataatttttaatattttttaaagatattaaatatagattttgaagatcagtttttactcttagtaattttttattggtatgcacgtcataaacacactatttacttagagttaaatataatacatcaactctattcgatgcaagatacactttggagttcttatatggctcaaatcgacaatgcatagagttgatgtggatgtctcgtgatgcatttatttttttgtgcaatcactttagatagagagaatgaagtaaatataataagcatgtatctgttgaagaaaagatagcaacttttttaaccatatatcatagcacataatgagcaatttattgtcatgatgagaagttgcaacactcttcacaaactgttcacaagtatttttatgaggttcttgaagcaatgatgcgttttgtaaaagagataataatactcacaattgatcttgattccaatattccaatcactcaaaaaaaatattagaaattttttaaggcactgtattttctcataatggtaaatacaatggtttgagatgatatttacacaataattttagtgcagggacaatcggtgatgcacttgatagaacactagtacatgttgtaatcccattgataaacaaactgcttataaagaagaggaactggtaattgctatcaaaat

SEQ ID NO: 323120 - DNA, 721 bp, Cannabis indica
aaataaaaaaaatatatttaaaaaaaactgaaaataattaaacttaaaaataaatttagtttgagggtataaattgaaaatgataaaccttaattggaaactctaattctctttcttccttactcgacacccaccctctctctcctctctctacgtttgtgcggcggccactggaacgacgggaccaccgtgatccgatcacccacgccccgataggaccacacatcatcgtccgtaggcccaaaaaaccccaggggcacacggctcgagatcacggggttaactcgagcttgacacgacgagagagaaagggtttgagagcaagagagggattagggaacacgagttcctgggatttcgtggctcgtggaggtcagtcatggcctccgtttaggccttcgccgaacgagggtggctccaccgagaaaatcaagagagacagagagaaatagagttccagcgagggtgaaactggcgagaaggggagatagatatcagagtttctgagtttttctgagggctgcaagaatggaggtgtggtccgtttagaccatcggccccggcagagggttgtctttggtttggctgtcataggtagaagagagggagaaagagatgagttagggttttcaaattagggttttctattttttttttgaaagaattagggtttcttattaaatttctgatgtaatttttttttttaaaaaaaaaaggagta

SEQ ID NO: 323121 - DNA, 1760 bp, Cannabis indica
tttgtttcggtattcaagatagtttttaaatttaataattttcattatgtacacgttattatagttatttaagataagctgtaaatttttttaaaaaatttaaattattttcaatgctaaaaaaaaattcaaacaattgtcattatttattaaaaactttaacaaatttgattatagattaccatcacttcaaatgtgtcgtaaatacaatggagttttgagagtcacctgtcttagtaacactttttgatcggacacaaaaatcatttcgtggctctttgaaaatgaagcaaaatatcttcttcttcttcttcgatcttcttcttcttttctgatgaatcagctgatgattgtattgcatttcaatatctttacaattcaagcacccatatcattatagatattttggccccgtttggctaaatttctattagctaaaagtataagataagtataaactttatcttatttttaccttggataactattatatgaaaatatttttttttgacaaaaagtacttttcaaagtgtttgggtattatcaaaaatatcttttgtgagtaaattaagaattatataaattattttaatttttaaaatagcttctcaaaagtccttttcggagaaactacaaatcctgccttcttccaataggacttttaaattaaaaaaaaaaaaagactttttcattttttatccaaacacctatgaaaggacttttttaattctaaaagctaaaaaaaaacttataaaagttaagccaaccatggctaattcccttctacatatgtgtctttaaaaatgctcaaaacactctaaatctttagagctaacttttctcgataacacaacaataatcctatttttgacatccactttgattttgttaatcaaagaagggatggtttgaatctttaaggaccaaaatacctcattccttttcctccataactgatataccatagctaccacaaatgtagcaagtacctgcctttgaaacttggactgttttgaccaagatttgcatctcaaaattataatcttcatcagtacactattcaccttccagtccaactatattttattctcatcaaaacatctcctactataatataacattaaaaaaaataagtgtcaaacaatttatgtatgcatgtcacacaccacacaatttgattcttgacatattttgcatttcaataatctctcattagtttacaatctacttaaaattgtaagccaaagataaaacaatgctttggaactgataaatgactccaaacatgcttgcgccaatgaaccttttcttgggaaggattaagagccaagtaatcttggctgattgtgtatgattgtgtacctgtaagagaaaaattgttgcatatttacaactttgcttatcttgtcctttgtcacttgtctccaataatagctttgttgggcagtggattgtaactccaccaatcttccctttgagatatacactatggacccacttgacccataagttatcttattttgtagctactgccccacacattttgcccaatgactaatgactcaatcccgatggggctgtaaggaaatagagttatatttttcgaacattggagattttttgggtaggtccgggatgaggtcagaccctccgtgtgacagccagtagtcccatgatccgtaaggggaaacaccgggtaagctgtgcaataccacaccgcctggggaaggtcaagtgggatgattctgagactgtgtagg

SEQ ID NO: 323122 - DNA, 915 bp, Cannabis indica
tttgtgaaattaaccctataaattagtcgtacatgtatttagagtggataatgaattagtttaaatagtaggtttttttgtcattcttgtatgatgtagtaatagtatgctcatctacggtaaaagttaattaatttattgttaaaaaaaaaaaaaaatacgaccaaaattttgactaccaaatctaacactttatgttcttgccaaaacattagcaacttaactaaactttccttttttttagaaaaataattaatttaattaaaaaggcaaagaaccaaagagattttattcagtcaaaaaatcattttcaaattagttatactaataaaaaaaatgtggaaaaattgaatgatactattttgtacaatttttgaaaatatagtgtccaatttataatttaaaaggtttaaccctcataataataagtatcaccatttatttactccacaatttacttaattatagcaattaacgtaaataaaaaaatttagaaaaatgctaaaaagtatttgtggttagggttgattctttgctaatttggatcttaggtaaaaataaaaataagagtaaaaaaaagtgagattattaagatttgaactctcaactttttagtggttaaactaatcaaattatcactaagttgcaacacatatttaatagggatattggcggctaaaccacccgaactttacggtttgtaacacttaaccacaaaaactgattttttggcggctaaactacctaaactcccattccgttttgccctgtacacctccgtccaaaaatctcagttaagtgccacggtggactgtccacgtgtacacacttgtacacgtggcaaatttttagtggtccacgtaatattactaattaaaatattataaaaaaataatttaaaaaattataaaataa

SEQ ID NO: 323123 - DNA, 1237 bp, Cannabis indica
taagggaaaagaaatattacagcttaaccataatttttgatttatatacatacacatgtttattataattatttagaatatcattccctttttttaaaaaatttaaattatatttaagatgtaaaatgggaattaaaaagtaatttaaaatttctctttttagttattttaattcttgaagatttttgagacatgccatatctggattctgtacaattattatggttaaaagatgtataaaatgtactctcaatagttgcccaatatctaatatgacttggactagaccccggttccaaggttgacatgtcactaggccttgtgccctaggatgacatgtaacttggttcgcatatggtttagctcttcaaatacaaatttttctcaggatattcttcttaaaattttcaaaaaggggtaggagacctcgttcgcaatcttgaagcatagaagtattaggaaggtgcctagaaagcacccaacgcccaagttgaaacctggatttttgtgctagattctacttattagaattcaattctgttttgagcattcaattatttttttttgtagtaaaaaagaccttcaaccttttatagatcaaattcacactttgatgtttcaccctttcaatacggtgggatatctacaaaatcagggagtttcgagtcttctcgatctcacaaaaaaaccacatctttgagaactggtgaacaacttcacaagaacactaaatatgaacaagtgatgtcaacacattacttaggcatcaaaaaatacaagtctagcatattttagcactcactgggtgtccaggttgatgttaaaacgtcaaccttgatgttgggtgtaaacctgggtgctgggttattaacatggtcgcatggtgttgcaatcttcagtaaaataaccttaactcactcaatatcgattcgattgatgcgattcaacgtgtttttcaaagctattttaatgatctatcaagtcatgtctcatatccacataaaaattctataaactttgagtgaaaaattcgtcctaaataaagttacaatttttcttgcaaataacctgaaaaggatccgagtgacgagattcaaagtccaaaaactaacgatattcagcaagattaaattttcaccattggatcattatcaatcatcatcaattgctaacatcatcccgaactaaattttttatattttttgtattttttaattattatttaataggacctcct

SEQ ID NO: 323124 - DNA, 2202 bp, Cannabis indica
aaaaaaaaatctaatttttagtattaattttttagttataatataattttttgtgactaaatataacttttagtatcaacaaaaaattacttgtgactaaaatataatatttaaatactaatttgtcactaatttaatttaaacacaacaagtattaactaaaacacatttatatagttacaacaaattatggtttttttatttataattttaatcattacaacataagaatgagatttattataagtcacaatatttttacttttaatcataattaagttatgttgtcactaaaaggaaaaaaaaattataatgtcttgtcacttttttttagtttttttttcttttacaagagtgtactagggtaggatttgtcaagtgaatgatgaaagaattccgctctttttttattactttattatcaaataattttatgacggttacaatactattggtaaattaatgtttatttttttttttttttgtagcaggtaaaatgtttactttgaaaacaaagacattaggtatatatttacatccaaaaacacatatttggtaaaattacaatattttttaaactatttaatatattttttaacctatattattttactttttgaatatatatttgacgtacgtatagctatatatgtatacatgacgatataatgtcaaagcaatttcatgaaactggtccctatatcggttatatatatagcaatgtgttcaaatcaaattgagacgtacacagagcaagttggtatgtatataacgatcgataatcttaggtatcacatgcatgatgttgattttttgatgatctgtttcagattttgaatatatagataatatttctatacgtataaatttgctaaataaatataaaatgatgatcacatatatataaccttgactgtacatataatatcaaactcaaaaagctactcacatatacatatattttaaagattttaaagatttggtgttgttccaattaattttagactaaagcataaatatttaaatttaactataatatttaattaagttatatttttaaaaaatttgtaagtattaattgtccattaaaatgtaaagttattaattatatattatctatatatatcattttcttattagtatatttaaactaattttttaaaaacaaaattaatgacatgataccaattaatatcaaggtaatttacttaacacttaaccgtcagtacctaataaaaaagttcttgaaaaccactaaaaattaaacttaaatatttatggcacaaatattactctctaatttatgtatacatttataaatgcacatatattattgtgaaacccgtgatggttattatataaatttcttaaaaaataaaataaaaaaggtggtggccatgctagtcaggcgggttttgatcagataagatttgtgtgacaattatgtatgtgattatcgtgaattatattattattttaaacttttaattaggaactaattttaattcgttaattaattagccacgtgagttttcacggccaaaagctatatatattatattaaattaattaaatatatgttaattattagtcttaacaagataacttattaactagtaaatactagaaacacaaatcatactaattaaatactttcgccaaatattttatcagttaaatcaattaatgaacaaatttatgattatttcccttcaaatatttaaatttaatttattatattaataaatttagataaatactttttatgagtcttttaaaattaaattaattagattttatatatttaacaaacatgatagaaaattaattcttttttttttattattatttaaaattaataattaaataatagcaacatcacccaatgtaaatatatataatgcatagttaaataaggtttcgaccatagcaaagctggtaagattttcaaatgttgtagcttataaatccaaagctgcaaaattcttggtcttctctctatatgcgttatcacatgatccaaaagtatctataatcatcagaaatcaaaacattttctaatcagtctagaagaatttttacacgttaccattagataaaaattggtgacagatatcttcttctcagcaccggaggtaaggttcattctgacattcttttatcttgttctctctttaataagattagagttaagttctcttt

SEQ ID NO: 323125 - DNA, 727 bp, Cannabis indica
atttgtaaagggtgttatactattagttatgtttttaaaaattaattagagtgtcaaaaatgatatggaagaaataatatactatatttttaaatgatgtggagatttttcgtacctttaaaaaatatactatgtttttatgtgtcaagtaattttaattaattatatttatttaaaatgagtcatatttatcaaaaataacttactacataagttaatttatgtgtaatttatttgtgtacatattattatttttaatagtgttgtgttgtgcttctttctcacaattaattcctatcactatttcaaatggctcattcatataataaatgttgaatctgaaatgatttatacttgctttatgatttaggttgagattgcggttatgcaatattaggaatattaaatgtataatgttgatcttttgggtctatacctaagttttttcctcttattgttctattttcaaataataataataataattaaatttattaatatctagttatagaatataatatgaatgagatgtgatccccacattcatcaacaattaattttaaaatattatatttaaggtgaataaaaagttagttgactcatataaataatgatttttagagcaaaaaatgcacaaagcatatcaagaggataatacaatataaaaatagagtaatttgtaatatatatactttagtttaattttcagttataaataaatatttaa

SEQ ID NO: 323126 - DNA, 750 bp, Cannabis indica
gctgactttccttttatttattttttttataattataattaaatgtgtaaaattaataaaatatttgggatatataaagaaggttataaaccctagtcttcttcaacacacaaattgaatcccttatctttctctcactcttctttgtgcggcagccatgactagctctggagaaacccagaaaaatccatgcatgtttacctccgactgtcaaggaacccaaaccccaatggaaaatgcctgatctcctctccctctctctctctccctctcgagcctattctctctccttgatctcctatatttttctttcgtatttctctctcctcgatgaaaaagagccacaagacagtttcgccagtccgccactccctcgacctctctcatctctattacgcgagctccgcgccatctcatctcaaactttcatctctctcttcgatggaaaagggacacaactccacctctcccactgcctctcttatcattgttgcgtgagctccacaccacaacatcttggatgatagtgtgagcttcggacggcgtaggtttgagtttggcattgaatagttgttcaaaatttttgtatttattttattcaaagacttaaagattttagttttgattgaaatgtatgtttgcactctttttattttactattggagatttattttttcgtctgcatagatttattttttggctgtatagatttttgattaacttttacacaaattgttgtaaatttgtat

SEQ ID NO: 323127 - DNA, 1254 bp, Cannabis indica
ataatatataatatattatataaagttagaaacttaacttttgtattttagatttgaaattaatgtctttttttttttttttattctaatctaacgaatatagattatggtattataagtttataacttatctgcttaatttaatatatagaaaaatcacataaaatttgattttttttaaaaaaaattaacgagttgatcgggtcaccccgttgacccacccaacccggtcaacccaaacccccatacccgcaaacctgaaacctgcaaactcgaatcatttcatgggtcgggtccagcgtccaagtacaatttttttaactcaaaatctacaaacccaaaactcgatcaactcgcccgatgttcatccctactcgtaataattgataatagggcttcatctttattttgaggcagctgaagcagttgcctaagacccctcagttcaacaggcctctcattcttctctttttcttttaagaatctttttcaacatcaatccatttagaccttaattttttttactagaaaaaatgtttaaaaatttacttgaattttattttatttttcaaattaagggctgattttttataatttaccccaagtttcataaaaacaaaagctatcgaatgtatagtttttgcatgttgtccactagttagaaagagctaagtgagtgtggggtaatatatcgacatttttttgtactttaatatttaatgtgcaataatatatttaaatttaaattttacttctttttttcttttatcctttttaacagattttttttttatttaagcgtttgtatattacacaatgtataacttgagattcgaactcaggacctccacaacacatgcactctcctatagcctactagcctcaagtggttctttttcaacagttcacatatttgtgacaagaaaattaaatgagaaacttattttatgggtcacaattatggccacacaaattggaggccaagaaaccaagactttttacttattttggaccatcttatactccaattcctcacataagtgttatactaattaaactatgtgtttgaaagtaagagtataatttaaggttgtacttaaatttttgtaaaccccgcctaactcgaacaacatgtttaaattaaatcgagataatttgacgaaaaaatgcaaactgaaaaatccaacaaaaatataatctgtctaatttttatattgggcgagttaaaaataatatcaacccgcctaatcaacc

SEQ ID NO: 323128 - DNA, 1757 bp, Cannabis indica
tcgtcattgaaatgcttcttgcattgccttataaacaatgggatttctttctcagagaagaagccatgccatgcatggctagggttcaattgaacacatgccatggatgggtcgactctaattttcacacctaagagaagtgcaaaacaaaaaatggtagagccatttcagttctttttgaatcaaaattgatccaatttcaattccaataaatatgtttatgcaatattataaccaactaatgtttcaataaatataaaaaaacatatatacacacatagacaatatatataacaatgaaacattcatataaacaatcacatcaaatacgtacaaccaaaacatgtaaaaaattatttttaaacatattaagtcgtgaaaattaaatggtaccaaggctctgatgctagttgttggaacttattttaccaggatcttatttactaaacatgtatgttgattataacattatgatttaacatcctaaagatgtaaaacataaacaattaatttaaaaatgtaaaagattagatttgatacattggattgcagcagaatatagtttttccttccattcaaacactctaacatttgatttctttctgtagcaaggtattatcaagtgtagaaccaggatctctttaatctctgaatttgaatatgaatgtgaaattgagaataccataatcttccacaatttcttgagtatcaaattgaaagtgtgggctaagctaaagacacaaaggtttgatctcttggttgtatggggttgaaaccaaagagagagagagagaggtcttgtggctgaaacttagagagagaaagggagaactttgttgctttgttgcttgtgtagacaactctctcttctcttccattaaatagtcgaagacttaagtttttgtttcactttgctaataaaacttttattaattttattaaataaataaattaaaaacaaattgggcctagataccctagtctaggccaccgccccttatagttgttgggcgaagttggatttttgccattgattttatatcataccatgattaaaaataaatttgactttcacaaatttatctattatcttaattaaacttatttaaatactaattttgatttaataattatgaataatattcaaatataatgtagtgtaaatatatttattaattaaaatcacaaagcttcataattaataaataaaagcttatctctcgtttattctcaattaaatataacatcagaccttatagtaaattcactaaacatgacatagacaatttatgaattttaattgattaacaaaatcaattacttgagttcttcaagatgatgttatctcaggtattgtggggatcattggcttgtataatcaagctcccaataagttgatctaaaatttacccacgtaaatttcctaacttattaatttctcatgattctactacagtttcatcattacactcttaattatatagaacgctctatatcctccaacttataaatgttatgaattatccattatttcaatcaaattaatcattgatcttttatagacggtctacatcaagtagggtcaaaattatcattttacccttcaatgtattttatccttttaacacttagctacttgtaaatgataagataatttcaaatgagtatcagcaatacataactccgacagtgaagtcagttcagatagctttcaaacatcctcaatcaacaaacgtaaccacccagttgatggttgt

SEQ ID NO: 323129 - DNA, 1375 bp, Cannabis indica
agctcttgggagagagctgggtctctcgaatacccagcaaacttgttctctttgtcactctaatatcaatatactagctatttcctattgttgctactgtttggctctattttcttttattttgcttatgtttgtaccaaaatgataggaaattcctatcaaatggtatcagagcatgatcttgtgacctccgttacggtgccaagactaccgctctttaatggagatgacccgtatggctgggttcttcgcatagaagaatatttccaagcttatcagaccccagaaagcaagaaggttgctgtggctcaagcatgtttagaggatgttgcttggagatggtttcaagcagtggaggagcaagatccaatcaaaaattggttggaattccgcatcacgttattcaattgttgctcaaaaattgataacgatccgttcgacgaattgatggctctccgatatgataactcggtgttggagttttggattcggttcattccggtggcagcaaaattgtcggatatccccgaaactttcctctgtgatatatttattgggaatctgccggtggaggtgaagaggaaggtgcgtgaatataagctgagaacactccctgaagtcatagccagagcattcttcgttgaaggacaactgaggtttcaatatcagagtagcacactgaaggagttgaagagtgggaacgatctaattgtcgaacaaccatcaaaaattctgaagaaatgcttggggtcgatggtgaagatggagatgaagacgatattgtacggcgaggcaatgaacattccgttgatcatcttattcctccaacgaaaatggtggaaatcaaagcatcaaagcatgattttcaatcggagttgctgtctgaaaaagaagtggagaatagtttaagccacgcaacatcggagataaagattgatctaccgatgcttgagacggtgccagcgctggacagggaggagtcgatctttccagttacaaggaaaatctcatctggggttgatcgacaaaacaccagcacaagggaagcgataccgacgtcgaatgaccaccagcgtgaggagacgtcgaaggagcgggtgttgcccatcgtggaaagagagcagccgctgccttccctgtacgaacagcaagtcgtgtatgggaagaagattgcggatcagagaagtcacaatattatgttattatttcatttgctcttgcaacctgaccaggaggggcccaaaccattgagtcacttcatagatcaggcccacttaaccaaaagcccaaaattataatcaggtttatgggccagccctttgggatcctggaaaaatccgatcgggtcacgttgttttggcctagagaaaggcag

SEQ ID NO: 323130 - DNA, 964 bp, Cannabis indica
tggtctgtagggtcagtcatcaatccatgaagcagccagagtaacttactcgtgtataagagccattcattaaatgtatgatttaattaaaactttactaattaatttaaaatataaaattcatggcattacaaacttttagattcggggatcccatttaaaatttttacaaaaagatttccacactatattatatcaaaatacacagtgtaatctaaaagtgctataaaatcaaatcccgacaatttagcactgttagttggatgagtcgatatgtatattttttgggaaagacctctaactcatggctgccctaacttgtcatttctcttacttgcaccataaaatacctgtaagtcacatagacttagcaagaaaaacaaaaacacaaacattcataacaatatgtagatataatcaaatatacacaactaaacataagcaggtaatcacatgctttatcccataagcaggaaatcgtactaagaatacaatccatcattacaacctttattgaagagaatgaccagatcgtagatgattatccaagagtaatcactcattttctctctcacttcaagggttttatggggtcttcaagtgttactacagaagctatactgccacaaattattagagaagggccttttctttccttagatcttcaaatcaatctcatcaggcctttcactcaacaagatgtgaagaaagctctattctctattccttacttaaagagtccagggtcggatggttttgggtcaaaattctacaagagtgcgtagaaagaattgggaaatgaaatcttctctgttgttattcagttttttcaaagggaaattttatttacaccccaaaaatttctaagtacaccccattttattaatttttatttaatataaaatttatatttttaattttactaagtattttttaaattttttctttcaatttatattcttaa

SEQ ID NO: 323131 - DNA, 1832 bp, Cannabis indica
taagtcaccaccttcacctgttcaagctttgttgggaggcatatcagctggtgttattgctcttattctttacaaattcactacaactattgaggctgctcttaatagacaaacactttcagataatttctcggtacaaccttctttccctgcacaattttactaggaaaattcagtcaaatatgtagttttgtttaggttattgtatacaatgtttgatgactaatctaaggccattgtacaatcctgtccattcatgtttatttcattatgaaatagtgaactttgtgaccttcaaatcaatcatgataaagatgtatgagttttcatactgaaaccaatcgacaatgatgtatcttatatatggtactaagatataggtgtgaaagtgaggttgagaatgtagaataaggtaagttatatggggtttcatgtcaaaatcaattggcaacgagtggagtcgcatatgcattttatgtatgatcttaaatttccacttattatcaaatcaatgtgagactgtctaataatcactagatttaacaattacatatgtagatgatatgcaagaatttcttgtttttctaaatgagtggttaaagatttaaagttgctacctttaccattcattgttgtcacttgctagtgtaatggtgttaagtgaaatatctcatctgctgttaagttactgattagatttctctcaaagaagagtaatttgtgatgtgataatggaagtgctatagcatttgatttgtatgacataaaattcacacaagtttcttacaatttatgtaaagttcttctaacacacaactagtctcccaatttcaggttcaacagattactataaccataaggtattcctcttttgattatttctatctacattccttgctgttttttctattttgcttcatcttttcatttttcattttgcaggactatcataaatggtttgtgctaccttgcaacatttgttttcggtatcaactcagtcggcttagttctttatgctggtcagctagccatcaactccttcatggaagaagaatccacaaataatgaaaccgagaacaagggtgagaatcggtcaacttcgctgagttcaacagccgagactcctacaaacactggcgacagcaacgaagggagtcaaacttcagatgactcgcaataacagaacataaaatccaaaagcttccttctttaattccatgctgactcagtcctccatgttgtaactaatttacacatgatggtgtattatatttgtatagctaagttattcatgaggtttttcttaagattggtaaattttctgccaagaagttttgtcaaaagattatctaggaaaaaaatagcccttgttgtttaagatgaaaattcatgcttgtttaaagctacttttatgttcactaagttcataactttaggtttaattgcaattagggtgaaactacataaacaaattcaagaaatatgtgcactaaattaagcaagaaataaattaagataatccttgtatgttttgaaaagttattaggacatatgatcattatttttagaatgtttggaaataactagaggagtaataacaccctatacaagatgaatttttatttttggtaaacaagttgataataacataaaaataatattatataataattaattttaaaaatggtcatatttcttaatacatcgtattgtttgtgggggagatatttttgggtaaaagtaagacttagacacaaacaaatggattatttacaccacatactaaaaatgttaactatttttatttttttactgtggggcggaattttttt

SEQ ID NO: 323132 - DNA, 1842 bp, Cannabis indica
attggggtccacaaataaattaattcacaaataataataaaataataaaaattagcgctaattgccttttctaatgcacattactagagcggtcattacacaagaatttttcgtctctttttcagtacattctgcccctatttatagtaacatagggtggcaattcatcataatcagatacgaatcccaaataatatttcccgaaaattgtgaactttatttacaaaccacataaattaatacggttattaattaaaaattttacggttatgatttatccgcttttactgggtcaatgttgatgtggattcagatgcattgtaaagtgcatctcgctggggcatcttattggggacttgaatagcaacactaaccctgacagcaagctggaccttctctcatgtctttctgaggttgataatgtagatctcgtcatttctgcgattgaagacataacgctccatctgataatcacagttcttggtgacaaggtgaacttcagtagtcaacatcatttgaatgtcagcttctatctgagagagctgactcgacagagcagtggatctcattgaaagatgtctaaagctgattagtgaaggtaccatgagtatgcctttctatagcgagatagatgcctcgctatccgtcatttaggttcttcaagttgtgatacttagttagtacaatgtatattatacgctaaatgttctaacaatccacatgtattgtcatcacatttcatacatagcaaggttgatgccttgctatgcattactgatgtcatccttacgattgtgtcttctgacacgaaattgtttctcatcaatgcgtgaatcaatagttcgtacatcctcgtctcgattaagactttacagtcagtgagttatagatatgctctatcaatctccaaatttaatgagttattctattttaatatccttaaatataattgtcattatattccttgattcgtattctccaagattgacacgtgtcatcctctgaaaaagtataacaattgcccctttaaaagtttttttttcaagaaaaagtactttttaaatgattacagagggtatttttgccataatctattttgaaaaaatgcatgtcctctaattttggtgattttatggtttcgaggtgcatcagcatttaataaccatctttttcacttccttttcaaaatttcatccgttggagaaattgtcaccttaatctgacggagatcaacccaagagtataaaatgaaaaaaggaaccacctttcattacctttgccaattcaaaaattttgaaaatttttcgagcttttctgcaaaaaactatacccagattatttcgaaaccttgcatgccagctttgtctttgacattcttcttgcgagtttcgtctgatttgatttttgaccttaagcattcagagggatcatcacgctgttcgttgtttcgttgattgtaggaccattcatcgttccaaaaatcgactttcaaacagtaagtgatttctctctttatctttttacacgcttttaattttacgtttctgggtttgatcactagtttcttagttagcacctttgtcgcctcatttggtattatcaattttagggttgaattgtatctgggtaaattttaatgtttaggcagaacgtaggtttttgggtctctcaaatttaccaacttctagtttgataaacttcttcccggaattgggattgctttctctttgcagtaatgtcccaatcttgttcagaagtttatcgtccagaatatttagaaatagagtgtcccactgaacttgccatcccatataaacccagaattttagaacccaaatccaa

SEQ ID NO: 323133 - DNA, 1103 bp, Cannabis indica
tttgtctgttggtaatataaacgatgatggtccccaatttgtatcgtatcttttcactcttgtatctccatcaccaagagaaaagtttcagagaaaatttttgatgcaaattggaagatcaaaccattaaagatcgattctatggacaccggtacgcttcctctattctttaatcttattgtttgattctcatgaattaattagggctaaattaagttttacaatgttcttaacattctctgctcctgaatagtgagatgagtttactatttatgggatcaattacctgaaattaattttcctaaatcaataataaattaaataaaaaactaatttatttctataattacaataaataaattaggaaactgaggcaggttttcttttttctctgatgatacgaatctattccatgaatgtagagatcgtgtcgtgacttgcaagcttagagatatataagatttatctctaaaattaccaactcacatcctggtcggtgcatgcaagctacctgcttgatagaagctagtaggatgtctatacaatgatctgtctggacatctcatcttttatttacgactttcagtattataactttctgtgtggctcatttggagtagtattactcgtacaaacagttatgatacttgaagtcgtaaatagaagatgggatgtccggacaaatcatgtatagacatctgaccatcttgctgcaaaatgactcacagtcgttggctaaaagtgagatcaacagtgtttatatttttatttttgttttggtagtattgaagaactgcatatgagatttagatctggtttttgcaaagttgaaatattttttttaatttttttaatcgtttgtgatctctatgaaaatgatacaaaaaatgtaaaaataggtttaaaaactcattttcaccaattctcaactgacgcaatagtttgttattgtcatttgaaaatagacgaaaaagaacttttttgcatcaaaaaataatatgttgcttggcaactgtagaaaatagtgagtcgaattgtgtgttgatttcatagaataatacatatttatatacaaagttaggagactaaatatctactaaata

SEQ ID NO: 323134 - DNA, 1470 bp, Cannabis indica
ctagtttgcaacatggtaaaatgagatctctttacatcagcgatacctttgaattaagtaagaaggattttccatgccttatttttagatacacaataagatatcaatttaataaaacattcacaactaccattaaaatagcatgcaatgctttattattaaaaccaaaaaaatttacatgttcagtagtccacttaagtttaggctttacctcaaaattacctttatcatccactgcagtatgtggtgacaaacatgcaagtatagctctccaagctttatcacttgtgaatttaatgaatgttatcaatctaacctgtcaatattaataatttgtgtcattcaagatgggtgctcaagtaatggagcttttttctacaaaaaatgacatcttaaaaaaattaactaaataaaataatctcgatatctcactaggagagtgacttgctctaataccaaattaaatttcaaattatataatcatcaaattattatttaattaatcaattaattaaatgttgaataataaagtcagtacaaaaataggtaatttgtagctataaaacattattctgtaactactgaatagaaaaaccagtaaagaataaaagtgttgaaaaacaaaaatacacaaggtttctatacgtggtatcaacaatccatgaagattcttactagtccacggggccatgcccagggataagaatcattagatagatttaaaaaatacaaagtaattgagttatgcataaacactccctctaattatatgccccaagcttgatgtattcaaccttctcaaatgaattatctttctaaaatttcaagtgctcgaactccattcgatctacttaaagagtcttacttcctctcaaggcaagacttgaacaactttctctcgaaagcttgaagaaccttctcttgaaggttagcacttttgttcttcttttctgttgacttgattacaaactcaaaacaacaacaaagacatgtacaaggtagagtccaacttactctcctctacgaaacaaatacactcttcctattaaatatgaattaaaatacaaagagacgaaagagatacaaaaattagcagtcaatatgagtatttgtagatgatataatcatattagataactcaaacatggactagacacacccataactcataggaaattttcttaaaataaatcttcaatcaacctaaaaatttattctgtacctataaaattgtgagcaatacgtggaactttctttttatagaaaaggaaaatattatttcaattttcttcacaaaagatgtgatcaaactatagaaattagtatatgatcaaaatacaataaaaaaacggctggaaagataaggaattggttttttcattaaaacttacaaattgtgttcaacttttctatattagattgacacttaattcacttttaatgaaataaataaataaaagatataaacga

SEQ ID NO: 323135 - DNA, 974 bp, Cannabis indica
tctgtcattcacttcaagaaaaggatagcaattaggcattaacgattggtaaactgacaacaggattcttctccctattttctcatcttgattaatattcttttgttattttaagtttctgaattattttattgaattcataaaaagtattgattttccagatagaattataagtataatttagtggtagttaatccaatttcgtgtggttcgacctcacctgtgtgagtttactacttgattgcgtatacttgcgtagtgttcttaattttcgtaacacttattttctttaatctttcaatatactcacaagtatgtgggtcaatgagttgcaagttcttaaagaacttattatctaccttttccagcgatacaattcgatctgttacatccaagaagacttctactgttatcatctcgccatgcgttacttgtctcgctgtcttactgcaaatgcgcaatgcgagattgatactgctcgtgatcaattatctctccgagataattcatttattgctgaattttttcgtgttgtgtctatatttatagttcgaaatatgagcataacaaaaactaacaaggacatagcataatagtgggagtatttcgctcatctcctttgtaaatattatataataaactttacattccaacacacttttcactaataatttacctaattactattttttaaacatttaattacatcgttaaatatacaattctgtaaataattttatttataatgtttttttcaaaaaaatatattatttgtaaacaatgtgggacttgtttatcgtcttttcacttgtaaggtttctaattctaagcttgtgtggaaatatacaaacttatgtgattaactcaaccctttattaaattctataattacttcttttggtgattttttttgtatgcattttttccaattatctcatagtctttttatttatttatttttatttttacatatg

SEQ ID NO: 323136 - DNA, 1278 bp, Cannabis indica
tttagaagttcatatttaggatttttaaacaacatacttgttagtaaatctaagatcctggtaaaataaattccgacaagatcatacttcgatttgcttactataaaccttcttgtttagaataatgtctttgttgagaccctagattttccagtgtgtgcatttgcaaatgagagtcgtactcacttgttctttgattatgtattctcatcaaaagtactgcagcaagtacgcagatgactgggtaacacattttggctgtcaaagtttgcaaattggagctaaggttgcacattgggcaggtatgccgagtttggggttttcgagttttgagtgtgagaaaatgtctaccgaacccacccatttttaatgtcaggtttgatgggttccacccggcatatccaaaattaaaaaatatacattttttttaaaaaataattataaacctaaatctaatctcctcagcctctccattctcatcatcagaccaaaaaaaaaaaaaaaattagatttaagctctcctctctcttctttccctcgtatatatatacactataagaagaagtaaaagagaagaagaagaagacatagaagagaagaagacgcgagatcaaagaagaagaaaaataagctctcttctctctcttctttccctcgtatatatacactataagaagaagaagtaaaagagaagaagaagaagaagacgtagaagagaagaagacacgagaacaaagaagaagaaaaagaagacgcagaagagaagagaaaaataagaagttgcttgaggagaggaagggggaaggggatgtggcagctggtaagatgagtgctaggtttagtttaacatatatatatatattaggttgatgttacgtgtaatgcataacttgcatgtattagttattttttttcttttaattaggtaatgaattttaatttttaactgttatattaaataaagatgcaatttatttaaataaatagtattattatgttagaaaattaaatgtttgatataaagtttacataaagaataacatataatagcaacaaattttttttattccacttgtttgttgactaaaattagataaactccataatcaataactctgttatcactctttgtcgattagtttcaaacattgttctaaagacgtaagaggttttgacttttatgtaatgtgaacttaaattcctacacattcagttaataaaataaacttcacttagaaatatggacttcattattgattcattctatatagaaactaa

SEQ ID NO: 323137 - DNA, 1064 bp, Cannabis indica
agttcctggtaaaataacttccaacagttgggcccgtgggttcccaagcccacggcaattccaactgatagtactcataatgtctggtgggcctggagaccaagacccaccttgtccaagttttttgaatttgtcacaattgctgaattattaggcccagtttccacatcagtttccattctctcttctgtcaacaactcggccccactggagagatttgcctcttttcttttcctttttaaatcagatatctctattaattcctcattagagtatgcagctgtattttcattgaccaagataacatggtcattatgagggaaatattgcttcccagaattttgggattgagcaatcacaggatgaagattagcaattgatttggcctgatagttaggtcgtgcattcatcacaggggagttgttagcagctgtcgaaggcgatccctggtgctcatcacggtggtcttcctttccggagcaaagccacggagatgctgttaaaaaattctgccttctcgttggtgccttcatgtctaaactatatggtttgacgatttgatcagtagggatatcgtaaaccttattgcagaatctttcggcatgtcccgtaaccccacatatgaaacagaatgttggcactcgttcgtacttgaaataagcataaaatgcttcgccattacgtttacgaaacttcattcgtctttttgatggttcaacaacattgatagtaacacgcatacgcaagtagtctcgccacactctcgagaagttgttcggatcagatgcaacaagagtaccaatgtatttggctgcttcacgaagagcccagtccgtcttaaatcccgtcatcaagccatggatttgcacccacatatcaagagaattcagaaccaccattttgagattttcacccggtgttaatcgttggataatcatctgtttacgatcatatgtccacgggctaccctcaagtactctttgaatgtctatctcatggtagaactaaaataaaaatctgttttgatcaaggatttttatggtaattcctttgcctggcttcca

SEQ ID NO: 323138 - DNA, 570 bp, Cannabis indica
aaaaatctgttttgatcaaggatttttatggtaattcctttgcctggcttccagagatcggccataatgttttgaaaaatctggaagtctgaaactttccctgatagcaatcggcctacaagacacaacttatcatcaaaattagtttcttcctcccctacacattcatcatcatacaatacctcatgatcctcttcttcttccaaacaaatatcagcccattgttgtgtaagttgttccccattgcttgaagatgccatagcagcagagaatagagaacaggaataagccaacaaaaagattgaatcagacacaaaacacactctcagacaaaatacacttttagaccaagaatacacactctcaaacgtgagagactaaaccctctctaccaggagagacgtttgttctgaaacatttttattattaatgagaacaatttttttttatacagtgagcacggttctcctttcctcggcaacctcctcataataacgcaccttaatagttagacatttatataagagatttttataaaaatattaacttttgagcaaaaatttataattt

SEQ ID NO: 323139 - DNA, 725 bp, Cannabis indica
ggaggtgaattttctttagaagagacttgtgggaggtggtattgagaccgttcatgacttggctcgtactgttacagctactccttcaaaaaaggaagacttttgaggatcatttgtcttgcaaaaaaactggaaaagatttcgatggacattggtgctcgggcatcctctaaatttaatgaacacactacaccggtaaagaaaagaaggttggactttgaaacttgctcattgggaaacaagccatgcatcttaattagaagagtgaagcgtgtggttggagacttcctgtgaggagtcggcccgactggtagtaacaaggatgatcatgttgctcgggctatctctgactcttcggaggagccttagactagtgatgaggtgcagaggtcgtgcaaggccaaggcttctccaaccaactctcaattattcgacaaacctatctccttgggcctgtcttctagactctcggtgtggaaagcaaaggcttgtttgttggatattactcttccctctaaggaggtgaatgtcattgaggatgaggaacctatgattggtgtgcctattggatatgtgacccctgtggaggaggatgacaaatctcctccataggagccatgagaggtgttgtaacgccctaagtaattaggcacgctatccaaatcacttattaaagcctaatcccctaaacgggattactaataaaaattgcgtggaatttaaac

SEQ ID NO: 323140 - DNA, 610 bp, Cannabis indica
tctctcttcatctttttcttggtattcttcatattggtacgacatcaagtctttattattatatcacccttgaaatatacatttaccaagaagaagagatcgttttctattcttgtctttattggcttattgttcttaaaaaaattacaaccaccattattatcaaattatgggtattgggtagccctattaccatagcaacatgggagtgagctactataaatctctggtgttctttcttattttttgcgattttatttagctaaattaattcaacatagtctttttattttatacaatcttttcagatcagttaaacaaaaaaaaaaaaaaaacgtcaacaccatactttgttttaacacctttgccactacttgtatgtctcctacatctagattttacatagttaaattggaattgcaatgtgaacactatcaacattaatgcatgtttacttaaaaggaatgagaattcttagagaaaaaaaaaatgagaattaattgtatatattaattttcatttatttgtttaactagtgaacaaagccgcacttcgtgcggcatgtataataattttaattttttttttttgaaagaataataattttaaa

SEQ ID NO: 323141 - DNA, 662 bp, Cannabis indica
ttctaattggttgaatttcatggctgttggtttagaattggaattttgatttaagaacttagttttggttctaacatggtgaaatggataagtgattgaattgctttttttggtgctttgagtgtgtcatgtttatgatattatattgatctagagcagttggataggtttggaatggtttcggctcgattttgaggatgaaaacttagaacttcctgcctgccagaaccgatcgaccggtttgttctggtattgcagaaccgatcgattggtcagtctgtagggggaaattctaaggttttctccttgaatctaatattcactcggggtgtttctgagacctggtttagggtatttggaagttataaaacctattttggagctagtggaagttaagaattgtctagttacgggagttagggttattcacggagatattcctagcggcctgcaactgtttcttaaaattattctatccctagcgacttggaactgtttattaaaattattaggtctttggttttcctttcagtatccacactgtatcagatcctcaattttgaccttaagatgcttgcgttgagttttatgccctaaataaaactcatttcaatataataaaatttacttattaatatagatcagaaataacatttaatgtt

SEQ ID NO: 323142 - DNA, 597 bp, Cannabis indica
aacaagaccatagtcttggtcaaggtactctgggagaacaacttggttgaggaaaccacttgggaatttgagtctaacatgagaacccaatatcaagagcttttcgaggttagattttgggaacgaaatccttttgacggggataattataatgactacatgttagaatattgattaataaaggaaactagcattaattattgatatttttataattatgcatgattttactatgttgtgggtcctattactaggaatgggcattagagttataatttctcaatttcgataattttattaaactctaagagtactatttaagctaaatatgatatatgtgatttttatgattttactcggcgataatggaaaatatgacggatggccaatatagtcacatggataaacattgaacctgttatttagaaagttatcgtatgttatgttcgagtgtgagtttaggcagggttatggtattggaccattttacccctaagttattcaataatttgagtaataacacaagggaagtttggtcgtgttaatctcaaaggttaggtgtgttgggttttgtgcccaaaataaaacccatttcaa

SEQ ID NO: 323143 - DNA, 1705 bp, Cannabis indica
tatatgtatatatatattgatatgatgcattcttctaagtactatatagttcattcatggtgtatttgattcaaatcaatttatgaaggttttgaattaatggattttatatagcacttagattaaagtggtattttttttgttctataagaggataagattataatggagtacgtggggtttatattattcctatattttattcaaaatggggttaggttgaattaagatgagaaattatctatatagttgaaaatatattattagaagctaccttgacatgattttcaaactatttggttggtgggagtaggagtataaaacataaaatactacattaatagttggaatttttagtgatgttgttttgttatgaagtaattcatagtatagtatgataaaatagtttagaaataatattgcattcaaaattgttaatgatgatcataacatgtagacctcacaacggctcactatgaatactaggttcaaatattggcttaatgcagacaactcgctcaactcatccgttaggaatcaggcaaaattggccacacgtgtggtttggttcgaaaaaaatgtgtcccgaatattaattctacacttagcagaaaaaaacaacgtgatctcaagaaggatgcccctaggggtcatctgggaacagaatacgaaagggcttttgagatcagttagtgtcctagaaattgtgtggcacttctctgatacaattctaaaaaatctctcgcagcttatccctgttagactttaagaaggtgcacatcaaaaagaaaactacattttcgggcagacatccactattctaatattttttttctctcaacaacggctcacgcctcacgtgtcactatcaacagtatgactgagtacgggaggcaacttaacttaacttgagccccacctacccggtctaatagctcaaattatatcaataaataattgtatttaccctatcaatgggcttttacaataatataatgctaatgactcctaatcaatatgacccatctgggaaatatacttataaatgtgacattattcttccatgcaaaggattgaaatttcaagtgttcaaacctagaaaatatgctgtaaacttcataattaagaacttaataacaattattcattaattacaatttattaatgtccaaactatgtagaaatcttatttcattttttttaatctttcttcctttagtttaatcattattataattggtttctaaaaatttatattactccatccactaccgactcccccgagttattttgatataattatgtaaattttgagattttttggattttaaaaattcaaaatacgtgcctagtgtgcattaaccgaactaatcgtagttgtttatgtacagtagaatctctatttaagaataatctctaatttgttataaataaatcaagtcataatttgggccagttataaataagtataacctttaaattgtaattagttatacattttttaagttccgtattaacaaagtatacatctatataagaataattacatcttaataaaatatatacatatattttgtaaatttatttatataaaattaataattttattataaattataatacttgtataaatgttatatttactctaaaataattctattatgatatagtattaatgattgtttattgttattattgttacatt

SEQ ID NO: 323144 - DNA, 1277 bp, Cannabis indica
ttgataaataaatggtaaaaaagcccttaagtggccatccataggatgtgggcccaccacttacaattttgccatttttcaactatttatcatattctttcacaaatgctatatttccaattcaaccacttaaatgccaaaactatttatttaataattaaaattaattatcaaataaaattaccatttaatatatttattaattagactcaataaagtctcttaattaacaaataaactcttaaacctcttttcttcacaattaagccctagcttagtgaaaattaataaataagacatagtttaattttagaattataattgattaataaacattaattaactgagtcttacaaacagtattgtcttaactagtatggggaccatgagcctatataaccgagcttctaataaacagatatagaatttaccaaataaattccctaacttattaatttctctttgcaccactatagatttgaaattgcactcaattatataaaacactctatatgttccacgatatagatacactatgaaaatttaacatatcattctaattccaataatcaaagatcctctatagatgatttacatctctagttactttttggaaatctgcttggatctcgaagtattttatatgtggtaggggatcttctttttcccatgtatattttccaagttggcattttgaatttaggtaggggcaatgcattgatgtatgcagagaatggtgaccctcttgacctgtcaagttctagatcggataactttgggccagacatatctttgatcatgtccttgagttgatccagttgtgcttgcacagatgggtctactttgacgtcttcctatccagacaacattccttagccagccaaaacttcttggttggagaggtatgcttggctggccagctcttggctgggaaactagccttggccagccaaccttttggccaagtaatgggccttggccgaccagcctttggctagttgtgattccttagctagccaaactcgtcagattttcttggttggccaggccggtcagcgggttaatttttacctcttctttttaaatttatttctttcttgagcttatttattttataattggttttacaaaatctctataaatactaggaataaggatgcactacttttccccgacggggagtcgggcccggtcggggaccccgcccctaagtgggggcggggacttccccgacctaaagtggggaagggggcggggacaaggattactttttatcc

SEQ ID NO: 323145 - DNA, 1050 bp, Cannabis indica
aataataataataaatgttaaaatcttaaaaaaaataatagaagtaaaataactgctcaaaaaactgattgcagtttaattaaagatagaacaatagtaaaagagtcttttgtatctgccccacttatgaagcgactttgatatattggctaacatcactcttaccggatccacatgataaaatcttgagaagaggtgcaacagttattctccagtactatataaccgcctctcactgcatgtagagacaccttttctaacttctcaaatcatttcttcgaagcaaaaatagcacatgattacaaacttttacagaagattttccgagaattagaatcccaactcatccaagtactttcttttaattcatcagaagaacaccccactaccaccaccacaatcatcatataatccctgtgacgtcgtcgatttcgaacagagattggcattcttcaaaactctcttaagggccaaatcttctcttcaaaccacattatttttttcgatttgttgataatcaatgacggtgagacttgaagtatggagattgaagcgaagagatacagaggaatggatgaggcatcggcagttaccaccatatttgcaagagcgtgttcggcgatttgtgcagtatcaatggcttgccacacgaggtgtcaatgagaatttatactccgttctttacctttggaccttcatcgttaaattcaatgccatctgtgtcttgcacttgttcgccgactaagttattttcatactctaataactcactatattcaatattgaaatgcaacaattatgaaataaatatatgtcattatttttaattctatattattttatagcattattcataatttcagacaaatttttatttcacaataaataaatttgttattcctaaaaaattgaaaaaaaaaatagaagaaagaagagctaagagactaagagcatgtttgatattgttttctatttttggttttcaaaaaattgtttttagaaatgagaacaaaaaatagtttttgaagtttttaaaaacaagtcatgttt

SEQ ID NO: 323146 - DNA, 1394 bp, Cannabis indica
aatgtaatcgtacttgtgcttgcgacatttatcaaggaaaatttaagggtgggattatttcaaaaaaaataaaaaaaacaaaaaaaaaaaaattataaaaatacagttttacaaaatctagataaagtatgaacaagtgacgtgacactctaaaattactttaatctcatatctcttttctctttaattttctctttttcttaattctttattcagttaataaatattaattattaattaattaaacaaaaagatcaataaaaatttaacaaaaccatatattatataaaaaacattaataattattatttatttattataaactatttatttctataaaaaaaattattaattttatatctcttcttattatattattaattttatatctttttgtattatataaccagcgccggccctgggcatagggggctaggcctgtgcctaggggcctagggtccacctagtccaaaggccccaaaaaaatcattcccttttaaaattacacattttttttttgctaattttggaaaataccactttttttctaataagggcccaaaattaattttttccctatgactcactaaattttacggtcagccctgtatataatctaaaccacttataatcataaaccaataaatttatcaataatgacatgttgatttattatgctttttttgcactatgatcaacaccatatgaagccaaggatgcgttaggatgattaacaaaactttacccttcaataccttttttaaatacctttttgaacctttcaaaagtttgttctttagtcttcggtttcaatattacacattacatatgactatattgattgtgttggttcaaaactatggaggtgcaaagagggggaacatgcaaagaaatgatattaagatgttgataaataaattgtgggacatctacaaagatgagttcctaaaacaagagactaatcaaaactgctgtggtgtgtcgtggttgaggcggaacatgtagcccttcattgatgttctctccgaagatttatagtatatactatatcttctttttcttaatttgataagtcaatcatttctaacaaattaattagagactagttgtagtgtgtaactgaatcaatatatatatataaaggaaagcacaaagggagtttaggtggcaacctattattttttcttcttattttttctattttatcacacattctcttattttatttgagaaatacactatacatataaacaaaaagtcccacatcatttaaaaatcgtttagaagttatccatgtaggttataagtagtagttttatcactttactttcttttatctaaaaaatattatttttttatgagtaattgaataatttcttactcaatattttttt

SEQ ID NO: 323147 - DNA, 531 bp, Cannabis indica
tataattaaacaccctatctaattttttagcataaattatcaaatttccctaaaaaaaaatagtgagaatcttatatcaagcatacattagccgagataaatcaaaaagtaacgtaaaaaatactctaaaagtaaaataaaagaatactgctttgtagcatgtagcgatagaataatatatttgaggtataattattttaatcattttatgtcaatctctcttttttaataaatattttattattcttttatattatttaaataattaaaatattttaaaatagattctttaaatgatataagaaaagaatacaaaatagtgtaatataaaagtgtacgaaataaaataaagaaagtagagttttaaataatatactttccacgttagatttttctatatatatactcagaaagttcaatctaataaaaatttagaatctgtagttttcggacttggatccccggtcaaaatttgctgtctaattttctgtcaaaccaattaaaaaaggccatgtcatttaactaattaac

SEQ ID NO: 323148 - DNA, 666 bp, Cannabis indica
ctcatgaatgatgtgtttcggccctttttacgagattgtgtgttggtatttttcgatgacatactggtgtatggcaagacgcaagaactccatcagcagcacttaagactagtcttcgagctcctccgaaagcaccagctctatgctaactgaaaaaaatgtgtttttggtcaactacaaatagagtacttgggacatatcatatctcaacaaggggtagctgctgacccccaaaaagtttcagccatgttggagtggccaaccccgaaaaccatcaaaggcctccgagggtttctcggcctcactgggtactatcgtaaatttgtagctaattatgcccgtatagctcagacgttaactgatcaactgaagaaagaccaatttcaatggggtgttgaggccgagcaagctttccaacaacttcagcaagccatgacgaaggtgcctgttttagctttacctgattttactcagcccttcgtcattgaaacggatgcctcaggccacggattaggggttgttctgttacaaaaccagcgtccaatcgcctatttcagtcaggttttgggagttcaagctagaaaaaaatccatacatgaaaaggaacttatggccattgtctacgcagtagctaaatggcatccttactgttggaattattttacc

SEQ ID NO: 323149 - DNA, 576 bp, Cannabis indica
atataagttgccacataatctccctaatactttcctttatatatatatatatattgatattgattaatttatattcaaagctatagttccattgtgatatgagatcatctaataataacttgattattttaatagtgactttcatcattgttgtgttttgctattaattatagggcttttttcataaatatataaaatactaatctctttaatttgtttttatttttgcaggcagttcactcggtggttcacggagattattttttattttggatttgtgtttggatgtattatttgggtgtattgttgggatgttttaaattttttgagatttgagtatatatcatatcatatcaatttttttattttgggtttgtttatatttttatttcttgcttcagttgttatatgtacatctagatggtgcaatatttgttcagatttgttttttaaattttatttaatttttttgctttcggtttataactgaagcaaaatctttttgcgccggtgcactactatttgcttcggttatgaaccgaagcaaaaacttttttttttgcttcgattcataac

SEQ ID NO: 323150 - DNA, 618 bp, Cannabis indica
acccgaaacccgaatacccgaactcgaaaccccaaaaatccaaaaacccgacccgtgtgcacccctactttgatctccaacaattactattgtaacaccaagtgtgaatcaataaaaattaaagtcaaaagttatttcattcgagaagtggacagtttttattgccaaacaactgattaaatctcgttaaattggtgtgatttgatttctgttttgcatttatatcttttttattctcttgattaattagttcatgttattaattgtcatttcagttcttaattgtttccgaggtgattaaaacaccacattaataataatttcatatcaattcttttaatatacatatggtggtggggaagctagctctagctagctagatattagaaatgaattatacagttgattttcaaggccaagtttgcttcgtgtgagagtcatgttttcatgcaccaaattacttacaatacctaattgatattgatatgaattagtgcgatataacctttatcaaaaaagatatatatatatctttatatattaaaagtgtctatttaacggcatttcttggtttaacattcttggtttaacagaatatacttaaaaataaaagaatat

SEQ ID NO: 323151 - DNA, 758 bp, Cannabis indica
catacaaacatataaatataatgtggtaattgttgtttaagataaagtaaatgaagctcaatctcataaatgttgcagttaggggtatagaagtattcctgatggtaaatgttgcagttacttttagtaatgttctctatgtatgggctaaactggtgaagtgatataacaagccttcttcttttcgggttggacttcttttcaagtcataaaagaagttcattccatggggagttgagacaggccagttccttaggcaataaaatatgaagaaggtagcaagtatcctatacccatttggatttatctagtaaaggcaaacttcgaagaaatcaactatggatatgaaccatggatccaaaggtaagtaagcacccgcattcatgtggaatcttgaccaagcactacaataagtattttgggagccattcggaccaccatatcgttgcttccgaacaacagtttcatgaagacaataatcatcctgaatcaattgggattgatgttcagtaagagtactaaacacaagaggccttaacctgaaagcctaatctctcgagtcatcactatcaatggcagcttgaaaaagctcaatttccatcaccttccaaccatgtgccttgtctaagttcttagacataggcacaattatcttagctgaactgagccacatgggggtcatattcaataggtaaccttctacttctcttcatcctagccatgatttcaagttccttacaactcaagaaaagtcttat

SEQ ID NO: 323152 - DNA, 649 bp, Cannabis indica
gtttaccaaaatttttagaaattgaataaaaataatgagaactgaagaataaattatcaaaaaataaagtataaaatgggacaaacattttttaatgtggctggggcattaagtcttagtccacgaatcagtattattcaataagttttttgcttgtaaatgtcttaagaaatacacaaaattgtatgttctcaagtttgcataagcaaagtttgcaagagtaaagtttacaagagagtccaatccttaatccataaaattagtggggtatttatattagtttaaaattttcattaggttactcatttccctctattggggagtttacaataaataatacacttaggctttctcatgaagtctaggccatagagaaggcgatctgctgactaggcagatcggatttggattgatctattcaacactgcgtacattgattgtgggcaattaatctgaattaattgtataacatttgttataagaagtttcccctttaatcttaatacgatactctgtcgtgatctgacaactggagtttctttatttgtgtgcaataataaaaagggaaaccggaagggtcttctaggaatgtgttctcttgtctctctgatctcgtggtaccaaacaagtctttcgggcatggttgctg

SEQ ID NO: 323153 - DNA, 645 bp, Cannabis indica
ttttattttattttataggtataatttttaaggatataacaataaagaaaaaaaaaattagtacattttaaaaatataaattttatataaaataaaagttattaaaatgggatgtacttataactttatgggagtgcaaataaaactctccaacaaataaaacacaaaagagttttttgcatctaaaccctcctaactcttgtttcacttgtattaattaacctcaaagctcaaattttgatagtaaaatcctccaaactattgaactggtaacaaatttaaggtgttatccggttaagtgccactttagactgctatgtatacactttgtacacatggcacgtttatattagtgtacttaatattattatttttaaaatttattttgaaattaaataattataaaaataaaaatataaaatatttaaaagataaaaaaatattatgaagtttaaattatttttatattttttaaataataatattagatgtactaatataaatgtgatatatgtacaaaagtgtattcataaacagtctatattgacaataaactataaaaaaattaatgatacattaggtagcgtttggtaacacttttttaatcagttttctgtttttaaaagtagaaaagtgaaaatattt

SEQ ID NO: 323154 - DNA, 522 bp, Cannabis indica
accatataataagcataaacttgagtataggtctacaccatgcaatttcttggtgtatagccttaaccacaaggggtacaagtgccttaaccctaatgggagactttacatttgtagagatgtaatctttaaagagttttcttttccatatgaaacactcagtcaacactcatctcacacatctgtctctgacagatcccccatagtgtctgcctgctataatcccctcttgctctcatcatcactgcacctactacatatctgatctcatgagtccccatgctacaacaaacactgattcaccgccactggtttctactactaacagttggcttccgagtcaaccatctattttttatataggtcaatcatctggacagagtaatgctcatgttgatactccaagtggtccacagccacctgttattcaccctgaacaacaatttgttggattttatgccctaaataaaactccatttcaatgtaatccattttattcaacatcaataaagaaacagaagt

SEQ ID NO: 323155 - DNA, 847 bp, Cannabis indica
ctcatgcaatttttgtagtagtgtcactgatctcacctggggtcagcctaatggtatattgggcatgcactttaacattaaggtaacgctgtaaaataatttgaaatttactttaagaattatttattttacacatcaataacataattttgtaattataaaatccgaaaaaaatgaaaaacggatcaaaaacaaaacaatcacaaatatacatttgtaaaaccctcctagatcatttacagaataactagattgtttatgaaaatgttatgacattaattatctccttttagggttcagcttcgggatcatccacaagcatatgcatgccacttacacttaaggatacatctcacatcacatatatatataaatatatataattatatatagtcaacggcacatcatattgctcactggatttctgaactaactcatctaagctaccaaaggagaggtcccactcttttgaaaattacgttttctgatcatcaagttatgaaattcaagttctttttttttttttttaattaatatcggacaactgataagagttgaggcatggcccaaaaaaaggtcatgcatgcgcatgcagtagacatttttaaagagaaatatgatacaatcatcaattaataataatcatgtatatgacaaaaaaacagttacattatctttcattcacaatatatatatatttttttttttgggtaaatgtgacttttagtcacaacaaaaaaattaattgtgactagagtatatagtatttaaataaagttgttactaatttaattttagtcacaatatagaaatgataatttataatttattaatcacattttttttt

SEQ ID NO: 323156 - DNA, 771 bp, Cannabis indica
gtactagtggtgtctagtacttttgcggcatgtcgcattgtgattggctagcgatactccccaaaaactattatattaaattatatgagacccaatatttaattggaccaataacgatattgacacataagagagtactagacactagcatttctcttaaatttaacatgtatacaaattaattgtataataattgttgggcttgaaattaatgctcacgaacactatacatgtatatgaattgtcaccccacctacccatacatttcaaaatgaagttataacggtatattagttttatttaaattattaaactcttgtttcataaaactaaaaatcctttgtttcaaaataacgaaaaaaaaaacttataataatattagttaacacttacctttgcctattatttttttaatatatttctcatcatgaagagaccttaatttaatttgttaattctttgggttatagtgttttggcccataatggacccatgcttatggtagatagaaattttaaatgaattaattagaaactataaacacttttaagtgacacttgaggccagctcaagtggccatagagattagaggatacgtgtgtattggaggtcttgggttcgaatcccagattatgctgatataatatataaacgcttaaataaaaaaaaaagcacataaaatagaatagaatgaaaataaaagggtaaataccattttggaccctgtgttttgcaaaagttacagattagaccttgtgttttgttaaatga

SEQ ID NO: 323157 - DNA, 897 bp, Cannabis indica
attattctacactcaagattgtgagtgagtgatctttttcttcttcatattatgtatatgttatataatattagtgtaatctatttatctattctatctttcatatatatatatatgtaatatatatagtgtatatatatatatatgtattgtaacatatatttaatcaatctcttttattgtccttgtcttatttttacaattgagttgtatttatcttgatttattttccagaaattctatagattttattagaccgacaagaggctcttttggaaattggatattcattttagaataagatgaataaagatatatttaaaactaatggacaataataacacatccatcttatatataacacaattgatttctatattggaataaccaatttgatttgaatatataataattaattacttacaggattatttgcagcaacaccaccatcaatcaaatcaaaagttcgagtgtttccattaagttcattagagcatctccaatgagataccaaatttagtgttacactatcactaaatttggtgtcaaaaattatttctactccaaccacaacaccaaaaattacactaaaaaaatattccttattattatattaattttttaataaaataaaaaataaatatcatattaattaacaaaaataatatgtgttcaattttaaaaattatttttattgtttaatttaaaaaataaaaaaatataataaattttacttaaattataattaaagaaaaataattatgatattcacatttaaatttacacaaaaaaaaataattataaggtagcttttacaatgtattcttctaaataaagagtcacgcaacagaaagtttgaattttatttttcggctatgttaaattttttaaaatttt

SEQ ID NO: 323158 - DNA, 1812 bp, Cannabis indica
gacaaaagtccttaaatttaacaatctcaatagttcgaggggaatttttaacgaccaaaaaagttcagggggcacaatttacggatttagtacatgtcaaagttcagggggaaaaattactaattatccatgttttaatggctaccaccctatattacatatggaaaaataggaacagttgtgttttcaatgcttgttgtttggctactggttttatcagtagagaaattaagaagttgttaagtttagagtgcttggtttagttgttaatggactaaaaagagaggatcaatatgttgtaaacatagttgagagttagtcagggccggccctgaaacaaagtgggccacaggcaaaaaaaaattttttgggccttatgttagaaaaaatatggtatttttcaaaattaataaaaaaaattgtataattttaaaagggaaaaaaaaaatttgggcccctgggctgagtgggccctaggcacaggcctagcccgcctatgcccagggccgggcctggagttagtgaggtttataaaatttgttcttttgttcaaaaaaaaaaaaaaaaaattcatatatgttttaaaattaaaaattatttgatttgatttcataataaattgagatatttgcaaatgagttttttctttattcaatttaaaatataaaattgttacatttggaaaatagatttgatatttacggttttataatttatttcatttgaaaaaaatgaaatgtgtacaaaacaaggcacaaatccacatgggacatagacccagtttcaacacaaaaatttcatccactcattaatcgtccttaaaatcatctttcatggctttgcaaaaaaaaaaaaaaacaatcatagacaaggcattttaaataagtttattaattattaattaggaagcttctacaataatgcaccttctactattttgtcattaaaaataaggctaattaaaatttttgtctttcaaattttgacatgtacaaaatcataccccctaaattttttatggttgttaaaaatactccctgaactgttgagattgttggatttaaggacttttatccaattttaataaaaaaaaggtaaaatatggataaagttcaggggacgtgatttaatacatgtcaaagttcgagagacatgttttggtagatatcaaagtctagggagcataatttagtacataaacaattactgaaatagtaaaattgaattaaattagataaaagtccttaaatctaaaaatctcaatagttcaaggagaattttaatgcccaaaaaagttcagagaacataattaagtatatattaaagtttaggggaaaaacaaatcctaattagcctaaaaaaagttattcatttttataattatgtatattgcagttatttaaaatatttttgttaaattttagaaaaagggtttgagtttttcttagtttttaaaattttatactttgtcttaaataattacaatatatatcactatatatatatatatatatatataaaaaatagattaaaaattctcctcataggcaaaacatatagagggtgcaatcgttgcacctttctaagaggtgtgataatgattgctgaatcgagaataaaaaaaaaagatggttgtcgtgaatctcaagtgtttagtgcatataaaaagcaaggctagtactatttttcaataaactatggtggcgtttggtaacacttttttaatcagttttctgtttttaaaagtagaaaagtgaaaatattttttaaaaacatgttctataatactgtttttacttttcaattttataa

SEQ ID NO: 323159 - DNA, 1021 bp, Cannabis indica
ttttttttctctccaaatatgtgggagaggtatatgttgagaataattatgaaatgggttcttgggcacgtacgtatatataagggaaaaaagcatcactagttgacactgtatgtttatatatatataatgtaatctatatctactgtagtgtgtgagaatctaaagatactcttcagcttagctaagcgaacaaaccataaaaagtatgaacaaacctaagaaaaaaggaatatataatatgtatacatatgcttggagaggaatgaaatggtacacgtatttcgccaactataccatattaccattattattaattgagaaagaatctaaaattttgagatggcttcaaattttctacgtcgattgatgtttataatagtactacatttttttttttagtatatatatggatgcacttttaataaatattacttttaaatgggtaaattttagtttttaagctttatttttctaactagtttaatctttcattcttacattatataggccagactcttaatgagtagtacttttgaatgggtaaattttagtttttaagctcaatttttctatctaattagtttaatctctcatttttacattatatgggcctgaattgttctatccgctagaaaaaaattaagaaaaaaagtttttcggcaaaagaaaagataaaaaaaaatagtgagtttgacttaaatattttgtaactaaatatatttttaatatagtgtaaaaagagatatttttgacctttttttaattaagtagctgaactaagcatatatatgaaaatttctctttcattattcatggatcaaaacttaataatttaatatttttaaaattaatatttatagttaaatttatttagtaatcatcaacgagtaatacccattaaaaggtgttccatatatatatgtgtgatttgtaataattaatttgtatttatttcacgaatttgtgtttaatgcaattaatttagatttatatgatttaaatgctacacataaaattc

SEQ ID NO: 323160 - DNA, 1201 bp, Cannabis indica
tttgcatagagtgaaaaattcattaatttgttaaatttacaatttaataatatatattttttattctgcacatatattatttattgatgcatacaaaaataaataaataaataaattaaataaaacgttatatttattgataaaaaatgacaactgaaacactcaaatacacacattgtccaatcataatagtgtaaaaagtattttttttttctttttggcttccatcttataatacttttcaattatatattgtattttttttatttgaaactcttcaattatatatagataggtcgtacacttcttaacgtgtaatatctattgatagaccctaaaaaaaatttataaggtaacaaatagaaaaagtaagtattaaaataaattttgtaataatactgattcataaataatgtcaattaagaatgcacttatattgttagaatgtgaaagtgtgtggttaaagtgtatgcgattttatttcaaacctaattgaatgagaagaataactcatttattttatatattttattttatatctgcacattaacaattaattaattttaatatacatgctaaatatatttatatatatcatttgcaaaaaatttcacttgaccatactttataaatttataattatgttatcggtgaaaagtgtttaatttatagagtagtacacgttactgatgaatattccaatgaattctcatttacttgcttctatatatacatttatggaatgaagatgttgattatggtgagcaagttggattggggcattactaccacgtatgtttcgaaggttgtcttgcaaacttcgaaatagatgaggaaggtcttgaagccactgagctttacccagaaatgaattatacttcagtggatgagtacatgaaacgctatgtctaatttatttctaaatttacatatgaatattattgtgcgttggtctgagaatttgatattaaaatacaataatatctgcatgttgatgcatttaaaatatttggacatttatgttactgtttattgtgataaatttagtgtgtgtataatatattttacaatacctaataataatattattgttattttgttaaggtgccgccattaacaaagctttataatgttagatcaaaatctaaatatttatatatatatctttatatattaaaagtgcctatctaacggcaatttt

SEQ ID NO: 323161 - DNA, 1773 bp, Cannabis indica
ttgtgaaaaactagacagacggttgaaatggcatcagattcgaataagtagaacccagtgcactacgccttttgccaacttgggggatgagtacttactcctgagttcctgggatttcatttttgatacttccaaggcttctaaacttgaggatgatatctcctacccaatttttgaccattttggattcaaggcaacatgctaggttgattgtcaacctgggggctaagcccaaccctaggtcaaccttggcgctaggcgttatttccagggactttggattgtgattttccccccgagtttgcttgaattttcattattttttatgacggaaaaaatacctggaacaccttttgctgaacttgatcgaaaatagcccaggctgacaatatattaacctgggcgctaggtcccctttttgcccctccacatatttcgtttggtcccaagaaatagttgaatctcaatattttttgaaaatagagaagttgctcgaaataattcttgtaaaactccatctgaaatgtctcaggctgacaaaatatcaacctgggcgcagggcaaaccccaagtatcaacctgggcgttggaccctattttttgtacccaagaattgttgttttccctctgaaataacctatttccccattcttgatgaagaatatgcaaaagttggatctctaatttgatatttggaaggcacccagattgacagattatcaactcagtcactgggtggtggggccctagggtcccgttgctcaaaaattaatttactttgattctgattctgatgcctcacatatgttcgttgtatgtctagtttatgtcccaatgcaatttttgacctttttgcactaagatggtctcaaaaattgaaaccctagtttgatatgtcaacttgggcagcgggtgaaaccctctgtgcccaggttggctttcgggttgtaggtttgtgtaattttagctcgcgagacttggattaggttgctcaatgtattcatggtacataatagattcaagttattgaagtctgaacttccataccagagatcttaaagtcaacctgagcgcagggctagggtcccctctcaggtcactgatatgacttggatccactcaactttgtgatgtcatccttcatgtcacatgtcaaacattgatgttcacgtcactaggaaaagtttacgggttaacattttccccccaagttaattttacacttgtgtggagttgacttgatgacgtgaactgagcctgtttcacttaaatctactagatgggcgcatcaattttgacattcttaggtacttgtatctgttcttcaagcattcctaattgaattaggactttgaatacttttgcttagtccttggaaatatcaaaaattaattaacaaagaaaaagaggaaaaatcttatctttttttttcttaaacttatcgtttatctctttcttggaaaattttaaattttcttattttttgttatggaattaggattaattggattggaatccttaccctatatagagatatcatttgaaattagagagagaaaggaagaagagaaaagacttttggctttttacttatcatgtttttttttcctttaattctctaatttttccttaatcttaatagcatttggaattattgtaaccttttaaatttgtattcatattccttgttgtataggaatttcaaaatattcttaaaaatgagaaaaaagaaagatataattatatcttttacttatcatttacctcttcctt

SEQ ID NO: 323162 - DNA, 1615 bp, Cannabis indica
tttcttctagctcaataaagattggagccattggggctggttctggccgaggagtaggcaggtgattcatcatcacactgttcgaacctcgtaatctcttgtgttcaaattacattattcttcttgtcaaattgctcttgttactggtttcgtatactggttcagtatactgtatgtttttgaagttactttgattttgatcaatctttcttgtttcatgataaagcatttgatcacattaaatggtatcagagctcagtcgagggacaacgtcaaagaactgaatcaagatctgatctgcaatggcttcaacacgattcgaagttgacaagttcaatggcaccaatgactttggtctatggaggatcaaaatgaaagctttccttgtgcatcagtgaatttcataagccattgatcaagaagagcttgttactcttggagaagacaagaagaagattaaaaaagttcagaacagtgccatactactgagtttaagagatgaagtaatcagagaagtttcgagtgaagaaactacagtgggactatgggagaaattagcttcaatatgccttaaaaagtcactagccaataagctttatctaaagaagaaactgtatacaatgagaatggatgaaactaaggacttcaggaagcattttgatgagtttaataggataatcttggatctcaacaacataggagtcaaaattgaagatgaggataaaggattcttgctgctgagtaccttgccaaagagttgtgagcactttgtggacaccattctgtatgggaaagaattattgaccatgacagaagttaagtgaacattaaactcaaaagaaattcaaaaaagaagtgaagaaaaatcaaatggctagggtgaagagctatttgttagaggtagatcagagacaagggaaaatagaggtgtttttcacaagacaaatcacaaaggcaagcagtacaagggctcaaatcaatcacataaaccaaggtctaactccaagataggagaatagtgctactattgcaagaaagatggtcattacaaggatgaatgcagggcattgaaggccaaacttcaaagagacaagagcaaagaaagaggagatgcaggtgttgtggcagatggctatgagtcagctgatgtattggttgtctctagccaagaatcaggagactcataaatacttgactcaggctgttcatttcacatgacaccaagaagagaattatttgatagtttcaagaagcttgatggtggatcagtcctgttaagagacaacaaggcatgcagagttacatgaattggaactgtaagaatcaagctccatgatgatcaggtcagaaccattcaagatgttaggtatgttccagattcgaaaagaaacttactttctattggtgaattgattgaaaggggtcatactataaaaatagatagttcttttaagatcatgaaaggatccctagttgtcatgaaaggcgaacttagaaatgaaatttattatctaaaaggtaaaacagttactggtgagagtggtatggtggttagaggactagatatgaaaagcactaggcttttgttgggttttgtgtcctaaataaaacccat

SEQ ID NO: 323163 - DNA, 858 bp, Cannabis indica
aaaatcactcgacatgcatgctcgagtgtcactcggcaagcctcactcacaatcactcgataagcctcacccataagtcactcggtaaacttcactcacaagtcactcgacatgcatcatctaaatgttacttgacatgcgtcttccaaatgtttcagcatgcattttccaaatgtcactcagccatgcatgcttaatgtcactcggccagcatgccactcgacatagaatttccacaacaatatgactaaagttagtaaaattttcccaagtaagggaatctttgagcaatatacgatcacaagaaaaatgcgtgcatggaaggaacgtacgaccacaccttttgcaagctctaaaagtaaggaggtagtgcaagtagtggaggcactgcacctgtaaggtctgaggacttgaccaagggtacactgcagccactactcttgagacccgagactacctgacaccagataaggatacgtggtgcaagatcacctcctgcacttgcgattagtagcctgaaagtaacatcttacttctttcggaccaccatgtatctcaggccactagagcctataaattatttctcaaatgtgagagggggttgaaaaatcaatcttgtaatcaacacattgaatgcaatagaaacaaattttttcactgctcaaaaatctcattgtcatttgaatttgcactctatctttatcgtcatcttatttttgagtttcgagtttagatttcgcttttccaaccaaaaagttagttgacgagttcttaccatcaataactttttgaaagaaaaaaaaggtaaatttttgaaagggtaaataccattttagaccctgtgttttgcaaaagtta

SEQ ID NO: 323164 - DNA, 743 bp, Cannabis indica
ttaagtgattcttttatttaagaatacataactaataaaaatatttatttctcgtttatgaaataatatcataatgtgtatattcttcaattaattatctctctttaatcttaaattctaataactctttcaaatggattctcctcttgaatggtcttttaaatatactctcaatatactcaatactcccactaaattagacagttaatctatctgtccactatccttgatcaattaagacctttcttaatttatgatttgaaatgtattacttgtttaatctcattaaacaagtatttttaaattttaacagataaacaattatgatatttaaataatactttgaatatattcttaaattgtttattcaatactttaataacatccctaatttctatgttgtattattaaatctacatttagtaatactgtttattagtaattattaattacacatatccactactttattctcctaagaatatttgatatctaattgttgaccgaggtttttggcaaccgataaaataataagaatttagagagctgtaagaaaataagagagagatttttacgtggttgaggcgttaatgagccttagtccacgagtctgtatatttatgattgtatttaatacagagaatgttcttggtgggtatttactcttcttgcacttatgcaacccggaattctcgacccccattaatgagctttgagggggtatttatagtgttttcgtgggg

SEQ ID NO: 323165 - DNA, 1134 bp, Cannabis indica
atcgacctcagatctgcactatattcgaagaaatcttacatcaggtgagaaatccaagtcacaaatcgactggtatttctgatatattctctcttttgcttttctgtgtttatctctctattatttttctattctcactcactgactctcttttcttttctttgcatgaactctggaacaacaacttttggagcttggcttccaggtcttggaatctggcttctggtatctctcaactgagagattggtaagtctctggtctgcttttatagttgtagtttagggttgatcaaggtttaggagttagttacaatttcggttgtaactaactactagatcttgatccactagaggcgaagccacctaggatcgagtccatttatttgtatttcttctcttttctgtaaaattgtaataataagtatgacaggggatctaatttaacaggcatcattaacattcaaacataaaatgtcgactaatatagtacatatgcttatatagtattgggggctctaatacatactctattatataggttggagaattggtagggaaggagaagcaagacatggtggttgtgatatgttggactacctggcgagctcaaaatgaaattgtttggaacaagaagattccaagtgtgaatgatgtggttattggttaatttagaaatgttgtatcttgaacatcgaaaaaaaatacccaaataaaggatgactatacaccattgtctagtggtgtggtataagatgatgactagatttgggtaaagccttaagattcaaatcaagataaatgttgacgctatattgttggcttagaaaactcatcctccggattggagttttttgaatttatatttattggttttagatttattggatgtagtttcggactctaatattattctttttcattaacagaaacttcaactttgttgcggatggactagccagaaagctagaatttctagccatatgactggtttgtttcaaggggagggaaatcctcaaatgattcccatctattttttttttgttttaattgaaaaaaaaaaataataatagtaaaatttaaaatacaatatatatgaaagtaattgatatttactttcacagattaatccgaatt

SEQ ID NO: 323166 - DNA, 1302 bp, Cannabis indica
attggtctctgtatgtacatcaacttaagaagtttctgcctccactttagtccctccacaaacttttacttgcctcttcaaacattcatgggcaacatttcttacttatccaaccatatttattgtaaaaagtagcaagcttaaaagaaaaaaggaatgacttgatggagattcatttattgagattaattagtcagcactatcaaagagttttattttgataatgaatagaaaactaaaactaaactaaaaaaaatgaatagacaataacacatttcattagttattatcatatataaatagacataaattacgtttaattatatatttactaaaataaatacatataaaattaattttttttatttttattcttaaatacaaattactttagatgacttttagtttgactactcttactataagtatttttaaaaatataaaaaatgaaaataataacaaaaaatataaactacattagaaaaatcttcgtatgccacataactttgttggcaagagaggtataaatataagacaattcttttataggacctcttaaaaaaactccataggtgggggtgttgtagatctaatagaaatgcgactcgttaactaatgagtttaatttttgaaaacatgagaaacactgcattatgttctacttgtcattaactaatacttttaaattttatttattaaatttgttgtgtttttcacgtttatgtatagtttttttaaatttttttattaaatacattaagggctcgtttggaacgccgtattaggtggtattgtattgtattgtattatattgaattggattatatatcatatttttatataatactatgttaaactttaatttatactaaaatattatatatttaagtgtccataaaagttaataccacatatagttttacataaaaatattgcataaaatacaatttaatataatacaatacaatacaatacgacctaatacagcgttccaaacgagccctaaatgcttagtctctccttgttcttcttcccttctacctaataaaaaaaccaacctatccacaatattgggcaagaacatgaacaaaaactattataaaagattaagaacacctacaatattcaaagaattcataaacaccaacatgtattcaacatcatgtctaacaatattttattttaaatttatgatccaaaatcacagatacaccatcaaatgtataaatcatagctttttcattatcactataaaaaattctgaaatatgtacactgtaatgaccgctttagtaatttggat

SEQ ID NO: 323167 - DNA, 1483 bp, Cannabis indica
tgcctatggacttcacttgaaatatgtatagaaaaggttgtgttcttccaatttgggaatgacatatgttttacttggttactacgatgagtagttaatcatggcattttggagctgactcgttgagttgtaaaaaaaaaaaaagtattgtgttaaacaacaaatataactatattcagtattattgttcttgtgtgattattttgtttttatggtatactttatataatttattagtactttatataatttattagagttgatatataattgatagtatctcacatgaaatttcttaactactttgttgcctagcattttgactgttcatgttttgattaattattgctcaaaagttttgacagctacacaagctattccctaaaatggatcatttcttttgaaccaattgtttttttttcctctttcatttattgatttatttcatccatggatcagtacccttccaaatattatggcactgagatgatggtatgatattcctagttttaaaacatgatgtaatatataaacgcttgaatcaaaaaaagctgtaatttagttttgaactattgtgagatcttgattgtacattacttcaatgcatatgtttaatttactaatttttcaggtgagattttatagtactgttatctgtcactgctatagatccctctctgttgcaagacaatgcagagtggaactttcataatggctaaattgtagtgatatatatgtattgttgctgatttttataatttttctataattctttcttgcacataacatttgaggttttcgcaggaaaattggtattccattaattgtctgtgggttatccccaatcaataagtgtttattttttttgttcattttactgttatgtgttctttagatacagatttgggcttcaaaataattagtagatatattttgatttttctcattaatcgagattcaatattacttgcttttatttgtagtgacaactgaaaatgatgatgtgttatttgtagtggaaggactctacaacactcttccttgaggtgagctttggtatagtgttgcttcattcaactttcgtattgtgagtgccttaatggttatatcaaaaactactttgtatcatagatgtttattaacagatatagatatataactttttaaatttcatctattaaccttgacaatacagatacaacatggttatggtgtttagagattatctttcaatgtgactcccaataggcagttcaagcaatactagcatcatagatcatgcctacagacgctcaaatgatgctttaagagtttgaggggtgtgttcttctaacttatgagtgaaagccagactaggataggggcttcacattcttttttatgtttgtttgtttgtctaatttagtgttatttttttttgttcatttagtttagtttgtattgaggtaaattttttctgttttccttgttggcaactctgatt

SEQ ID NO: 323168 - DNA, 722 bp, Cannabis indica
tttttttttaatttaaggtttaacttgtttaacaaagtggttgactagtactatcattattggttaattttgctattattgtctagttttattttgttctttactactcgactactaaaaaatatagatttcttgacagtttaaaacagccaaaaaatatatttctatcaggttttaaaactatcgcctattcgagtgtcgtaaatactgagtagaataggagatagttgaaaaatatcgacaaaatgaaatcctgacagtttaaaaccattggccatactgtaatcgacaattttaaaccatgacctatagtataactgatggtttaaaccgtcggatacaccaaaaaataaaaataaaatatcaaaatttgagattatcttagatttacaacaacttaacaacaacaataatccatctccgctgctctctttgtgtagaaattctctctgagaactagattatctcaccacattttgtttcaatacaacaaatatatagatatatatatatattcgttacaaatacaaatatatatttatatatattataaatacatagaaaaaatagcaagatgattgaaaatctcgtgtgcgactaagaaaacaataggagtgttggtttttatggttaattatatcagagttaaaaaagtgaaagtagatttgatgaaaaataattttatccaatatgaaccatagcctaagaatctcaacataatg

SEQ ID NO: 323169 - DNA, 803 bp, Cannabis indica
ttttttttaaaaaaaaaaaaaacttttagaagagctgcgaaggaaagagtgatcaatttctttttttgcttaaattggtttttattgtcattgaagttataatttgtttggcgtacaagtttttgaagttgtttataactctcgtctttgaagtttaagggattaatgatcatgacgaagaagttagagataccagatttgaatgaacttcccaaaaaagtggaagtggaagaagatcattagcaaccaacaacaaagagtttactagtctacacaagaaggcgcaaaggaaaccctaatgataattacttacattcaccaccaaataagtggataaaagtaatttcagcagagacgaccaaaccagctgttgatgtgataagcacttcaataaaagttgaagctaatagctccaccaccgcatgcagcagctgccacatagattttgaatcttcagcacgccacagccacaaccacaaccacagccacaaccacaaccacagccacaacctcagcctcagcctcgagtgtgcctcacattataagtgtagatatatataagattcatgttgacgttgtatgtatatactatcattaattagtaataataagtgtacacgttagagactgtcagttattttaggtcaacctattagtattactatctgcaatttgttattttttattagttacatattttaggtcaacctatttagtttatgtttataatttaaggttttggatgatcactgtttatcatctgcttagttcttatttctttctcttgtaacgtagattttttt

SEQ ID NO: 323170 - DNA, 1440 bp, Cannabis indica
taaagaaaaaaaaaattaaattggatgggatgcacacgtaaacccaaccgttaatgttacagttttgacgtggatgccaataaaggctctcaccatcaattaatctattacttctacttcaaatactttgaaatttcctacaataacaaaaaaaaaaaccaatcatgagttcttataaaaataatatttaccataaaagtattaattaaaatctaaaaaaatgaaaacttatcaatatgtgactcgcaatgcggtgaacaatatatgtctccatgtataatcacctaacctaaacatacatacacaaacaaaacatataacaacatgacacactgagttaccaacaacacacaaagtaattttcaataaataataataataataacaataaagtcattaagtaactcatacaaaaagaaaataaattataaaataataaacgtataaaaattattaatagcaaataacagagtaaatataaccatcttagctttagtctaaaacctttttaaggaagcaatgcttacactttgtctatatattttctatgtgagaaatctacttaaactgttctctctctcttctgagtcttcgcgagattatttgttgtaaggacgttttctgtgatgttcatcatttcttggtatttcatcttctactttgtaaacttcatctgataatgattttttctgcatgatgtttttttcggatcgcttagtctaatcggccagtacttccagtcttgaagagattattgattaattctgtacgtaagatatctgatcttttaggtaattttttgactttcttgggaacattttagaaatcaatatagagttctttctgctatttgatcatacgattcttctgataatgattttatttacatgatgtttcttttagattgcttagtctaattggccagtacttagagtcttgaagtgattgttgctcaacacattttctgatcttgtaggtaactttgttggaaacattttagaaattgatatagagttctttcttgctacttgatcctaacttcttctgatactgatttttttacatgatgtttcttttggatcgctagtcgatctaattggccagtacttggagtcttgaagattgttgctgaacgtacattttctcatttttaggtaattttgtttttgtcttttgttgcaaacatttttgagcgatgtagagttcttttaattataataatcgcacttatattaattttcctataaattattcttctttcgtctttatataaatgttagttatatgacactacacttaattttgtttgttatatatatatatgttgagaatcatggagctccatctcaaaaccaattggtgatgagtggagtagcccatgctcttatatatgactcaatatttttacatttaatccaaatctatgtgggacaatgttta

SEQ ID NO: 323171 - DNA, 469 bp, Cannabis indica
atattgaaagaaaaacaatgtgtttctctttctcaatatcatcaccatcaagattagtagtagaacaagggatatagtcatgtttttgataaactaataattgtcacatgtatttgagatagaacattgctattagttatcatatagtgtctaacactatattgatgtagcacgttgcgattgattatagcagttttttatattttttattaaattaaattgtgtgggatccaatattaatttatactaataaactaataataacaatatgccacatgttatggtgtttggcaccataaggtgccccttaacttttctcattaattttacaaaaatcacaaactgattttaatataataactttttgttgtattagacctcacctggaccacttattattacaacttacagaaaagagaagaaatacaaataaaaaccagaccagatcctatgtggcttcgcctctagt

SEQ ID NO: 323172 - DNA, 505 bp, Cannabis indica
atgtctttaactaaatcatggaaactagaatgttgtgactgagctccatttatagcagtgactaacatcaaacaatcggtttccacatagtgtagttgtagttgcaattgttcagccaattggagaccccaaaacatagctttggcctccatttcttgagatttaaaattgccaacagcaggcttagacatagctgctacaacactacccgatgagtctcgtatgatcacccccatacctatcttactcctcgaagaatcaattgcggcatccacattcatttttaattttgtctctggaggaggagtccatttcacccgattaacatcagctgcaacacgaaatgttgctggtgtagcttgaagttgcacagaattgaaattggctagatatgcttcggcttgtgatgatatagccataggttgcttgagttgtttgccatgaatgaaattgtttctatccgaccaaataaaccacattgtacaaaacaatcgtccaattcaga

SEQ ID NO: 323173 - DNA, 878 bp, Cannabis indica
atcacctcttttttactagttattttacatgtttttcttccggttatctaaacatgtttgatatctcatttcttggcatttgataaagttcactataaagaaatattatttaaagtagaatgagaaataaaattccattctcttttcaaaaatagaatatacttgtcttgcaatagattatagagatacaaataaaactaatataatacggtaaaaatgaaagtaataaaaccgtaaaattttaaagttttggactaaattgtcccattgtgttataaaaaaaatgtaaatacatgagaatttgtaattttctatataaattggcacgtgggatatattacacatatatatatatattgatattatttaaaatgtaaaaaagaaaaggtataaaattaagaaggtgaatatttgtctagtctggtggcctgggctggttatggtggtgggcccttaaaggttaaacttgtagacttaagggccatgatattggctggactaacaggcccagcatccttaagttaagaggtcggtctgcattttgtgataattattagactgagcagagactcactaataaaatgtacaaaaattcaaacagccagacaaattaaattaaccaaaaaaaataaacaagaaaacgacttcaaaagaatatataggtacgtatccatagatatttaatatactataaaaatcaaagaaaattgttttatgtatttctatatttggttgtggagaaagtagatgaagatgagaccagagttgagtagtacacaattgggttcgtttggaacgtcgtattaggtcgtattgtattgtattatattgaattgtattttatgtaatatttttatgtaaaactatatgtggtatta

SEQ ID NO: 323174 - DNA, 1581 bp, Cannabis indica
tcatgatagatttgatttttctaaagtggtagtatttttggtatatatatatagggaaaaaaaaatagacatacatttcaaattatatttttattggaagttacgattttgggtagcatgtaaactctattacaatataacattaaagttattttcaaattttattctaaataatttttttaattagagtctagctattctatgttttattcttttagttagtattcagctcattttctctcacctcattttctcttgatttactttctctctcatcaattaaataaaaataaagattaccaaatgttaatttttaaaataaaaataaaaattaaatatatatcaaacacattgttatttttcagtaaacaaataacaaggaaaaaaaaacaaaataaaaattattcaatagtttaaaaaatttaacaatcatttttaagagctatttaatgagattatttctttttttttttttttttttagtaattcccaaagtcatatttaatgagattattcagttatctctttttgttcatcacaaaattttgtttgttgttgtctgtgtttttctttttcttcccttggtgattattttacacatatgcacctatatatatatatatattaaagaaatagtgtatagtgatatgatggtccagtttcaatagctaggtttgcagccttatatattgcacgcgaaagtcagatacatgtacatgcataatataaatcacgagatgtagtaatagcaataggatcatattcatatatataatttcaaacccaaaatgaatgatctgtatacgtatattaggaataaatatttttaaaaaaaggactacgttgattgtgtcagcataaagcagtactagagttttctcagctaatttcataaagatccctttccataatgactgatcgatccctgagaaagttcatgcatggttaattcgctcacgagagctacctacctacctatactatagcttattatacagtatggtaatggtatattcatacataaaaaagaaatgcatagcagtactttcttgaattctgttactatattgtattgctccggctgatgatcacaatattgcttattttaattcatatacgtaccaattattaattcttataatcaagtatgattcgcgccaccattataaatatatattgaaggtatagagatattaaataattaatagacattctactctactaaaaagaaaccgcagtcctgttaactttaatgaaatggggaagccaaaaagggaaagagaaaaacaaataaattgtgcctcttttgggaaaggctataagatggattattaatgatgccatataaaaaatgtatctattctatataaagtgtgtctatataaccgaattcttggtttttgagaaatttatgggtgattttttatttatattaaaataaaatagtttattattaaaaataaaatggtttatgagaaattcatgggtcactttttatttatatataataaaataaaaataaaataaatttcattaaataaaaaaaaatagaattttagattttctttaattatcgtattt

SEQ ID NO: 323175 - DNA, 1465 bp, Cannabis indica
atatttaaaaatattatttataatttgtacttttttaggggcccaagttttaaattagaacaaggcctccaaaatgtttaagacgaccctggataagttgcatgaggttctatctcaaaactaattgacaccctaccacccataagaagcctagcagaagcttttttaattgatctaataacgtgttagaatttaggatacggtgcatgaggtttcatgtcataatcaattggcaccctacaacccgtaagaagcctattcatttcataacgcttcgtcaaggctgaaaaacctttggcacacaccaaaaataaatgaggtgataaatgatcaccttgacgaatgccacattgaggataataggtcccattcgtcttctatcgtgaacaacatgataccaaacaaaattcacactacaaagaataaaatcaacccatctttcatggaatcccatcctcattataatcacacccaagaatgattgctctactcaatcatatgtttcactcatgttaaacttaagagtcatgaaactgtttttccttgcgttttcaacttaaaataattcatgacctaaataaaaccattatattatcagaattcaaacgtcctgaaataaatgcactttgagagaccgatatcaccatattaagcacattcttcattcgatttgccaacaccttcgatcccactttataaaaaaacattacataaggaggagataggtcgcaaatctcccatatgaattggactcttctttttgagtaattggcgttgaaactcttttatgttttaatttttatacacttaatctctttttttttgggaaattttacattggatgctgttttttttaattgtttcattttacacgcttaaaattatatttactgtacactttatatattgtatactgtgtatagtaaaaattgttaattttctccctttatgctatttgtatttgtaggatgtgttttgttttatttttcttttttaaaaaattagtaaaagctgatttaaaaagagattcacatatgtgataattttttttaataataacaatcaaattaaaaaaagagtgataaataagactctctttactgtcattgttcttccttcttcactgccattgttctttccttcttcttctttttattttttatctttgtatctttaatttttgtttcagtttcttcttcttctttcttatttctcttatttttgttagtaaattaacaatgggtaagaaatatttcaaagaaaatcctcatatccctacatcttttataacttcgaaaaggaaattagttgttcattatctggaaaagagaaaattagttgttttattttcgatgatgaagattttgagatacctaaagtgccgaaagtatttatttatttttttttgtagttattttagagttttttttttccttttttgtctgtagatgttctggtttttttt

SEQ ID NO: 323176 - DNA, 1965 bp, Cannabis indica
gatatgagtttataaatataaataagtttgattatttttttcaaaaaatcttagtttgtttgaataatttattgcattttcaatcattttgtgttatttttttaagtatatgtgtttataaataaaataaaatttaattttttttttattgaataatgtaggttttttttaagttaaacttaatttttttcaattaatttaatatttttatcaaatctttcaataattttttattgatttttttcggaagtagcagaatattataatttttaaaattaaattttaataaaaggggtagaattttgtattggtcaatgttcaggggaaaaatgctaattttaaacggtaaatgaatcaaaacctaacagaaggggcataattatgtaactaatatattttaaggggaattttttacaagctgtatattttaaggggcaagatcaggtagtgtcaaatgttcagggagcaaaaaatgctaattattccccctataaattaacccccaaaacttatttattgctcacaaaatccccaaaaaccccctttcaaaaaaaaaaaaaaaaaaactccaaaataacttgtaaatctattaccaatttatcattttcatctattttaggctattaaatagttatgccggattgttatgtgtatacaatgtattgtccacatgatacataacacaatttaattagtctacatagataaatatttaaaagtttaaaataaaaaatagaccattttaaaattaaaaaacgcatatgcttgtattttatttcaattttaataaaaatactatttattgagtttttttttttatttaaaataggtttaaaaggaaaatatcatttactatccttaaaaaaacccctattacaaaaaatatccatttaataaatctatacaattttatcctaataattccacactatacccaaaaaaaaactcttcccatttattttgttttaaaaacctaaaaaaattaatttttctctctctacatctctctcatcagcttgtccaaaaggaatcgtcgccctcctcccactatttctctctctacatccctctaatccatccaaagaacccgccaccctcaactcatctggtcctccgtggaagcccaaacatccgccatatcacattataattgaaagtcgtagctcgtgggttaatgggtaaatatttttaaaatattttattaaatgattgtaaaagtatagcatatttttggtagatctttgttttttcgttgcgaaatttatgctatgcaagtgcacacagtcacaatttgtaaaaaatcttggtaagaccaaatatcgtcccacaaggactgattattagttaccaaataattaatcttttctttctatttgatttaataaaatattagagaaaaatgaataaaacaaaataataattaaaatttagagaaataaacaatgaggaaaaacaggaattacccaaccatcttttcttttacttcttaaagaaattacccaatttctcttcttcatattcaatcgaaaaattgaattaaatagttcataatctgattaagatttacaaattccatctatgtgaaaactccctatatttctatggaaaaatttaatcatatagaaagtattaaatacatcaactcataaaattatacaaataatctaaatactttcgttctaaatcaatttgcatccataacaattaaagtatattcaaatcacttttaagaattttgattcgaattcgcaaaaattatatgtgatcaatcaataattgcacaatttaaatcagatttcatgtaatcgaaataataaaaaaagatgaaattgaatatctactttaatctatataaaaaaaatgaaaatagttcacataataatcctaaaaggattttgccaatgacaatcatcttaaacatccaaggattaaattaaaaacataaaagatgaagaaaatgagaga

SEQ ID NO: 323177 - DNA, 1239 bp, Cannabis indica
ttgctatatgaattttagttgcgatataagttgctccgttaattccgttaattgctataagagtttctgtgtaaaattccgtaaaaataacaaaaaaaaaaatgttttaaagtagtaaaaaaaaaaaaaaaacctaaattattttaatttcaatataatgcaataattatactcaatcttatgcaccaaataaatttatttatttatttttttctttctcttttcctaaatatttaatttaattttaaggtttaatgtttaatttgtagaaaataaaaggtttaattttttcactaataatatatattcttttttgacaaataataattatttaaatatttaaatgaggggaaattgggaaacgacaaaaaaggtgggacccattgcttcaacttcaccatcacaaataacaaggcatgcatttggacttggactttgttgacaaaatataaaaataataatttataatattattataaaaatagaagaatttgatggggttacaatctacaaccacatgattaatgattattatttatttattgaatattgattaggtatttgataattactattttggttttggctatcaatttttttcattttttaagccttaacctaaaattgtgtcttttagaggtgattgatggccaacttcattgataaggccttgccctctttgtttcttcttagaacaaaacatttcatatttgtgtttagtttcaatatgccattagtttttgtgttttagaaaatgataaaatgaagctttgttttgcaaaataaatcaaaataaataccaaatttaatctatgtcaaaattaattaaaatgaaatatgaattaggtatttttagaattataaaaatttagagtattttagttatattgattgaaagaatatttaaccgaaatcgagtttagaatctattttgtgaaacacggaatttgtttggggaattttcatttttatgattttttaaagtgtaagtttgcaaaaatatggtttttttctcaaaaaaatatttatggaaaaattttagaaaaaatatggaaaatatgaaaaaaaaaaacagcataatatactggttacccccacatgctaattggttatccttctattatccataagattacaaggttacccttacttaatttttccataatttttaactttttttttttatcaattttcccataaaataattttttgaaaaaaaaaatcatatttttgcacaaa

SEQ ID NO: 323178 - DNA, 1290 bp, Cannabis indica
aaaactaataaaatttaatgtaagcccaaataaaagtctaacaaataacccttaaaactaatacaggtgactcttaaaagaaagagtgactcagtgagttcttacagtgtaataccaatatcaagtgctactttgaagaagtagatattagtcattaatgaccttagattaatgtactaattaatgacagtattagctttaacattataacatgcaataacatgtttcttttattttttattattattttctttctccaagaaaactaattagattaaacctatcaactaacaagaaatagccttgcactttatcatgtaagattaagataagagtaccatcaacatcaactgatcaaataccttcgacattttttcttcttgtttttaggaaaaaatcttctcagtgccataaccataaggattgattatctgaatgatgctgtaatgaaacactccctctcaatgtgttcagagggcaaggatgaaatttgaaatgaagctttttctttttataaaaatttataatatatattatttaaattttaacacaatatcaattttaactttttttatcttcgtttaacaagtcgtgacataagaaaatttaaagtaatacatgattataataacatctctattgaattgctatattgtcacgacccgagccctaggccgtgacaaatatgtaatattcataatttgagtggtgaaaggtcacactttgacccttatagaaagataacacttataaatgatccttgaattaattatatatatcacaaaatacttattgaaaaataatgtattaactcctatatcgataaaaaaaatattagtaacaaaattaagaccactcattaatataaaagaataataatattcccacaattatatagtcaccgaatagatagatttaataggtcaataaaataccaaaataatatctagcatccatcattcctcttttcaaactagtacatagctaatttaagtcatcccgacctccatttcaacctaaataaaaaatctatttcattgaaagtttaataagtaaaataagacgaaacaaataatgattttcttctccaacggtaacatctccatccactagcatcaaactaagttcctggaagggaagaaaatagggggtgagcttataaagcatagtaggaaaacaactaatatcaaaagacccttggtttaataaaaattcctgcatggttagcttttaaaaataaaatatctcatcaccattataaaaatacataaacaaagtagagatgccaca

SEQ ID NO: 323179 - DNA, 1026 bp, Cannabis indica
aaaaaaaatacagtaaaaaaataaaaaatactacctaacaatatttttggaaaaaaattacaaaagttagtatatcatgtaaattttccttaattatatccatccaaactaaacaaaataaaaaagtagtctcataaacaatttaataatggagattttgatttgcactctataaatttatagacattaattacagtctttttgttggctaagttagcaaattgaaaaatattccaatttgtattaaaaaatatatataatatatatttttaatttataatagtatttttttagtttttttttttcaatattcttaaaaatatgtttttttaaataaaaataaattatattttaaatattatgacaaaaaattcaaaataaaaaataatatgaaattttgttatgaaaaataaaaaaattatacataattcaaaaaaaaaatatataaaaataaaattaaaataaatattaacattaataaaaataatatgaaaaataaaattttaaaaaatatgaagtgtgattttttaaaattatccttttaaaattagagtgtatgcaaataaatccaccctctcataatatgccaaacaccattatatgctaaattaaattaaataaatttcttttttataaatactaaattaaattaattaaatgatggtcccgaaaatcaaccccacccgaatgtttttcttttacacacaccaaacatgtcccacaaagctaaaatcacacttttctccactttctattcgcttttaatttcaaagaaaaaagaaaagaaaacttttttttaattattaattaataataattttcagataatattgacgtggaactgcatcttaaccatatctaatgataaaatttaaatttggtattaaattaatactaaaaaattattattctagcattaatttttttttttctaattccaatcacaacactaaaaattataataaattctatattttttattattctattattttattaatataataaaaatattttaatactaaa

SEQ ID NO: 323180 - DNA, 1209 bp, Cannabis indica
gattccttcagagaaaaactcaaagccttcttcctataacctagccgccaccttctctctctctcttcctctcttctaaaccgtagccctatagtcagtgagtcagtgcccacacacatcaagtggtatctcaatcatagtgtgtaaggctgtgaacaatccaaattcaagagaaggacattcgggcttagatctcggtgatactctgctacagaaaggatacaagggttagagatctaagtggaaggagacattatattccactgcaaccactgtaaggtttcttatactttatatgcgtttatttcatatcgtcttagaagttcatatttatgatgttaaataacatacttgttagtaaatctatgatcctggtaaaataattccaacattattttcacattgacatggtaagaggactaagtaacacgtgtctcatattctaatatgtgggtggaggtcaatgtccctaacggcctatacataattcatcagcatctataattgtcaattatctgagcagagttgcaaagaagtcattcgaccaggtagaagtctattacgccaaactgcttacaagagataattacctcagaatgatcttgtaatgttcagacacgaagacaatccctataatcgtgggattgagtcagagaaatatggcaacctattcaagttttctatttcgtgtattataatttcctattttagggaaatcatccctcatgcattaagcctttataaaatgtgacctagcctcactatggaggggatcgagagaattgctttagagagagactctagagagaaaatagtgatctaagagagtcaccactactacaatttagccttttactgacacgatttagtgacacacacaaaactacaggtcactaaagagttgggagtgatttttagtgacaggcacaattagactctatatattcagtgttagtctcatataatgtgtgtcactaaaaatatagaaagccactaaagagtaaaactcaaaattttctaatttttatttatttgaaaaatgctggcatatagtgacgcgctaggcacgattggataagtatatcccaacccacctggcgtgtcattatatcgcaatcataaatttacaaaaataaaaaaaatacagctgtgttgaccgaggtttttggcaaccaataaaataataataatttagagagctgtcagaaa

SEQ ID NO: 323181 - DNA, 1139 bp, Cannabis indica
ggttgcataagtgcaagaagagtaaatactcaccaagaacattctctgcattaaatacactcataaatatacagactcatggactaaggctcattaacgccccaaccacgtaaaaatccttctcttaatttcttacagctctttaatcttttattattttattggttgccgaaaatctcggtcaacagttggagtcatcccgtagctgaaatcaaggtgttattcgtctacgaagtttgatgcagattctaatcatttaagctcttttgtacatgctggccgaccagccctatacttagggccttaccagcacataggtttcattggccggccaaggtatggtccggccaaaaccttttggttggccatttccatcaatcttggtcttgcttgattatttggaactctttttaattgacgtgttgcgcaaggtgactttactcatctattaacaggatgtattttacgtggcctcagttttgcctatgtggacacgtcacgtcacgtgagaaaaaattaagataatatttgccccacgtccctatgcagacgtctggacagataggaattttcaaatcccgcccatgacaaaaaatgactttactgccaatcattatggagatttatgtttcgggtacacattttctaatttatgaattgtgagtcttctacacgactattcttgtggagaaataaccacccactaagttttttgggggaaaagactacggaacctacacaaggttcaacttttcttcattttcattaacttcactacaacctctctcttttctttgaactctctctataagaaagaaaaaaaaaagcaactcttcatttcctcatcacacccgacacctcaagctcctccatttctcgaggtttttgatttattacaatgatctaaccatcccccaagcatcgacaacgaccttcatcagtgggtaagtcttcaaatctcactttttcattttttttcttgaatcctccattgatgactatgtttttttcaagatttttgaaatcattgattctcacgttgtagtgtattattttttacactataatccacatgatcactttaggacgcataatgtatgacttcctgataaaaaatattagattttaggctccattta

SEQ ID NO: 323182 - DNA, 737 bp, Cannabis indica
tttaataattttgtaaaaaaattgtgagataattactataccatatatataatttttaataatttcaattaattttatataattttacatcaatatattataaataattatataaagaattattagaataattataatttgacgatttattaataatgctatgagttttgggtcacactttacaaataaattaaaataagattttagtctattcgtagttacgtattgtacttgggcttatcgcatcgtgcctttcgggtttatcgtgtcatatcatgattaatctcatattttttcatgtcatgtcgtattaattcgtaatatcgtgttttatcgtgttcaattccatatcctttcgtactagcttgtgcttcttagactcatgctgacttgtcgtgttaaaaagttcagtctatatttacaaaattgatgtaactactaaatcttgtaatagcagaataattatttgtatgatacaattattattattatcccaattttttttcctaactgaggtgacgtacaataaattgacatgtggcaaatataatcagcaataagcagatggatgattaataaatagactattcagacagaacttttttgaaaatatatgaataatgctcgaatatactataatccctttcgtgcagctggaaagatgtaacgttcttgcttcaagtctccattagaaccttacacccatataatgatggctcttatacacgagtacgtca

SEQ ID NO: 323183 - DNA, 562 bp, Cannabis indica
cacgtgacattttatttgggtttaacagatccattacaaagagggaccaaaagacttacaaaaaatgtgacctgaactattactgccaatttttaaagttgaggactaatctgcattaatcctaagtttttggagacttttaccgcaattatatcttttaaaaattaaatatataagtaaaatatttaataattaaatttgaccataattaaaatattttaattaattattaaataatgaattatattttataaatgaaatcaaatataatattttatttattactatataaaaaaataattattttaacatggtgtactacattccttgagcacaataaggactagtttgacacaacatttggaaaagctaaaagttgcttttcaaaaaagctgtgataaaaaaatgtttagtaagctgttaaaatataactgttgaccgagatttttggcaactaataaaatattataaaattattgagctgtaagaaagtgagagaaggatttttacgtggttggggcgttaatgagccttagtccacgagtcttttttattcatggat

SEQ ID NO: 323184 - DNA, 840 bp, Cannabis indica
aattaaatttaaatatttactgtaatttaaaaaaaaaataaattaaatattgtttaatgtgggccagtagctcactactaatagtttagtgattgagtgggacccacataaggatgaaagagggagagagcatgtgaacccaaaaaaaagtaacgaactatggtgggactctcttaactgccgatctcagaaagcgatagtagcggttgtcagttgtgacagttggcaaggaataagagttagaagaagaggcaaactttgtttgctttgcaagaaatactaataaattaaatatgaattgtttttattaggatttataagatgttgtcacgtatctttcttacttttctagctgtcttaccctttccttgcttttcctcaccctcaaaaaataaattaaataaaaatgtacaatttaggtttccttcaatctcacgttaccaccacattttttggtcttgcggtgaaggtcttttatcttgttccaacacctctagaatatataccctttttgtacatatatgtatatacataatatagtttttttttctcctttatttatttatttttttagagagaaataatttatgaaacacttatgagcaagaaactttgatagatgcgccaggtccgtagagataccaataaagattgacatcagtcaaaatgagatttctaatacaattaggaaagttaaccactaaacatgaaacataaattgaggaatacattcgtttttttaatcattaattttaatatttattaaatcaatgtctcttaaattttattaatcgttaaaaattctcttgaactattaagattgttagatttaaagatttt

SEQ ID NO: 323185 - DNA, 946 bp, Cannabis indica
ttaattaaatctaaaaaaggaaagtctacctattagtaacctgctattacatgttaaaaaaaaaatgtaaccatatagttacaataaaaatgtaaccattgaatagtcaccctttttttttaaaaaaataatatctagaataattttccttttcaacttagtatcacatctgtaatttttttttttgatggatttaattttatcaaatataatatttatttaattatcaaaatttatattaagaaccaactactcatgtgggggtatatatatatttattcaattatcaaaaattttatgggtattaagaaccaactatccatgtggggtgtgtgtacaaactatgcatatgtatgtatctaatatctatcactattagttgtgtcagagaaagatttatagggtacacaaatagtccaaacttcaaagtaaaagtttggtttaagaagaagaagatgaagaagagaagcattatttttgtgaaaagagaatataaagccataatagttagtactttcattttcattgtaaaaaacgatgtcgttttgcacttttattggcttttgtcggtgaaataatgaaacacaaaaaaccaaagtactagtgactattattgtgacaagagagagaagagaaagaaagagagtacacaaaaaagataaagccaagactgtttttgttatgagaattttgggctttttggccttccataaatgcacatttcataaccaaaagctaaaaaagaagaacttatagtcatatagacatagactagtgggtgcaaccatttaaattggtggttgctatgtctttatctcacaaaagatttcttattctttttagcttaatagaaatgcaactacggtgttcggtatttttgagaggtgtaatattattatcatgtctcacttattttactttaataaagattataaaaaatcgctaa

SEQ ID NO: 323186 - DNA, 1747 bp, Cannabis indica
ttaattaattaattaatatatgtggttcccatgcatataataaaaagtaaagggacaatcttcattttaagtttatttttgaatgtgaacagaagaaaccagctctgatcaactacggacaagtttccctgtatatgaagtgggagacaagttttacagttcattaatttgccttatatatatatatatatatttatacaaatatatatattttaattttcattataattagtatttatatattatatatatgtgtgagtcattttagacttatatggaccactaaaatagtttctttctgtatatatgattgataactatatatattaaatgaagtcatgtatacacacatgatgacaattcagttaattaatacagatctagttagaagacattataagaaaatggaaacaatatgttaaaatgtttaaaagaagacaaatattaaactagctagctagctagaaaattaaatatatatatatatatatatatacattaatataagaatagttatatatatatgttacccaatcaataattaattgttcattactcatgtacatatatatatatataatgattctcaatttgttaagaataatttagcaaaattatttttgcatgcatgcctatatattagtatatatataattaatgttatatattaattaccttataaattaattgatcacttattttttttggttaattaattatatatatttatatagttagggatttgtaattatttgcagcagaagagagatgtttggaaatgttaaaacaaaacatggacatagaaactcaaaataatgtttacttatacatataactatgcaaacacactcgtgctatcttggaaatataaaataatttaattaattaaaaagattatatatataaatattaatattaggtagcatgggatctctggtcaacaaacagacttctttttgctaaatgttcctattttatatgtaatctaatataacattctctatacttgttaattagtataaatatatccacattctactagggtcaataaaagctactgtgttcaatattttcactatatattgtattcttttgtttaaaaaaattaatatatgttattagttaaataaaggaaaccctagtgtatatacatacatatatgtatatatatatggtgtttcccccaagtactatagtgcaccatgttctccatttactgaaattgtgctaaaatgttgggatattacttcttctaagaaaactttgctccttcattgatcattccaaattccaaagattaattcttcttctctctctagctttgagctaataataataataataataataattagaattattttatatactatttttctaactttttttttcttttcaaatttacagtttgagtttttaaagttggttgtatgcactagttgtaatagagatttctgttacgtatttttctgtttgcaatttaaagttggcagcactagttgttaatacgaattttctatgtagaaatccataaaaatgcaaagaaattattttaaagtgtaaaaataaaaaaactacctaataataataataataataataataataataataataataataataataataataataataataatgtatatacagataaatattggtaaaggttttctgtaatagtatcgattgctagctttagaaaaggagaatttaaaataaaaagttagtggctttaatctat

SEQ ID NO: 323187 - DNA, 807 bp, Cannabis indica
ctttgataatgcaatactatcaactaagtcttcctccctagatctcgaaatcagaagcagtttatttatctgattatcaaaagtatacaattgtgatgagacaatatgtatttatagagttagggaggggacttagctacaaaaccctaattgggctgggcctgctcatcaaaggcttcagtcaactagaaaagcccacacttctgcttcacctagactttagcaaagaactatccaatcaacccaagttttaataaaaccaataaaatttaatgtaaacccaaataaaagtctaattttctccagtttttaaataattacttttttattaaatagttatttttttttcaaaaacataatattagtttgtttgaaaaagtttattcgattatttaatttatattaaacaatcactcctcatttttaacccagaccaatcacatattacatttttacttatggcttgactctttattgttattgttgaatctacttatatagttttcaagttgaaacttttcttccatttcgtaatttatcaagatttgataacaaatggtaacaaattaaaatatttttattaccttttagatatgcttcgggttcacattgtaattatgtcttaatcgaatttgatatttttaatttttccttgctaattagcttatactatttcaaaaatacttaaccttcagttaacaacaaattgaaacacaaaatcgtgacttttccaaaaaaaaaaaaaaaaaaaacgaactgtgacattacgactttcatggattgagtaaagtagtttttttttttttt

SEQ ID NO: 323188 - DNA, 2291 bp, Cannabis indica
tttttttgaaaaatatacatattgcagttttttgtttcttaagttttctatgatatattgtttttgtttatattttcatgagagttttcttagagtacagttgtaatattttatttgtatactagtatagttgtgatatttttgcaaatgtatgttcatcattgttatatgtgttttcggcagtggacacgtggaattcaggtcagtacctagaacccatcagtgggtctcccaaagaagataaagtgggccaagatcatttgaattggtccttccgagagcatacttcagccccgtgaatgtataaccttctactattgacaaattgtgtctagaaacatgtccagtactctgagtccggaagggtaagacaacgtgttcctgtaagattagtctagtttccctttttattcctgcaaataaataaggaaataatcaatcatcaaatctcagtagaggattgtatcaagacaaataggagaacttcctaaaacatatatcaagcaattaattcacagttgatcgcccacaatcagagtacacggtgttgaccaaatccaacaaaatccgatctacctagtcagtagaccctctccgttattggctggacttcacgaggcaacccaagtgtgcaattcactgtaagctccccaataagaaaaaaaaaaaaaaaaaaaagaaaactaaatgtaattctcaaattactataaatagctagtgaatcctatggattaaaggttgaattctcttgcaatacttgcctagaaaaacttgagaacttgcattcattgtattcgtaagggcttttcaagctaaagaactactgaataacattgactcgtggactaaggctagttaatgtcccaaccacataaaaaatattgtttgtgtcttacttgcttttttatttttaattgttttatttcttcagttctaattattttattagtttttttaaaatttcggtaaacattttggtgctttcattaagaactgaagaaagcagtgataccaactgaggattacgttcagtaaccatgctattcacccgaaccaagttaggtcttcattacactggtcctagcaccaaagttgggaatactgatgaacggcatgaggcgaccagtcactagaaaggtccctattgtagactttctctgaaatctgatcaggtcatagtcgaattaaggattgaagttcaactttatttttcttacacaatttttttctattttatagttcatcttttcatgagatctttttatatttttttctatcttattcctttgatattttctttgtattttaaatttgtaaaaataaaagataaaaagcattaaattgctccaaacaagagtataactaaattaaaaacacactaaaaattaacctaaaattagtactaaaacaacctaacatgaggcaaagagagagcagggctgagagagagtggggttttaggcggagagagagagagaagagagcagcgggtgtttcacattaggctttctgaaacgatatgttggagttagaagggaatttgtgtgaaattaattagttagcgtcggtttttaaaagatgattaaattgtttgcgttatttaccaaccagcacaagcatttttagggtaactgacgcataaaagacatattttttaaaaaaagaatttgtttttgccgtcggtctacattctagcatcgaatacatagctaacgcaaattcctaatagtttgtgttagttgaacaccgacgcaataactctgcctctattttttgcatcattctttctgttgaccatcatgttgaccgatgccaattcaacattttgtagaagtgattcaatattcaacaaatcacaacaagcaactttgtttctattttttggttgctgaaaaaaaaatcgtaattgttaattcaataaatcacaatttatgagaatagtgaaaatgttaatgtgcaccaatagaaacatgatagaatacatgcaatactatatcaaagcttaaactttattcttcctttcaacgactactcccccaacgtgaaatttgaacatctttgctctctatgactaaccaaatttaaataaaattattaaaataaattatttgaacggatcaccaaattgaaagtattagaataaaataacttaaatcttattcattgacccaaaacagagcatatagacatgatatagtttgttacaagattaaaaaaaaaaaagtaaacaactcgagtaacggaatcctaacaaccctctttaatagcctataactaattaactaacttaa

SEQ ID NO: 323189 - DNA, 840 bp, Cannabis indica
acactgatgggttcgagagatctaagagagagaaagagagaatgagtgttacccattgttccagaagcgtcgctgccgccataaaaggtggcgtgggcgttttgccaagagccaccagtgtaagggccagggattcttgcattggctaccgttaggagaaatgtgagtagtgctgtgatgtagaggacagtagcgaacgccattgttaacagtgggagagagagagaaagaaagaggtgtaggtttgatgaggacgaatggggaaagcgggaagagggtgggggtacttatggaggtggaaactcccctttctctctctctctctcttaaatttattacacccttaattaatgcttttgtttctctctctcttacatttatttacttttttttaattatggtaaaacaaacaaatttttcttttttcaaaggggtgaaattgtttggtctaaggaagaaaaagaataaagtatggtaaatttgcaaaactatgttgaattatttcttcaatatccttatgacaaaatacttccctagaatctattaaaaaaatactttgctagaaattctcaaaaaagaaaaacctttatataaatttgtgtatttttttgcatggctaaaaatgtatagtggtgaaagaaattcaaataaaagtaatttacatttgtcttttttttttgattaactagtaatgagaatttgataaagaatgttaaattggatttaagcactttattctttattctagtagaacttctattatttaagaatattcaataataatttctaatttattataaaaaaaaattaagttctaacttgaattaattataaataaga

SEQ ID NO: 323190 - DNA, 920 bp, Cannabis indica
aatataatatgtatggatatcctttgattggagttgtactctaaaaagaaaaatacttctcataagaaacttttactaagctcacttcaataacattatacaaaaaatacttcataataaaatattggttaaaattagttagtagctagtagacatattttgcactttttaaatttgataaataacatttatattctaccaataatttaaagtataaaataaatcaataatatccatatattatgcaatgataaaaaaagtacaaccaaaattttgttcagcatctatctactagagtttttttgtttctcactttctcgagataaaaaaagggctctcacaatttcacaaatcctagtcgcttaaggttagttttttttttcccctcccatcggctagggatggctttgccatcgcggcctcttgtgggcttttggctcctttttctccgagagggaacaggcgtctaatctacgttgacccttatagttgtgtctctaattttctctgtctgtttatacaaaagttaataaaaaaaattagtcatgtggaaacatcgacttatattaattatgaaaggttgtacattgattagtttagtcggattgtaatatatttttaccaattcaatataaatattcaattgtaaatatttaattgcaacctgttcaattaaaaaaaaaaagaaattaactcgcccaataattttgttggtttaattggataatcccatgatctttatgttagacatttatatgtataaactgcaatatatatgtttatgtataaaatgcggaattaaatcaaacatatatacactatgaatgaggatcgaaatacctctagtcattgaatctttgagctttagtcccatataagcatgatctgcaaaagaaaccgattgatgtgggtaatcgggc

SEQ ID NO: 323191 - DNA, 1489 bp, Cannabis indica
aaattaggctttagaggcagtttttaaggccattcagtgtcggttttggtaaaattcgctaccgacattgttccaagtgacactaaaagggttaaaaacaactgatgctgtagggaccctacgacgtcagttattataacaaaaccgcctccgactccataggaaccctacggaggcggttattactaaataaccgactccgtaggggtttcctataatttttttttcagctataaaattttgtgttttaatattttttttattaaaaatcttttttttttgatttttttcttatatatatattattttattattaatatgattaaattaagtttaaattatatataataagtataaataaaaattaaattgaaaagttatataaatatatatttacattactttaagtgtctgtatacagtattttttttttcttaaatttttttgttttataatatgtgtttgtattttcttagattttttaaagttatgttttttataataattagtatattgagtaataaataatatgtaatattttaatttttatgtaatttaatatttttataaatttaaattttataatatgagtttatatttttttcttagtatattagtatcatttttataatcctttaagttatgttttgtataataattagtattttgaataataaataatgtgtaatattttaatttgttgttttacttaaaaaaaattaatagaatttttctgtaaagtattaaaatcaatatttaggatgtatttattaattcttataaaactaggtaaaagaaaatatacccattcttttaagaattaattctcgcttttaatattgaatacacttatttgttcctcgaatcactcctttttatagattgtaaaacctgctcaagacatcccgtcctaagaaaaagaaatcatatgtcttgcctagtatgacttgatcaatgaacccatttagcaaagtgccacttgactacaacatgcatgttttgacttagatgtatttatattttcaaagtataagtagctatttatgttattttttatttaagcgtttatatattacaacgcataatttgaaattcgaactcaaaacttctaacacacgtactcttttatagctacttgaactagccccaagtgattagctatttatgttatctgcctatacctaacatgtgtgtattgagtccttgtcaaaatttgtacacaaaaatattagagaagtaaaactgactcgtgtactagataaattttaactattaaagcttgaaaaaactcttgcctttctattcgtagtattaactattatatataattaatttgaagtattaattattaggactttatgtttttttttgaaacaaagattgcaactttattaatgcaaatcagctaataaaatagcttccaaaccaatagggacagaccccctacaggaaagacggtcgagacatgaaccagaagaacgagctaacc

SEQ ID NO: 323192 - DNA, 1732 bp, Cannabis indica
gcttgtaatgtaaattcaccagcatttatcatgacgaattatcttgattgcatagtctgggaattgtgctcataattagattatttgagcaagcaaatcttgcaaatgctacattatgagtagataataagcgaattagtgaccatctagttgatgcatctaataataccataaaatatctgaatggtcgacatggtgggaaaataggcccatatatatcgccctgaattcgtttaagaaatctaagggattcaattccaacttttactggtgatggcttaatgattaatttttcttgggaataagcagcacatgagaactcattgtataattgaatcttctggtttttcaatggatgaccatatgagttctctattattccacacatcatgattgaactgggatggcctcaccgttcatgccaaattataaattattttttctggtttatgaacttcttgttcacaataacatgagtttctattatacttctacgtgtaacgtacaaaattgaagacaaatcagacaaattttctaaaatgtacttttttcttgaaacaatagatgtaatgcaaagatactcaatattatttttatctattgtctcaatataatatccattacaatgtatatttttgaaacttaacaaatttcatttttaatttggttgataataaggcattttctataataatttttgattctctaggcatcaatataattgctcttctggagccttcaattaaacttgcagtgcctgatattgtattaatattttcctccattcttgataaatttaaaaaatatatatcgcttctaagtattgatgagtggttgcactatccgccaaacatatatcctcatcattatttgtggaatcatgtataagatgacaaatgtctattacttcattaactaacaacaaagaaaaaacataataaatttaaaatataaatacttaaacaattaaagttcactacataaacatcctaaataaataaaacaccttaaaataaataaataataataacaataaaaaaatacaaaacaaagaaaagtgactctaattgtgaatattctcatctccattatcgatattcatgttgctattcatggaattttcattaaaaaaatttgcaacatccaagtgcgtaatatccaagggctctttgaaaagaccatcatcttaataggcaaaatttgcttttattttctccttcccttttaaagattattgataaagatcaacaaggttttttgccgtatgacaggtacgtggctagtgtcatttcattccacatctaaaacataagttttcagaatatttacgattattattttgaggaccttttctcttgttctcagtagttgtactttttattagagtatacaaacttttatttgaccattatgatgccaaatattatttcgaccgcgaccgcgactttgattatgatcacgaccatgtctattactttaattatgatcaaaaccacgaccatggttatgattgtcagaaattatagcattcacttcagggagtggggcagacctaatgaggcgagattcatgatttttcatccaaagttcattattctgttcaactactacaagatattaaatcaattctgatgaatattttttaaaatttcgttctctatattgttggtgcaggagcacattagaggcatgaaaagtagtatatattttttctaacatttcatagtcagta

SEQ ID NO: 323193 - DNA, 1009 bp, Cannabis indica
ctgtggacttggcttgggaataagtgtaggccatcttcaagttgacctagcacaggaaaaagttaaaactcgaactggcaaaaaggcaaaacaaaagtaaagaatgaaacacttacccgagcagcctccttcaggactccacccatcaccagttctagggacagctcattgtccgccccggacagctgatcactcacttcaagaagtgaccgatgcagataatacaggagcatgtccttaccctttttggcctccatgctcaacaccacagtagttgaagaagtcttagtctgaccagacccatctgagatcccccctttggagctcttagattttgagacattttgaaatggagggtccacggtaggcactacctcagagaggtctattacttctccgaccagcaccttctccttagatggggcctcattgtctctagatttcttgggtgagggagtttggcccgagctgtcatcaattctcttctttaaaccctgaggtatcttctgggacatgactacatgaaaacaagataaaaaagtcaaaagcaagtatgatgcaaaacatgttatgaagtaaataaatacaagtaaaaaataccctgcacgtgggcaggagcattggcccgaacaagtaaagacggagcataatcatctgaagagtcttccttctgctccatcaagatggctttcccctttccctcaactggggaatatggctggacaagcatatcaggttccctaatcctaatagcacgttccagtggtgcctggtcacttggaagagccttcttcctcttcttgctcggtttctcttactcggtcaccccgacttggctaggctttacctccttcttcttcttctgttggaaattattttagatctctttctctaaatctttgatgctgaaactcctttttggggcactattctcacactaagaattttgaaattcaagagacaagagaaagaagaaatggcagctaaagatagggagagagaaaggctc

SEQ ID NO: 323194 - DNA, 2007 bp, Cannabis indica
tttgacctatgagaaaggaaaagtagaattggagttgaaaaggtttgtggatgcagactgcgcctcaaatagagatactagaaaatcaaccacttcctatgttttcttgacaaactggaactgtataagttggaaagcccagttacagtctgtggtttctctttcaactgcagagaatttatggcgactacgaaagcttttaaggaagcaatatggctttgtagagtactctatgagttgaaacaaaccaaaggaggagtgactgtgtattttcacaaccactcatccatccatatttgtaagactccaatttatcatgaaagagtaaatatatagatatatgactctactagattagagagatgatagaaaaggattacttgatttaaagaaagtcaaaactgaagataatcctgttgatgttggggctaaggttaaccttaagcaagtgcaagcattacttgaacttgatcaatctcagaagttagtatactcagattcctagaacactaatcactaatggttgtattctttcttcatcttcgtcattcttttcatttgaagtaacaaggtggaatttgtggtatagtccctccaaatgaaaaggtctgcatagacatcatttctggaaagttgttcactcacggttgccagtcccgaaaggagtcttatagaatgatagtcgagtctggatgggagttcctaaataactatcatgtccactccatgtccagtcttgaagatagctagccctcccatggaaaggagtttcagctgtctagttgtcactcctggaatggttgatccagatagtagacttctgtagactatatcctatctggaagcgtcatcagtgagtattcttggttcgtgagtccaggagctcatatatgttcccggaggctctgatacttaagctgacgtggagacttcacttaaagaggagttggttaagttagttatttctaactaacttaacaaccttgtttcttacaatcaccaactttaagatcttaatcctaagcctataaataccacattgtctagttatttgacgagagacacaaaatatatacaagagttagattaagaactcagagagatgagatttgaagtttgagagtaaacagattgagaggtagagagagatgcagagaaagagagggattagatttgtgttttgtaagaagaatcttagatgaagagaattcttgggtgtaagtgtgagagttgaaacactttgtgaggactcaatagagaatcttgtcttgaatgtattgtacctattgttgctcaatcaataaagaaggatttcaatggtattctaaaactagagtagagtcatagatcacatcaatctataggactcgagccagtatataccttggtgtttatttctttattttcttcatttattattttctggttttaattactctattgcccttcttttcatctgtctgttgctttcgatttgataatcttgtcattgctaattgtttgattgttaaagttttgacgttttgattttgcactatcagtcataatgtttattattggtgtaatcaggcgtaggagtttaggttaattgatttctttaaaccattgttttagttaataacgttttggcattcatagtaggaggattttattgtttgcttacatgtcacaataaataattaagtaacgtcaaaattgtaatatttttttatcacgtatattaatgtaaaaatctctaatttttatcccaacaaatttgcatattgcaaagattaaaacctaaaaggttaaataaaaggtttaggtaactcaaaatcatgaagctgttagaatggagagataaaaatggggttagtcacacaggtgtgaagggcagccgagagagtagatagacgagaagcatgtaaagtaggatctccagtgaaatagaaagaaaaattatttctcaaagagagttaaataaagaattaattttttttaatgtagtatcggaaagaatagaagaag

SEQ ID NO: 323195 - DNA, 1026 bp, Cannabis indica
tcaggtacaaatgaggggccatgatggggtatgatacgggataaggtcgttgaatgtagagttaccctaccctgcaattatttgatttgtgcatgacattgatagggtaaggtataatacgacgacaatgttattgaatgtagagataccatatttcatagcaatagtaggactaaatgtgcccatgttattgttaggccaatataggcccagattatgtatgtaatgggcatggtatgataaatggtatgatatggttgggatatggttatttcatagtattatggttattctatgagtatgatataagagttatgatctctacgtatgatgttatggttttggattagcatggacgcatgtaatttaatttttcatgtgtagaattacttgcttgtcgttatcagttaaagtatgatgttgaaatacttaatacattaagaatatgacagtattgtatatagttgtattgttatgaattaaaaaaatgtatggtgtattgaatgttaatgtgtgttaaagtttttccttactggacttagctccccctcccccaccccccccccttaccttttcccctataggcaatagatatggaacattgaatgtatgtttgatgaactgagtcagttctggtatgtatactgcgatggactatcgacgagcaaggggtctaaaatgcctgtggagccttggttttctttttataatcaagcttccaataagtagatctagaatttacaaagtaaattctctagtttattaattcctccttgcgccactatagattcggaattacactcttaattatatagatcgctctatgtgtaccaagatatagatacgttatgaattatctattgttataatccaaatagtcaaagatcctctatagatgatctacatcgaatagggataaatttaccgttctacccttcaatgtatatttcagtaaaacacttagctacctataaataatattcagtaaactaatataattaataaaatgaggcctcaatcatttat

SEQ ID NO: 323196 - DNA, 1415 bp, Cannabis indica
gagagagagagggattaaacactaataacacataaacacttgtattaaacataagattaccagtcaaaaattacctgtgacttggaatcttcattgttgtatgtctgaaacgttttgatagtggaatcgagctctcagaatttgaggagcagctcaaacggagacgtagccaactcgttggtgaacttcgggaaaaatttggtgttttctaacttaaatctctatagcttttgtgtgtgtatgggtataaagatcagatcattgtagatctgatctttctgctgggtttgtgtttgggatttctgggtttctagggtttggattcgagtttctctttgagaaactctctgctagggtttctagtttttcagagagaaaggaaggaaatgagaaggttctcgatccattcctaggtcttgttcaaagacaaaacggggtcgttttggggttaactttgaaaagtcaaagtgaacagagaaaggtcgaaattgaccttgaaattctgatttgtttgttttgttggtgtagggacaagatagtaaatttctatcttaaatttcctacagttataattatttaagatattttgtaaaattttgagaaattcgaaaaaatttaataagccgaaaatagctaaggatcacacgtgacaattttttttttttttattttaatacgcgtgtgaaataaacagtttgaacattaaattttacattgtaaattattttaaatttcttcaaaattttgtaaaatgtattaaattattattacgtataccattatgaaaaaaattggactaagaaattagatgctgaaacagctaagaattgcaagtgtaactattttagtggggtgccttgtagtcagggtctggcctaagcataggcgagctaagcccgtgtctagaactcacatttttcgggggctaaaatagaaaatgaaatatcacattagatttttatttaagtaaattcaatcgtattttaaataataaatattcacagattaattaattagagtgtatgatatattatagagatgtgagtactagtcttataacagtgttcttattagaacaatatattttgaaggtggaccctctctataatataagtatatgtatgtatgtatgtatatagatagatgaagtaatgcttgtacgtatagatgataggtttaagatcaacacacgcaatactattcagtctttatacatattaattaatatatatatatatacggccccacccaccgtaggggtgggcatcatccaatccaatccaattgaaccgaaccgatccaatccaatctaatccaattacaaaagttggatatccaattacaattggattggattggatgctaaaacttggattctaattggattggatcggttattgaatgtcaatctcaaa

SEQ ID NO: 323197 - DNA, 1003 bp, Cannabis indica
tttttatactgttcacgtggcttaaataaatattgccacgtatatcaggggcggactcagcctaaaactagagtggcctatacgctatagccacttaaaattttttatttacaatttaatctaattttcattttttttttttacattggagtgttatccccttattcttctctcattacaatacaaattagtttgtgattggaaaatttatatggtatattaattttgagtattttttataaaaatattgtcatgcagtattttttatttttttattgtatttttaataagttttatactgttgtatactgtgttaagttttaactggtgttttttagttgttctactattgttttgagttgttctattttgtgttttattggtgttttataaaaacacagtacttttgaaaacttttccgtgtgacagtatttttgtaaaaattaacttaaattctaatatttttataaatttcccttgtgattctatttggaatttggccttagttgggagcttgctaattggagtgatagtttgtttgtgggaggttggttatgttgatgcagatagtttggcaaagtgggctgggttgaatgatacagaattggatttggatttggatttggattttgtgaatatgaatgtaaatgatttggattggactggattatattgtatctaataccatgtttgggaaaacataaaattaaagattggataaaataataatgtgtttttatatatgtttgagctacactaattttcttttaaaaaattatataaataaaatacattctctatcctgtcatgggaatatatgagtctaaagtaaattaaaatttgaaactctcagaaatatatataaaaagatattgaaaaagagtattgtagaatttgaacctatgacattgtataatatgttatacagggacggagctaggacgggatgtttgggggccaaaccatataaaatttaagtgataaatatttcaaatatatttaa

SEQ ID NO: 323198 - DNA, 1585 bp, Cannabis indica
aataataataataataatgacatttcactttattaatttcaccgtaccattttaatgataaattgaagctttttgctttcaagaattttaaattagtattgaggacgtttttttcaaaagaaatatagtagcatcaaattaggtaattctataataaacatcttcaaagatactataatacaccttatatttgtttaagaattttttagttcaattattttaattaggataattaggatttttgccccctgaactttgacatgtaccaaatcatgtccctgaacttttaaggtcgtgaaaaataccccctgaactattgagattgttagatttaaggacttttgtctaatttcattcaattttactattccagtgattggttatggactaaaccatgatccctaggctttgatatctaccaaatcacgcctctcgaactttgatatgtactaaattatgtctcttgaattttcatccatgttagacttaatattttatttcatgttttacattttgctcatacacgtactaaacaattatttgaactttactcttggtaatctcaactgttcaaaaatttctaaattttttacacatagtcttaaataagttgtggtgttgtgtgatcaagtcacttgccacctaagcaatcaactcatcactcgaataagaagattgttaagttagttgtactagttatttttctttcttactttcaatttttttaccgatatctatataaagacttgtcaaaataattgtaaaggttaatcccattattaatagcagagagagtttaggaggtatcgagtgattgaatcttgatgtttggtaatgaaattttcaccacaaagggtatcagagctgaggtttagattgaccaagattcaagtttaaagtttcaagaaatcatcaagaacatgaaagtaatactaataaaaacctaacatattctcccaaactaaacctttactcatcctcgaataaagaactaacaactaaacacgacacgacataaatgaaacaagtcaatcaaccaaaacatgagtcccaatctttcaagtaagccaaatagcatggtttttacaaaagtttcacctatatgttttaatcgagaattttagcttaatcacacccttaactgatgacctcaattctttcttttagttcataaaaccataatcggtacttaactaacaattgaaacaatttatgcatgccaaatactacttttaatccactaaccaaatatgttctatatgcttgcaatgctcactattctccagtaatataaatagatacataatcaagaattacaaggtctttttaggcatataatgataggcttaggcacaggtggatagaataattatttaggttcacatataccataagcttctccaatcaaaccattacacaatttttataaatgatcttgatatcccttttttctaattacatgagagaacctttttctcgataaccttggtaataactttttttttttcaaatatgacaccttattgtcaaattttcttctttttctttctttttttttttttttttttttttctaagtttgttgc

SEQ ID NO: 323199 - DNA, 951 bp, Cannabis indica
ttggtgcaattctcttaaagtcttaatgtttcctaggcttaggcaattgagaataagaccaatgtatttagggtttaatgcaactgtttctaagtcctaatgtctcctaggcttaggcacttgagaataaaacaatgccctgtggacttgatgcaattctctccaagtcctaatgttgcctaggctacctgtcaatccaaaagcttgattctacttctttgagatgggattgaaactgatcccaggaattcgagcaacaaaatccttgaatgattttttgaagcgaagaaaatcttggcaactaagaggaatttcaaaaaaatcaaagaaaaacaaaaataagggaaatgaaactcttatctttatacatagggtttttataagtgtcgacatctcccgttgagatcatgacacatggcaaaaggaggctagaggttgccccatcgaaaggttcacaaggagcattggtaaacatcccttaaataggaaaacaccaaagggtttttgatgatgtggcaccttagaaatccaaaataatgataactaatcacccttcataaacctcaagaaggaaattcaaatttcactcgcaacatgacaactcgactgtccttgaggataatttcgatgcttgataaacaacagccattgcaaaattaaaggcatgtgctataggatgatttttttcacctaaaataatgagttcatactcatatttgattgacatgtggacctagttccctaatggaaaagaataacgtgtcaacactaccaaccccagttgggttatccttgcatgatcgaaacttacgataaggtgtgaccaagatagggtctagtctcacactatgcaaggcatagtaagagaaagcaggacactgagagaagttagcatagtttagacatatatcgattatatgtgatgaccaagtgtgttaattctatttttgg

SEQ ID NO: 323200 - DNA, 704 bp, Cannabis indica
aaagatactccatgcctaagacaaaagaagttgggacatgggattcccttgtctcaaccctcgcttagattcgaagtacccatgtaaagagccattcaacatcaatgagaactttggagttcacacacaagtcataataagctcaatgaacttttgagggaattgaaaggcttgcaacatttcttctatgaaaccccattcgatagtgtcataagctttctgaagatctagcttgaacatgcagcttgctctctttgatttctttccataatggcgaataaggtcttgatagatcataatgttgtgaccaatgaacctgccatgaacaaatccaccttgattttgagcaattaaattaggaaggacaactttgagtcttgcacatatcagcttggttgttgccttgtaaagtgcattgcaacaagcaataggtatataatcactcaccagatttagacacttaatttttgggataagagtcagaatcgtggtgttaatctccttcaaaagatgacctgaatgaaagaaagcactaatagcatcaaaaatatcagctccaatgagatcccaattatcctgaaataagaagctactaaatccatctgaacctggggattcatttccaggaatagagaaaaaaaacagctttaacttcatccaaagaaactggggaaagtagaataacaactgttggaaattatttt

SEQ ID NO: 323201 - DNA, 1456 bp, Cannabis indica
atgagtttgaggaagatggtgggaaaataatttgtggtggagatataggtggtgtagtaggggtaggagagaagtttgaaacaacaggagtagagacaacatcagatgtttgaaaaggaaatgtagtttcattgaacaaaacatctctagacatgtaaattctaccatctttggcaaggcttttttagcctttttgtgtaaggctataacctaaaaaggtaaaaaaagttgacctataattcattttatttctgttatatggccttaggttaggaaaacaaagacaaccaaaggttttgagagcagagtagtctggtttagtatgaaacaaggtttcatggggtgtgaagttgtttaagactccagttggcattctgttgatgagatacacagatgttctatatgcatcgttccaatacttaagaggcaatgaggaatgagctaagagagtcaaaccagattctactatgtgcctatgctttctttccacaactccattttgttcatgggagtgtggacatgaaactctatgaatgatgccacaagactcaactagagaagtgaaagctctaaattctcctccccaatcagattggatgactttgatttgatgattgagttgtaactcaatctgtattttgaatttaatgaaggttggaagagcctcgtccttagttttaagtaaatagagtcaagtgtacctagagtatgcatcaacaaaactaatgtaatatctatatctattggaagagatcacatgggctggaccccataggtctgtatggagcatttgcaaaggaacaatatagacagtttttgaatttaggtaaggcagtttgtgatgtttaccaagacaacatgcagtacacaaatcaaaaacatttttattgctaggagagatattacatttagccataatagattatacaatttgtttagatggatggcctaaacgattatgccaaagattaaaatttgaaaaaggtacagtagaactgaatgtttgacattgaagtgcagactttggtgaggaaacaacatctgtagtagaggagctacaattggagtgaagactggattcgagaggctggtcaaatttatagagccctttgtcaaccttcccaaccaataaagtcttcatagtagcctgatctttcacaaagaaaaaaggagggtgaaactcaaaatagacagaattgtcttttgcaaattgcgagacactcatcaagtatttggtaatgtcaggcacatgaagaagattatgcaaattaagggactgagatgtgaaaggggaagtgaaagagttgtgacaagtgtgatgaatgtgcaaacttgagccatttcccatgtgaatttggtctgaacctggaaactcttgtggagccatcagattgtggagatctggagtcaagtgattttgtaacaccctaactaacttaggcgtattacgtgattt

SEQ ID NO: 323202 - DNA, 1508 bp, Cannabis indica
gagagagggaaggagaccgattacccatggtagtcaatttcctttgcagatcaaagcttgttgggattgaagctaaaagaatcaataggctggaggtatttggatccttaagttataaagtgtatatatttgtttattccgtatttttatatacacatacatattttcataattcatacatataaaagtctaacagttggtatcagagtggtttagtctctgccttaattttatttgagtttcatttatatatacatatatatattcatacgattatatatttttatctacgtatatacatatatatttacttatatatatgctatatacgtgtatgttttaatgtatacgtatatatttcattcatatgtgtttttatatattatacattgaatatatgattttattgcataaaaatgtatataatattttcttccatacatttataatgtctttatgtgctatatacatgtatatatatataaacatgattggagtttttcggtctgattgttggttttttctgtttttcattttcggtatttatttcgaattctatatatattactatattcgtatagtattatagatcgatctaagcatgtgaaaatcatttgaaaaactcaaagataaaaaaattcagtaaaaaccttttcagacccgacttaactttatgatatttaagtttatattttttttcgtgttttcgtacataaaatctatatggatctctttattattggatttagaacatttcagatttgaaaacacgcaatttgatcgtcaaaattagcttttccggttaggtttgggttgggttcgttggacccacgcggctgaaacaggttaaaatttacccagctggaggttgaagaagcaaccaaacaacatgtcgtttttcacagtgtagaaactgacatgtcatttttaatggtttgtcgtagccttcattgctccaaacgacgtgtcatttttcatcgttgtgggcagccttctctccataaaatgacgtgtctttttcccgtctgcgatcagcccttcaggttgaaaaatgatgtgtcattttgccctttgtaaaaatgatatgtcgtttctggcagtgtagttttttaaaaaaaaagttggaaaaaattccgaattttaatattttttatttatttggaatattgattattttcctattttgtgttataatttaatcaataatttgcatttattcaatttccatttttatttaatacatatatttagaattaatatgttatttagtataaattgaaagtgaaaatttattttaatttggtaatttattacatgatttatttagtcatgtaataattgtacaatttgtataattataaatttaattatttattaccatatttatgtaatatattgtttaaattaaaaaaatttgaaaaatctgtcattaagtatattctttaatttcgcatttaattcatttcatataattaattgtactaatttgtatatttaccttatttata

SEQ ID NO: 323203 - DNA, 675 bp, Cannabis indica
tcggattataattaaattttattttgacaaaaatcaattcagggtcctatttgtactattttaaaaaatacaaggtccattttgtcatttaacaaaacacagggtccaattagtaacttttgtaaaacagagggtctaaaatagtatttaccctttattagtgtttgtcaaatgtgattattgaccatgggtcgaaatatatttttcctgcatcattaatgttattaattagtcaaaggtagtcgttgaataaagccataaaataaattctgggatcatcagtcttatatttaattaaatttatggaagaaaagtaacgcactcaaaataaatatcaactatataacaaggtgataatattatggatacattataataatatgtaaggttttacaaattttgataataaataatataaaaaattattaatttattataaaacggcatgcatgttaatatatagttattattaagcactttaatatattaaataataataaataattattaatgtattaattttatagtgctcgacatgattatcatttatcaacttataaatcgttagtgattttatatacttattattaaagtaaaatactagaacccaatattgatactatatgtaataactaaaatattcagttattattttcctattatgctagtctataa

SEQ ID NO: 323204 - DNA, 570 bp, Cannabis indica
tctttgtatagaaactatgaaaaggaaaattttcttataaataataattcaaaatgacgcccagtaaacttacatggtctgcagatgttgaagtttggatatgtcattaggcagaaagcctttgagaccctggttgtcaagaccactgggaggaagggtgaatacataattactaaaagcactaacttgataatggaagaattacaaaaataagcataaaagataagcctaatcattcgtgtatactctttagagatcctttgctgtgtgtgtgtgcaggtgatcacaggtgtttctcaacaccaactacgaccattatagacttttgtccattgaacttttctcagttgcaaaaatttatcctaaactataaaaattgttacaaatattctcctgcagttgcattttgctcaattctttaaataaattgttgatatagcactaatgtaacgttagtctagcacagttcaagagtccaaacaaaaaataaaagcataaatagcagtctaataatgaataatgagaatatgtatgtggattcttagagctactaattgtatgtttaatgtc

SEQ ID NO: 323205 - DNA, 2403 bp, Cannabis indica
acatgcgacacattttatcacctctaagtgcttgccacaatatttctattttctttctttgagggagtagctccctttgccacaattacatctaactactcttgattttttcttttcattctttggctttgagtggtattccagatattaaaggaaaaagaaaaaatctcggccacgtcactagcaagtaagaccaaatgagcatttacaatcacgaattcaacactaggggtcccaaaacccacaacagggcagctaccctagcctcttctcccaaagccttagataataaattgagacttggcccattttgaaatttattggactgttctcaaacttctctgtcaaaaactcattgtcctactcacttaagtttcttgggtttttttttttttaaaaaaatttaacatttataatggggtaaggagtttagtctcacatcatcaaagatgtttaatccgtaatcaactttatagtcattagatttagttgtgagctatggtttttggtaggaaatttacatagtatactaacttttgtcattttattacaaaaatgttgtcaggcgaatctttttacttttttactgtatttttttattaagtttcatactgcagtatactgtgttaagtttcattagtgttctactggtgttttttagttgttctactgttgttttaagttgttctgttttgtattttactagtgttttataaaaatacagtatttttgaaaagttttccgtgtaacagtatccgtgtaacagtattttgtaaaaattaactcaaattctagtatttttgtaagtttcccttttggtatcatacgttcgtatttgtccaccagtatttttactttttcatgtattattttaatattaataatgtcattaaatgggaaatttaataatatatgttaaaatattggtcttaaattattcctccaactacacaaattttaagggctattattaataatataagaaaaataattaagatttagataaatacatcatgaaaagtaaataccactaaatatgacaatatttaaccaatcaaactaaaaatatgattttaaaaaaaaaaaaaatacatataaaacattaaaaataaatttaaatttaaaattcatcatttttctcgttctctaaaaaatatatacaattctctctattctctgatacattacaattctctctctctactgcaattctttctctgattccacattcgacaatttaaaaactccagcaatataaaatctaccaattccggcaacggcaggagcaatacaagaagatcgacactgaaaaaaacaaaaactccacttccagcagcaatacaaacataatctcgaagaacctatcaagctctatacatagatttcaatcaacagttaaaaaaaaaactctctgatcatccctgtcaacaccggtaataacaatgtcaagtaaatgtatatacatatacataaataaaaaaaaatgagaaagaaaaaaaatacaatatatatgtgcatttgtaaattgatcataataatataaatatatataaattaaagatgaattttagacaaaaaaattatattattttgcatttcttgataatgagacgtgaattaataaatattgattgagactataaagtttcacaactaactacatgttaaaaatgtaacattatgaaactttaaattttaaacatatacactcgtaataaaaaagttactgaataatatgaatcaaaaaccaattactataatttatctattaaacataaacaaacagaagacttattagaaatcattttcttacatatatggtgaaataaaaacacataatttgcaaaataaacaaaaaaaagtgatcaatttcttaataaatcataatttttaattatttattttcaatatttaacaagaattgactgaaaaatgtgtgtggttcaatatggagggcaatggaaaggggagaaaaaaatatgaagactgcataatgacatgactactaataccaaccaattatagcctaaacagcttgatgaaattagtaaagaatgaaatcaaatgcaacacaccaatagaaatgcatgaccaattatgcccagggtcaccaccaataaaaataataaagtgacaactcattgttattctacatggaactcaaaaagaaacagaatgcagttagtgagtctccattctgcatcacaactatagatgagacaagattccaaatcattgctcaacaaacatcagaaaatgaagttgtaacacaaaacacagatgttcagaaattggttttacaaataaccaaccagccatcattcaactataagcaatataatgatgaaactttagaaataagtgaggtactagattacaaacatatttcaagtagctgatagt

SEQ ID NO: 323206 - DNA, 849 bp, Cannabis indica
aaaaatttaatctaaaatactaaataaaaaataaataatcaaagtagagtaaaaaacaaactttttccttattaacttttccaagaaaaaaagataaatttaattttcatatataacatgattaattatcaagtaaattaaaaaaacattaaaataaaagtaaatatcattttggatcttgtgttttgtaaaatttgtcaattggaccatctgttttattaaataacaaaataaaccctacattttctaaaatgataaaaataaaattttgaactcaattttcaaacaattttattttttaatataactaactttaagataatttccaatacgaacaaatacagaaaatataactaattttatcataacattaatagatcagattttattaagttttattttgacaaaaaaatcagttcagaatcctatttgtacaattttagaaaatacaaagtccattttgttatttaacaaaacggaaggttcaattagtaacttttgcaaaataaaagattcaattagtaacttttgcaaaacacaagctcaaaaataatatttatccttaaacaatataaaaaaaaactaaaaaaaatgtccatattataatcagaggtcttctaacaagtaatattagaaagctatgaaatggggagcacttttttcccacattacttgcactccaaaagtttctttgagaatgttattgactgaagttgaacagatgaaccatcttttctcatctgcctcttccaatgaaaattaaagcccaagacaccagaaaacctacaaaccaaagagaagaaaattatcataaaataataataaaaaaagtgtgaagaaaaaaaaaaa

SEQ ID NO: 323207 - DNA, 1732 bp, Cannabis indica
aagttcaccttgtcaccaagaactgcgattgtcagatggagcattatgtcttcaatagcataaacgacgagatttacattatcaacctcgaaaagacataagaaaaactctgactcgctactagggttattgttgctatgcatctagtgagatgtcccagaacgatacgctttacaacgtatttaatacatgtttgcattgacccggtaaaagcgaaccaatcacagttgtgtgatttttagataataaccgcatttattttacgtaagacgcaatctaatcccacaaattcaagggattattgttgtaagatattagtctaatttttagttcactaccctcctatgtaactataaataggagcagtttacactgaaaaagggacgaaaaattcattagagtaaaagccctagaattgtatcagaaatctaataacattgacttgtgaactatgcagaattttaactgcaaaaccacgcaaaaagctttgtgttcttattttttccttcactgcttttattttctgtgcaaattcctcacgatttaggctttaatatagttaacgaaaatctgcgttaacactagctttaatcctatacttcgtataaaggagagaaaaatgaaaagatagaaatgtatctttttttttctgttgtttggaaagaagaaaggaaagaaaaaaatataaaagtgtaattacataataacaaatacatataaataatatctaaataataactgttaaaaaaaacttaaaaacctaaaaactatataaaaataactacaaaatagcaaaaagacatgcatcaacctcatttaaatatgtaaattattcataaatcaactctaaaaaaattacaagacgtaaaaaaatattacttttattaatcaaatattaatcattctccccaaacctaaacaacaagcaaaatacatgtatacaacaaaagtaacaaaataaaaatgataaaacaacttaacatcaactcttcttaaaccctataactggtataaaagaaagaaaaaatgaaacataggacatacagaggagatagaaaattatgatgatagaaagagaatgtgtttctttttatcttgtttggaaagagagaaggaaaaaaaactgtaaatgtgttataataatttaataattttatataaattgttttaatagaaaaagctaattattaattttgtaagagttaaaataaaattaattaatattattcttttaaaaaatataattattttttcaaaaaaaatagtattggacaaatttgagtgtgactagtaaaaaaatataggaaaaattagaagtgcttctaaattttaaaaatataacaaattttgtgagagtgagaaaaataaataagagtgttaaaacttaaaaaaaaatggtaaaaatatgagaaataaagtatgtgaaagaaaaagagtgggtgagagtagaaagggctaaagaacaagaaagaaaaaaactaagaagaagctaacaaatataaatatatgggtgactattcaatggttacatttttattgtaaccatatggttacatttttccttaacctgtaataacaggtaattaataggtagactttccttttttagattcaattaattataattaactatattcttaaaataattaattaaatagacattccttttttagaattatttaattataattaactattttcttaaaataattaattaaatatttaacaagac

SEQ ID NO: 323208 - DNA, 1374 bp, Cannabis indica
attattgggtttattttttaacgggagatcaaacctaatcgttaaatttaacagaatattcttttatttttaagtatattctgttaaaccaagaatgttaaaccaagaaataccgttagataggcacttttaatatataaagatacattaggtgcatcttcttttggggcattattattattattattattattattattattattattattatatattccattggaaatctttctacacgacacatcgatcccacatggagcttcatttaccaatatattcacatttatcttaattatcataaaagtaaataacatgcatactcaaattaccttgggtggaataatttatccaaataaaaaaatttcaaaaagttactcttaaaaagttgttgactcacagaagtagatgcttgaagactttcttgtcttttcgggaagggtcttcaggaaagctagcctttctctgaaaagaagtttcagatgactagatgttcctcctaagaaagagttccgaatagtcaacttcaactgactctgtcctattcgggaagctctacgagtgctttgatgtgtgattctgaaagctttcatacacgctcccagaagcacctatacttaagctaacgtgaagatctcgctcataataaagcttgttaagtttgttaagtcactacaataaatgtcacttttacaaacacagttcgctactgcgttggtaaaagtaacttttaccaacgcatttcgcaaactgcactggcaaagaggtcaaagttttaccagcgtacatttgcagtggctaaaatctaacttttaccagcgcatttacgtgctgggaaaagtcatctttgacaacgcttttcattttatgctggcaaaagttctaatgcaaacattgatttgccaacccccttttgccaacgcctcacaaataaattctattttaccagcgcaatactaacttttgccagcacaaaaatgtgctggcaaaagtgatatttcttgtagtgagtcctaactaacttaaaaatttaatttctctcagccaccgattttaggaccttgatatgaaacctatagtaatactaccaatattaaaattataattaaaaaactaaattaaattatcgttagtttataaaaattaatattatttacactacaaactataaaataaaactacaagtcaacaacgttattttcctcattgtcatcattgggaggggcaacctatgaagaagaatcggtgctaggagactaaaatagtagaatcgatgaaatcaaagacattggggtatgttgaatcctggaaaggcgcctgtggaaatattttaccaggatctagatttactaccaagtatgtttcattaacatc

SEQ ID NO: 323209 - DNA, 1348 bp, Cannabis indica
tttttatttatttttttatttttatatacttattaattaccttacgagaaactaggtcatccatgaatctagaaatgatagtgcaagctctaaaaatctttggttgtgtagagagccattcaaatacttgatttgttttaacatcttgcattccaacaaaagaggtctcaatcaacattgggtaaccagaagacacaaaagaaactttcaaatgctcatcaaagcttgggaaatgtccttggttcaaccattgtgcttcatggaaataagcttgtattaattttttcatctgcaaattaatattaaagtacataaaattaatgagacattggtaggagtaaataattcaaattttattattggatgttgtgcagttatagcagacattctataatttctactaatttttataaaatattttaagaaacaaatttaataagttgtcccttactataaattttttctatatttatataccaaaacataatttaaataaagaaaactactataacaaaaatgaaattttagattcacataccgattcttttgcatagtgaagtttgtatctctcttccttttaagatcttttcacattcttcataagaattcaaaaataccttataatatgtcttcaaataatctaggactaagtttatctaaaaaacttatgtcccaacctgaaaaataccattacttataataagttttcaatttactataaaaaatttaatcacaacataattttatgatataacaaaattttatttatcataaagtatcgatcattaatatataattacgttaattactataaattaggatctaaaatagtaataatatttaagtattaggatcttatattgatcaagtatgagatcggttagtagtatataactatttgaacaccttcctctattatatattttgggaaagagttttactcgaatagttgtatcaatatcgttatgtccaaacctgagaattgcttcggtgaggagctcaagttcttcaaatgtaccatatgcatcataaatatcatctgcaactgaggccattgaaatggctttaattaagatttttcttgcaagagagaattgaggttcatgaaagactcctagtatccaaaggtatagctccacaatcctatttcttgcaaatggtagtttgtttgccaagtctaattctttccaccacctatttataatataaatattgaatattgcaagagaaaaggaaatgagataacatgctttattaataaataatattaacttataggtcaatttagtttggataatgaaaatagattagattggattgaataatttttaagataattttttttatc

SEQ ID NO: 323210 - DNA, 715 bp, Cannabis indica
gacatgtcgaaaaagtactaggcaccactagtacctaataacaatgctcctattgtattattagtccatctatatgagatttgttatttaaattgtattgatgacaatatatgatcctttatagtaatgcttatataaatatttatatgactatgattattctaagcgtaattattctaaattgttttgatatattccttatttgtttcaacatcaataattttttagttagatttgttttcataattgtgtatgttatattccatttatatatttttagaaatttcttgatcctttatagtttatagtattgaaaatagtatttaaatagttacttactattaagaaaaaataatcatataagcaatatattttaaacttattttcggtattgtaaaactatttaatttttttaaaaaattactagtagtcttttttatttttgaatggtacgagtagtcttaaatatgcatgagctaattaaatttttagaccagattagtctatatatatactaaaacgatcctttagggagtgtaaaaacaattactcaaaaagttatggaaagacacccattatttaaaaaaaaaaatgggttaatttcacaaatgcacaaaaacaacaaaatacagtttcatggaattttgaacatttttataattttatttacataaaatacggtatttttatgttgaaattttgttcatttgttgtt

SEQ ID NO: 323211 - DNA, 674 bp, Cannabis indica
aatagttcatggggcatttttaacaaacttcaagtttaaggaacatgatttggtacatatcaaaattcaagggtaaaaaaatcctaattagcctattaaattttataaacggtaacttttatatctttcataacgtttttctgaatttttaccaaaattaatatgaaataattaaaaagtaattatgttttatatattttaatactataaaatttttgtattcccactataattgagaatgatatgtattggacctattggtttcggttctttttttggttttatatggttaggttagtcagttttcatcattatcaattttatcttgtacggttaatatatgattaattttgtaatgtcaatataattagttttggttttgtaatgaaactttcgttttgtacgaccaatgtagctagtttttattttgtaaagttagtatgattaatttttattttataaaatatgtctagttttgattttataaagttagtataactagttttaattttgtaaagccaatataactagttttggttttgtatttagacacaaaagataaatcctagtctttacattagagaattatgtgtgaaaatattcatataaattatttatattttattaaatatttgatattaattatttttttttattttgtaggtattttatta

SEQ ID NO: 323212 - DNA, 603 bp, Cannabis indica
aatatgaatatcccaattttgcaaggaattattattgaaagaaaaggaaaacactgatttttttttttcagtttctgattgggtattggcatctttattatatttaacttgataaaaaataatcctcacaaaaaataaaacatttaacaaataataatgtattgttttgagtgaatatttacttaataaataattttgctccaaaaagtgtaaacagtagatttttttcttttaagacatgaattaatattaatatattttttaaatatataagaaataaaatctagtgaccatcactgtattatgtgtccacgtgtcaactcaataataacatgtcgacaaaatagaaaaaaggaaactctgaataataataaaaatattcagatttttgtcttttgttggcatttaattcaatatgttcaaatcaattctctcaaattaaagattttaacctttttttttttttttttttttttattcataattaggtggcttaatttggaaacattaaactcacacggtaaaaatctaaataaatatttaaataatttataagtaaatatgtacatatatatatatatagagagagagagagagagagag

SEQ ID NO: 323213 - DNA, 813 bp, Cannabis indica
taataaaatatttttcaattaaatatgtcaaaaatggaattaatagtgttgtacgcgtctatgtagacgacgtcgagttttccttctccactagattccacgacactactccttcttttcctctgtaaactcttggagatggcgtcgttattgcttccaatcctagaaaaccagaaccagtctagtgacgaacaacaaaattaccctcccttttcctcttctcgcagttacgacgtcgatcacaagtactggagtgcttcatcttctccgtcttccccatcacagccggtatgatttaacttcgtctagaggcgtcgaagagagaatcacaggtacgagttagttcgggtaaagagggatgcgatttcatgtaatttttggagggttttctgggtttgcaattcataagggaagaagttgtacaattggaaatgggggtcgattgggttaacaatttgagttcttatttatttttatttttaattaatttatatacattaggaataggtttttattattatcaatagaatttctaaatcattattgtggatttttaaaataatttaattaaatggaatttcatatgaaaaaaagacatgggatttaattctagcattacacaaataatagttttaacatctagggcttgtttggaacgttgtattaggtcgtattgtattgtattgtattatattgaatttgattatatatcatatttttatataatactatgttaaactttaatttatactaaaatattatatagttaggtgtccataaaagtcaataccacatatagttttacataaaaat

SEQ ID NO: 323214 - DNA, 1975 bp, Cannabis indica
ttcattgggtggttaaggaatattattcttgcaaagttgaacgaaccgaatcatagagtatttgaagagttgagttatattgctcttagaccaaattttgctgtggcaaagcataaatcgcatattgtaaggggcaaacattttcatacaaagtcaagagatgatactcgagaggttcaaaatagtggcataagtatcatcacaaaaaccatgcatatagcaagtgcaaaatataaaaatcttattttaggtaccatgatatattatggggttattgaagaaatatgggagctcaattattttgcattttgaattctactttttaaatgttcttgggttgacaacaatattggagtacaaactgacaagcttggttttactttggttgatttaagtaagaaaggaagcaagaatgattcattcatcatggctagctaagcactacaagttttttacattttctaatctggctaaccaattttttttttattgacactagagaggaggttcttagagaatgaagaggttaaggagaatgctaatttatgttctgataacttcattgttgggcagcaaattcatgaacaagttgtggaaattgatcgatacctcgaagaagacaatgctaaataccttagaaccgatatcaatgagggaatgtgggtcaattgtgatttaggtaaagataaataacaaaagaaaagaaaacgtgttaatttgttacttttgataatatttgtttatgtagttactatttattatagattacttgtgatattgttttttttttttttgtaagttgctctgttgtagctaattttatattttgttcattaatggtgtagatattgcaaactcaagtttaggctcagattcagattctgacccagtagcagagtgtcctagggcgataccttagcgaggtagaattgagatgaacaatgttagtaagttaacggaccaagaaagaagacttcctgtccttgtcaacaataaaggagagtattatggcagaaactatgctaagatagtattgactttaggagttagatgttgtatgatgattgggctgccctatgaaaattggaagcaggtcaaccctaaaattaaaaatgaatttagaaagatatataggtaagtagttatttgttagaattttggtttgtatttgattaattcagatgttaattctaatcatgttgttattactaaactagacgggttttatagtttgggatgacttcaaacataattacatgatcattggtgggaagttaatgaaagatttcaagaacattatgaccaaggacatcattatgcccgcattagaagataatgatatgcaacggttggcagacgtcactcaaaagcatcttaaaattgacaaaaatgaatggttgaaatttcttcaaagttgccaaactcttgaatttcatgtactaattaaatttgtactacgataaacttataaatacaagtacatgtagctaacatattttttttccatggtagaaattgagtaaactacaaagggaacgattggcaaaaaaccaatccagacatcgaagtggccagagcggaatggtgaatgtaagagaagatgtagtaagtatttaatataatgaatttctagcaatgtgcataaaaatataatagtactcatttaatttttgtaaaataatacagaaaaaggaccttgaggtttaggatccccacgccaccgtgtttggatcaaatctcggactaagaaaataaaacttttcactcattatgacatgaaaactgccaataagatagtaagtatatatttattattgattaagtaataatgagttaatatatataaatcatatactaattgtttgaatttgtgctttaagcttaactagaggagtaagttagtcaagaaaattttaagtccatggcaaaaatgacattcttacacagacgctcgggacaccagagcatcctggac

SEQ ID NO: 323215 - DNA, 1973 bp, Cannabis indica
tgtggtactgtcaaaattaatgacactctaactcttaaggatgttctttatgttcctaaattcaaatttaatatcatttcagtgaactgccttactcatgacagttctgcctctattttcttcaagactaatggttttcacattcaggaaaatcttaccaagagaatgattggcaagggtaatatcaaagatggtctctacatgtataatcctatacctgaagatgctcatgtgtgcacgattcctgttgacatatggcattcaaggctaggacatccttctaagaatcgtttatctttactaagtaatactttgaattgtaattttgattctttgcacaaaaaactgccatgttatatctgccccttagctaaacaaaagaaattgtctttttccaacaatactactttctctactaataaatttgacttgatacattgtgatatttggggtccatatcatattccttcatattctaatcataaatactttcttacccttgttggtgatcatacctgattcacatggatatatttgcttcaacataagtctgatgttgtaaccatcatacctgaatttctatgttatgttcaaactcaattcaattgtgttttcaaaaaattcagatctgataatgctcctgaattggtttttaaggatctttttttaaaatatggcataatgcatgatttcacttgtgtcgaaactcctgaacaaaacgctattgccgaaagaaaacatcaacatcttttgaatgttgcccgtgctctttactttcaatctaaagttcctatacgtttttggacagattgtttaatgacagctgtgtttctcatcaaccgaactcccacaccaaaccttgcaaacaaaagtccttatgaattactttttaatgagataccggattacactaatatgaggaattttggttgtcttgtgtttgcttctacccttaccgctcatagaactaagtttgaaccaagagctagaacttgtgttttttcataggctatcctaaaggaattaaaggatacaaactctatgacataaactctaaacaaatttttgtttcaagtaatgttgtctttcatgaaaatgtgtatccttttcataaattaaataatgacacaaacatgcttgatcctttttcgaatatggctttaccaacatctcatgttatcctaactcctattcaagattttcctcctacaggtactagtatttctgccactaatgattctgtgcaggaacttgcttcagtcgagatgaacatctccacaccagtccatatcccagattctgcttgcacaccaacatctgctcatatttccccactagcaagtgatcaaacagccacaccagaccctcctgatccacctgctgttgtaccgtgtgacactacacatgttgactgccctcaatctcagaatttaagacgctccagcagagtctcaaaacctcctaactatcttcgagactatgagtgccattctgtcatcaatgacaaatcttctacccctcactctcttgataagtttttgtcttatcataagcttttagattctcataaagcttttattcttggagttacagccctctttgagccaacttcatacaaccaggctgtccacatcaaaatttggaatcaagctatgcaaaccgagatctttgccctcatcaaaaaacaaaacatagactattgttcccttacctccaaacaaacgcgccattggttgccgtggtttataaaatcaaatataatagtgatggattcgtggaacgatgtaaggcgcgccttgttgcccaaggatatattcaacaagaaggacttgacctctttgacactttttctccggttgctaagatggttactttcaagttgctattggtcatttccacaatcaaacaatggcccattcttcaacttgacatcaacaacgcctttctcaatggagtgttggaaattattttac

SEQ ID NO: 323216 - DNA, 721 bp, Cannabis indica
tctgaccagatgttcgaacagggtctcgaggggaagatgttatcccaaattttgtccacctaacttggcatgtccacgtaagctaaagacagagtataggtggaatacaaccttgtcggtagcaagataaggtctctatacaaggtacgacaaaaccataaagtaacaaccgaaaggagtgaagcgagatctcaaagagctatacctatatccttggtcggccaagagaagcctataggctcaccaggatgagcctataggtcggccaggatctgtgcacaagctggttggccaagaagtgacttctaaaccaagggaagttccgttcgaccaagggatcctggcctctacaagaaacggtgtaaaaagctatcctcaacttgcaaaaggctggcctctacatccaaaggctgacctcctcttggtaaagctatggtgacctgcaggatcatggaagacacatgacctaccaggtcttggcaggagtatggccagccaggcctcatcttgcaggccttaggtggccagacctcatcctgcagtccttgggcagccagacctcccctgaaggtcttttggtggctaggattaacctggcaggactctgtgtacaacccaaaacatggacagcaagctacctgcaaattagccccttaatagcccaataaactaatggaaaatatctacttttgaggggtagtttagtattttgtatttaatc

SEQ ID NO: 323217 - DNA, 618 bp, Cannabis indica
ccaaaaaaaaaattaaaaaattaaaaaaatttaaaatttaaatattatttattttaaatatattttccgtaaaaaaatattctactttttgtaatatataataaataattaaataaatttttagtaaaaaataatttattataattttttcataaattttttttttttaaaaaaaaaatagggtttaccagctttagctttttagctacagtttttcaataaattcttcaataagttattttttaactgtttatcaaacactttttcgtcacagcttttttgaaaagcagcttttaacttttttaaaaattgtgccaaattggcccttaaccacgtaatagtaacgggaataaagatttctatttaaacttcatcttaaaagaaataaaaaaaattgtacaaacaaaaaaaaaaagaagaagaagaagaagaacggccgggcattgccatttgcaacgaaataatgggtcattaattcggggcattgtttctcttattactaattcggggcacatgtctactctttcagcagggaaagcaagtagatccagatgtgtttaatgcaagtcatatgatataactctaatttaaaaatcaaaagaaataaaaaaaataaaa

SEQ ID NO: 323218 - DNA, 1128 bp, Cannabis indica
tttttttatacttgacatggaggaagatgagaatattcccatcattttgggaagactattcttggccatggcgagagctttaattgatgtgcaaaagggagagttaaagttgcgtgtttaaaaggaagaagtgatttccaatgtatttgtcgcaactgaaattcctacctattgtcgagtggaagttgtaaaggatagtcgagaagtaactactaacaagaagaaagggaagtccaaagaacgattttgaactttttgatgacgtttgaaaagactgaggtgtgggaattatgaaggtgactgtcatttacggaaagctttgaaattagcgacattgaaggaaatttttcgtcgtttggtacaagggctatggatgcaagaggtacactttaccctagttgaattttgtaagaggaaaccagcatccggctatatgacgttaacgatagtgctcctgggaggcaccccatgtaagttctcttctttactctttagtgtcacattgaggacaatgtaccatttaagtttggggtgaacttaaaattttttagttttaattttagttatttgttgtgttttttgtgttatgagtcaattttctaaatgtgagtcaatgtggaattaggtagatagcatggtttgaaaattttatttattttctcgaaaaaatatttatgcttagtgagattacattcttgactaatttcaacttttgtgcttgaaaaggacatgaatttataataggtaaatttctagcaattgaattggtttatgtatgctaaatgtgaaatagaaaaagttgtttagacaattctagaacttcttgcttgctatttgaggcaaaataaatagtgcatgattaaaaaagtgatttacgtattttgtttggatcgattgtgcctttcaagctatccatgtaatttctatcttagctaccctttttgagcttggacttgattcttcgttgctacacatatttttagccaaaattaacccattattatctaactttgaccttaattagaccatatgtggatcttaagttttaatgggaaactttatatatgtatgggggaaataagaatcaaatcgagagaaggtgaaaaaaatgattggcaacaacttgaa

SEQ ID NO: 323219 - DNA, 1094 bp, Cannabis indica
ttcagtttttgggactgtcttagtacaaatgggtcaaactctgtattaggacatcaactagacataccacggacatatttgatacactagaatcaaatttagattaattttatatttgagtacctagagtacccggtgcccaagcacccagtgcccaggttaataatttctcaatttgggtgcctttcaagtaccagatcgatgatatgactttttcatcatctttgtcttcatcaaaaatgggaaaaatggtactttaggagaagaaataacaattcctgtgtgccagaattaaggcccagttcccaatgtcaacctaggccaatttcgatgatgttttctgagaactcttgcaagcatcttctccgtttctagcaaagattaagattcaactatttttggggaccaaacggaacttctgaagggccataactgggacccagtgcccaagttaacacactatcaacttgggctatattcaatcaagttcttgaaaaagtgtttcgagcattttttccgtcacaagaaataatgaatattcaagaaaatacggggagaaaaccataaccccgagaccctagaaatagggcccaacgccgaagttgacctggtgttgggcccaacgcccaagttaacctagtactaggcccagcgcccaggttgacaatcaacccagtgcgctagtttcaatcactcaaataccaaatttggtttgaccattgaattcggaatggttaaaaatgggttaagagacctcgtcctccagttcaagaaccttagaagtatcaaaacggcatcttgaaagcttcgaaatgagtacccaatgcccaagttgaaaaatggcctagtgcgttaggttttgcttctccgattctgattctgtttcaaccgtccgtctagtttttcacaataactaagatccatgaagttagagaagtcaaattcacaacttttcatttctcatttctaaatgggaaactcactcgaaatgaagagtttcgagtctcattttcgcagaatagcaacatctctgagaattggcggccaattttgccagagcacataaatagattaagtgatgtcaaaatatcatt

SEQ ID NO: 323220 - DNA, 1412 bp, Cannabis indica
tatgctgaccaagaaagtattagtaattcgtgaagttatcaatttgaaagctactcagagatgagaattatgagtaattatgagcaaagatagcctgaccttcgagaacacctaaatagaagacatccagatattcgcgagcatctgaatcaaaattcacctaatttgcgccatcagcttaatcaaaatgcaaatcaacaacaagtggaccctatccaactacaaataattgaactagaagataagtttacggagtataaagatggagagcatggtagatttccaggctacgactcggatgaggaaaccaagccattccatccagatatcctaaattctaaattttcccagggatttaaaaacccacatgttttgaagtatgatgggaccacagacccagttgctcactttaataactttaacactattatgcgagccagtaatgccacgaataatttgcattgcattttattccagacttctctaacaggagttgtgagcagttgatttgacaaatttactcatcattctataatttcctgggaatagctatccagggactttaaaaagcaattttaagccgctagagacagacgacctgaagcatcatccataaccaacataaaattgtaaccagccgagtcacttaaggcttatttaagccgttttagcacaaccactacaaaggtcagaaacctgaatggcagtatttaactcactgcacttcaggcgggaatcacaactgacctatccacggctagaggagaattgtgggatgatctacatggtcacccagtaaggagcattaacaaatttaatgaaagagagcaagtatttatgctcaaagaagaagcaagaaacgagatgaagttgttaaaaattgtctcgggaagtaaacccaacacaaatacggcaacagcaagcacggtctcgactaaagtagacaatcctagtggctcaaacacaaaaagaaatgatgatatgaaggaatcatctaagaattaaaagaaatagaaaaggcacaacaagtatttttcaatttgttcagtgtacaccgagttgactgaaactcgtgagaacatatttctcacaagtcaaaatagggttgcatttcgcaagcctaagcccatgaggcatgcgagatataagtgtgattccacaaaatattattgatgtcacaaagatatatggcatactactgaagaatatcgacaactgcaagacgagataaaaaatctaatctcgcgaggatatttcagacagtatgtaagacatcaaggaaatgggctaaacaggcaaacaaccctaataacccaaataaccgaagagtgtaacctcctccgattgagggtgaggatattcttgtcatttggggagggccacacctctctggaaatagcaataatgcccaa

SEQ ID NO: 323221 - DNA, 1380 bp, Cannabis indica
ttgagatggaaccccatgattctcaacatggtattagagtcatttcccttgcgggcaagtgatcctatccgatccgcacctatacagatagtgactatattcactctgatacggttcaagattggtaagcgaaaaataaccaccatcttaagagtgaatattgtcccacatagaataaatagtagagaattgagtcatatataaaaacatggactactccactcattaccaattggttttgagataaaatcctataattcagacgtcctccacaagcctacacctagtatatatatatttcaaaatgtgttattagtagtacacaactaaaaaggtcctatatttattagtttttttttattattataaatatgattttttttcctctatgaactatgtttttttatagagttttgtctctaaaaaatttttttattgtaaaaaatctccataaactatataaattattgcaaatatctatattcaattacattatgctacttttctaaaacaattcatttatatggtaataagttatagatatatataaagagtatttatttaataatttaacctattcaaatataatttattaacattaaacatataaatatcaactctaaaaatatatatatttattctcataattcattcttctatcaaaaaattgtttaaaaaaataaataaaatgtaaccgaatgagatatttacaacaatttttataattcaaaagaattttgcaataaaaaaattagtagacaaaactttataaaagtctttgggacaaatcttaattattcttttttataataaaaagagggtttattaaaaaggagtggataattgttttttttttttgctaataagtaatttttccaactgaactttgacatgtactaaatcgtgtcccctgaacttttttagccgttaaaaattaccccgaactattgagattgttaaatttaaggacttgtctaatttaagtaaaaaattctaacatgaatgaaagttcaagggacatgatttagtacatatcaaagtttgagtggcatgatttggtagatatcaaagtctggggagtatggtttagtacataagcaattactgaaacggtaaaattgaatgaaattagacaaaagtccttaaattcaacaatctcaatagttcgaggggaatttttaacggccaaaaaggttcaaggggcacgatttactacatgtcaaagtccaagggaaaatattactaattagccataaattattattaaattttattttaataaaaaataaatttactatattattttgtattaaaaatacaaaatcttatttattatttaactaaataaaagatttaaaattaaatataaagagctaaaat

SEQ ID NO: 323222 - DNA, 1093 bp, Cannabis indica
ttttttttacattttagtttataaaaataataacaaaaataaacaaaaaaaaaattaacaataaaaataacaaagaaaataaacataaaaaatacaatatgacaaataaacaaaaaaaaaaacaaaattaataagggtacaataataaaaaaaaataattaccctaaaaaaacataatacaaagactgtattttatctaaataaaatcttaaaaactgtaaaaatattttaaattccgtacaattataattttgttttatttatttagtttattttttttttgttatttttgaaataatctctaaacaaatgtgaaaggctgaaagccttagaagtaataaaataatgaaattataaaaaaaaacacttctttcaaaataataataataataataaggaaaatagcaacatctagtgaaaagaggatacaacgacagcgtttcatttatacaatcggtaatgaataaagaatttagaagagggtagtgtaatagctataatttatttattctttctttttttttaatttcacacgtacacaaatcgagtatattattaaaataattaaccattaatcgtagcttaattaattaagggctcgtttggtacgccgtattgtattgtattgtaatgtattgggttgtattgtattggattggattgtataattttaatacaatactatgtttggcattgaattgtattagtgttgtgttaaattatacaatgtttggctcacattgtattgtattgtattaattaaaaattttgcaaaaattaaaaaaatcaaataaaaactgaaaataaaaattaataactaaaaaaaaattaatgacactattttttttttaataaaaaaaaaagaaattaaaaatgttgaaatattgaaaaaaactaaaaaaaaaaataaaatcaactaaaatattaactttttttttaaaaaaaaaacgttagattataacccgaatattaatgtcaattctaaataaattagtcataaaaagtaaccaatttttttttttttaaaaaattaaagtttacataactaaaataaaccttagtagcaccgtcaaagttcaaccaaccaaactca

SEQ ID NO: 323223 - DNA, 548 bp, Cannabis indica
ttgttttttatagtttctctcacatactcgagtctaggttggagttcgggtctgggttccgagtctgggtcaggtctaagtctggagtccaagtcaagatctgtggtccgagtccgggttcggggtctaggtctcagtttggggttcgggtccgggtatgaggcttgagtcccaggtaaggatgcacataaactccatgggaacggggacccgccccattaggggtggggattccccaacttagcggggattagggccggggacagggcttaattcatgtcccgagttggaggcagggcaggatcgggaaatgtactatccacccctgtatatctcaattatataaaattatatatatttatctactatttgttatgtaaagtagaacctcttcttaagaatagtcttttcaagaataatttttaaattataattagttatacattttggatagagactttttaagttttgtatatagacagatagtaaatgaaccgaaatgaatgcatatttttttcattaattatttaaaataataaaaatataag

SEQ ID NO: 323224 - DNA, 3317 bp, Cannabis indica
tatttgcaattagaagttaaactaatatagaaaaataaatgctaactaggataattagttacctctctttaaggtaatcaattgatttgtactgttttttttttttggtaataactttttttttatcaaatttttcccatgaagttacttttcttttggggaaaaaaatcatatttttgcacaaattatataaaaattcataaaatgtgtaattttcactttttataagagttttttttatggcttatatactaagagtttgtaaaaatataagcaattattattttttatttttttttatttttttttttttattattttttttttcatttgaaagttaatgtttttacgaaattttcacttctaagcaattgctttttttaattatttattttgtacctttcattctctttctctatttcattcttttttttttttctttttgttctccttttttggtcattgttagcgtgttccaagaggaagaaacatgtggcataagaatagaagtactgatccagacagtcattaaatgagcatcttctgtgaagctaagtcatggagaggctctgcgaatccaaaaataatctaggccaaagggtacacagagatatacttagcctccttatgccccctgagacacggaagacttgccaccactccaggattcggaatggcccaagctcaaagcttgcccaagtgatacctaaacaggtactagaagggcctatcatagacgttgaccgcccaaaagggatgcagacgtctgccttgaggataaactttgatcgcccaacgacggttatgctttttccctgacacaggatcagatcttgtccctagtgccagaacatagtagtgcatgcaccccatacacctttttgccagacagttattcaaggtatttactttttaaggttaaaccttttggtgacatgcatcctctacgaatggtggtcccctattgtccagctgcttcaatgcacgagcacaagtctttccaaggggcccaatagtcagctcaatttgcatgtattttaccccattagtgggctttttgtagaaatcctagccgggtcatggacaagtctatacccaccctttagcctataaataccattttatttccatacaaaagggggatcaaaatcaagatagtcgaagctctgttaaaattactctaagcttttctattttcaagagaaaccaagagtgcagagttagagtgtcttgcataaacactgtaataacatcaaatacgcatgtaacgactactagactgactcgtgacaagggctcattaacacctaaactacctaagaatctacatctcttttattattgttttcttaagctcttattatattagtttatgaaaatctcaacaaatgtttttatgctttcattgagagctgaagaaagacctaaatccacagtgttactgcaaccatggtgtttacttgaaaaacagtaactaagaatactcctcaaggcagcctcgatcttgtcatagcggatgtaaaccctctctctctagagcatgctcagtcgagcgatgtgagaggaggagatgcattcaatgctgataacctagagagtaacctaaacaagcagcgcaactgaatcgacgaagattgagatgttgaaaatgaagaagaagacagcgataggtttatcaaagacatgtactacaaggatggctattattatgagcaagatctcgaagtagtttgagtatctaaaaatgacttaaaacccatgagaagttagccgtcaagagaagttgtctaagagaatggagagaatgatggcttgcctctaagacaaatttggagatctagacaaagaagaatttgacgaagaccctttagtggaatgtgtcaatggaaacaacaaggaaaaccttgttgatgttggaacctctgctcctgtacaggagaagggaaacgcaaaagtgggtaaccctcagaaccctacaactcttgtacctcctcgaaaagtgtaaatctagccaggagacctattcaggcacagaaggtcatcgatgcctccgggcttggacgctcttctgctccgaaaggtaatatactgcaaaaagggactggtgtgaaagcacccaggcccaaggaaggaaaaatcaccccaatgattccgttaaataggatggtgggaccagaggacaatattctgatgatagttggtccatagtagatctttgaaggcgtcttgacgccaagtacaaaatagcaaaaagagaaaaggcgaggccatgagggaatggccttatgaatcatttaaatgataaattttgcgaacaagatctctagaatagtgtcacaaaatacttaacaaagcttgtctggaagcaaagtgggccctcaccgattctaaggatgagtacccggagctgtgtgtcagattgagttgtacaatgggcgcacagatccaaggactcacctggccaaatacaacaagatgatgcatgtagctagggttagtgatgatgacaagtgtctgtgtttctccttaatgctcaccaagtttgctgaggattggtggaaaagattaactcttggatcgatccatagctggaaagagctgcaatctaccttacaaaactgcctaggacgacatggaggtgggatccatcacaaatgtcaagcaataggtgggagagatcctgaaaacattcattcaacgaatgatggagacagcatctaagataaaggtgagtgatgacatgaatctgttgccttacaatcttgacttacagctggctccttattttggggagagatgcaaagaagaagagctgaaaccctatctgagttcatttcaagggcacaaggcttcatcaatttagaatatgcctatcagtaagcttccggagtccctccaacactagccctttctgcatctactccagggtttgttcctcaagcccttcttcccaggactgagtatactctggctatctacggaccttcagcatccatgcaagcacctacacaaacccattttctaggtatggagcagcacaaaatagatgtagtatcgttcctagacagtcaaagcctcaaatagaggttccaaaacagaatgtaagtgattatcgtgtaaaataatacatcattaagtgtatttttgggtaaataattagaatttaattatttattttcataaaattaaatacaaaatttctctacttgaaaatatttaatttaatgtaatttggtattaatttcagagttggagtaatatagcaatacgaaaacaaaatagaagaaacattggcacaaatcaaggcccaaaaagaa

SEQ ID NO: 323225 - DNA, 778 bp, Cannabis indica
ttgctcccttctctaactgtcaacgccaaaaagaacaattcattagaataagaggacttacagaaactttccttgacaaaatcatatatttggaagctaacaagcatcaaacattaaggctatgcttggaatttagattttaggaagaaactttcatggattttggtttttcttttcttatttatttgtttattttaaacaaaacacaaaggaattattttataggaaaccctctgagtttaatttgatgtaataattaatttttttcgtaagcatatattatataagagaattttgcataagaaactttttatcaaacattttttttattatcactttctatcaaacattagtaaagcattttctttccttttcttcctagtcttttctctctcataattgttctttagaaaattacaaattccaaaatatttgaggacttttaaattccatgaatctatacacaaaaccactaaaactcactttaactgactctggttcaaagttcacagtcccatggaacagtagtatttaaacattaaagcaacagaacaagatgtaaactgctcaataattgaatagtgtgaaacattattattttccaaatactacaaaattaacttacttacaaagccaattataattccccatattttcccagaagtctttttggtaccccagcaactttaattgaaaggtagtcaacccaaaagaataaaaagtaaaataaaataaaaacaaagcttaagcttaagcttaaattgatcatggatgattg

SEQ ID NO: 323226 - DNA, 1319 bp, Cannabis indica
ccaactatttttgaaaagtttaattattgcaagtttattttcagtctctttaatataaaagtttaaattctgcgctattttaattagtaatcccgattaggagattagggtttcataagcatttttgggtagcgtgcctaattatttagggcgttacagttattcctacactaggcataggaacgttaagagttccaacattgaaagatccagggttgttgttcacgtttgtcagatctgtagccatattgattttcctctaaaaacttttaaaattacttcgtttccaaagacggtgctaaatgttgtcagagaaatttagacaacacctaattcatacgagtatacaaaggaaataagaatacccagttaaaaacgtgcgagtacttacctaatgtagcgagtactcaaattattggctactaggtaaacaaaataaaagcaaaaaataaagagaaaataaaagggatgaaagtggttcagtcaaagcttggtctgcttagtccattgttgtaagaatttcagcttgatttatttgatttggatcacccctttatatagaaagcaaatgtcctttaaaattacatcggtttcagaaccatttttacattatatgacaatattaatcaaagtaaatgtttaaagaataaatgaaggatagttttatctattcttatattaagtgaagtagtgtatgcgacttggtaagctgggagtttcctattcatattccaacacatgagcttgtaggctttaggtgtgtttgtattcgcaggatggcctttgggcctatcattcagatgtctgcattcacttctgatcgcataaataaacatgtcatgtgttgataacgtagaatgtgtgagcttctgaagagttatcgaacacatttagttattcagaccactcttatgtaaagaatcaatctttactagtcgtaggagaggtctacttcatcgcatataattggtatatgcgcgaccagtatcaaatccttttgcacctgcttattctatttactatgcaaggcatattatacgactaaaccctatcttggtcgcatcctcttgctaattcatatcaagcgaggctaactctataagagccatctataaacacgtcatcctttccatcgggaattgggtccacgtgttaattttattgggaatattttaccaggatctagatttactaacaagtacgttgattaacatcctaaatatgaactctctaaaataatgaaataaacacataagggtttaagaaaatcttacattgattgcagcggaatataatgactccttccgttcaagatctct

SEQ ID NO: 323227 - DNA, 902 bp, Cannabis indica
aaccgcatttttttgcagtgtggtgcggtacggacggtttgagcggtttgatgaacacccttataaataagtatttaaaaataaattaaaaataaaaaatgaaaaccacttttaaaaaaaaaaaaattgcttttattgtaataaagaaaaaccaaattcatttcaccctaaccctaaatttttatctctttcaccattcagcctccctcaccatctttctcttccccatctctactataccagtacaacaaccacccacctgccgccaatgacggagacgagactcgctcctcaacaccaaccatcgtgactacagaaccccttcctctcttagctcactcgtaactcaaactgagtccactcgatcgatgttaagtcaaatttgaaacccccaactcgccaggtgatctctggccggtgaaattggcctggctccgtcacgcccttgctctcttctctttgaaattctctccacccccgccttgagaaatccacctcggctaagatagttggaatggttctaggttttaggtcatgtgcttcgactaaaaatgagttggggaggagcggagattgatcgagtcgtggacttcaacatgaaagggatccaaagtttgttcttttggatgtgatttttttctgttgaatatgatattttttttcttttgaatttgatttaggttttgtttgattttgtgggatttggatttggtattatgacaagtgtggtgtatctagaattagtttttaattttttaaatttggtttgtgatgtttttttttgacctcgcggggggttggggtgtttgaataatattttaccaggatctagatttactaataagtatgtttttaacatcctaaacatgaacttctaaaacgatatgaaataaacacataaa

SEQ ID NO: 323228 - DNA, 970 bp, Cannabis indica
aaaaaaattgaatggtttatagcttatccaaactgcaatttaggttggcctattaaaatacctataacccagcaaacccagcccatgtgcacccctacttgagtgtgctcgaacaacttcagcaattgaaatttcaaggaaagttctttgaagagttaagagaaaaataaaggtttttgctctggttatgcaagcataaaaatggctataagagtgtaaaaccaatttccatcctttatataggtggttaaaggctgaaagtaatttaaaattcaaatttttgagttttttcccctaaaggaacgttagtattcattaaaaaaggcaaatgtcaagcgtgcggtgtcattcaaaattcattacatgtctcgaggttcagcctccaagataaggcattaaatgctctagatatcgaagaaacgcttaatcagtcaagtcagatcaagagtaaaaaccaaacacgtgtcacccattttggttattgtaattatggaaagtaaatagtttctttttatttcttattagttttaggaaactaattgatgtaattcatccctataagtagtggaatcatctcaccattcagggacacaaaattcatagagaaaacacacgagagaatcacaagaaagtgttatacatttaagagtgtaaaaactcatagatcattgtaagagctttcaagggagatcaaggacttctcggtctttacctcaccatcatcaaggggccaaacctctataattatgatattttctttacgtaatcttattcatattttatatttaattattcttaattgttttaatttaattcattgtcattggctaaaagcgaggttaacagcagaacattccatgtcaagcaaacattccacaaacccaattagaacaaaagtgataccatccaaaaatcaataatttacatctatagaacaaaaaattttcacaaggcatccaattcaatccaa

SEQ ID NO: 323229 - DNA, 1343 bp, Cannabis indica
attaattcaatattttttttttctttctctatcaatcaaattcttttctttaatttcatttgctcccactgaaagaaaatgatacattgaatttttatttacggaaaaaataaggagagaaatttcaataataataaataagaaaatataagtgatcatgatcatattcctttggcgtgtacctttcgaaaaccacactaacatattatcatatatttcatgtagatttttttttattaaaaagaaaaaaaaaatacatcaaaattaatcatgtgacttgaaagacatctaaattagatctcttagatttgattcacttattaatttgaaaacattaaatataaaattaataattaagttgatttataattttaaacaattaataaaataagtaatttcgggtattaatccaggtcgatttggcaagaaattaagcctaataaatcttcattaaaatgattataatttaattaaagtagtcaattcttggttgtgtaaattaggataaagaaatatatattaattaattaattgcaaagaaaagtgttatttgttgtatttattttttcagtttccagctcttgatcattgtttttaattaatgtaaatgtgggtactgtccccacaaccacaagttattaaacaaataataaagttaaatatataggcattaaattaaaagtttaatatgtaaataaagtcaataaatgattcataaagagaaaaaaaagtcaataaatgattgtgacttcttcaccaaaataaaaagtaattttttttttgaacacaaataaaatgtaattaagtgcatataaagtacactctcaaaaaagttgttctagtatactttttattatgtatttattaaaattttttaattaattttggtctaaattttttatggtaattttgtcaattttatagctcacaattttttttttttgcggtcattgattgaatatctattattgtttgttgatatctacattgtgaatttttttaaattattctattaatcacttcttaaaagaaaaaagatagaaagaaattggtaaatactatatatgatctaatcaatattttatgtttcattaaataaaaaaatatttttatatatgtaatatatgccgtctctatactaacaactctaattaattatgataaatagcctaatatattatagattataaatttgattagtatgtcatattacaccgtaacatagtattatattaaattatattttaagtaaaactatatatgatattaatttttatgagtatataaatatataatattttaatataaatttaaatttttatatagtattatataaaatatga

SEQ ID NO: 323230 - DNA, 998 bp, Cannabis indica
ttttcaagggattgaaaaaatcagatttatattggggttatatcaccccttctttagccgtaccagtttatattaattattattttttaatttttgacaagactacacaacacaatcacatccacaagtactatatatagccctctacctctccttactccttcacacctcaatttagtattgttttctttgctagagaagtcactccctatctgtagacgtatgtatagggataatatataaaaaaaataaattatgtattgttgttgcactgaagtgaagatgtgtaaacagaaggattggtatgcactacaaccgtgtgttgtaggtgcatcaagggaatttcagcaatccaataaatcatctcataaaaaattcgggtaataactcaactctttatgtctatttatttcaatggtatattattacaaattgtttcttacaaaattttatgtatgtactatatgtatattcaggaaatgttgacaaaggcttcgaatgggtggattaggctggatggaactacttccaacaccgccaaatctgccatccaactgagcctctacctcccgcagtccacaaggccatcgtgggatgagtgttatcatatttgacacaaccgccggtgcgccagacacgggaacaaaatcgagacgcgggaggaaatcgtcagcgtttttacagtcttaggtcaaataaaccatcatgtaataacaatgccgatattttagtacacgtacaaattcatctcaacacaatcaatatttacagtgtcaaataaagcatcctaattaaatacctcaaatcaaacatcacgtaactttgcacccttctgtacacaaaaaatataactgtatcatttaaaaaatggtttatcataattaattaacaaataatgaaggtctctttatagtaataacatatttctacgtaagtattttttttaggttattcaagtacatagtacaacctactgatttgaccgtatatggattgat

SEQ ID NO: 323231 - DNA, 2364 bp, Cannabis indica
agagagagagagggtgtgtgtgagaggaagtgagttgtagaaagaaaagtgagtataagtttgtagtatgatgagagtgaggaagaagtaaatggtctattgggatttgggtagagaaattgagataatgagtatttaattttataagtgaaatatatctctctttgtgagttttctctttgtgagtttggtaatttttcaaaccgagaattttttttgcttttgcttctacatttttccgttgcgcttgaagttattatttttttcaacaagtggtatgagagccaaggttcagatcaacacagaaaaatgtcaaagatggtgtgttctataaaatttgagattaagtgttttgatgggaagaacgaaatttcagttatgatagatcacggtgaatcagttgatcgaggagagggaaagtcttcagaagctactttatgactatgatgagaacattaagaccctagccaaggacctggcccaagagaaggaagcccgtgccaaggataaagagacctatgaatcagttggcgcgaagatcctctatgaattcggaaaggccaaaccggaaagcaattttgggtatctcaagccagaagagcacgaggctctgattgggatgtgccaaagtctaaaggctgaggaggatgccaatgaagttgaagaagaaaaataggtcagagagaataccaacgaaggtgctagtggaaatgacgagcagactaaggcggttgatcccaacttcttgattaatcaacaagacggatcttcagtgaatgactatcccaatcttacaactccgatggacttctgaaggctttcttttttgttcggtctaaaggccatactttttggaaaatttagccaactaaacagtttttaaacttactttatttttctttttatgcatacgtatggctagtcggacaacttttaatcttagactttaacctttttatatctgataaagccattttcatttttgtatatatatatataattcttagatttttgcttaattattttcacatgctttttatctatgttgtaagggtgtaagtttcctccaagtgactcagtagactttaaactctttgtcacttataaattaaccaaagtattccatagcagcatgttcggaccttatacttgggtggacctttttgtaaacatgttaggtagctctgtgacttttaaaaataaatcactaatttttgcaagaaatcatagatattaacacaatttgaattataatgaattgctttattcatttattagtaagaatgtgtggttatttttgtaacttacatttattaaaaatattacatgatcaaacaaatcttagaaaattaaacttcaaagcttttaaacacaaaatctatctagaagacatcacttaaaagtaatattttataaaaatatggtcatccagaccttagcactaaaaatttcaaaacttctgaatgaacagtctatccaaaagccaccacttaagaatggtgttgtacaacactatgcaattaggtggtcttcagacctttacattggtggaattttcttaaatattcttggctccaatactgagacactaagacgagttccatttttcatcatccgacccaatttgtatactccaaaacttgcaacttcagtgactttttacgtcccctcctaatttggttcgagcacaagtgccacattgtctttcatattaaagaaatcttctaagtatcgtatctcccacaaagaactttctttcctttactagtttgttgaagtatctagccactttctgttgatgggcttgaagctttaagcgtgctagatctctctttcttcaaattcatctaatgactttgttaggagcttatggttgacatcttgatcataacatagtcttctatgggacaaaggttctaactctaccggtagcattgcttcatagacataggctgatgcaaaaggagtctatccagtagttgtccatttagtggttcaataagaccaaagtacttcaggtggttctctaggccaattacccttagtttttacaagacattttttagagtgtccgtgagtgtcttattcactatttcgacctgcccatttgcttgagggtgtgccacatttgagaatctctttacgattccatgtttcgcacagaagtctgtaaacatctggttgtcaaactatttcccaatatctaagataatattatgaggaaggttatactgacatataatgttctttaccaaaaagtctaggacattcttggaagttattattgttgggttttgtgccctaaataaaattcattacaatctgattagttatcaatacaagaaatttaaagtgatttatgtt

SEQ ID NO: 323232 - DNA, 1032 bp, Cannabis indica
ttaataaattcttacaaaacaataaaccaaacagataagtaactcaaaaaaaaaaacaaaaaaaaaaaaaaaaaaaaaaaaaaaaaataaaaaaacaaacttgtatcaaagtcaaccaagtaaatgagtcgctttctcctatgcaaaaaggaaaaaaaaattatgttagatatgtacataagagtttatattattcaaataacataataataaatttgtacattctcacaaacatagaataaaatcctcaaacttttgtaagtgaataattcctccaaaaataaagaatataataagacaataaattcttccataaacaaatctaaaatatcttttggtagtaacattatgcatcttatacacttaagtgagcataagttcatacataatgattataatagttgaatcacaaaataattgctcaattttagtataaagagtattccaaacaatactctcataccaaatttttctaacaatattaaaaacactcaatataaatattactaatatatataatgcattgaattataacattaacaagttcatatctacatttcattgaaaatagtttaaaattaaaaaagtaaatagaaaccactcaacaatgatgactatattgaagattttcacgaatattaattgagtttcacactcaatcattttagtaagttcaacatcttttagttctagcaactcattaatctattacaataaattgatataagagttagaaaatatattttttaaaaaataaaataaaaaaataaagtaattatagaaaaaaatatattttacaggttaccgtccattgttgctgttgttgttagtttaacgtccattgttgtagcagtaataagattggtaggaggagtaagagtgataacagttagtattaatgatcatataaaaagatgagttgtttgtagtgtagttaaagggataagtggtgtaataagtaccacactacaccaaaaatcaggtttagtgacatttttatgatattttaatgacatttgttaaaaaatgtaa

SEQ ID NO: 323233 - DNA, 2778 bp, Cannabis indica
gtttttcactcaattaatcttgctcatgtgttgagaacttacagaacagggttgtacactttattctaatagctcaaactactccttatgtgtgcagatcgatttggaagacactgttgtgagtccaattgaaattttttcatcacctagattaagggatataagttacaagaagttttgagaatatcttgataggcttcaagagatatactctaaatttattattttgatttaatgtacacacatctagagatcctaggggctatggtacaatgataatcagataatatgaaactcttccgttgcatacctgatgtagtaccataaaaccaatagctaattcattagcaagtgggttgacacaatttgaactgaagaaatgtcttttattcatttagttagtcttacaattgtagtgttgccgtgtaacgtacattgtttgtgtaataaaggcttacaaataaaaccatgttggatgtgcaacatacattggtcttaataagtctacctttaaaactacgttttggatacccttacacggcttgccatgtaaaggctgccattaaagagtggtggtcatatagctcttttctaaattcttacacagtgagacgttggaggaaccactactaaagagtagtgttttgcacaagtgggctactggtagtactttatgagatgctccccattccaataccttggtaggagaactaattccattttctcattatacctacccagtttgtaagcacctttatttgtgatttttgtcacttggtacggtcattctcacttaggtccaaacacccctactacagaatctttagagtttatgaatactcttcgtagcactaagtctcttacaaaggatttcctctccttgaacttgttttattgaagtaccttgcaactttttactgataggcatgtagttttgagttggcctggtctcttctttcttctacttcatcaagggattctgccaacaaggtgtggtttgttacttggtcataggttatcctcctgtgagaaggtgtttccaactcaacgggcaatatttcttcatagtcataggctaatgcaaagggtgttttcctagtgactgtcttctccgtggtcctatattaggtcgggccaactgccttttgcctcttctagacatttcatagtgtccttaagggtcttgtttaaagcctctacctccccaattacttaagggtgtgcaattgcagataagcttttactaatgtcgtatttattgaagaaatctgtgaacatgtcgctgtcaaattacttccccttgtctcatatgatcttttgagggagcccaaaatgacatatgatattcttgacaacaaagtgaaagattttcattaaagctatggttgccaatggataaacttttgacaacttagtgaaataatcaactgcaactacaacatattatacttcttcttttctcttaagaagttgttcgatcaagtctatccccaatatggaaaagggaaaagcagactatatttttgtgagaacatttggtggagctctcatgatctttgagattattttgtacttgtcacatttttcgacatagtccattgaatcttcgatcatggtaggccaaaagtacccttgtttgagtatcttttttgacaggctttgcctcctgcgtgatttccttaaaaaccttcatgcacttcaaccaatagtctttcaatttcttccttggtcacacatgtcagaagtggcattgagaagccatgtctgtacataactccatctaggatgatgtacagggtacctttccttctcatttttcttgcttcatttttgtcctctgagaggactcctatttggatgtgtgctactatgggtgtcatccatgtcagactgtcatccaacatgtctttttcttgtgaaatagtgatgcttgggtctttcagaaactgaataggtaccaagttggtcttgtctgtcaaggtgcaattagctagtctggcaagtgcatcggttgttgcattttcttctctggagacttgccgaatagtctaacctttgagttgacttaacaattcttctcaagtaggccatcattctatctcctcaggcagtgtactcacctaggacatggttgatgaccaactgagagtcaccatatatgtgtaagtagtctacccatacttcatgtgcaagctttaatgtggcaattagagcttcatattcagcctcattatttgaggctttgaaactgaacttgattgccctgtgcaactattgtccccatgtgtaatgagggcaatgcctacaccggacaggtggtccgtacaacttccatcaatgtgtagtttccaggttgaattttcttgcatcgcttcttctcttgctctttctcttgcttcttctctggctcttgcttctctcctaaatcttcatagatttcaagagataagcatgtgccttcagccataaagttagagagagcttggccttttattgccactcttggttattggccaagttttattgtccacttgagtaaccgaccagatgctttaggtttctgaagaactattgcaaggactggttggtgtatactcttattggatgagcttggaagtaaaggcgttagctttcttaaagttagtgtttaacgccaaaaatgtgacttccactagcggtggttgtagtatagatcgggcggtcgattccacagggaggtgattatagacaaaagcattaggagaaaaataaaaaaaacaaaaggttaataataagtga

SEQ ID NO: 323234 - DNA, 2213 bp, Cannabis indica
ttcatctcttctatcattgcaacaagccaaccaggatgagacattgcttcacgaacagttttaggaatagtgatagaatcaagagaagcaataaaagagcaagaagaagatgagagatgattataagaaacaaaagaagaaataggaaaagtacattggcgtttacttttacgtagtgcaatgggaagataatctttgatttccgaatctgatgacgaagatgcaagcccagaacaggaaataggaggaggaggagggggcgcctagtgtacattataggaggtccagggagttgtggaggtggaggaggtgatgggggtggtggaggtgtcgacattgtgggggttatgacccactactataatttggccttttagtgacactatttagtgacgagcattttagtgtgggtcactaaatagttaggaatgatttttagtgacatgcacaaatagactctaaatattcagtgttactcacatgtaatgcaggtcactaaaaatatagagtgtcactaaaaagtaaatccaacaattttttaatttttattaatttgaaaaaatattaacctatagtgacacaccagacatgattagataaatgtatcctaacacacatggcgcgtcactatatcataactaaattaaaaaaaaatacaattacaattattgacataacaacaagtcagtacacatttttctagtcccgcattgaatgactctatatatccaccatatgaattaaaataatatttaataatattggacacttcttttgaaacaaaaaatgataataaaaaataaataaaaatatcaatcgtatttctctctttcttctgaatatatatattaattcattttttttcaaagaacatataaggttcggttagcattatttataaaaaagaatatcaagttaacttaaaaagttatacataaagaaaaaaccctaatagaaatataccatagatcagccacttaaaatgaaataaaaaacctaacttaatttgtttttcttctctcgttcacagctccagcatgcctaggccagatggcggggagctcctcctctctctccacccaatgcacggtgacctcctcctctctatctcctgacatgcacaacaacctcccatctctcttcgcccagacacatagcaccatcacttccccctttctctttcgtcctctctcacggcacagaccatggaagcgcttccgccaggccgttcgacccatctctgacctggaaacctctgaatctactccggtacccgtgcacccccttctctattctacctcattctattttcgacgagcaatgccccttaaaattctaggagccactgccctttttactatgtacttatctcccctttctcttttttttttacagatctggaatgactttttcagtgagctaggaacgatttctttatcggagtttggattcaatttttcatcagagctctttgaaggtctctgcagcccattatatttttttgttacttattaggttgttcaatactgatttgaattatgcttggtatttgcacatgaattttgtaaattgtgtaaactttgttcaaaaattttcatattaagttttatgttttgctataagactctactttttgatttttgattctttatcatttgtattttatgttctgtatgtaatattgttagcaaaaataaaattaagtaaataatatttatcgtccattcatttaatttattttaatttttattaataaatatattattgaatatttagcctaaaaaattaaatatagctaaaataattaaataatattgagaatataaaaaaaaattaaaaaatatatacagtgacgctccataagggtagttgttactgacaaagtttgactataaaagcttatcgtgacacacaataagagactctaacagggctaagtgacccacctgaagtgtcactaaatactacttttccagtcacccgcattagtgacgcacagtgaagggtcactaaaatattttagagtcactcaatgtgggtcactgaatcccctttttgtagtagtgaccgaggcaggtgacggaataagagactcatcaaaacatgtagcaggcgcagaggatgtgacagaatatactaacaaatcatcatcctccccctgactagtaggagtagtggaagatgaaaaataaggtgtattttctacaaaggta

SEQ ID NO: 323235 - DNA, 1499 bp, Cannabis indica
gaggttagtagaagatttgttgaaggatttgttgagatttctacgcccttaacaaaattgactcgaaggaactataagtatgttgggacgaacaagtgcgagagtagcttccaggaattgaagcagaggttaattactgcactagggttaaccttaccggtcaataatgagaaatttttgatttattgtggcgcctcaaaagagaggttgggttatgttctaatgtagtttgggaaagttattccctatgcatctaggaaattgaaggagtatgagcagcgatatcctactcacgacattgaactggcaacaatcatttttgcattaaaagtttggcaccattacctgtatagggaaaagtgaaaaatctatacagatcacaaaagccttaaatacttttacactcagaggatttgaatatgaggcagtggcaatggttagagctggttaaaggctatgactgcaagattctctacctccctggaaaagcaaatgtggtagcagatgctctatgtcgaaaatagggcaagtctatgactggaagaagatttcaccaaagttgggtgaggatatgactagagctgggatcaaatttgtagttggaaaactagccaatatcacgttgtagtcagatttgttaaaaagaatcaagatagcccagtagaatgatctgaacttcaaggtacaaagaaaggtttgaatccgggtcagcaaggaactttttcagtttcaatagatggattattacggtttaagggcagagtttgtgtaccagctgatgaagggatcagacaagagattctagacaagtctcatactataccatattccttacatctgggaacaactaagatgtatcaagatgtaaaagccctatgttggtggctaggtatgaagagtgatatagtgaagtgtgtgtcaaaatgcctaacttctcagtaagtcaagacagagcatcagagacaagcaggcttacttcaacctctgaagatttctgagtggaaatgggaaaatataaacatggacttcgtggttggattaccaagaacagtagggttctatgattctatttgggtaattgtggatagatatacaaagttggcacactttttaccagtgcaaactacatacacggtggaatagtatgctgatttgtatgttaaagacatagttcgacttcatggtgctccaaagtcaatcatctctgatcgagatccaagatttacatccaagttctaggagagtctgcagcgagcaatgggtaccaaattattcagtacaacctttcatcctcagactgatggtcagtctgagaagactattcaaatacttgaggatatgctacgggcatgtgtattggactttgtgttgggttttgtgtcctaaataaaacccatttcaatgtaattagatttactaattaataaagatcagaaactacattttatgttgtatggttcacatgatttattttatgattatgtttaatgtataaattc

SEQ ID NO: 323236 - DNA, 901 bp, Cannabis indica
taattatattataattataattttttaaaaatatatataatttagtgcggaatggatttgatcggttactttttgaggtcaaacaacatctaatccgcacaagtgcgaattttagatttttcaatccaatccaatccgcgcaagtgcagatatccgcattttgtgaattagattggattggatcgtgcggattagattgcgatcggatacttagtgaacacccctaattgtatcttacttaattttcttaattatcaaaacacaaaatgtattcaaaaaacagttattagatatttttttcaaaaagagaaagaaaaaagaaaaacttataaccaagacttggaccaaaaacccaactctagatctaaaccccaaccaaaccttagactcgactacgacttcaaccaagctttggcacttgagctccaacctcgatcccgaaccacaaatgcgacattgttcctaattttctaaataataccaatatatatatatatataaatatatatatattacacgtataatttatctagtactatttaaatgtacatttattatttatttcttgattatataatattaaaaaaaataagtgtgtagatagtgtgtacaatttaagtgtatcacaatcattattcttatatatgtggatatgaagaaagtattgatcatgagccattcaacaatttacctaatttttatgtattttgaacaaattattttataatatgggtctcataatgaatactttagatttagaaacacgacttaaatgtttttcttaccattgctctaaaccagggccggccagagggtggggcagccggggcctcggccccaggccccataattttggaggccccgaaaaaattaaaattgatataattacacatataaaaaa

SEQ ID NO: 323237 - DNA, 1540 bp, Cannabis indica
actatttttaaataaagttacttagttttttttctataaccaactaagattcaggtcgtgagactttatgtaaagtgatgtttctttgtgaagggctatcaatattatttgtttgataggaaaaagatatggaagtttcatggtgtttacatttggttattagtcaaagtatgtttagttaattaattttaatttattatttaagttgatgaatatatataattaatatatgaattgtatatgtgtatggtaagtggacatgagtgggagatatatatatatatgattgaaattcaatattagttataagtattaatgttttggatttggatgcactgaatttattttattaatggtgttctcttcaatcctatcaacacttctcaacaattccagataataaataaataaataaactgaataaagctgattaaataaaataaaagaaaaagaaaaatagatggggccagaaatctgaccaattttagaagtgtctagctaaactttccaattgtctaataagaattagtgagtgtttatatacaacaaaatttgctttctaaaacatatctagaatttaaagtaaatgatgcataattattttatgattttgtattaaatatataaaagtgtttattattatattttatataaatatggtataatattatgttaaagtactcttcacgggtcttcttacaactactacaagcacaaggcacataaagtgaaggacatatcttaccaagaaaatttttataaaagaaaattctaaaaatatatctcaaaaaggttcttattaccaacaattttatatacaattatatttgaatgcccaggagttgttggcaataagaatttgactacaaataaaggaaaaagaaaaaagaacaaagtgggaggttaggtgtttacctatggaatacaaacatgtgcataatgatcatgatcttatattgcttaatttttttattttaaaaaaaattctttgttctattatggagtgttcccttgaataaagaagaagaagtttaagaaaaatgacatttttaaaagtcattttggtttaatattgataattattaaaacgattgttaatttaatgaatgtaaagtcaaacaagaagttgctgtggtgtagtggttatcacgttagtcttacacactaaaggtccccagttcgatcctgggcagcaacatttattgttataatttttattgtatcttaataactttttccattttctgttttagagagaaaaattttcttatataatcttgtatatatttgaccatgcataatctatgaatccatgtttcagttttctatcatttgaatatttaaaaataattaaggatttcagccaaaaaaaaatgattagtttattttaactttcaaatttaataattacactctatttgcttataaaattaaaattaagtaatctccttccttcaagtcctaaacaaagaaatacactaatgaaagaaaacaaattgagatttcatcaatggagaacatttgatgtaagcataaaaaa

SEQ ID NO: 323238 - DNA, 737 bp, Cannabis indica
aagcaaaaaaagaaaaaaaataaaaataaaatctatcgctagtttcaggccaagtattccaccgaccctaaagtgttcctaactccaagtcaagttgtcccaaaacaatagaaaaatggaatttacctcgttgtaataatttacttaaagtcaggctagtcaggccgccagctcatctatttggcaaattatacaaatttaaggcctcaaaaggctggctgtattcccagacatcatcagatattgttgaaccgagttcaccaatctaatgttatgtaataactcaaactccaaaatatacaataacaagtattttaacgtcttcaaatattaatttttattttttaatattgtatattaaattaaaatttatgaaacttaatatcaaacggttaaatattattttaaattttatattgttttaaatgttagaatttaagataaagtaaatgagtttatcttaaaactaattagcaatgaaaagagtagtctatttctcttgtatattcttatctttctacaaattaacgatgtgaaactatttaacattcaaataaaatattcattaaataataattcgaacaatgtacttattaaaataatagtacaaaatattctaaatttaattttcatcaatttcttaatataactaatctgaagtttatttgtagtatgagcaaatgttaaaaaatacaatcaatttgggcataatactctatatattatttttttaactt

SEQ ID NO: 323239 - DNA, 1509 bp, Cannabis indica
acaacataagctgaagttcacttcgacaaggcacacaactaaaaagatacttaaaatatgtgcacgctgatctttggggtccgtacaaagttcctactcactgtagtaagcaataagttctttcaatagttgatgattatagtcggtgtatttggacctacttgttaaccactaaggatgagtgtctggaacagtttagaatttgaaaaactcaagtaaaaaaccaatctgatcttaaaattaagaaccttaggactgataatgggttagagtttgttaactccgaatttgacaaaatgtttcaaaaatttggaatcactaggcatagaactgtagtgaagaccccggagcaaaatagttttgctaaaaggatgaatcaaaccttattgaacaaagttagatgtttatagtttagttttggattagaaaaaccattttggggagaagccttagctaccgcaacttaccttattaacaggagcccgaatagatttatggaccttaagacaccttataaaaggtggtacaactgaacccctaacctattgcatttaaagacatttggttgtacaacatgtgtacaccaattatcgacaagctggaacctaggtccgtgaagggagctttcctaggttatgcgttaggaaccacggggtatagaatctacatttctagggagggtaaaccaaagattgtgattgctatgaagtgttattttcaatgaattagaatatcctcacttaacctgtgggaagggtagtgtgtctttgtgtgttacaagaaaaataggaaacaaagacaccacaaatgtggaagtggagtatgaaacgaagctcccggaagaaggttcacaagtgaaagatagtatggaactggaagataatacgtagtcagaagttgttatggagccagaagaacaagataacaaagaccaaatagaggtgccaaaagggttcaaacagacaggtctgaaacgttatcagttggctcgtgatagaacctatagagagattcaacctccagttaggtttgtttgtggaagctaacataatagaatttgctctggcggtagctcaacaactaaaagtaaagagcctggaagctatgaagaggaaatttcaggtggaaacaagtctaaatggctccaagccatggatgaggagatggattctttacaaaagaacaagacttgggtagctgtgttgaaggcagagaacaagaaaattatggagtgtaaattgattctcaaggtgaaagagggaatcaatgagaatgaactagtgaggtttaaagccaggttagtggctaatggttttactcaagtggaaggtgtagactatgctgaaatcttatcacttgtggtaaaatacaagacaataatgctgatgctatccttggcgggacatttggagtttgaagttgaaaaacttgttgctaagactgcttttctgaatggattcttggatgaagagatctatatgaagcaaccacctgggtttcaggtggaag

SEQ ID NO: 323240 - DNA, 667 bp, Cannabis indica
tgagttgaaaacaacttggcgggatctaaacatctatttcagagttctcgaagtcaacctagttgtatggttatggactcctcccaggtcgacagctatgactcaagacttcttaactccgagatattttctttcttgccacgtgttaaacattgatgtctgcatcacctgggtaaatttcgaagttaaccattttcatactttttagtgataaaattgtatttttgtaattttggaactttaaaattgtatttttgtaattttggaactttaaaattgtatttttgtaataaaaactttaagttataaaattataaataaaatataaaaaaaaattcaaattatgaactatttatatttttttatttattattttacttaataaaattattattttttatattcaatgaaaatattaattaaatatcaaattttgtatggtgttttgcaagcatgtgctaaaaattaatataaatatattacaaaatcatatctaaatctagcacaaccacctttaaattatgtttggtaggaaggtgaaataggtgaatggagagggatggagggagagtgatggaagaagagactaaattacttgtttggcaagaaggagggagaggagagatggagggagacattctcccttcaaaccttcaaaatttaatcc

SEQ ID NO: 323241 - DNA, 806 bp, Cannabis indica
agtgcggaagacacattttccaataaaaacaatgacatgctgaaaaaattaaaacaacaaaacaaaggaaagttggatttatttgttgttccaatccaaaaatgacacatggcagtttaaccgctgagttatcatttcaaactatagctagtgcactactactcttaggtaaattggatttagaaagaagcaagaatgaattgtacatataaaccaggaaaaataaaagagtaatactcaaatattttacacatatataagtgtgtattatatttgggaataatttatatggataaataaatgtgtgtctacaacattctcaaccctagaaaagaaagggaaaaaaaagacaattcataattaaaaagaacctcttccatttacatgcaatttagttggataagcacaaaaataatgcttactttgcaaagttcaaagaatgtttatagattgaaatttgaaaccaacaaacaatgtctccctaactaaataaggtaacaaagaaaaaaaaatactcaaatgtgatcattttagaaatattctactcttgaaatacaggttgggtgggaataatatagaacaaaacttagcatctagaacatatccgtttcaaatgacaataatttttaagtataattagatgacccaactatcaaaattctgttgtctgcagtagtgagacttctttattctttttgctctgtaaactttggctaaaaaatctacatcagacctcgcagaaagcacatcccctacagcagctacattttccatggagtaaataaatcaagcaatactttggactg

SEQ ID NO: 323242 - DNA, 1301 bp, Cannabis indica
gaattatatatatttatatataaggaaaaacctaattaagctttttattttcgatgtaatttatcaatattaaatgtggtatagtttttctaattgaaaagatctctataagattgttgtagtaataaaaaattagttatcttttcagaagtattctcaataattagcttattcatctagaagaaaaaatctcgtgaaatgatacatcattcggaaggatgttcccgaatgtctatcttgaccactcagaagaagtttttaggaaagctagtcctcttccagaaaggaatcgaccccagctattgatatccttgtccgggaagccctttcaggatacacttcggtttttggtcccagaagcgtatatctcgtctagaagcactttgccttgtgctgacgtggagattcttttacgatgagtttgttaagtttattaaaatattactaacttaacaaacttaaaacttactgtcactgactttaggatctttttcctagacttataaatactaccaacacttatcttttttagagaacacgagttcaactgagtttcgagaggtgatcttgagagaaaaattaagaggcagagaaaagagaaagagagattatgtttggattttgtatgaagaatcttttacaagtgaagaagattcttgggtaagagtgtgagagataaacactatgagagaattcaacagagaatcgatctcgatagtattgtgtcatgttcttgctcaatcaataaaaatgatttggtggtatttcagaactggagtagtgtcatatatcacattaatctataggacttgaactattatatatcttgatattgtttttattgtttaccgctctaattgcttctgattttaatactctgttcatccttattttttaatcttcgtttgttgcatgtgaattgttaattttatcattgctaactgtttgttaattaaatttttaattaatttaattttgcacattaattataattttctcacacgaatacatatgactttgaaacaaagagcgatcaaattatgataatagagtattttatgatcattataaatatacatattcaataattatttgtttatgaatggtgcatatgcatgcattatttttttaatatctatgttatattaaatgtagctataaaacagaaaataatatattttttaaaatattacaattcaaattaaattcactacacatgagtaaataacataaaatattttttcaactattaaaattcaaatttaaattcattaccatatttaaaaatatatcttttaatt

SEQ ID NO: 323243 - DNA, 1104 bp, Cannabis indica
aattttttattttttattttgggcccccgaaaagtgtgggccctaggcacgggcctagcgggccctggttatctttgaatttaaatgttagagcatctctaatggtaaaaaattaagagatgcttgttgaggtagatagacgaggtaacaaaatattaagatgctatactattgaagaaaaaagaatgtcattctagaaatatgtgtgaatgtcatatatgagtattgatgcgatcattatctttttaataaaaaattaaaactaaaaaattattgttgcaaaaaaataaaataataatgtgagattataattatagtatttttgaattgtgatatactattggagtgattttagaagtacgagtgttaaaaatgatgtggaagagaaataaaataaaatattatatatttggataatgtgaagatttttagtatctttaaagaatggtatcattgaagatactcttacacttatgtcctgctaataaataataggaataattaataaagaaaattaagtttttgttttaatactctttttctttcttgtttcctttaattttagtagaggttacaataaagtgattgacattattaattagaggaagcttacaaagtttttagcaataacttcggtttatgaaaaactcttttaacaataacgttggattggatgttaattttgtggaggttacaaaacattttaacaataaatttagtggatggtcttgtgtgtataattctcatagtctataaaatgaataaaaatgtgaggttcatataatttaatataataatttttgtagagtattattaattaatggtaaagtaacacgtctagaaaatactaaacaccactgatattcaatagcaattctcttattttatttaatataattaatatttctgttaagtttttatcatctttaataatgatttaatggtacatgcttttaatttgagtatcaaattcaagaggcatatacaattgatgctatttagtatttgaatgttacttttttgagccaaaaaatttaaacgttactttttgattactcacaataaattaaaaaaaaaaactaataaattctcattattaataca

SEQ ID NO: 323244 - DNA, 798 bp, Cannabis indica
tgttttattaagcatgatttattttcatgatgatgatgattttattgatgctagtgcttctatggcttgtggtgttcaagctgctgagaagatggtattttatttgtctattgttgctttaaagttgtttctattatgttttttaatttatctctttttattgttttgttgtttttgacattagtattttactttagatggactcttcctctattgctgttgttgctggtcactcttctgtttcttctagttttcaaggtttggtgcaaaatgatatccgtgacattgttgtttgagacaccaatcttaattcctggaaagagggacatgaagaaaaggactatcttgaagtgtccatttattgaactaggttcttttgaagctaaattggattcaatgtctgattcttctgatgattttgatttcaaaattgtgaaatatgttcatagataaattgaagagacaatgtgagaccaaagataaaattaaaattaaaagtaataaataatagtgaaaatttaagagagcaaagaatataaaacaaagttcatataagaaccaagtcatcttgcttaacaagaggaatatattaatatgtagaaatagatgtttacaaaacaaaagaattaattgcggcaaaactcttaatactttcatttttttcgtacttaacctccaaactttttttagtggtagaattttcaaaaccacattaccgttaacaatttgtagtttccatccaaatttaattgttaagtgccatgttggattgtccatgtagatgttgggttttatgcc

SEQ ID NO: 323245 - DNA, 2953 bp, Cannabis indica
tcatattaggttgttaatcaaacatacatgatagtaaatagatcctggtaaaataatttctgaaaattatatactactgcacattgaaaaatcatatcattgtattttaacaaaatgtgtcaaaaaaactaaatatatgtatctacacaacaaagcaacacacatacaataaaaaaaattatgaggaagaaactaagaatatacaccataaagaaatacaacatgaataagaaacaactgttgaacaaaaaaatattgactactataaaaagaggcattcgcgatggtcttcaaaatgtttttttaggggactgttactaataaatttatatgacttttttacactgtcgggaaaaattgggtatttctaacagtttagaaaactcattatggaaataggtggaagtgatgtaattagtgcgataccgaccctacgacggtgttactaagttaagtcatggaatctgaaacaatggttacactcataaggtgcaactaagcttccatgtggttaattgttaatttgaccaaaaagcgatacatactttataaattgaaaaggaaatatgaggtttaagttcaaaaattataaagatgagattagtctcataggctcaatgaaattgactcgataccgatccttcgacagcgatcaattgtcaaagaattttctcgtagaataacttaaataattttttatgtattttacctgtatgcgttcatgcatcacgtttacagtcatttcaaagggatatttttaattttaaagtataatcatcatgtcatccttatttactttagtcatgtctactatgctaaatcctattactgctttattggcttttgaaaaactaaatggtgagaatttcttgaaatataattcttatctgaatttgatgttggtttgtgaaaactacaaatttttcctaactgatgatcgtcttgaggagtccactgccaatgtcccgaatatttgaacagatatgatacttggattcaatccaacaacaaggctaaatgcttcattcttgttaacctaaacgatgttctaccactactataaaattgatttttagtgacactctatagtgacccgcacaaaaagtgcgtcactaaatattttagagaatttttagtgacctgcattataagactttaaaaatttaacattgctaacccacaatgcgtgtcactaaaactattctaaaattttaaattaatttttttattttttattaaaaaaataattaactatagcatcacccaatgcacgtgtgtgaaaaatttcccactcacgcataaagggacgttgatatacttaaaaaaaatagaaaagagtgtaacataattaattgggataaaagaaagacctcctggctaacataattaataggtggttttatttctcttaaaacttaattaattaattaataaaattaaatatatctttctttctcttattatctaacacaaccctatattaaactaacaaaaccctaatactaacttctcctctctcctttctatcagtagcacctcctttctttaaaaaaaattacagcgcctctttcttcctctctcttgttattccagctacccagttaagatggcaaaactcgacctctgatggtctaacctgacaataaaatgaagacccccactcccttaaaaccttacatccatctttctctttctctaaattgtattgcaaggttggtatttccctcattttctctctgaaatggtatggtgttggttgtttggtggcactgagacaaactcaggtatggcttttctatctctctctcactgtaatgatatctatttccttatctgttgataatgttctccttctttgtctctcttctctgtagatcatcgacagaggggcttgctttggggtttgcagagttggccggagtctagattgcagaggcagtgggtgaggagatcgggatttactgggcttgagttttgtttcttttgatgtcgcttttagccaacaacaatgagtcaattaataagcaataagaaatgtaattaagataaggtaagaaccagtgaacagtaaagaacacatgattttaaagaggttcggcccctttagttcggtaatagcctactttccttagattgtattaacttgagaataaagaatacagtattttctcgctcaaagctctcacaataaaatctttatgtgttttctcttagatcactctgaagtaattttttcgaccccttttacagtgaggatggatcactatttatagggctaaatgtgtgagggaaggtttcccttttgcttacaatatctataattggtaagaacatacattacatatttagaatacatagattgagggattcggacagcttgccatatccctttgatacgatcccaggattgtatgtgtgcttcatgacatcaatcttaaaatagctaagtctttatacattgttcagagaaatgacctcgtttgttgttcggattatctacccttgccctgcttggtcaggtagactttgtccgtacagaggtatactgagtcctatttggaatatccttttagctagatgtagaaaataatagccacgtgtaaccagtgtgtgtttccacgtcatagtacaaaaaatgggataacatttagcccccaagtttgcacgtcacttctaaagtcacgcgtagacttcactcagctcaagtccgtatcagaacgggtggcacgtgttcgatgtgcctgttggtgatccgatgtgattctgaccaagagtcccttcagtattcggctaattaatgctctgattaattcgtacctcgagatactccaacaattcacatgcttttgatagttacccttctccaagtacatgaatgattttgatttctcaatatttacttttggggggaaatcgaggcgtttgaaattcgaaatgattgcaccttttcact

SEQ ID NO: 323246 - DNA, 956 bp, Cannabis indica
cttaattatacataacgacacattaaaaagatattaggcactgcttagtacctaatagttaatttttttttttattaaatactaatagtgtacaataccttttatagttaacttcttataattgattatcgatattctttaaaagttatttttttaagttatactaataacaatattatatcaaaaaggatactaggtatagtagtactttatagtaattctcttacaataatattatattagagtattgatattaggtactagtagtgcttagcacctttttgacattctgcgttgcgattagcgatactctctcaaagctattatattaaactatataaaatttaatacttagtttgactaatagcgatatttacacggagagtaagtactccttgtaccctttaacatttccctacaatattgtgttaagaaggaaagagacagaagattttggaaggtaggcattggctggagacagaaaccgtgtgtgaccattattaggctacatataataggattaaattctattgttgataataatgataagaaaagatattgggaaatgttcaaaatttgtagctagtgctactcacaatatgacattttttcatttgctattggtatctaaagtcatctaccatttagtatgtaactaagtatgttggctattggatttgattttgaaggtactgtcattttttggtgtgatgtaacctcgcctataacactattctaattaaaatacatcgtcatatttaaaattaacattgaaaatgcaaggtggtctccgagaatgccttaggatccgatgggtgggacagaagtatataacaaaataaaatggtgtgacaaaaatgtttaatatcttactttttatattaagaattgtctttaaattggttatatatatacaaaaaaaaaaaaaagtcaaaaattaagctcaaaatcctatt

SEQ ID NO: 323247 - DNA, 1429 bp, Cannabis indica
gagtcaagtgggtctataagacaaaactcaatgcagatagctctatcaaaaagtacaaagaaagattagttacaaaaagatactctcaacagtatgaagtttactacaatggaatattttctccagttgcatgacttgacattattagggctttaataactctagctgcacagaagaaatagaaaatttttcaactcgatgtgaagtcgacattcctaaatggttatcttgaagaagaaatatatgtagaacaacctcaagggtttgtggcgcaaggacaagaagataaaattttcagattgaagaaggctttatatggcctaaagcaagctccgcgagcctagtacagtagacttgaaagttactttactaagcaagggttcaggaagagcaagagtgcgccgacactctacatcaagactcaaggtacaaataaatcttattgtctccttatatgttgatagtctcatctacactggaaatagtgagaagatgataaagaagtttaaagaagacatgatgaagagttttgagatgaccaacttgagcttaatgcactactttctcgatatcaaaataactcaaaaagaagatgaatccttatctcacaaaagaattatatggagacactattaaagaaatttaaaatggagggatgcaagactatatcaactccattagacaacaacaaagctctcaagaagaaagatggctcaccaaaagcagatgaatcaaaatttcaaagtttaattggcagcttactctatctaactggtacaacaccagacataatgtatgcaattattctcctattaagattcatgtatgatccaagtcaaattccttacggagtagccaagcgaatgcttaatcgatacttacaagaaataaaactctacggaatatggtacgaagttacaaatgagtctaaattgattggctacacagataacggctgggtaggatcagttgacgacataaagagcacgttaggatatgccttcacagttgcattttaaatattttcttgggcatcaaaaaaacaagcaactgttgcacaatcatcaacgaaagcagaatatattacagcagcaatgactacaagccaagctatatggcttaaaaaaatactagaagatatggtagaatcacagaagtaggctacaaagatcttttgtgattgcaaattggctatagcaatggcaaagaatctcatatttcaaagctggacaaagcatataagcattaagtaccactttattagggaagcaaaaacaaacaataaaatagagcttaagcactgcaaggctgaagaccagttagcagatatatttactaaagcactaccaagaggaaagtttgaattattgtgagacatgatcggagttatcaaaatgtgtattaaggaggagtgatgaaaagtgctaca

SEQ ID NO: 323248 - DNA, 1657 bp, Cannabis indica
gtgagtagatctaagatcctggtcaaataaattccaacaagaaattgagtagcgtggatgacttattaaagatattctatccaagaaatgatgattatcctcatgttttcaggtattgaatctcctttctaaatttctacttaacatcgattgaacatatacttgagttatagttttgaaattgatattaagcattcgcaagctgaccttaatgtttaacaatgtcttagtggtggtccaagctagaatagtaacgaatttctagactacgtagatactgtgtttaactttcacaagtttagatatccatttccatggatcaaactaagtgtttatgtatgaacatgagtttgatattctaagaccgagtatccattattattgaagcaactttttgttgtaactagacctagtaatcatatacatcaaaaaatgataatgactatcgattatctattgcactctatcttgtcatagtggctttgacaagattactcactaaaaagagatatttgtactacataaccacttggatggtatattcaggtgtccttagacatagggatgtacaagccaggggtggttaggagtaattcttcaatttcttagacagttaatattgatatttaacttatgctagtaatttgatatgtttgaaaattttcataaatttctagcaaaaacagttaagaaagtcattaaaagatctagcaaactaataggagtacagaaatatttaatatgcagctcaaagatcgtttaaataaacttagaattataataattataatcaaacttacctcctcaaaattttggagtcgcatattaatgaaatggttaggtttatgattatttactagaagctgacaaagtccttctaaggatatacctttgagatagcaaccaatattttaaatgtcgtcccatctaagtctgatcatatcttaaggaaaagctagaactactaactgaggttgcatgcttgttggctattctaaagtgacttaaggtggactacactgtcatgaagaatagaaagtgtttgttttcacaaatactacttttttttgtgatgactacatagatgtaatctcaaaaacaaagtagcaaagaagctgtaatgaccacattttagaatatggattagtaatggcaattagcgttaattattgattttttttagaattatgcatatatttatttaattgtgagccccattattaaaagtgtgcactagagttataatttttcaattctagagattttattaactctagagatattatttatattatatatgaaatatgcaatttttatgatttttggtcggcgataacgaccatttgagtcacatgggtaagtctagaacttttttcttagtgggatcaatattgaagattattagaatacccagtgtgagcggggttatggcttttgaccattttacccctaggcttgctaaggttaacttttgggataaaaaggcattttggtcattttctatctttgggttaagtggttgttctgggatgagacagctggtctctaaatcttatttttagcattactctatttttgaattaattagagaaagaagacttattattttagaaaataaagaaaaggaaaattcaaattgaatcccctctctctctct

SEQ ID NO: 323249 - DNA, 538 bp, Cannabis indica
aataaaattttttatagtgaaattattggtgtcttatgtacatattattattacatagtcttactataaaagtgatattatttggtccacatcaaattttaaaaataatgtaaattttattattttgtatatgtatacaaaataaagaaatacttagctaatattattgatacatactatatccagagttagtcttgagcataagtgtgctaagatcgtgttttcgacttactcattttagggcctcaaataaaaaaatatttttaaaaaatatacatattttttttaataatttttaaaaatgctattttctaattattttttttttttatctatgactcatttcagctgagtgcggctctgacaacttcactgctctattgtctctattgaatttctttgaaccctaagagcatctccaaagagacaccaaatttggtgttacactatcaccaaatttggtgtcaaaaattatttctactccaacaacaacaccaaaattacactaaaaaaatattccttattattatattaattt

SEQ ID NO: 323250 - DNA, 731 bp, Cannabis indica
acgtgctcgcacgtaattttttgctagtgtatataaatatagtaaaaataatgaaaatggaataaaactaatcgttgactcaatatatacaatatattatattaatcttagatacacttgattaagatgtttttaatttttaaatcttgcatttatatcattgatataatataatatattgtccgttgagaaaaagaagaaactgttataggaaagaaatcgtggtggaattgcaaaagaagaaagcaacaacaacagcaaataattataataatgaggaaggaaaattataagatttgtcatgtgtagaagaggcaaaaatgaaacaaaattcaaaatcaaatgtatagtcaaaattagttgattcaatattgtagaaattattctcaatcatgtccaaactccttgacatgtcatcaattgttttggcaatgaattctgacctcggattaggatccaaaaacttaggaagatcgtctttttcttgttttaatccatggaaaaggagcaaccatgattggtgcataatttcggattttgtggagtaatctgtaatagatcaaaactcttacatgcacctaagcgtaagtggacgtaccataagaaaagaattgtgggagacgaaagtagaaagttgtacatctcacatattttcctacgagaaatttgattttctatacttaaaaatgttaaaaaagaaaatttaaaccaatacattttacactacaaaa

SEQ ID NO: 323251 - DNA, 1794 bp, Cannabis indica
ttataagtgatcttaaagaattacgacgtatataattattaaaaaaattaattttttttttcttaattgtgtaaatagataaagactttaccatagttgtttccataatttttatatttcgtacaaatggatgaatattattgataagaagcgttcactatagatagttttagaataaattaatatgcgcggatttgggatttaaagttggaaatgtcaataactttgttatattatgacttgttcgtactacatgaggtatgtttgccactgaagaattatattcattattattaggatatatatatccataatctcgtttgacacgtttaaaaactctattaatttactaaataataatggctacacgataattcaatattgggattggtctgtgagtgtgaatgaatagtgatcgagacagtcttcctaattatatatgaatatgcatacactaattgaagcattctatcttgggatttttacaaggtggttttctattgctggtcatcatgggccacgagagtttggggctttgcaatttagtaaaagaataattagataaaacactatttgtaaaaaaattatattttcacatttaaagaattttttttttacatttttacggattattatagacacaacaagaaaattacataaaaataacatgaaaataacatttaaataacatcaaaacaacaacaaaaaataatatacagataacaaaaaatcaacaacaaatgaataaaagtacaacataaaaaaccatattttcgtaaataaaattaaaaaaattgttaaaatattaaaatttcgtgaaacagtattttgtaatttttttgttatttttgtgtatttgtgaaataatcccttatgtcaaactattttacaaatttccaagtggttaagttatttcttagtatggcgctagacacattttaggacaagagttcaagaatgagaaatttacataatatacttaaaatggatttttcttgaagaaattacattgtatatccactttattttatttgttttaatttttaacttcatttccatatttcttttagatatacctacttttatggatgatgtctctattaaacctttaagttatgtatatgctagacttaagtagatagtgaatattaggcaaccactaaaaaaagtgggtatattttagtaaaaaaaacaatgtgaggatatttttgattaatcgatacaaaaaaaagtatttctcaacttattccgtttttctttgaatttcttttcaaatatttttagggcttcttttttataaacaaatgtgggtcgaggcccattaactctcaacatccaaaccctaatatatgtatatctaagatcaatagaagaattgatgttcactaccaaacaaaacaaaaggacttgtttttgtcctatctctctttcttctttttgtttttaatttatttttaaaattttttatatattttttatttatatatttattaatttttttttacttttgtaatttttttaattgttatttttttttaattttttgattgttattttttatttagtttatttagtttattttttatttatttttcatttatttaatttttatttatttgttattttttttacctaggagtaagggaatcacatagtgccaattcttttctatacatttggttatttttgacaatttaaagactaccttcgttaatcaggtcatcgataataatgattttttttttctattcttttattttattgtttagtttttacgaatgatttttttttttt

SEQ ID NO: 323252 - DNA, 766 bp, Cannabis indica
aaggagtcagatgcttggagaaagtttagctggttcggaacaatggatgatttcacagaacatttgaaccagcaactaaatgtcaactttcaacccttaacagaaatagttgcattcacatacagatttgctagcaaagtaaaacaagaaaagtgaaacaagggagaaacgtataggtgagatattttgataccagctatgattgaaacctctttcatacacatagcacaagggaataggaatttgaaggaattgtggatggcaaacttgccaaaaagtgttttgtattcacgaaattaaatagtgtccagtactgattatttttttgtatacaagaaggaaaagccacgccttcgtttcaattttaactaattatatttcaattgataaccaaagaaaaaagatataaaatataataagtgacaagaggacttcctatgcaatcacagtaagagagaaagcaaattacactgttgtattatctttcttgcaagaccaggattcattatcctaagatgagaaaaacccaaaaagaaacaaaagaagctagacaaaatcacaactaacttagcttagcttctttaagctctttattaacttctaggattaaaaaaatagcttctcagagtgttaagataaaaaaataaatactttttatttttaaatttctagaagtacctatagggtagaaagctaagaaccctgttggtcttagctttctataagcactatttggtttttagtattttttttttgttttacgtta

SEQ ID NO: 323253 - DNA, 1231 bp, Cannabis indica
caagtaccattattatcctaaaaaagtctttcgatgaaactggggagaaagtccctttataatcaatgccttatttttgagtatagccttttgctacaaggcctgccttaaacctcacaacattatcatcttcatcccacttgtttttaaatatccatttacaaccaatcagttttacactttttagtaatgggacaactttccaaactttgttatcatgcatagacttattctcttcattcatggcatcattccacttttgagagttcgaacttttcatggcctaatgaaagttaattggatcatcatccatcattccaatggaatcttgatgttcttgaatatatacaatgtattcatcttgattaatagtatttattctttctctagtggatcgtcgcaaaggaacttgttcttgaggttgttaagcttgtttttttgggggttcgattgactatgtttggttgctcttgatctaaaactttatcaatatcaggattggaatcctgaacattgtcaaaagtaactattggaatagaaataaattcatcttcaagaagagtagttgattctaaatcctcctccaaaataaattctttaacaatatttctccccaaactaaatatcctcaaagaactttatagttcccgttttaaaaatattccttactttgggattataaaacttgagatcccttgattgcttagaatatccaataaagtagctactcacagttttaggttccagcttcttttcatttggcctataaggtcttgccttagttgggcatccctaaatatgaaagtgcttaagactaggcttccaccccgtccaacactcataaagtatttttccagctgctttagttggtaccctattcaaaatataggctgctaccttaagtgcctctccccagagtgatatcggtaagattgaagaactaatcatactccttaccataccttcaagagtacagttttatctttcaaaaacatcattcatgcttacagatcctggcatagtgtagtgtgggacaattccacactcctctagatatctagaaaaagttcatggacgttgttcacctgatctgtcatatctaccatagtactcaccaccacggtcacacctaacttgctttattcttttgttaacttgatccttaactttagcctgaacacatccaagacttgagacttttcatgaagtagaaataggtacgcatatcttg

SEQ ID NO: 323254 - DNA, 1155 bp, Cannabis indica
tttgtccccaaatgttaaatggggtgggaaatgacactctctgctccgatggggactcgtttagtattttattttatatttctaaatataatttttaatttatttgtattttttgaatatattagtatcttatttatgtattttaaattgtgttttggataataattaatttattatataataattaatatataatatttgaatttttctatagttgaatatttttatatatttgaatttttattataaacattattttttttattaggaggttccctatcccatccccgatggggaataagcgagaatatggattaaaattcttaataaagatgaggacaagagattacttcatgccaattctccgccccgtgtgcatcccatgtggaatgctatttcttaatatttttgtaaaaagaaacatagtatgctaaagcttgtgtctaatttgacatttactaagttaaatttaacataataagatataacattgtgttcaatatgacttactttaatatattttttaattacaatattactatcaattatcataaaatatttaacttattgattatcattaatgatgattatcttttatctcaacttgcattttagtttgttattatgtattagattacaattacaaaaagtattgttattgggcatcagtagtgtctagcactttctataggtgacactttagattagttaacgatatttcttaaaggttttttttcttaagttatatgagacctgatacttaattacaccaataacggtatgacaccgagaataatgctaaaaactagtagtaccttttagcatttctctaacaaagagtgtgttatatatatcatttattaattttttgtgccatatttagcacattgtttacctcatgcattagtgttagcacccttatagtaacatcctacaaatagttagcaatatatttttattaaattacactgataatgatatgataatgacatttcataaaaatgttggccattataggtgccctttatatttctccacaaaatatatatcaaaatattatagttagtgatgtgacaatatttagtaaattacaagatccacaatttgaaattgccaggtacaatccatattagtaataagttttttttttttttt

SEQ ID NO: 323255 - DNA, 573 bp, Cannabis indica
agaattgccgttagataggcacttttaatatataaagatatatagaagaaaagttctttttgattgtaagttaattagctactacaaccatgtaaaatatttttaaaaaagaagaacaaaaattaatacctcctaatcttctccctccttaattaagctttctatctctcactagcttatcaacaaacacgtgggtggataatacatactcccgttgcacactaaagtaaaaactcatgttattaatacaatggaatagatttaatacaatttgatttaataaataatatgatatttgttattttaaggtgtctaataataataataatgttagtatgcactcatgaggtgctatcttatatttaattaataattttttataatttttattaaaataaaataaattagactcgatattaaattgtactaacaacaatattacacatcacaaaaaaaaaaattataacaccatatagataccttttagctttcgttataaaaaaggatttgaatggtaatgtaaataagtgaaacaaaatataaaatatagcttattttgttaaaagtctattt

SEQ ID NO: 323256 - DNA, 1107 bp, Cannabis indica
ttattatatataaataaaaaaattatccatcaatttctcataaaacaagaattcagttattcagttatataggtacactttatatagaatagatatatatatctcttttttctaaactttttttctaaacttacatatgcatcattatataaccttaacctaaatgtctatcacaaccgctgcattcctttccgctgcagaacaaagcattcatcatgtctcttgtagctaacgaggagtttcaatacattttgcatatgttgaacaccaacgttgatgggaagcaaaagatcatgtttttccttacctcaatcaaaggtatcggtcgccgtttcgctaacctcgtatgcaagaaggccgatgtcaacatgaacaagacaactggtgaactttctgcccaagagctcgataactttatggtaattgttgccaatcctcatagttcaagatccctgactggttcctttggttccttaacagaaagagttttaaagctaaaacaaaaatacgattgcaaaactacataataaagtacgagataaaaaaaactaaatataattaaagtaattaatatattataaaataaaaactagctctatgcattagtaactgggtactcttagggggcgtttggtacgaggtgttcaaaataatttgattatagggaatattatgaaggagaatatgattatagggaaatgtgtaaactgtgtttggttgtgtagggtaatatgtaatcatattcctgttaatcaaattaaagtgtttggttgagtacaggaatcttatatattattttaaaaaattaaaataaaaatatttttttatatatttatttaatgttaattatatataaaaataaaataattatttattaaagaaatttatttattaattagtaaatattaaattggagaattatctcatatactgtttttttaacttttttttttttctaaatttacggtttgggtttctaagagtggttgcagcgctagttgcaatatgggttttatacgattttttattgcaatttaggttgcagcgttagttgcaatagaagtttctatgtagaatttcgtaaaaatgcaaaaaaaaaaaaaactg

SEQ ID NO: 323257 - DNA, 2785 bp, Cannabis indica
gatttttaaaaagatgaaaaaaatctgaaaatagacaaaattagatgggggcatcaccgcgcacgcaggaatgggtcatgaccgagtaaaggggctgctggcaacatgccttgtttgaattgcatgtttgtccaagcattagccccacaaaatgcagcctcgtgtcccatctgcatgtgcatgcagggtttcaaccctagcatgtgtagcagccaaattccaattttttttttaaaaaatcatatctttttcaattttaatctaaattcagtttcgtaaaggctaatttacttattttttaactaattttctaaataaaataatttcagatcgaaaatgaaattatttttcatagaaaattttgtaataacacaaccaatcatcaaactcacttaaaccatcatgagcacatccaaatcaatcaaaaattgtttgaaatctatatttcatgaaaataaattattactatggctttgaagccaattgttggaaattattttacgaagatctagatttactaacatgtatgttggattataattctataatataacatcataaatatgactttcttaaaataatgaattaaacatgtaaaggtatagaaaaccttacatttatggtagcgaaataatatggctccttctgatctgatctctaacccttgattaattctgttgcaaagtataatcaagatctaaaactagattctccttctgatgacaattggactccctagtcttcctcactgtgtcgagtattgctttgaaatgtgtgggcaagttctcaataccaaggagcacaaaattttgtgaagaaatccaagaggaaatagcctctgaatttttgaaaattaaagagaagaagaaatcatctttttagggatttctagtttagaaaatcatcagataaagctctattctctttttatttataggtttcacttagggataggctttacttagggttatgtttaaatgagattgggcttaaaatggagacttgggctgaagtctaactctagggccgaattgcttattggactttagagttagatttatgccactttattttatttaaatgaaacaatgtgtcttttcctattttaccacttatctcttctaattatttcaatactaattttattttaataattattaaatatattattttatttaaatatataattaattaaacccacaaagtgtcttaattaacaaataaatctctatttcttttttcttatcaaatatgccatttcttagtaaaatttataaataagacatattcattatttagaatcctaattgatttaattaaatatattatttgaaactacaaaataatattatcacagttagtgcaaggaccgttggtctatgtaaccaagctcccaataagtagtcttagaatttattgagtaaattctctatcttattaattcctcctaactctactgtagattcagaactacactcttgattacatagaacactctattcaccaagaaaagatatgttataaattatctattgttttaatctaaacaattaatgatcctctatagatgatttacattgagtagggacaaaaattaaccattttacccttcaatgttatttatcctcaaaagacttagcttcttataaatggtattttagtaaattagtataattactgaaataacagctcttccatttatgtctattagccaagctcttagaaaatcattgtttcgtttttaactatttatagaagttataaattctatatctatgattaccgctcccactcaattgcactaccatgtccccaagatgtaagtattgcatcgatccaaatggtcagctataacgaacaagtcaaagaacacatgtaatatatttaagccaaaacttaattatctcaggattaagatctattgatcgaagatcaattaagtgacattgacttagaaaagacataacagtaagtttacgatattttttccactgccaataccggtctagtccaatgtatagtcgatgcatccaatacaagtttactttaataatgctctaaaaagtacattccacatatcactgtgtaagtaaactttattattgattataacgttagtgtaaattcagtgcattgataaatcatgagactaaatagtttgaagcatataatcacaattactttccactgtgatgatatcactgtaattgtgaataactatatgttcaaaatttaatagaacttatatattaaacctataatcatgataaaatacgtgaacaaagtatatgacaaggtcaagatatgatttttgatctttattgaaagtaaataagattacaatgaaattgaattttatttagggcataaaatcccaacattacatgcctctaacacatctccacactagtatataaataaacaaataaatatatacataaatatggacttagttaattaatacgaaactagagtattgatttagaaatctagatagagatttccaagccacacacgctcctagattggcaagaataaaatatttgttaactataaataaagagagacaacaatttatagtagttcactctctgtatcgcgacagtaatggagctacattgacttcaatttttatttcttacgagatggcattatagaaaatgttaagtgtttcacctttagtttctagagagagaaactagagaaagatactctgaccatgtggctaattttttgaatgtgaaatgagctaagggagctttcctgttgtaggtgaaggaggccc

SEQ ID NO: 323258 - DNA, 816 bp, Cannabis indica
tttccttaaatagaaaatcatttccttaattagaaaataatttccatatataaaatattctaatatggaatagaatcaaaattaattaaaagcataaaaaaattgataaaaaaattattaaattttttctcatttagcattgaaataatcattctttctatttcaaaatgaaatagtcattccatcaaaatgatgaaaaattcattataatagaatgatatttcaacattttaaattgtaaccaaacaaagaaataaaatgaaaattattttctttctatttcatttcattaattccaaccaaacgctactttagagagttcaacacttaagttgtttttagttggaaataataaaatagagtggaaaagaatacatttatattctatttttttattcagttatattttaaagtattgaaatatcatttttattttaatattttgatggaatgactattttatattaaaatagaaaaaaagactcttaaatattcatttatcaatgcaagatgaaaaaaattaattatttttattaattttttttatacattctaaatatttcatttaagtttattactattctaattcttttatttttattcctttcaaccaactaaacgcaagcttagagagaaggtgtaactatttcatggacaatatttaccatacttcaggctcagtttttttttcttctttctttctaatttctattatttagtagcttacaagtctacaaggtttgttattgtgttcatatatatatgggtgcgctcttaatgagaattattcatgaatgggtaaaattagaaaatttt

SEQ ID NO: 323259 - DNA, 1108 bp, Cannabis indica
gtgtgattttcgtgggtggtggatgcgggactttagtgaatctctaacattggtcacacttcctcacatatttcatgcaatccatcttcttggtgggccaaaaatacccttgccgcaggattttcttggaaaggttgggtccgaaagtgtgatctccacagaagccttcatggacctcatggagtattgcactaatctctgtccattgatgcacctcaaatatggaatagacaaccccatgcgatatagtttcccgtcaatgataccataattatgggcttagtattggatctttctggaggtagcctagtctgcggggagttccctcgtgctcaagaactagtaaataggtgtcatccagaagtgtgaattatccactacaacattcacccctggacgtcgatgctggacttttacagatgaccaacaaggactattccgtgctctacgatctccggatttgtggccaacttagcaaaaatgttagcaaacaaattttgatccctcgagatttttcatatattataactcttaaatccttagaaaaattcacgcaacactaggacataggtagccattcgctcgtcttttgtctgatactcatgagagattagattcaccactagttgggaatcactttaaatattcacctatttggctcctacttcttttgctaactccaaacctgccaacatggcttcatgttctgcttcattgttcgaggcacggaaactaaagtatagcacactttgaagttggtgcccctaggggagattaaaattactctaggtccgaccccattctcattggacgcaccgacaacatagaccttccaagtgggtagctcaggaattggttcatctagaaggtcgttgaagcccatgaattctgccacaaagtcagtaagggcctatccttttattgagacccgtggttcagaggtttcggatttcagcatcatctctaactggcctctaaacattagtggtagatgggacctcagtgttgggagtggattgatcggctacttaactggtgtttccagtctcttgcacgcctggtgtgatcccagctagagggaaagtcactccatggcccacagtaggtg

SEQ ID NO: 323260 - DNA, 886 bp, Cannabis indica
tatatatatatgatatatattgtaatttttgcttctttttgagatctattggtttcatcaatctatatttggatttggagtgtgggtgttttttttttgttataatttgtttccagaacaaattagtatttatatataaattatataaatgtattagttttgagtttgaaatttttgaaaataattctatacatatatatattagggttttttttggttgaaaaaacatattagggtgtttatattaattagtacgtacgtatttaacactgcatgcggatatatactccatataatagtttctgtgttaattaatagatttattattattattattattattattattagttgatatataatcgaaagtatatagctatgtatattcagctttcccctatcaagcttgatagctaggtattattcaactttttcctattaattagtgaattttagttgtaattaagattacttcgttagttattatgtgaatttttatataaatttttgtaaaaataaaaataaaatggatacaaattaagtgtgaaaataaaaaaaaaaaatccattttaattaatatacgtataattatatcattttgacagaaaatattgcattaattaactattactttttgacgtattattcaatttgaatttggaagatttagcatgataaagtactaattaatgaaaaattaattagattattaatatttaagtttgaaaagctatgattacatataattactttcccaactcaattaaattaaattacatttatatgcgtgcctacattataatatgatagcattgctattaggcaccaactggtgcctaatacctttctcgacatgtcgcgttacgatttgctagcgatactctct

SEQ ID NO: 323261 - DNA, 661 bp, Cannabis indica
aaaaactacatcatataatttcaaaataactttcatcgttgtatctcacctgtagtgactactacatttaataataccatcactgtatttcactttgtaattatatatcgttaatatcctttcaattaatttgctctatacgtaaaataaaatgattgataaatactcacttttaaacataagtgaatcatattctgttataaattttacctaaaacaatttttaactgtcacatcatagtctcattcctcaactttatatatagatatatatgaaaactaccccttgccttgaatgatctaaagaaataaatgagtgaaaaataataaataaaaaaatcacaaccatgaactcaaattaaatcaaattattttgaagcaaatacccataattagttatgttttggcaaagtaaatacataaatagcaataataataataaaaaagcaataaaattaaattcacatgaatcttaaatcaaataaaaaaagtttgaatccaagagaaattgaggaatataataatagggcaaaattatggtagaacttagcaaaagtttcctactggtaggaaattttttttaaccattgattttatttcacgtggttattatgatgtaaggtttatactcttacgataagactgcttgtatacaattaaac

SEQ ID NO: 323262 - DNA, 620 bp, Cannabis indica
gttgatgtaaattatgtgctaaacttaagtagagaatagaagtatattgggaaatccactcacaaaagtagatactttttaatgaaatataatatgaaagtatttttgattaatgaatacttatttctcaatttattccattagcatctacatctacacattttgatctcagttacattgtgggccgaaaataactttggcccaagcttgctaatataatcataggcccaaacttctcctcctccatcttcgtccccacggttaatcaacaaactcgaaactcgttcaccatgcttgctttatacaacttgtgacgaaaccaatcagtgtgtttgtgacgaaaatctcaccagaaattgggttcaatcaataacaagcgttttcatgcgaaccggagtttgattgcagaacttgttgattcaccatctctgccccaactcaagccatgagctgtgaagtttgtcaactcaaagaattggtaagattcttcttctgggttctcgaatttgacccgaagtcctaaatttttctagttctaaattgggttttgtgtgaattttgattttgaagttttaaactttatttattttcaggaagtgggtcactttgaatttgagata

SEQ ID NO: 323263 - DNA, 986 bp, Cannabis indica
agcttaattttattatttaatttaaaaaatatttttttcataataaattaaaatatgtttacatttaacattattttggattagttttttttttataggtttttcatatttattgttaggtttatcaattgttttttctgataatcttagagttattgttttgtatttcaagattttagatttattaatttctgtgctgtttcattattctcatgtttcaattttctttttctttgagagatttcaattttaagattttgccttggctagttgatgacagtatgatcgatgtttgggtctaactggtatttaatttagttgccggaatgatggcaaaatgatcgaacacatattattgtatacgagaaacgaatttgggtggtaattaagttgtggatgtttttcgatgatgagggtggtgacagattaattaagcggaggccatttttacggtgtaagttgtattattaattatatttattacttttatttcttttatagtaattgtaattatagcatatttaaaattttatatttataagcatatttacaattagtttttatttgtcagatttttatttttacatttatttagtctttttatgtgataaaagtcaatttatttagatcaatttgggttattttttatttttcaatttattattttttaaatagtaattatatacttctttatttacaacattttcctatgtttgtttttgactttcttccaaataaaagattataattatttttttgcaatttaatagtttttataagtatgatactatttttataatatatatatatatatgtaataggttttattagtataattttactgtttttgtacttttttatctttaatgatatatataatttaagaatttaattgtattttaatggcagagccaattttatctcgtgattgatttcagttttattttcaatatttttatttgatattgattattatatatgatact

SEQ ID NO: 323264 - DNA, 2002 bp, Cannabis indica
gagagagagagagagaccttgaagcgcttatgtaggcgataatagaaagcatcaaggtcgttgaagatatcagagtgcgatcgttcgatgcattttttgaaatcgtcgaggcgcgaggccaccatatccttgagatcgaagatggaggacaaggtcttgggaggatgaaagggcgaagtaaagggaggggatataggagaagcagcggccatggatttctggcgcttcttagtggtggtcctgaaaacgggtgagtggggagattggttgggagtggaagccgtcgtcaatggcgtttcgagaaactccatggcggaatgtttgcgagtgcgagttcggggtcgcgtggcagtaggagtaggagtaggaccacggccacggcctttcttcttcattttccttcctactttacttctctgattctgaggttctattcaaatttgaatttgaaggcttaaattgcttctccctctttatttattttttaataatttgtttctccctctcacacttactcgcgcttcttcttcgtcaatcgtgggggctattttgaattaggagtgttcatcagttttaaatttaataattatgattcaaattgcagtgcactatatatattataaagttatcaatttatatattatattattttttaagagacaataataagttgatgattagtatatatgttatgatgttgaaactttaatgagattttcttttttgtattgttaaaaatttatagattcatttttaaatttttattataatgttcaatgatagtgatagtgtattgttcaaatcgcactacatcacactatttttgcggtgtggtttttaaggttttaaaatctcacagtgcgattgattgagaaattacaaaaattgcatttgctgtttagtttgaaaaaaaataatttacataatttacatgctaatttaaaatattatttaaaaactattgttgtttttaatttgcccattttttatgggactagatcaattttaccttttcaattgtattttttgtcatatttttgttatattcaaatacatatatatttttttttattaaataaatttgaaacaccgcaaattaattttttcatcaactctttattagaaaactattttgggtagtgggtttatagttgttgttgaaggaattttgacaatactaaatagaaataaaaatataaatattaaattaaaggcatgagtactcaacttagaatgacgagtattcaaatgagaccacacagacaaactagaaaaattgataaacacaatgagcacaaaaaagtatagtggtttagtcagatcacggtctgtttagtccactgttacaaggatttctgtcttgttcatattcatattggatcactcttttatatacaaagcaagtgtccctttgattacacaaagtttaattattgaaccgttttacattgaatatcaacattaaataaaagaaaatgtgaatgaaataaatgaaaaatagtttcaatttgttttactaaatacaacaacgtacgcgactttcatagtgcgagttgtcagtttatatactcgcacaaactcgcaagcttagggtgtgttcttgttaacacaagattaatgagtctcgtattaaggtatatgcgtcctaattgagtcgcgcatatggataccttgttggcatcgacaactcaggacgtgagagtccttatcgggtcatcgagcacgttaggtcattcggatcaactcactaagtaaagagtcaatctttactagatcgtaggagaagacttcatatatatcgcatatatcttgctatatgcgagacttgaacacgtccttcttggtcctacatcatgcaaggcgtaataatgcgagtagactctatcaaggtcatatcatctcgctgaacttggttcaggccagatttattctcgagaggttctctttgttggaatttattttactaggatcttagatctacttacaagtatgtttattaaca

SEQ ID NO: 323265 - DNA, 1173 bp, Cannabis indica
aggttttttggttttaataaaaatgtatttcgggattaaaaaaaaattaaaagtatagtttaaaaatatatagtaagaataaatattttaaaactatgtgtaacattttagcatcaaatgtcaaatttttcttatgaaatgaattcaccatatatacttttgtaaaaattattaatatacactcaataatattgttaacttaattaccacacacaaacaatgatcatattatgtaaaataatcaatttattttcatagcaaaaaataacataatattttcataattattattaggttaattcaaacaccaaaaaaggctttgattggatttttggtcttcttggcctcatctgcagtgacataaaattgaatatattttctactatcaaaagggtaattatatagtaatggatgttcttcatccacaaattcttgaggaacttcaatttctccatctgtgaatgtaaacattcccattgaatatctctcaccatctccggaaaacttcacttgatggtaacaagctcgtattctatcgttgctccaaacctgacatgaaaacaaatcggtcgatgggaaaaagaaatccaaaagatttatttttcatgtttggattgaattgataaattaaaattctattttagaataattaaaaattttaagtgtggtgtaattttatgaaatttagatcaaattacaaaattacaaaaatattttccttcaatattgctatttcttcctcattaaatttttctttagtaaattttaaggtccaaacaaaattttaatgtcaaaagtggtgaattaaatttgaaagtttaatttaattgataggttaataaatgactaattgtctaattaagaatagaattttgaatactttatcacataaaaacttaagtttaactctcagttgcaaataaatatctaagttataattcgagaatttctgcaagtacttcgtcgttaagtattaagtaaattgccacgtaacaatttctcattggttcagatcattaaatttttttattttttatttaaaaattaatttaaatatactaataaaaaataacacgtgaataataacttgacacttaacggttaggtacttacggaagttccatagatataatttaagtataattattaaaactaataattaaacttaagtat

SEQ ID NO: 323266 - DNA, 492 bp, Cannabis indica
tttatttaaaataataaaattgagaataaaaaaaaagaaggaaaaatcaataatcaaaaatataaaaaaatatttggctttctccttttggtcatattatttcagagtgtaaggctttgattgtcgaggttgataatgtttttttactaattttgttaaacgataggattgtgtattttttgacgctatcttttcttattgaggctgatcatacttttagtagtgtttctttatttactgtaattatccttagttttgaatgatttgaattaactatgcttgcattattactaaaacaaataatcaaaagataaaaatttttaattttatgttggtcatatataatgaatattatataatatttaaaatggagaaaatatatgcattctgctcataatggagagagagagaaagatgaattactattactttatttcggtattaataatattcttaggttcggtataactatctaccatattaagatcaatt

SEQ ID NO: 323267 - DNA, 1387 bp, Cannabis indica
acccggtgtttccccttacggatcacgggactactgactgtcatagatattgtcttgaccttaattcgagatcaagttacccgtcttgatcgtcttagtcgggtttgactttgtccaatccgaggtaagatttatctcatctcggatctatcaagaacttccctttctaggatgggtatgctcttattttaatccaattcgagatggtcttatctcagcctgacccatgctatgtactcgccttggtcatctgaagtagattgcttcttgtgggccctagagatgacacatctggagccttttctgttttgggcttttatcttgcttgtttgttgggccttcctcctctcctcttccgtttttagtgggcccttaattgggctggtctcgacttgtccaatccttatatggaccttcctcaatttagaggaaattacactatatactctttttatattgtcctcttttgtttttacccacttttttaaagtctatcatttttacctcttttttcaaaattgtaccaattttgctcctatcacttcaagatactctccatgtgactctcatatgtaaggatattttgagtacaatacatataaaaagaggtatgtttcaattaaatataaaattttaggtaaatttgatcaattgattaataaaagaggtatttttcaacttaccccttcaatttaatccacgtgggctttttactagtcatcaatttttgggataagttaaaaaatacctcttttattaatcaaataactaaatttacctctaatttttatttaattgaaacatacttctttttatatgtatttgtatcaaaaataccctgacataagggagtcacatgaagagtatcttaaagtgacagagacaaaattggtacaatatttaaaagaagaagtaaaaatgatagactttaaaaaagaagataaaaataaaagagaacaatataaaaagagtatagagtctaatttcctctcaatttttctcctaaacactattcctcagtttcttttatatttttcgtataagaaactagttaatagttaccaacggatgatcaaaggaaagacaaaatcattactgccttctcgctagtgtcagtacacacacatattttttttttatggtgctcactagaatttttatttctcgagtcgctctggctttcctatttacttaacactctcatgtatcactacaagaaatgtcacttttgccaacacatttttgtactggcaaaagttagtattccgctggtaaaatagaatttacttgtgctgtgttggcaaaagggggttggtaaatcaatgttggtattagaacttttcccaacataaaataaaaagcgctggcaaagatgacttttcccagc

SEQ ID NO: 323268 - DNA, 575 bp, Cannabis indica
taaactcttatgtgtttatttcattgttttagaattcatattagaatgttaatcaaacatacttggtagtaaatctagatcctggtaaaatattttcaacagagtgactccctggaggatggcattgatggcatcttgattaactccttgaaaatggaaaagattggagtaaaagttgagaaactcggaaaggatggtggaggtattattttttagaaaataatttaaggtattatagtagtagtactaaggtcgtatagtggtatatatatatagggttgggttggtctcaatatttgaaatgatatattatatgagaaacaatatttagttacatagaagtgtgcatgttagtctacacgtgaagcaatattctccttaaataagtaagttttataagtatatatgttatgaagacaattcgaatttttaaatttgaatattgggaacgtctaacactaagaaaatgaacttagtagatatattctaattacaatacctattatttttattagttttctttttattttaccttttaccttttaacttttttttttttttggagaatttttttt

SEQ ID NO: 323269 - DNA, 962 bp, Cannabis indica
tatcattattttttcactcttgagaggattatttttcttttaacaatccttttggagaagaattattattgttttaattaattttcttacaattaagatgagtatcgtgatcacaaaatcaattaaaagtgtcaaaaaattttatttactataaatataaaactcttagtatttatttccacaaattatattttaaataaataataaaaataatattttgtatgttttggttgatgtttcctccattctttaggtattattatcattattttacatcatttataccattgagagttggataatattctctaaatattaatgaatcatgtcaatatatagtgagaaaaaaagtatgtagtataagaccatgatgttatacaaatattatgaaaaaagaaaaatgagaaactattaaatattacactactatatatatacatacataatacaaataaaaataattttattttcattagtatgtttaattgataatacgtatttataaatatatatattaatcatctatgaactcaccattttatttccacaatcgtctttgaatgatctttaattaccacttttgagcatatgacacaaacaatatcaagtaaatgatcaaagcatccaaaatcttagagcctattctattctaattttttctttaaaagctatgttaatctataatgtatatataatagagaacgatgaatatgaagaaaaataatattgttaaaagaaaattatatgaaatacataaaagatattgttattattatttgtagagaactatttagggtgtgagttataaaaatgaaaagctacttatattaattatatttatgaatgatttgatgatatgtttttatttataggtagttatttaggatgtgagttctcaaaaatgaaaggccactatattaatcatatttatgaatgatttgatgatattttttttatttata

SEQ ID NO: 323270 - DNA, 1805 bp, Cannabis indica
ggcctggagcgtacgatcttaggggacaccaaggctttcgctagcaataatgtattttgtaacgggatcctaaaattttatatatgtattattataagtttattaagtaaataaggaaatgtaaattaatcatgtttttcaataaccttgttgattagcaacgagctgcacaatacgtttaaaatcatactaatacgcctatgttagttagggtattacaaagtactacgaaataaaaattatattgttagctaaagcgctgtggatgagcaacaagattaaaggcagcttaagaattaatgtcgttgttgcaggaacggtatcctgagttgtttagacaaattttgagaacggaatttctataaggaggggatagttgtaatatcctggaaaatataatgatatttaatttgacgtattttattaaatatgtgattatgtgggcatttgagtaggattataatcttacttaagataattacaaataattagtgaaatataaataaacgaataaataaagcgtaatttatgaattacagagattttatcagattataggagtcttgtatatactattttcaaaataaaatatttttcgggttcggcggccgtggaaactaaacggagtgattagaaatgtcacgacaaaataagatgaattgtattggaattatactggcctagtttagaattttaagttgtcggtttggcgagattagttggaaataaccaaattaccctcacattttattttaggcttaagtgtttattttgaagggcatattagtcatttgttaagattataactttatttgtcttattaaggaacctagagtatgctaggctaaaaatgactttcttgtattgagttattagaaactaaattaagaattaaggaattaatcataagaagcaagaaaaaaccatcttctctccctcatctatcgacagccctaaaagtatgcagaattggagcaatttcttcatcatatttacctcttctcaattgatttagcaaggttttagagttgttcaagcatggtggtaagtcttacatcctttccctttgaattttttatgtttggattagcttttgctttagggcttttaagattttgcgtatatgttgatttatggagttcatagattgatgtttaagaacttaagttttctcactcatggtgttttgtttattttgatgaatttctgggtgttgattgatttgttacaatgtttttatgatatgaaagtgttctagagggtttgagcaggtttggtgaagaattggttgagttttggagcaataaaccagagtttcccatttctacagcaaagaaaccggttaaccggtttcataggaatagtaaaataggtcaaccgattttgccagcagaggaaatcctagttttaggcatcgaaacaagttttgtttggggtgtttcccagagcttagaataggatattttaatgagatttgatttattttgaactaggggggagtaagatatgtttatttacgaaattagggttatttcagaattttgaataaatttatttatcgagcttcattctcgtgatatagaacccgagatcgtcgagcgtagttcaactcaagtcggcctccacatctgactattggactaaggtaagaaaaggtttatgcaccactaagtggttaaataagaagcgattataatcgttagtgcctcgattaagatcgagattaatgttatgtatttgttgtggctcgactattatcaaagtgatgatgaggaacgacgtttgtgctgggttttatgccctaa

SEQ ID NO: 323271 - DNA, 784 bp, Cannabis indica
atgtgatatgtgatatgtatgatgatgatgatttgtagtagtgggaaaagtgaagagggaatattggatgcgtgttgaggaaataataatgaaaatgtagccgtagggatatacaaaccaactttctttctttcttttttttgtttgtattgtgttgtatgcagctagccacatggatatgatatgtacggctctgcaatatattacctcacgatttcacgagcgtgggagtaagaaccttcctctcaataattccattttctatctatactccttttcactacactgcacttagggataaaaatatttagtgggtaataagcaagaaatgcactctcattctccttctccatttatgcccccatccagaaacgaagctaggattatatgacaaggaggccaaagattttaaatggtagaaattggaagggtaggaaaatactaaaatgtattagcagtgtctaacactattacgatgttttacattattattattagtgaaataaaatattaagtctcatgtattctaatttaataattatataatatataatttcgctaacgtgacttgatgatactggacacccttagtatttaacaaccatactagaagtataaggttaccactctatatacaagtgaatagattttttgtaagggtgtctatacatttagtatcatgtgttttatttaaatacaaattagttattgggtgactatttaatggttacatttttattgtaaccatatggttacatttttttttacctataatagaaggtta

SEQ ID NO: 323272 - DNA, 1045 bp, Cannabis indica
atttgcacaaccaaaatatgaaaatatcttgtatcaaaaattatgtaaaaaaaaatatgaaagtatgttttagtgtcgaggggattatatttcttagtgtgagacacactgtatatatttaattaatacaatgcaacgcagtatatattaatgtagaagaatatatattacaaaaacttatatgtataatatgttaagactcgatcattaacaacacaaattcttttttcttcttttttaaatttgcatggatcaattacacaaatcctgtctagacaatttgagcaggacacataattgatgatgtgtattaatttttaatatatatatatattatatcctcccaattaatggaatgatcgtactgcaagttaataaataatcgttcaccaaatgagataactacatcatatatttatatatatatatcgatatatatatataaaaaaaaagaagcccaagaaattttgataaaatgagaaagtgtcctgtaatagaataagttcgatacttacgatagggttccaatttgtgctatgagtgaaaaatacacacacttgacccactatgtgcaccgtaggatcgtgctgagctggtttggtgtgattgttagataaattaacaattaacccaagatctatttgtatataacatagaacacaatagtagtatatgataattgagtatgtgtacctgattgatccatagcaattatctctgattgatccacagcagttactccaatttgatagtgcaatactatcaactaagtcttcctccctagatctctaaatcagaagcagtttattttctctgattatcaaaaggtatacaattgtgatgagacaatatgtatttatagagttagggaggggacttagctacaaaaccctagttgggctgggcctgctcatcaaaggcttcagtcaactagaaaagcccacacttctgcttcacctagactttactcacagatgctaagcccattaacaattgatcaccaacaacatgggctaacacagcaaagaactatccaatcaaccca

SEQ ID NO: 323273 - DNA, 590 bp, Cannabis indica
gattggattggatttaaaatgttatgcggatcggattggatccaaaatatgaaatccgcacttagtgcggattaggtgttgtttgaccaaaaaaatgcggactggatcagatgaacacccctaaatatttattatacatattaaaatatatactattttttgaatgaaatttgtcttccttttttggtaaggatcttccttacattagagccaatcactctaaagaacatcataaagttcaaaaaagacatttctctccctaaatatatgacaagcataacatcgagtttgtctcacaaaaacatttgtagcttgattagtagattatttaacaaaacataaaataacattatttaaagattgcaataaatcttgaattttttacgcaaaaaaaaaaaactaacttttattatgaatataccttcacacagttggataaatttttgtagtttttttaatattttatttaccaaaatatattttgcacacatcatgcatgcactgttgttatcattcatctacaaggacactcaactcttttctcctctctttgctatactttttctttctcttcttctttttcaattttt

SEQ ID NO: 323274 - DNA, 2156 bp, Cannabis indica
ttaaagtacttaacacatccttgtgggatcaacctcactctttgtgagcctataacttgttaacgatacgtatacttgcgtgttgaaaataccagaatagttttagtgccgttgtcggggattgttagttaatattattaaaaattaaattttattctaatttagttttttcttttttattttagtactaattctgttggtttcaaatttttgtcttttctcaagttcaacttgtttatgagacgtcaaagtgcaagtgccagattgcctatttgtaacgcccgtatttaaaaacttgctaactaaaattaatcttattatataatattcatatattcttataggtcgggatcccgagtgaaaatgtagttgaaaaattcatttactaatataaagtctcgtaatatttcttttttttttttacaaaatacagggcaactattaaagataattcaaaatgctataagattgaaaccctctaggttgcactgccacgatatgtacaatccttgtcaagctccaactcactgctcctctagcttagctttttctatacaaggtagcaaactgatgagtcaacagactcagtaagatatgcataacatatatataagcaatactataccgactttatgcttaagtcatcctgagcccaacaaccgagctcaccaaatgttaagaatgttctcaatggaagtacgaccactgtaccatatgcactaaagtaccaactccatactcgtattggtagtgccattattgtactctcaagagttactaagtgttgttccacatacacgacgtaccccttggtactcgtgttggtaagactataactaccctaaaatcctacactgtactaacacccttaaaatcacattttcgttagtgttagtagtgtaaataattaaaataaggatacattcacatatagattatttatgctatcttacctcgtttccgtgctcaagtgtgccggtcagcctcagtgaaattacagctcgacatttcacagggccctaaatcacaacatttataattctggtgagagacacactaaaatgcttatcggggacttattatcaaaactaagaataaccatatcgatgaataggatggtaataccctaaataacacaaaaacggggaaaactagggttctcaaaaatggcccaaccgacagatcggtccccaactggaagtcctattccttggggaccaaccgacgaccagttcagcactaggaacctcaaaaatgtccccttgacctcaaatcacacccaaacttcacataattctacagaatacctgtatatactccaacacagctaattaaagcaatagaacataataaatgactcaaaaattgaaaacaccattagagcacaaagttggagttctcaaactccaactttgctcaaacaacacaatcctcctaactcatcttaaaataacataattaatcaccacctaacttaagaatactaaattgaacaaccccaacacaaacaaccatccaaaacttaaacttcaacactaaaaccttgcttcaacttaagaaaatacaaaaaggaagagagtagaggggtgataccttgaattaagctcttaatttcctctagaaatctctgatttagaccaagtaacaccaaccctagcttgcttctacacaattggagagagaaagagacaggtagagaagagatggtagatgctaggcttttctaacctttttccctaaaaagatacttaattaaaattaataaatccaacataatattcagaataatattgtcacaaaagacaaaataaagttctcattaaaatgactactatgcccttctataaaataccaaataacaaaaaacccacaagcactactataaaaaccccctttagaggcgatttttaagccctttcagcgtcggttttggcaaaattcgctaccgacgctgatcagggcgacgctaaaggggttataaacaaccgacgccgtatgtaccctatggcatcggttattagctaggaaccgacgccatagggtacatacggcgtcggttcctagctaataacaaacgccatatgtggcgaaggaaccgacgccaaaaacaagcatttttttagtttttttaattttatataatttattttaattat

SEQ ID NO: 323275 - DNA, 889 bp, Cannabis indica
ataatattttacttttgcttgaattagagatggcaaaataataggtaggagttttaccaaagggagcgtgcataataataatatagtatccttaaagttttaaatatataattatgaaaacatctactttttcagaagaagaataagaataagatgaaaaagaaaatgttagctatagctgtactggatcgaataatttttttttggtcaaaagaaaagtgaacattattattttgtgggaaaaagttgagagagatagaagaaagagagtactgggaatttattatatcataattaaagtcgaatatgtataatatatatttatatatttagagagagaaatgatgtaaagtgataatattgatataattaagtatcggaactcgtataatttaaaaaaataatttttaaagaatatcgctaactaatcatgaagcactacttataaaaaaatgttaagcaccattatagttttctataatagagaatagatgttctttactttttcctaaacttttttgatagtattttaataaaaaatatactataattttttttattattttatacaattaatttatacttaacaaattcaaattataaaatattattaaattaataatcaaataaaataagcaatataattagagcaataactataaaatgactctctattttaactaaaataatttagagatcaccgttagaaatactcttatggaattaatttgaaagataaaaggaaaagaatagggatttttacactacatactgaaatttttaattttttattttttacactgtagggcagaatttttttaaaaaactatttagtgtaagttttatattgtgtattgtgttaagtttttactttttagttattccactg

SEQ ID NO: 323276 - DNA, 632 bp, Cannabis indica
taacagaatattcttttatttttaaggtatattctgttaaaccaagaaatgccgttagatatgcacttttaatatataaagatatatagtcaatccaaatatagatcctatatatttaaataaattatcacaatattatccaacatattttaatctaattctaatatatgaaataattatatgaataatcctacacaccaaacacatcattagggaacaaatcacatggtttaattagtagtttttaattaagtaaccgaaaagtgccctataattaattatatatatttttttccaaaaagaccagaaataaaaagttctctcttcagttcatgtacatgcatgtggttaattttcctatatataataagattaatattaacaatgattagaagttaattattaaaataatataaaaaaaaaaatcaaaacatcaaaaaatattaatggaacaataatgacaataaacaatctttaatactatatcataataaaattgtttttgaataaatataatctttatatatagatgtattacaatttgaaataaaattattaattttacataaataaatttataaattatatatattttattaaaatataattattcttatataaatgtatacttt

SEQ ID NO: 323277 - DNA, 1744 bp, Cannabis indica
ctttgtttttaggccctgatgaaactcaactcagcttgtgatgtctgtagggggtcttcacacaacaaggaaataatctttgtcacctgctaagatttgttggcgccttttttctccagcaaagagtgccgataatagctcgtcggcgtatcaccttttgtcggcgcagtgggtaaatttgtcaagaaaagtatttacaccagaaaatttgtttgcaatcataagtgcaacgctgggaataggatcaccggctgaagtcaccatgacgaggtttttccagtgagttaacacgccggcaatagaattggcacgaatttggcatctactctttgctggcgcatgaactcgtcggtaaaaacatttaaatatgtaaaaaaaagaaaaacaacattttttctagcaaggaatgtgctggaaaaatcatattcgaattctttgccgacgcatttttcgcgatggtaaaattatatacatgttttcaaaatttaaaaattataataatatataattaaaatttaaatttaaatgggcaatctgtgaggaggacccagcagcatggccaggaggctgaaatggttataccggtggaattgggggcatcccgggcatgttaaaccgcattggccaattggatcatttgttgtttgaacacactcatgatttgattctgagtcatcatcatctgttgttgccactcgttccgtgcttcttgctcttccacccttcgctttagtgcctcatattcctcttgagtgacagtgggctcctgtcttaagtcttggcaactggcctagtcctctcaagtggcatgaatgctcacccaatacatctttcataacatgcaaattcgtaggaaaatgggtggggtcgacattgtactggcacgggacattggttggcgttggttgagttttacgaatctcaaccattttggccttcaaaaaaattcatgaaatttttagagtgaaaataaattttaaatataaaacgaatttattaaaaatataaagatacttacatgcagttgttgtgtgtgctcatcgcgtcatttgttgttattataatggaactttgcaaaagtatctacaacactagaaagttcccccgttattctatcccatatagtttgaatgaatgtatcctcaacgtcctcgaactaaaactgttcatggaattgattgcgaacaagaaacttgatataattgttaaacttgttgccatagtcgtctacaggggctccagtcgccatatgaaaatctaaatttcaatttttgacctgcaagctgcttggccagttcttgttctatatttttcccttatactttccctaactcccttttttgacctcacttgaacctgcatagccatctacaatacaagactaaaataattaattaattatactattaacaaaagaggcatgcatttcatttaattaacgatgacttctatgttacaatactttaaagtctacaagtcatcataatcatcatcatcattaacaggtacattattttcattatcactatcactagtgtcttcatcatcagcataaacaatgaagccatctaaatcttcatggttaggctgctcacgacccttgttggtcacttgaattgggtcaacatcatcacggacatattcaacatcatccaactgtgcaagttgaacgactaaagggattcctgaagagtttctttcttttatagtggtggtctcatcatcatcctcatctaaaagatcc

SEQ ID NO: 323278 - DNA, 1094 bp, Cannabis indica
acaaacataaaattttgggtacttataccgctatttacttatactttttattaaaaaaaatatccctactggaatatctgaatatggctccacaacgtaaataattttttttttttaaaatgccaaaataaataaaaaaatttaccaaatgttttaggaggtatgctacataaattttcatatgttttactttatagttttacaaatctctcttattttttttgttaaaggggattggattgtaattgtattcattttccatggttgaaagtaaaaaaatgaaaaagaagtaattataagtggagtttcatgagctgtacctcactaattctgttcttgtttttattttttgaaattagatttatatgaagttcacacgtggaaagtgatatatgatttgattgtcccaaaccaaacagtagacagacaccaaatgacgatgtgactcttttgtcataattgaattaattacttgcaaataattatagcaacttttccatgcctacctacggtggaaacttattacaatcaactattatttattcaaattcttacccaaaagattgaaaaaaattgaatattgagtggtttacttagaattgagtattccatttaatttaatatttctttctatttactttaattagtaattaaatttaaaaaattatcatccaatccaatctaatttaatttgacctcaaaattcaatttaagtaaattacatattagattagattaatttcttaaattacacacttaaattttaatattaacatgaaaatataaaaatacctaaaaattaaatatcatcatttatttaagttaatactctataaacatatcatccttataaacataatacaactaaaattttcaaataattaaaacaacatatttctaaataataaaataaaacaaaacatctgagtaaggtgatttgggtgtacacggcaaaattggactttttagacgctctttgtggtgaagatgctgcagtttgtttggcgcttgaagtggcaaaggacaaaggacataatttcatcctagttgaaagcgattctaaagtagtgatcaattcgcttaatggctacgac

SEQ ID NO: 323279 - DNA, 872 bp, Cannabis indica
cttgggcctcagaacttggattgggattcgggacccgatcccagacccaaacatggacctaggacaaacctcgggacctaggatctgagactcgatgcttggacccaacccgtagtcggtggctgaatctaggacctagaccagaacctaaacccaaaatcgaactgaaactaggacccagacatatacccagacccagacccacactcgggaaccaaaaccgaaacttaaactggaaccagaccaggatcttggaacgggaccaggacctagacccgaacccgaacccagaactggacccaacctcggaccctaacagagactgaaacccagacctaaaccttgccccggacccaaatcaagacctgaacctagacacggacccaaacttgacccgaacccgtaccccatgacttgaaattagaaccgaaactagaagcggatcgggacccgaatctacacctaaactcagacccgaacatggaacaggactttggaccatgaattggggtcgagacccagaactataccgtagtctcggtccttgacctagacctagacctagactaggacctaggacatgaactgaaaccatacttggacccatgattgggattcagatcttgtcctgggatccaggaaccagggcttggacaagacccatagtcggtgtcttgatcgaagactcggagaaggacctgaagctggactaggatctagacctagacctagacatgggacccaaaaccaaaactttaatcagaacgttacaaagaccctagaacaggatcagtaccgtgaccagggcctggacctagaccgacacccaaaactagaccataaccatattggaatttattttaccaggatct

SEQ ID NO: 323280 - DNA, 686 bp, Cannabis indica
ttctcaaaactaaagaatgaatcctttcaccttcccaaacaactgctaacttcgctacaaccttcagaagaaaggggtaaccgtgagtatcaggtttaacacaagaaaaaacatgcatatgacgataaagctcaatagctggcctaggattctcactctcatcataccctctaatcatggtgttccacgtaaatatgttagggctatcaattcgcgaaaaaaaattgtgagcatacgacattgaagccgagacagatacaatggcggataccaggtgtttccccacaaccgggtcggaaaacagaacaccaagtttgataaaaaaaaaggcgtggatttgcatcaatttgaggttggaagaagcacagatctgtaatagtgatatgcattgtgtgatcggaacgtgcggattcgggttcgccgaattatgaggtgatgaaccatcgaatgtggttggatgggaagagtggcggagaagggtactggtcgtggtcgttatggggttgtgaaatgatgcaccgcgttgcctggagccgtcgtcggaggaaatcgcagacggtgggggactcgggagagagagaaagagagggctgggagttagaaagaagaagagaaaaaaagaaaaaaaaagaaaaggacttgccacgtgtataagtgtgtacacgtggacagtccaccgtgtcact

SEQ ID NO: 323281 - DNA, 994 bp, Cannabis indica
aaaataaaaattaatatacaaacttaaaatttaacacataacccaaagcacaaactcaacattactaaaaaaactaaaaaacaacaaatttccaagtataactagccaaaggtattacctttgtctagtaacaacaaactagcaccctaatttaaaattactgaaaaataataacaaatagattatatttaaaattaaacttatcgaacaaatttctataattgtaggtcctccacaaaataatctacaaaataacaaaaaataaaactctattaccacacaataaaatgaataaagataatgtgaacaaacgatggtaaaccaaaccataataactataaggacttagaaagacttaaataattatctattaaaactgaaaaagtcgttgaagtagaaattatgagcacaaaatgaatcacttttcttgtccattgcccatacctttaaaactctgaatgtcatcttttgcatagaaactacttcattattggcatttcagcatacacttatctattgttttggacttgtctccaagctatttagttttattaatcagcttcataacaacttgcaggctaagcattatcatttgttgatgacacaataagaaaacattatttgatttttcttatataactcaacactgaatgtttgaaaatggaagagttgtcgctttgagttctcattaaggatgtgaggagagctgcaggttgcgttggaccaactaccttaggccagaccataaactcggcctattgttttaggcagaaaagcaaaacattttcaagcttcactccattgttggcaataggtatgtgttcttggctagttcatttatttttctattttttcgtcattttgattgctttaatgcattcatttgaaatgaccaggcccggccctgggcataggcgggctaggcctgtgcctagggcccacccagtccaggggcccaattttttctttcttcttttaaaattatacaattttt

SEQ ID NO: 323282 - DNA, 1742 bp, Cannabis indica
gtacatgtcggggcggttaggcctggagcgtacgatcctcgggacagcaaggctgaatttttgtaactggtcgttagacgacttttattttatgtaacagttaaacagttaaatcttttgtaaatgattttataatcgggatcccgagtctttttgtaatattgttttataagtttaattaaaaaagcaaaattttaattaatcacgtttttccatacgagctgcacagtacgtttaaaaatcacgtaatacgcctaaagtagttagggtgttacaccttttctatggtggatttgaaatttatctcttcctttttcatagacttcagccataaatgtgctcttagtgattcaagaaattgaccacactagtcataagtgatacctagagtattaaggaagtctgtaatgaaaattagttagtcagagaaaataataagatcaaggttgatcacttgataatacattactacgttaagtgatcaaatgttagatagattgaatggaatgagttattattctgctgcgtgatcgttgttagtatactcaaacttaaagtgtttatattctgtttttaaaaaagcatgttccaggttattagataattatattaattatcaacatacacgatattaaatgtaaaattgataaaataagttccaacaactgatattagagctactagtaatgttttatgcatgaatatgtttaaatcaaatttacatctttgtatgtgatttggatggggttcattgtttttttttttttacaatttggtaaatttttggtaattgatatatgtttatatgataaaatatttttgtaaggcgtgttttatgcttgaaaatattttaaaaactattttggttgaaatttgcacaaaaataagttttttgggatcaattacgagtcaaaaagtggtgttgaacacttttagggggtgctggatgtacccggcgcacaaggatgtctattagaattttatgtcttaaataaaactaaattttaatatactcttatttactaaactactaatactagaaaaaatacaccataaaatcttgagaaattattttacaatagatacaataatatcaatttttcatttaaaaatttgatcgctgagagatttaacaataattttggagtttctatacattcacaaaagtaattctttaaatttttttgacatgatatcaagtgcatctataaaataagagtattgctattggacacctgtgatgcccagtactttttataggtgtcactctataattgcttagcgatatttcctaaaacttaatttttttaagttatatggacttcctatttaattacatcaatagtgatatgacactcaggagagtgttaggcaccaatagtactttttagcaattctcataaaataattatgcatagaattatttaataaataaactcttcttgagaaacaatgcattaattaataaaagaaaattaattagagaatataaatcatttttaaaggaatataaatcatttttaatgctactttggaaaatagtttttaaacaccttaaagtgttatgcatagaatcatttaatagacaaactatttttgaaaaacactgcattaattaataaaagaaaatttagcaaatgatataatctcgtgttttatataggagaatttacaaaaatattaaaatttaggttatttttacaaaaatattgttccacgaattttttcaaaaatactatctt

SEQ ID NO: 323283 - DNA, 1195 bp, Cannabis indica
gttccacaaagatacattcgatatgatcaaactcaaattcaaaccaattcttcttctgtaatttcttctgatcaaaaaattccagttattgacttccaaaacttattgcttgataactcagaattatatgaatctgaactcaataagctccactcagcatgcaaagaatggggcttcttccaggtacgtatatatataaatataagtactaattatataatattctttgttgataaaaatagatttttttggtattcagatagttataattttttttgtatatgattatgaattttaaaataatttagaataatttactgtactaaaataaaattaattaattttttgtatattactatctgaaatagtcatttctatttttttagagatgcactgtaacattatattattttctgaaatgataataatttgtagttggtaaaccatggtgtgagtaattctttggtggagaaactaaagcaaggagtagaagaattgttcaaactaccaatagaggagaagaagaagctatggcggaaacaaggagataaagaaggcttcggagaccctggtgttttaaccgatgaacaaatccttgactggaaggatgtactttttctctttaccctacccgtcgccttgaggaaccctcacttgtttccaaacatctctcctcttttgaggtttattttttcttcccttcttcctttcttgcttgtttaatttcttagtaattacatcgttaactagttataatttgcttaatcttttgtgatataaatttgaaaaaatttacaatgcatctaaaaaaatgattgtagtactaatgcaccattttttgtgttgtagatattttgaaaaatttagaataatctatcggttgcacttgcacgtgtgtctatttgttttatactcatttgaaatagactatttttgtattgtaaattatcttgaattttttgaaaaatttacataatatctacgttataaaaaaattgaaatcacagctattcgaataagaaaaaaaaaaaaaagtagaaacatcagtagacttttttccgggatgcttcatagaacaacccaataactttttctttaattaggtgccgtttggtaacacttttgttttcaattttttaatcacaaaatgaaaagaaaatttttgtttttaaaaatttattttttaaaaacaaaa

SEQ ID NO: 323284 - DNA, 940 bp, Cannabis indica
attgccgattgccgatcatgtcgttactgtttaaatgtgttatagaaagaagttatataaaaaagttcttcacttaattattataaataatatgttttgctaattaataaaaatatataaatcgaaacacataacatacattatttataattataatttatatatgttaatctcaagtgtaattaatcttaaagtaaaaattttatttatatatcttgactcattatatattaatatttttcataagaaaataaataatattataagaaattagaagtcgataacataattatttaaaaggtataattgatctcattactatgatatagtattcattaaagaaagaaatatatatcatagtaaaaagccaaacaaggaattgaataattatttaattagctgcaaattaatggctgtcataatcagaggaaagactttgtggtaagagataggagacagcatgaatcttcaaaacaacactcatctcatctcacctcatcacaattaaataaaaacatatatacacatatatacgtacgtacgtgtacaagaatcaattgcttttttttctttcaatctttataaaataaatatatattatttatatatcactctcaagtcaagtcccaaatggatcatcatcatcgtcatcatggctttccatatgacaaaatgtataatagctccacacacagaccgtcgtggacctctcccacaccacactgccgctcataataatcatatcactcgctcaccataaaatcctttgttaagtaaaaaatgagacttaatgaaaaaaaatgagattaatgagattttacaattttgtatacattatattaattaattataaaatatgtacaaaaaaatatattcccactgtctctgttgttttgccacaaccgaagagatcaatactatttagttttcttagacataa

SEQ ID NO: 323285 - DNA, 546 bp, Cannabis indica
gacctagaccaagacccggacccaaaactaggacctgaacccagacccaaacttggaatcgtacccagacctcgacgccaaatctgaaccacaaaccaagacccagacttggaccctagatcggacccagacctggaccggacccaaacccggaccccaaacctgaatcctaaccctagatttggatcccaaacccaaaccctaaacccgaaccccagaccagatccggactccaacctagacctcggacctggactcggaccccaaacaaggacctggacccagaccccagcctcattccggatcttaacctcaacctcagcgcctgacccagacttggacttagaccctagaccaagacccggacccggaccccaactcccgtactcggacccagaccctagatcccaaaccccagaccccgacccagaccctgacctagaccccagcggtggtcccggacttgacccccatccaggccacgaatcccgatcccggacctgacttaaataaaattaataaatgaaaataaaaatgaaatttaca

SEQ ID NO: 323286 - DNA, 1141 bp, Cannabis indica
aaagtataataagagacaaacagttttttatatggttggggcattaactagccttagtccacgagtccgttttatatagtaatgtgttttcttgtaaatattctcaaaggtatacaagatgtatgatcgtatgtttgcctgagcaaaagtacgggagagaattccacccctaatccatgagattagttgggtatttatagtagttggagaattacactagggtttcccattttccttctactagggagtttaccactaaacaatatatttgggcttactcatgaagtccagcccatgaagaatacaacatgctgactaggcgaatcagacttgagttgatcaggccaaaaccgtatccgattataacgggagaatactttgaaataactaccctgcgcttgttatgggaagtctcttctttaaccgcgatatgatattttggcctaatctgacaactggaattttcttatttatagaagggaacaaacagggaaattggaagagtcttccgagaacgcaactccttttcctccaagctcgtgataccggagctgtcttctgggttcgatctatcgagagcggaaggtactatgtgcacggaactaaggtaacactcggaaggtcttatccaggtgggcttggcccaacgtatccctgatgagggtctactgatgagtcttaaatgtcaccttgaaggccacgtgtccagtcccagaaacatggataacatacccgtagtaacatacactttccaatgtcacaactaattcatatcgatgtgatatttttgaccaatcaatcaagtttttcttgattgccagatctaaagatattttacattgacaaataggatatacatatttcatatattccaaaagtattctcctaattaataaatcaaacttatttctcatatttctactaataacattaatccatataattatcctagtaggatgataatcttatctatttattcatttaacacacacgtaattctatatttttatataatatatttatttatttatgattttatttctgaaatactacaaagctctcctcaagaaagtgtctatccttgcctataaaaagagagtcactccttccccataaagtgttgggttatatgccctaaata

SEQ ID NO: 323287 - DNA, 2873 bp, Cannabis indica
ttttaaactttttgaaccacgaggatgtggctccagataaggtagtagggaataacacacattttaaatcttcaaccacttggtgtgcttgcatgagagtattaaagtcgcttatgtggatcccagggtcagtggtcccatcatacttggttgtagttggcatttcatactctggagggtaaggtaatgccaagatataatgcacaaaaggctctctctcttcatcaaattcatactcctccattttattgttattcaaaagttgtcggagttattcctcaagcattgttatgcgaggatttccatttggtataccataatcaactcctacagggagaggaggattgttggaatggttaccgacatatagagtggctccttgatgaggagaaatgttggtacggttaccaacatgaggattgactccttgaaaaggaggaatattggcgtggttactaacatgaggattggctccttgaaaaggagggatgttggcacggttaccaacatgagggtatgtgaaatgagaatcttctctttggagatgcccttatatatagttttacttggtatttccccatggtattgaggattagtggaatgggcttgatatgaccaatgttgaatgtcatcataaatacttatggagcaatttagcgaatcgatgatgtcattatctttgagaaagatttgttgatgatttccttgtgccccgagttaggaatatgtagtagtagcttgtgaccttgaagggtaactcgcctcttgagtaggttgttgcctttctctgtgagggttctcccttttttcctcgacgttgacccctatatttcttggaacatgaggtggtcgaggagatgggtcatggccgccatgtgtggcacagttttgattacctaatgcatgatttgcatcattatcggcacgaactcccatgtcacctctatggaggttgttactcaaaggtggatgtatattgttttttccatgaagatattctatatttccttgggattcatgcagaggaggaaaattatgtggattgggtcctccttaattcctcatgggatcatatgtggcacaactttccatggaacatcctctctttctctttgaattagagggttcttctttcttctctttccacgcccatgtctctaaggagtggcgttagagacaaattttgttatcatgtgggacatctccatgcaatagtgcatgagtggcatgagtgtgttggatacgcactccaatgttaggtattgacaaattggtattgccaagagcatcattggctttgtttgcttggttatgggtaccttcatggtgggccagagcgccaaggccgtctccatgcaatagtgcatgggttgtatgtgcatgtctggcatgtactctaatgtttgataaagtttggtggtcccatctccttggtggattggtacttctagggacactatggaattggatcccttggtgtgccatggtggcatgttcttttaatgggcagcctcttcttctcctagggcgagaaggctcacttggtggaggagtttggtccccacgcctttgcgcttacttttggagttctttgttgtggcggaagctttctaccaactagacacgtaggccctcattttcttggaacgtatcatgcacagtcatggatctgattggtgggcgctctctagattgtgatgaagaactttcacatgcttggacctatccctcatcttctaataggtggcatgggacacttttcttggtgtcgagaagtgccctcttcatgtggtgttcttggttgcctttaagtaatttttaacgagaaggtcacgatgaggaggatccaaaaaatcaaaagaaaaatggtcccaaaaggaagaagccaaaaagaagatccctttctcaacctcctacttagggtttgttagtgatccctcatacatcgagatatctcattaacaaatcccgtataccactcttttttatgaataaaatattacaaataaataaatatcaataaaagtctccttgtatcgaggcaaatatcccacaaatattatacaactggttattatcggttgaggatgcaccaatttgaaatggagtgctgaacacatgagttttggaattctgatgctcacgcacaatggcacataggttgtggcagtgtgctccaccaaccctcgcttggccacatttcccaattctcgagtaaaatgtatcagctttccttgtaaactaattttggacttgataacttcatgattgagtcatggctgtgagacacactttgatctgcctcaaaattatcttccccacgcaagttaaacctggtcatttggataaaaattaagagagttatgcctgttttactgaaggtagtttatgctgtcttgtaccagttgcaagcactgccatggccaaatggcagaggttggctatgcatgttctcagacctctcggggtgtgtttcgacttgttttttgatggtgagttatattttggaggtctcaggacccaaaaacctcatttcgacgtctgacaccctaataggttaccagtgccaccaattggggctggataatggcacaggtcacccatggcttttgggaagtcatgggtggtgtatctcacttgtatttggtacatggatgctgaaaatgtaatttggtcagtaaattcctcttccttgtgttaaccgacctgcagtggtctccaattttggagagcactgccattctcttatggcacaggtcacttaaggcgactcctaggcttaaaataactttctcacttgtttcttactcattgatgtcgtgggaacccactcagacaattttcgtcccatagtttgcgaggagtgacctgtg

SEQ ID NO: 323288 - DNA, 846 bp, Cannabis indica
acaaaaatatacacataggcagtttatattgacagctaactgtgaaaaatagatgacacctcaaagtttccacagttcagtaatttaaagggttttatcgttaaaatttaaacttagaaaattaagtgcaagtggaatgacaattaagagagtttaattaaaaaacttaaaaaactatgataaccaataacaatttatgttttttgcaaaaaagaaagttagaaaaatttacacaaatattatatttagtaaaaattttgcactattatcttatttcttattattagtattatgtgttttataaaaataatacaaaaataattaaaaatcttataaaaataactggaaaaaaatattcaaataacataaaaataagagttatacaaataataaaaaaaattaataagaatacaacataaaaatatcaaaaaatcatatgtaaatataattctaaaaattaaaaaaaatgtttgtttttgttttgaaagtaattattaataataataataaatttagattactttatagattgagttcaccgactgagaatataataataccccacaaattaatttttcctacttcttcaaaaattgtcaaaaattctagccgttggacttggagcgactcagattcagaacctccataaccatatccgtcgctttcttcacacaataatttcatttttccatatttcttttgggtatttctcaaaatcgattcttcctgttcggatattatttttctcttggaattttaccgacatctaattaatttttgggacgaaaaatatctctgtttttcatttctataaaatctctaattctgtttctctctctctctctc

SEQ ID NO: 323289 - DNA, 1047 bp, Cannabis indica
aaaaatatgagaaaatttggtaagaataactaggtacatttatggtatttaaaggggtaaccagttaccataaagtgtaataaggtaccttatgctgtttttttaatattttttaactttttttttaaagatttttctattatataacctttttttaaaaatgccatatttttacaaatctatactttaaaaaccataaaaataaaaattcttcatatgctgtcgagttctaccgtattacagttttactattattattagggaagcttacaataatatatattgtttgaatctgacttataaaaatgatgttactactattactcgcgtgccatatcggctaaatctaacttatatgatgttttccttttttttttatcttcctgcatttttttttaaaaaaaaattattggttacttatagtgttgataagaaaccaattaattacttttacatagaaactttcatttatatatcatataatttgaaatacattttggttacctccaaaatttatttgtatacatcttaacaatttattagtttttttaagttacattatggtagctcagaatttaaaatacatttaagtgatcttaaaaaatatttttaaaactaataaattgtcatgaaatataacaagctattatttttatatactaattattttatatacatttttgttattttgaaagctaattagttatcatataatataatataattcaattaacaaaattctaaaataaatgttaaatatgatttaaaaaaaaatatatttttttttacatcttgaaatattcacattgaagaataaatcataatgatatttttttaggaccaaccgagtaatgacgacgtggcgagaaattattttaaagataataaaaggacagaaaaagatgaaattaagagagaaaagcatacaattatagcatgtttactaataaataatgggaatcaatggtaaggtaatcattctcttacacttgtttacttacattattaaaaacaggaaatggagaacttggttaaataaggcagaaa

SEQ ID NO: 323290 - DNA, 1778 bp, Cannabis indica
gaagtgtatgatacattatataatgtcatgggtttgaattttataatactcttttaattttttcttatataaatttcgggaccccaaatttaattcgccttaggcccatatattcttaaggccggccttgactagaagttattttgacatgagaaattgagtgggccctcaagggtttggagtggacccatcgaccatccccctgctggtggtcccaccaccggctgcaacaagagacaaacccaagaaggttccaaaaaattgtgatgatcgctcaacaaaaaaaaaaatatattatataaagtgtgggactcacaagagttcttaaaatttaattttcttttattcctctctctctctctgcttctttctttctttctatctcatccaagaatccaccataaccaccaacggcggagcttcaatgaccattgaattctctaactagcagcaaatctactcctcaagcggcataacctcactcgccaccattggcaagagatcgtgagctaaagtttcaaactttaaatgtattttctagccaactctattatccatttgacgagccatcttcactactaaactcatctcactgagggggaaaaatctccactaagccattccatctagttcactacgttttctagtgaaatttttggtagctccacccttttaaaagtattttttggcaaggctagtgtttgtttgaaaaaaaaagttgtacattcgtgatctactcgagaggatggttgttttgatatatgctatgtcaatatttgtcaccgttcttgaaacactatttttggttactggaaagcaccactgtgcatgactaaggtaagatctttgctcatgtttgaatagcatcatgttttatatcgttggactcagtttgaagagtgcattacactaattattattatttattcaattgaagagtgtagaaaaaagtgacttttatagtgacttagctatttagagcttaagaattgaaggtttaccaacgtctcttttgaagaaagtttgatgatcctaaggaggtagagactcaacaagattattgagctctattttatatgtgatgaataacagtatacatattctaatatttatgatttataaaatatgtagacttgaaaactcatagagtgccaaatatatttttgtaaaattatttataaaagttatgctgtcagattttctaaaacaaaagaaaatatgttcttttattattcttgtttgcctgattttggttataatattgagagccatgctgatcttgatttatgcatattgtgttcacggtctagtctctatgtcatcataagcagattaggtgtgcacttacttgtagatgtaagacctaggacctatacatgaagtgaattatttgagtccttatattatggtagttattaggtgcaactatgtatgtggttttggaatgtcattttctatgatgagtattgggagcctaaggatctagtggatgatgtgatatgcacgagtaacttgtctcttgtgattatttgtggtctttttatatttttttttttatattgatgatatgttttaatttaaaagctaactacgtagatatttttatcaaacttttggtcctttaatattagttatttttctacttggctttataagctcaatcccttatattttcccttctagaaactcaatttggtacttgtggatgtgaggaaatcgttgatggagaatgatgagattaacttagtcttatatatcttagttattggactcttcat

SEQ ID NO: 323291 - DNA, 951 bp, Cannabis indica
ttatttagggcgtaaaacccaacagcatattctctgtttttgtcaaagattaagatacaagtattttttagaatcaaacaaagccatttgttggtgagaaactggacccagcgcccaagttgatacctggttttgggcctagcgcccagattgatattttttcaacctaagctgtttccaatcattttcctgaaaaaagtgtttcagacattttttccgtcataaaaatgacaaagatataagtaaactcaagaaaaaaacgagaatcccaaaggactgaaaaatgagcccagtccccaggttgacctagtgctaggcctagcgcccaggttgacaatcaacctagtgcactagtttctgttacccaaatgcaaattctgctatgggcattctctctggcatggtcaaaaacggggtaggacacctcagccttgactttgaagactttgaaagcatcaaaacgatatctcagaagctctaaaaagggcaccaaatgcccaggtttacgtatgacctgtttcgctgggttctgcttattcgattctgattctgtctcgagcgttcgtcttgtttctcatagtaaacgagagcaatgaactcaaacaagtcaaattcacaacttcataatttcactttttttgacaaagtgacttagtcgcaaattaggtagtttcaagtctcctgatttcgcgaaacagcaacatctccaataattggtggatagcttcaccaaaataaagaaattggctacgtgatgtcaaaatattttttttttgggaaatttttagttttttttgtctttagcccttagatatacaaaaggggggagtattttgggttttaatttggattgtatactcatctgtccatagggagggagttgaggtttgtgtttgtattaaacttttgttaaagttagctttttattttagtttaatgttgtgcttctca

SEQ ID NO: 323292 - DNA, 1377 bp, Cannabis indica
ctctctctctctccttcatactctctttttgtgttttttatttgatttggagaaaagttaaggaattttgtatgattcttggtgcttggagcttagaattgtggtatactagttcttactcctttttgattatgattaatttttagtatgtgaatgttctttgggtttgaacttgatgttcttgatgttcatttgagatttaatgtatgttggtaaaattagtgatgattttggtgattctttttggttgtttaagcttataggtctatggaattacatctgctatatttgggtgattctagggctaattttggttgttaatttctgggtttggctttgaatatttctgggtgtttttagttggtttgaaaccttgtgattcaagtgtgtgttgttgaagaatcagattaatttgtggatcatgcttttatgtatgatctttgatttagcattttgagcatgaaattgtgattatatgagttctttgagataaattaactggtgttagattgaattagaagttatgcatgtttagattaagtttggattggtttttggcttgaaattcgaaaaggaagaaaatggaaatttttgagttacaaggtcccttgctgcggccacggctgggctcgccgcggtcgtggccttgctcgctgcggcgaggccctactttctcgagaattttttgagtttttattttagtcataatttttcattcaaaactctattttggattctttatatcgttggaaagctcgttacgagctctatatgcctatctgtaaatggaatgaaaattatatgattatgtgaaatggaattttaggattaaccctatatgtaaaattctgagaattgtgactaagattaccggcgcttgctcaggaacacccagaggtttagaatctccacatacttgggatatcaggtaagacattagctagcatgtagagttaagcgcggtggcgctcatgtttgatattacaattatgattaaatgaggaatcaggattagagttattaccctaaagtgagcggttatatggcctagggttattactctagtgattaaatgattttgaatgcaatgccatgttatatatgttgaaataaagaattatgcgggtaaggcataattaggttaaacttggtaatcagaactgaaataaactaatctaaggccttattgtaaatagacgtgtgagagcaacacgtaggtctatgctaaatagacagtagatgtggtggcatcaatatttacttccattgagaatatattgtatattattatttatactgtcttgctaggcttggctcacgggtgctctactgttcaggaaagggtaaatcagtctgtgattagccatgagttcgagg

SEQ ID NO: 323293 - DNA, 1137 bp, Cannabis indica
agttggatgggagaaataccctatcctattttctctgttgttgtaaatgatttcagtttataataacagtgattattctcaaaaaaaaaaaaataagtatcattggatttttttttttttttggcacttgtaaataatagtgaggtaagttataattattttgattatcttttattgtaataaaatctgcaatgtatagttcgtcaaacatttttaaaatattattacactcaaaaaaaaaatcaaacagttttaaagttacgtataaatattaagagcaaaactattcatagatgggatttaattaagataatatatattgatcatagcaagcaataattcatatactataaattgctcttgaatatagtacattatgaatcgatcgcttcagcttgaaatatatataataatattaaactaaatgaaacatatataatacatatatgtctatataaatcaccgtttattattagttattatatataaataataggctgacttttcataactgatctatgatgatagaattatagatcaatagcgcagctatattaatctatattaatcatatataagtgtagaatgtataattaattaattggagtccaagcaccaacagtaataatcagacctagagagagccaacatttgttcaagggctcattctctcaagctcagattgtctccacgaagcaaagttgtttcgattttgagggtctgaagccaatggatagtcctccgctctatgattctgtgatctcattctactgtaaagcctcattgtcgcaacacaatcctcataagggtacttggattccagtttggatatcataactgtattacgttacatatatatgtatataaacataatagtaactatatatatatatatgcataggaaattaataaaaggaggatatgtatatatataagatacttgcccaagatatgcttgagttagatacttgagtgagttgctgagcttgctagttttcatcagcggaggatatttcgcagtatccctaagtacgtaaatattaattattagttagttgttttatatatatatgcatgggctatttggtatatatgtagtgatacaaattattacctgatcataagtgatgggtagtc

SEQ ID NO: 323294 - DNA, 1220 bp, Cannabis indica
ggtcttaaaacataaagcccttgttccatgtgagcaacacataattgaatgccattacgagaaatagttgaaatagaactcaaaaaattcaattgaaaatttttgtgtttgtagacatgaaacactaatcaagtttccactaaaatttggaataaacaaaacattgtcttaaatcaaaaatttattctgaaacttgaggcgagcttttcttctagctttgacggatactaattcgccattaccaaccttgaggttcaactctcctggatttaagaaatcccaagtttcaagcagctgcaatgaagagcaaacatagttagtagatccagaatcaacaatccaaacggatttgtcattctctaaaacacatgattcaaaaacaaaagtgttacttttgtttttatggtttagaagtctaggacatcttgctttaaatgtctgttctatccacaatgagaacatagaagaatacgtctacttcgctattctttgattgtctctattactgattcaatttgaattctggccttcataattgagccaaaagttgcagcactgtcgaagtaattattctcaatatcttcaactttccttttgcccttttctgcagtattggagtgggacttccttgcaagtgacaatgtcctttcataagcacgcaattcagtgtccaacttgtctatgtcagatgagttccaattgttgatcatacaagatacaataaatttattatactcaggtgataggctattgagaataaactgaacccattgatcttttgataggacatttcccagcaaatttgctttttggaatttcaagttcatcaaaagtaagtgtgaagtgatactctgatcaagagtcatcttcgcactatggagttcgtttgcaaatgcatatactagttgagtattggggtgaggatcgttaaacaacattttgacactacaaatatcaataaacagaaaaaagtaacttggtttaaataaattcatacacatatttagaaaataacaagtaaagaaaatatgtttgcaaaaataccaaaaataaaacatattcaaatattttccaaggtttccaacaaactaatatagtgtcccgtttaggcgagagtcaaagatatcattcattgaatagagtgttcagctcatctaaaatggacaccattctagtaaccttttattccatcgaaaagagaatctgacgttgtcccgttt

SEQ ID NO: 323295 - DNA, 1264 bp, Cannabis indica
ggacaatctttcttgaggtgcccgactagcccacattaataacaagctcttcgattgcactccccaggatgatgcttcttgcaacgcggacactcaggataagagtaagtctgacgtccccctttactctgatttctatgaaacctcttgctttgacttaaactaccaatagtcgaaaaaattcttttcttttgctcaatggtagaatcaccaatctccttaccaggactggaaatagagaggtagcggttctaccagcactcggggcctcttgggtctcttgcagaatttggactccaccttctgctcgagagccttgtcaaccatttcgcataagttgtggtatcatcggttgcgataaccaaatcatgctaattttggcattcaatcctgccaaatagttttctttcttggtaaaatatgtaggtactattctagaagccaacttggccaaacaatcaaatttggttgtatattcagtaactgacatcttctcgccctgaactaaattaacaaactctttctattttgcactgtgactgcctcactatagtattttgcgttaaacagatcccaaaattcttcccaagtcattttggtgacgtctcaagtgagggacaccatttcccaccacacaagggcatcctcttgaaactgaaacgtggtacacgccaccctgtcatttttagtgactcccatgaagtttaaaattctctcaatcactgtcaaccactgttctgctttcaaaacatcaatacccccaaaattactggaggtgcttgtttccagaactgttcatacagaggctctatatagttgccaacaacaggttgttctgctggcaccacaggaaccactacagctggtggttgtgatggaagcaccatcggagcatcctactgtctaagcctttaaatttcttcctcttgttgagtaattcgagcttacatcttagccaacctctgctcttaatcaaaaagagactgaggtggattttcttggccacccctttgagctcgaccacgacctctgccacgtccacggggtttttgggggtttctacctccttgaccacctccagtcttaaccatttcgtcctgacctctaacgtttcgctgggcgtccataatttaggacttggcctgcgaacccataaggcatataggttagacagtggtcaatacataaggtatataggttagacagttgtgacagtcagtagtcccgtgatctgtaaggggaaacaccgggtaagctgtgcaat

SEQ ID NO: 323296 - DNA, 1061 bp, Cannabis indica
atttttacgatatcttgatcagagagtggagaggtgagtagtggacagttaaaagtagtagagtagtaaaagtggtaaaatattattaattaataaattagttttttaccttttttaatgttagttgaaactagttattctctttatatctattattatttttttatataataattaataataaaaaaaacagttcaacaaattatctaacataagtataattttttcaacttaaaataaatatatactactacattattggttgcgtttatcatcaatatcatcattgccacaaccatcattatctcccatctctgtccaactggatccaacatcatcaaactatagtgacagggggtctaactgaaatctcgaaatactcgcactctatttctgcatcaatgcccgcattattaggtcttgattgacttaattttgcttaactaaaaaggcacttgcaaaatgaaagttttgagcaaattagggcattcaccattcaaaattcaaatctaagagcataagataattttatataatacctatgatacatacagtgaccaaaaatctaaaatcatgttgcttagataatcagggccagtttgacacagctgtgttgtggaaaaagcagctgtagcaaaactgtagaaaaaagctgagctgagtgtttggtaaattataaatttcaaagtactatgagttgttaagatctaatataatgataatgataatgttataatctagtttattataatcacaaatatgtaaaaacttattttatatcatattttattttttttatatatattttaatttttttttcaaatataaatttatatgcatttgataaaaataatttatagtatttttttaattatgttttatcaaaatgtaaaaaaaaattagaaactcaggtatataagaaaaattctagcttgatattgtttgttaatattaaaataaaatataaattatttttttaaaaaaaaaataagagatgtaataattatttattttattataattagaatagtttattttaattttttaaatatataataaat

SEQ ID NO: 323297 - DNA, 2122 bp, Cannabis indica
taagttgtccgtatttttttttaaaaaaaaacttttagatttcttatttttgtttaattcttaccaagctaaaaatgtaaaatttgggcctaaaataaatattttagttgtatgtgatttaattaactttttccagtaaaagaatttatttatttttttacttttgttattatttttttttcttttttggtgtaaaagatactttgattagtttcatttaaaattttagtttgataattttttttaaaaaaaaaaaaacaatagtttgagatattatgatttgaaaatgtttttcatgccctgtaaagttgcgattcagttaggcaggtgtggaaactttgtggatttacaaaacagatgcaaagactacttacttggaaacaagaatattttagcatttataataaaattatctcacatatggcaacaagataactttcaaaaccgaagcacacaaccaagattatgtgtgtcgtgtggcttccactgcacacccaataatatagccttttttatcctatatcaaactgcatcctcagtttagagctgctatctggcagcttatactcacactgaactactaaactatgttgaagcctcacagtccaaaacattggcttcaaaccgtagacaatgaaactcaagctttagaacaaaataaaacttggattataataatcaaattactcccaaagccacaaagtcattggctgcaaatgggtatacaaagtgaagtataaccaagctggagaagttgaccaattcaaggctcgactggtagccaaaggttacaaccaaagggaaggaatcgatttctcccaaacttaagcacctgttgcaaaattcaacaccgtaaaattttttcttgctttagctgctataaacaattagaacattcaccaattagacataaataatgcatttcttcacggggaccttcatgaggaagtctacatgaagatacctcctagatacaaggctccctcgaatacaatttgcaaattaaacaaaagtatttatggccttaaacaggcctcacgataatggtacgccaaacttagtcacaccttactcaaggataatccatttcaaataattcattgttcataaaacgtaccacatccattttcttggctgtcctagtataattcgatgacataattctcacttccaacagtacctgggcattaaattcaaacttaaagaccttggacaattacgattttttctcggtcttgagattggtagaacaaaacagggaatttcattttcctaacgaccttttactctccagctactcaatgacacatgttagataggtgcaaaacttgcctccacccctatagaaactaacctcaaactcagtaaagacaaatggactccactccctgatcctatagtttgtcgcaacctcattggcaagcttatatacttatcccatcctcgagtccctcacttgcaaactaccaacagaatcttgcaatatatcaaaaggaatcttagccaatgcctttttttccatctgatgcaactcctactctcactgcttacgcagaaaccaacctatcttcaacaaatgttcaggtatcctcttttaatgatgtgaactggggcagttgccaagacacacgtcgttcagttttaggctactgtattttcttggcaagtctcttacctcatggaaataaaaaaacacaagtagtctctcgctcctcaattgaagctgaatatcgcgcaatggccaatgcaacttctgaactaacttggatccttgctcttctcaaagactttggtgtctcccacaacataccagtcaatctttactgtgacaacaatgctgcaatacacatcagtgaaaactcagtttaccatgaatgcaccaagtacgtggaaatcgattgccacttcatacgaaaaaaagttcagcaaggatccctcagcttctccatgtttcttcttaacataatttagcatacatattcactaaagctttacttccaaccccgttctccaatattgtatccaagatgggtgtactaaatatatacactccatcttaaggggggctattaaacttagcctgttattctatttcttgagttttttttttttatttttgaat

SEQ ID NO: 323298 - DNA, 848 bp, Cannabis indica
gaccttctaaaggggatccttctcaggtaacagaaactccaactgcgatgcagaccaccatttatgggatcaaccaggcagaattcaacaccttggcaaccttaatgaaagggattacgacttctaagatttatgaattcgaacttgacagagaatgatgctctctgttctccgaaaaaataaaagctcttcctatccttcgaagttcaaaaacccttcataacaccaatacaccgggaaggaagatctattatctcacatatactactttcaagtgcagaccaggaaggtgtgagagatgacatcagatgcttaatcttccctgccacactgacagacctaactcagcagtggtaccttaagctctctcctagatcaatcgactcatggaaagatctagtggattattttggtattcaattcactccttcacgaaaatgtcagatcgaacccaataatttggtggatgtcaagcagtaggaagacaaacccctaaaggaatacattcaacgatttttagaggtagccactaagatcaaaagtcctagcaaagacggaagggcaatgggaattggcaagctttaggcttcgtcaccttgtgggattgagtcttttcaggctgcgtctagggatgtgtcccctagaatttcttgatcatggactccgagaccgtgttcttggtattagagatctccatttttctttgcttttctcgagttcagccaatgagttcttaatccacttgcggggttctgccaaggcaaaaaactcgactagtgtttctggtcgtcgtgcctgcaactctttccaaaaatctgcccttggcaatacacctgtaatgagcatgc

SEQ ID NO: 323299 - DNA, 562 bp, Cannabis indica
tcacccaccaataaagcatcaaatttcacactttataatcatgataagcaccaaaaccaatatcactgccctccctctcttcctttctaatttctccactcttatcattcccacccatcacggctcctccactcatctcaactagtcaatcattaattttctttccattacacccaaaacataaaatcaactatgaaaatgaaacccaccatgttaaaaacacacccatcaacctcattttgtattttattaatattagttccacaacacacctcaatgctatatatatatgtcaattaagggatactagtgcctaacacttgtaaatttattgttttataattagttagtgatattttttaaaaattattaaattattaaattatatgagatcacctaatatttaattaaatcaataacaatattaccacttaagtggatgctaaacatcattatgtctttcagcgcttttcttattcaaataaaaggaacaaaatatgaaaagagacatattaatatacaaactatatataattaaaacaaggttaattagtaatttttc

SEQ ID NO: 323300 - DNA, 1301 bp, Cannabis indica
attcgatacacccatttattgtcgataacattcataccatgatgataaggaactagaacccaagtattgtttttctttagagcatagtattcctcccccatggctttattccataaaggattgttcaaggccatttttaaagaagtaggttctttaatataagattcatagtcatgtaactcagctgcaagaactttgggcttaaaaataccagatttggatctggtggtcatattgtgtgaagatgttgttcttgagtcatgttgggtagtttgattttgaggagcaggtaaggcaatggaattgttggtaatgggagtaattgttggtgaaagaagtggctgcagagaagaatttgcagccgtggaaacagcagcaggtggggaaaaggatgtagactgccttggtaattcagttggaggcatagtttggggaagctgttgagtaacagcaggagtgggaagagagatattggagggtaaaggcatgtactgaacagttggaggaggtaggacagaattggaattggttgaaaacaattgagaatatggaaaacatgactcatcaaaggtgacactacgggcaatataaattctacccgagggatgtaaacatcgataccctttgtgttggggactataacccaagaaaacacacatggaagttctgaaattgaatttatttttattgtatggacgtaatagaggaaaacatgcacacccaaatgtttttaaaaaggtataatcaggttttgagtgaaacatattttcatagggagagatgtattgattcttttgaatgggtaatctattaatgagataagcagaggagacaaaggcatcccaccaaaatgataagggcaattttgcttgagcaagcaaagtaagacccatatcagtgatgtgcctatgtttcctctctaccctcccttgttgttgatgtgtatgtgggcaagggtgtctaaaggtgatgcctaaaccatagaggataggtttgagaggtctatattccccaccccagtcagcttggattgacttgatttttgtgttgaattgcctctcaacatagttattaaaatgagtgaagacacttgcagtttcagacttggctgtaagaggaaaaacccatgagaatttggtaaagtcatcaatgaaacatatgtaatacttaaatccttctggggaaggatgaggtgagggtccccaaagatcagtgtgaactatttcaaatggagaatgagttctattttgtgaggaatgaaatgaaaattggtgaagtttgccatattgacatgcatgaca

SEQ ID NO: 323301 - DNA, 951 bp, Cannabis indica
tcacatggagagtatcttgaaatgacagaggcaaaattagtacaatgtttaaaaaaagaggtaaaaatgatagactttaaaaaaaagataaaaataaaagagaacaatataaaaagggtatagagtgtaatttcctcaaacccaagacaccccaattcattaaaaccaaatgaaaggaaacaattacaaaaataaagacaaatcaaacaacaaaagtacaactcatgacaatccaaatagttttttccaaaatatttggtagtaacaaacaacaaacaacaaacacattacatggtgtgggggtgaattagttttattcttattttatattaaagcaacatatatcttaattatataaattgccccactcaaatccatgagtacatgatgtaattaagcttacaatttgaatgcatcaatgtgagattttccattatactcacgtgaaaacatactcttgatatagtctttactactcattgttttgtatatggcaggattttgttgagtgattaagctgtgtgaagggcctatttcacaatcttcatttgaattaagaaatgtggcaatggacattctttcatctgtagagttcactattgctctgtgctcattgctaagatatattccatttgttataatctgcaaattacatggtagataaaaataattagttaatgtaaaatatagttacatataagaaatgtcacttttaccagcgtagtacgtgaattttgcaaaaatgcaatggtaaaagaagattttgctttgttagtgcaatacctaacttttatcaacgcaaaaataagctgaaaaaactcttgtttcttgtgtagtgttacatgcaaataaaaatatattgtatatattgtgaaaatatataatgaaatactaatttttattattttgtgtattatgtatattgtgtaaataatataaaaaaaaataaaa

SEQ ID NO: 323302 - DNA, 693 bp, Cannabis indica
gtggactatctatcaaatcgctgcaactcacaacctcagttgctttagcttagtcttttttggagtactctaactctagtctctagtacttgtgttataccatttctctcttccatttcccttaacataccacaggcaatctttgatagtgatttttctagagggttgaaaatacttaccttttctaaaagaaaaatacgtagtacacgttaaatggtgtttcaaaagactttttatgtatttgggtatttaagaaaaattttaagtataattaatggtacaaatgtagttatttaagattatttatatattttcaataaattcaaaatagtttacaatattgaaaataaagtttaaatagttatttatcacaagtatataaaaaaaagaaatcagtcacgcgtaaaacaaattattgaaatcttattttcagcactataagcaatttgaaattatttgaaagttaacaggtgaccctaataaatataacgtacacaatgatgaaaataacaattaaactaaaaacctctctcaaatctcaaactagataaggggtctacccgaatatttgtttaaaatggtatactatagactgtttcccaaatatatgtttatatataaagggtgcttttgcgttgaaccccataaaatattgtatccatatactcttttcatgtttttgataattgtaat

SEQ ID NO: 323303 - DNA, 554 bp, Cannabis indica
agtattaacccattccaaatagcctctaagtgttatgtttatttatatatatataaacatggtgggctcgagtattacttaaaacttaattcataagtaatttataatacatacaccctgaatgacatgtttatttagtataatcacgatgagcttaatgtattacttaaagcctatttattaagcgatttataatacacatgctcatataagtttcacattttgtaactttttcgtttctatgtaactagtttaaccttttctattatggaccaggttgattagaatcttatatactagtttattcatatttttaaagttcatgtgaatttttttctcacgacatggttttttcatattaataattaaattcaaagttatcttctttttctagttgcgactagaatttagatgtttatacaattcgaagatgtcttccttttcttgttgcaaccagaatttggaagctctattctacaattgcgaccactttaattagttatctttgggcatgcccccagtgacgaagctagaaatttaattgagtgagggct

SEQ ID NO: 323304 - DNA, 755 bp, Cannabis indica
gcataaaacccaacaaaaacatgcaaactatgttgtatgtcaacctaggcagagggcccatcaccaatgtcaacctaggtactgggtccctatttcggccctcaaatggtctcgtttgcttcccaagaacacttgtatctttgctatttttgtaaaaacaaataccccagagacttctcgggaaaaatacttggaacttgcccaggttcacaaaatgtcaacatgggcattgggacctagtatcaggttaacctaggtgttgggtcccagtttgaccaccagatgactccatttgactccctgaagtagttgcatcttaattgttgatggaaatgaagaatatgcccaaaagaattcatgagaattgtcattggaaactcgtttttctgttttagaaactaaattctaaatcttcaactgtggtagaatccgttcgattctctagtttttggtggtggagatctcatatccagagtctatttgagctgctagtcgccggatgtgtaactggtgaacggaagtcggtaggtagattattaagaggtaagacaagtaaagtacttgaataaaggagaagaaatagctttcagaatttttttttttgaaaaattttatctaaatatcaaatttaggctttaaaaattaaatttacacatatggcatagaaaatactataaaataatttaaaaactaaatgatctattctacataaaatgtggctatataacagaatcttggtttatgagaaattattg

SEQ ID NO: 323305 - DNA, 1984 bp, Cannabis indica
gtttttatattttcttatatacaactgacatttgcaaaaacacggtttttcaagaataatttttttttttgatattttcatttgtaaaaattcataaagcaaagcttaaagatttgtgaggcagaactaagaacagaatcaagaacaaagagaagagttgctatgagctgagttctatgagaagcttaactcatataactgagctgaactttatttatactagtaaagcattacaagctaactttaaaaaaaaaaaactgctcaaaatttgagtctacaatcaaaaacaaactaacagaaataacaatataatcaatttagttaggttggtttacatcccccttaaatgaaaagggatcgtagccatttgaagtttagatttaggataggaaaatcggtctgtagagagtgatttggtaagtagattaggtacttgatccattgatggaacataacgaatcgagatttgtttgactagaattcgatctctaacgaagtggagatctatctcaatatatttggaccgagcatgaaacatctgattggtagcttatgcagtagcactttgattgtccatccacacaattggacaatgagacaaaggaacatgtagctaagtaaataaggacactaaccacttcacttcaacatcaacatttgttagtgccctaaattcactctctatactcgatctagcaaccacttgttgctttttggcagacaaagacacaaggttacctcctaaaaatagcacataatatcatgtggatcttcggtcatcgacacaattggcccaatctgcatctgaatttgtgtgcaagttaatggatgttacttgtttaaggtgtagaccatcaaacaaggttccttgagatgtctcagaagccacttgtaagcttcctaatgaagagttatttgagctttagtaaactgactcaatttgtttattataaagacaacacctggccttgtaagagtaaggtactgcaaagctcgcaataaacttctataaagaataggatcttcaaacgactctccctcagctagagacagtttagtggtagtactagtgggatcagaacatgttttggcaccttccatatacagtttaagaagaagatcaattatgtattttgtttgagttaagtacatgctagccatatttctatatacctccacaccaagaaaataatgcaatttttccaagtcttcaagaacaaaggaagtgttgaaatctaaaattagttgttgaataaagttgaaattaggtcttgtaactaaaatatcatccacatatacctgcaggtagataagagtagaaccagatccataaatgaataagaaagtatcaaattatgatagtttaaaaccccttttcagtaacttgtccttcaacttgtcattctaagctctaggaggttgtttaaggccataaagagccttttctagcagacatacatgattaggatactgagggtcgcaaagccttgtggttgctgcatgtacacaatttcttgtaactccccattaaagaaagcattattcacatcaagttgcttcacccccaaatagaatgacacatcaagagtaagtattgttcttactgtaacaagttttaccactcgtgagaaattctcctcataattaattcctagtgtttgtaagtaccttcttgcaactaatctggatttgtatctatctagggtgccattaactttaaattttattttgtgaatccacgtgtaagtaataacaagcatgtctgaagtatatggaactagagtccatgtttttgcagcctttagagcattaaattcatattgcatagaggcaaactacttgggatcttttaaagcagctgttgtagtcttagggtcaggtggaagcaaggactcttttaaagggtgtttggtagcaaagtatgcttttggtttgataatacaatagaaactcatgttattgtgaacgagaagttcacaaacca

SEQ ID NO: 323306 - DNA, 1246 bp, Cannabis indica
ttttctgttcttattgtgtaacatgcagcaagcatcagtaattaatacaacttcggtgtcagttggtcaaatatgaggtcaatatgcccccttagttggtgggtaatgacctactcctcttttggttgtattaataatagagataataccactctgatcacaaaggttgtggattctaaagtggctctcttaaaattacaatatgagaatcagtagataaatctcaagtaagagagagagcctagggcatgtatgagaaaatggaagatagaattaaggttttagacatagaacttgagagcttagagagattgagacttagtagaactagggttagattaatgctctttatatagtagagcttacaagagactaataacctaatatccctaaaaaataagaactataaagcatttgttacataattaaataataaataggttacttatcccctaagaataggggaatagctgatatttctccccaatttttatgggtggttgaagcccaagtcacagcttgacttgttgtcccaaatgaaggttgcacaccaagtgcctgccaggtgcaggctggccgactaaatgtctggcagcgtttggctggctaagtgtctgtcagggtcaggcaagtcaagtgccttccagctttggcaagtgttggccaacctttaaacaactttccttgtaaaggttaggcttccttggtcaaacaggccctctttggtctgacaatcaccctttggccagccagcttgtgctcaaaacctggccagtcatacaagcttctcttggccagcctatgtactccctttggctagccaaacatgattgtgcagcttcttaacggctagcttaactcctttcgcttattgcttgatggttttggcatgccttgtaaggaggctttgtcctgtttttgacaagattatatttcacgtgtccttagacttggattatgctgacatgtcatgttaggtggaaaaaaattgggataacaacaataattcctaaagctattgggactaaggaaaaattagagaaattaatgaaagaaatacaaattataagcaaaaggccaaaagtcttttctcttcttcctttctctctctaatttcaaatggcatctcaaaaaaggatgaggattctaatccaattaatccaaatgtcataactaaaaaataagaaaatttcaaatttttaaagaaagatataaaagataagtgaaaaaaaaaagataagatttt

SEQ ID NO: 323307 - DNA, 649 bp, Cannabis indica
cctcaaaatttctaaaaatcaatgtatatgtcttcttaatgaacaaaaaccatcagaatggtcatctaccactctctctttccttctgagtctttgttctcatttccttcatttcattccttttcctgtcctatttcatctcatttcttttaggtgtttagtgtttttgtctgtgggtgtgtggctgtgtctttgagctatcatctttctctttggtgtttggacttggtttggtcttcttggattcaaaacttcttgttttcagtcgtgtttgtctctgggtggggtcttagtttgtggggttgagtgtagtaaaggtttgggcttctcgtggggtttgtctctgtgttggtagtgtttgtttgtggtttttggtctttgcgtagtattattctgttttggctgctttccccttatttttatattcaatggcactagtaaatgctacctactcctccaatcatggtaagtgcttcacgtgtgaggaagcttcggtcaaactcattccttgtgaatcttctcaggctttacattccttttgtctgcttgggaaagtggtggccccgatggtagtaaatgaagccaccattattgactttgtggaaaaggtttggaaatttaatgtttctgtggtagctgttaatgaggg

SEQ ID NO: 323308 - DNA, 975 bp, Cannabis indica
ggttgaacttagtgtacaaggtttctatataattttttgttgcgatttagattgcagcgctagttgcaataggagtttcgatatagaattccgtaaaaataacaaaaaaaattatacatttagaagtgtaaaaataaaaaaaataccaaaaaaaagaaaaataaaattgatgagctaagttcagccaaacggggcggtgtgttgtatataaatggctgcgtgcatgaatccgaactaataaagtataaaaaatggagctctctcaaaatttcgtctgttattccacctttgagtctttgactacatataaatataaattcctcctcgttactacctttcttgtcttagacctaaactcccctgatcattatctgccatcaattgtcctcatatataaccaccgccaattaatataatatatattataaagggcttctagaatttatcctccatcctctgaaatagtgcacaaataaattctttacttactgtttcagtattttgggaaaaatttagtttaattttgttgatggcaatgtaccttataattattcgggaattactttatatattattttttaattttttttttaatttacgatttatttttttaaagtgatttttctagtagttactatgtgagttgctatacaattttttgttccaatttaagttgctccgttagttgcaataggaatttaattatgtaaaaatacaaaaaaaaaaaattgttttgaaatataaaaataaaaaaattcctaattattctatatatatcttgcaattttttttttaaaaaattcacaatatttattatataaaaaataatatttaaataataaaataaaagagtcgtgtaagatagtttaaatttattaaattttttaaaatttctcacaattttatgaaatcttttaaatgactataaaatatatataaaaaaaataagatcatttcacaaatacacaaaaacaa

SEQ ID NO: 323309 - DNA, 522 bp, Cannabis indica
attacaaaaaatagatgtaaggattgcaataaaaaagttggattgacagggttttcatgccgttgtggtaatctctactgtggttgtcatcgattgcccgaaacacatgcttgtacctatgatttcaagagtgctgctcgacaaaacctcaaattaactctcatttgtgttgataaattggagaagagactttaattttgaacattaatttcttattttacacaattatatttttaatattttaaagtaaactttaatttttttttttatattggaagagagaaattcgaacttgggacatgtgtaattttatttttttacatgtgtaatttcattaattaattatttctccatagttttttctaatatgtgtaaaaaagtctatttgtttttaatttaactgaatgaattgatttctttgaattattttttttttctacacttatattaagcaactattgatttattttgtaaaaaagtaactatttattttgagttttcatataatttttttttaaaaaa

SEQ ID NO: 323310 - DNA, 1496 bp, Cannabis indica
accgagtttggaggtgctttataacccggaggggattttcatgtatacttcttcatggagatctccatggagaaaagcattattaatgtctagttgatggacattccaattgttcatggctgctaaagctaaaaaaattttgagggtgttgaatttagctacgggagcataggtttggcaataacgattccatgtcgttgagtgaagcctttggctactaaacgagctttgaatctttcaacagccccactttcgttatatttaactttatatacccatttgcaaccaacggctttatggccgggtgggagcttggtaatgatccatgtgttatttttttcaagagaagtggtttctttatccatggcaagaagccaatggcaaaattgagccgcttcagcatagcttttaggttcaatttcagagtaggctgctaatacagctgctcgaaatcgagggtgtaatttaatgtatgacaagaatggatcaattcgatgtgatgtagatgaggcatgacaaacatagtcattgagatgtgtaggtttacgtaaaatcctgtcagttttggtagttttgggagctactaagatggcaggttgtgtgtgagaaccagtgttattggtttcggatgtggaagctggagggctttcagcttgtgggttatgttgggaaacaattgcagcaggagaggttgtatgtttagttggggcagtggtgatggggactggtgctgaggggctaccagttgctaaattgtccactggatgattttttggtgtagaaaccaaatttttaatatgggcaatatgatcaatatgatctggtgtgacaccagatggtttgagggaatcggttactggtttggaaccaggagagtgtgtacactcgggtatcagtgtgaaaccagatggagaaagtgaatgttgggtaggtttacttgcgtgtgctttttgttgaataggtttaaatgttggaagcacaatatcagtaaacaatttgtgtatttcagatgtggatgttgatgataccatgggaaaaatagtttcatggaagacaacatctcgtgaaacataaatttgtttggtttcaatgtctagtaaagtataggcttgcatgccatgagggtaaccaatgaagagagaggccctactcctaggtgtgaatttatgtcttttggaaggaagggtggagccatagtctaggcacccaaaacttcgtaggtgttcatatttaggggctgtaccatgaagaattcggtacgaagttaaaccattgaataatttggagggtgttctattcattaggtatgtagccatttggactaggtaggaccaatacaccaagggtaagttggattgaaatcctagtgctcgggctatgtttagtatatgttggtgttttcgttccacaacggagttttgttgtggtctttccacacaagagtggtaatgaataatgccctttgaggcaaaaaaaaagattgtaagttcaattct

SEQ ID NO: 323311 - DNA, 681 bp, Cannabis indica
ataccttaaatattcaaccgtaggttttgcgaatacatatgtattgcggtccaatggatggataatttttgtatgttaatattttttgttattttgtattattttatatgttttatctattatttttttcatatttaaaatttttgagaacgtctaattacatccgttagactgccaaaattttggtagaattaggataaatttcactaaaaatgcataaatttcactaaaaattatatatgtgtggtaattaatttaactaactatttactacacatattcaaacaaacaactaaataatttttttagaagttttcgaatggatatagaaattggatgagtacaaatagattatcaacgtagtataatcaaggggttgaccatttcttggacatttgtcagaagtaagccaaatatgtgagaacgtgaagcaaatggacattactaagataaaggagccgatcagactttgatgaacaactttaagaacataaataatacaattgagatcgaacctaaccatctcagaattaagatctatagacctaagatcaaccaatgatattgacttagaaatatataacggtaagtttatgatagcttatccaagatcaatatcggtctaatctaatatatactccatacatctgatattggtatactttgtcaatgccctagaaa

SEQ ID NO: 323312 - DNA, 1736 bp, Cannabis indica
tttgtaaatttccctatatatattagaaaaatataataattttttgagtgcataatttttaatatattcattaaaagagttacctatataattaaaaataaaaaactgaattatgtacatattgtttaaattgtttgtacttagtaataattttataatatatatatatttaacctaaaataaataatactattttaaaaaaaatgaaataataatattatattaataaattatatgatttttttaatataaaaataaaaaaaatatatatacacgactaaaaaaaattatgaaaataaaattaaaataattattgaaattaatgtaaaataatatgaggaaaaaaatttaaaaaaatattaagagtaatttttaaaaattatttaagtttatactttttttaataatagagtgtatttattattttatggggtgcaaatagaactcccttataaatgtaactgcaaaaatttaaaataaagtagtacaaccaaccaattatttttaaaataaatatcataactaatagtcgcataataatattattaattactattaatatttattcaaaaaaaattaatattaatattcctctaataattttggttattaattatttttttttttcaactatacacgttttctttttatttggcttttcaatttgtacacatttttattacaaaattttttatgtctcttgtgtaaaataatctatatatatatcttttgaattgatttgagtgataaaaaaactaaaaaatattaaattaataagaaaagttgattgataatacattgaattttttttttacataatcatgaaaatgtaaagacactataaaataaaacacatgtgataattatcaaagaaacaaaaaaagctctaatcttcaatagattttaagagtggaagaagattacactaatccaaaaagacattcttgttttgagagctttaacaccacaattttgtctacttattattacttaaacattctcaataattatactcatacataactatgaaatatcataacaaagcataaattaatacacactatatagttttttaataatcacaaatgcctcatatatgagaaagaaggtataccattccgtcttagaaaccaatatgttgatcaccttgcaatgtgagagaaagtctaaaattgaaattgtgaaactttctataataaaagggaattaacaatatttatactattataagattatgaactcccaatttttaaactacaacacaattaataaataatgtgaacttaaatacatatatggaagagaaaaaggagagtcacaccctaataaactcttttagcagttataaaataatttatatatttgttattctttataactaattacaattaattaattaattaaataaatataaaatctcacaaaatagatcaagtaggattgaatagaatgtaagatgccacttgaacttttttgggctttcccatatatagagttatcatacctgtcaaatatgttccagtaaatcatcaaaattaacaaaaaaaccttgaaatcctcaaagaattattctgaagcctcaaaacttttaagctccttactgtccatattaaccaaaaatagcggtcaaactattatatttttcaaaattaaacctgaaattctgtattttaatattctcagtttaattatttaattaagtgattaattaaatacggaataatgaaactggtact

SEQ ID NO: 323313 - DNA, 711 bp, Cannabis indica
cgtaccaggacatttgaataaatatattaggattaggtttatatataaatcttttatttaaaaaatttaaaacgtaataaaaatatattagaagatttttctgattacgagtaataagatatattataaaatttaaaatatattatttgttgtccacttcaccaaaaatatattactaatatattaaatatatattagtaaataaaattacatagaattttttataatatagaaatttttttaaagtaaaaataacaaatgctctaggaaaatggataagctcttacaaagtagaaaccttcttcttgatgagcacagacacttcacttgatcgaaatttttgtaggcagttgtattggatgcacctttgacattctttggaacatgaaaagtagttcttccttggttgaattccaatcaaaaggagttcattgagtatctttcgatcaacatatctcaacacattgcatacaattacaaagcaaaattctatcaatttacatgtgcatatatattctatataaaataaagataacaagagctatatatacagatgtctacaaataaatacctttctaagttcattcgaaagattgtatgaagtatttgatcaaaggggaagaaatcccagtctctatttggccttcgaagcctcagctttactataaagatggtaagaacaaaggaactactgattatatatacataaat

SEQ ID NO: 323314 - DNA, 821 bp, Cannabis indica
ccatatactatttttttttaaaatttacggtttggatttttaatactatatatttataaataataaaaagaactaatttaaaaattaaaataaccgaaatttaataaaatatttctgtttgttaaaagtaattaaagaaatttgaagttttgataaaatttgaaaaattcaacaatatatgttgcatttatctaagaaagtataataattataagtaagaaatatcaattacacaatattaattttgcacaaatcaaagtgaaagaaatagtaatctatagactataaataggctctaagtgaatcaccacattcatttttaaacaatatgtgagatttttttcaaaataactcactaaaaagttaaattaataaaatttaaaaaagtaaataaaaaatgtaaaaaaatataataaaagatatattggaatagaactcatagaaaatactacatcaccgccctatttttctcttttttatagatatatagatatattgatttattttcactcttgattatctcttaatgaaaaattaagagaagataaaactaagagagatatagtgtcactacaagaaatgtctcttttgccaacacatttttgtactggcaaaagttggtattgcgctggtaaaatagaatttacctttgatgtgttggcaaaagggggttggcaaatcaatttggtattagaacttttgccagcttaaaatgaaaagcgttggaaaaaaagacttttcccagcccgtaaatgtgctggtgaaagttagattttagccactgcaaatgtacgctggtaaaactttgatctctttgccag

SEQ ID NO: 323315 - DNA, 1347 bp, Cannabis indica
cttttcaaagattgaaatcccctaatccatcaaacctctctaggtcgaatctggttgatgaagatgccactgatcaacttttcttgattcttggcagctttggtgttgagtcttggatcctcaaaaaacctagctctgataccactgttgtaaatacctacaatacaacctcaacacacacacacacacacaaacacactgcattgcacataaaccagatgacaaaaccagaaaacaaaatgcacaataattggacataatcaaagcataaaacagaggaaaaaaataaaaggttgagacaagaaatttatcctggttcggatctcaatgtgtactccagctctcccccaaggagtttctccactatgcaatgttgtttacaaacactaattaagagttcttcaatcagagatacacacagagagatataagccctcaaatcatcatgatcgagccactaaccacttggacaaagccaactaacttagcaacttttaactaacttcctaaccaacttgccaagaatataaagttggttataagacttgttttctatgaattacataccacaaatctaaatcctaaaactaaactcagcaaaagcacaaaatctctgatatttgataatgggtggtagtgtaagatcatctctacatatagagagccattttttttttaattcatactctaatcgtgattttagaaagtctctaacatagtaacatgcattaagtcatgggaagaaaaaacaaatgcattgcaatgtcaataaaacatgtatagaattgaaaaggtcaataaataacatgtaataatcaaagattgttatcaatattttttcttttatcgtacaaacattaatatccttttacatgatgtgaatgaacatcctttgtttactctttccttaattatttgtacccttcattacagctggcttgtggtccttattggccaccctgcttcattattagaattgttctaagttattaggtgagcttgctttattggttagctaggttacaatttattgtgcccattactactactactactacaatttatttgttatcgaagctgttaggaatgcagcttcgaattgttgcctcatgcaacctgagttcttggacagaactctaactcagtaaccaaaaccagaaaacagagtaaccaacaaaacacaagttgtaaaacgtatgaatcttattgaatgaatcaaattgtattacatatatacaagtgtcttgattaagagtaagctaactaaactaggattaactaatgccttatatactcggcagttagttaggtacaattagttaggaagttaactaactcctatgacac

SEQ ID NO: 323316 - DNA, 690 bp, Cannabis indica
tatacaaactcaatatattactagaaataattttaacgggtgtagatattagaagtttgtgtatatatttttttaatattactagaacactaatatatataatattatatttattataattttataaaatatatgtatatataatattaagtgtggattagattagattggttattttttaaggtcaaaaaacattcaatccgtacaagtgtggatttcaaatttttcaatccagtccaatctacgaaagtgcggatattcacattttgcgaatttgattggattggaccgttcggattaaattagatcaaatactttgtgaacaaccctattgttaaccattggagtaaaaaataaaaaaatatatatatatgtgaataatgtggatgagagaaaataataataataaatgataatattttaggataatgtatgtgcttttggtaactataggtatatgtcctcctatttgtagaaaataaaacttactgttcctaaattggtgtgccctcccaatcccaccagttattttagtacacatcatctataccaatttaacatataataaattccttaacaaattaactctaaactaaattaatacatgtaaaatatattcaaatgatgcatatcgtgaaataattggtggggacagaaaagacacaccaattttgtaaagaccgcatatga

SEQ ID NO: 323317 - DNA, 805 bp, Cannabis indica
cgaccataacaatgtcagtagttcccttgggtgtgcctacaaactgagtgcttcatgagttctcaatgtacgccactctctcaatctacacacattaaaataacatagattatataaatacatttatatatagatagatagatacccttatagatgattatatattaatttattgaaatttactttaaccaatttgatcatttccagcatcaatgaaagctttatctgagaaaataagctgcccgactgaaaaactagcaaaagccttggctaataatcctttgcgagcaagaaattgctgagacacatgcttcattgttggtcgacactgtggtttgacatttacacatgcaaatgcaattgcggcaacaagaacaacatctcgtgctacaaccccacttgttggtctaggcaagcgtttgtctaatatatctattagcaacatcttttgagtacttgatgatgaagataatgacaatgataacagttcttgaggatttctacccattaaagtttcaagtgccacaactccaaagctataaacgtcacatttttcagttatagccgtagtgtaagcaagttctgcaatcacaacaaatggaatatatacttaataaacaattaaaatttatacaataggatattgaacaagcaacaactatacatataaattaccaggagcaatatatccataagtaccagcaatcatggtccgattggaagaatcaggatctagtagcttagctgtaccgaaatcggagagaaaagcctctagttccgagtttaacaagatgttggtggtagt

SEQ ID NO: 323318 - DNA, 661 bp, Cannabis indica
aaaaatttctaattttttaatttttttgaaatatttataattatttttaaaaattaatattacatggatcactaaaaacttgccacctgtacaaatgtgtacacgtggacagtccaccgtggcacttaactatgatttttgaacggaggtgtgcagagcaaaacgaaaccagtgttaggtagtttagccaccaaaaatttagtttttgtgtttaagtgttacaaaccataaagttcaggtggtttagccgccaatatctcgttctaaaattgtaaataaaacataaaagtaaagtaaaataaaaaacatgtatttgtgaaggaaaaaaccctattctttatgataaaataggttaaatagatttttatcgtatccaaaaagttatcacattttttttcacagaaagaaaaatctctcctcttccctctcaaccgtataattgttaatatcatgtattgagaatattattgatttacaaaatagatcattgttctctatgtgccacccacatcttaagttgtagaaaatgttttagaaaattttaatttgagtattatagctaggataggaatgttgattattatacaagggaaatttgattttctatacttagaaaatcaaaaaatttgatttctaaaccaataatttaaaccctaaaaaa

SEQ ID NO: 323319 - DNA, 1422 bp, Cannabis indica
tattaatcaaactgagtcaattacatccacaaggggattttccttcaaaatagaaacttacaaccacttttacatttttaagaacaattttatcttacacaacttctttttctatacaaacttaagtctacttttaaggccctctttaatgataatatcgatgcaactcgtatttatgcacaaattttagtttagccaaatgtcataaattgtactcgctaaaatattcttatgaacataatattgtttttatgacctattctaacatattttttttttttatttttaaaattatatatgtgtttttttttaaacatatttatttatttatttcaattaataataaaaaaaataacattaaaataaccaagtgcattaacttaaagccaaaaaaaaaattagcctattaatgtatacatacacacagcatacataaaactctctattctattttttttaatttttttattctatttttttttaattttttctatgaagcagccactttttattttcttaaccagaaaaaataatcacacgtggatatacacactaccatactatgtaatttttatttggctttaattttattgtccaaaaaaactacctcatgtcatgaggtacgaactaagagtcctgcagtattattactctataagtatatataggtgaaattagaaatataattgaaatggacgacattaattttataataggtggagacatcaaaattttaataaaattgtaaaattagatataataaaatgtaaaaagtaaaataataatgcataattatattaaagtaatttttattttatattttcaccttacagttggtaggtgcttcaaatctcaataatgatatttttttttcaaaaaaataaataaaaggtgcagagtgttcaatgatgaatgattattttatgcatttgtcatttactcttatttattgggttgttttttttgaatttgatgtgttttctctaagtgtgtaagtttatgcttaaaagatgatcttgatatactgagatcttttaactaatttttgactatgttcccatcattttcttaagagcttgtgaaaatccaaaataaaagaattctttcttagcttttcaaaacatgttaaatcatctaatttgaagtctagacgcgagagttatgtatttttattgagcaagttcgaagtactaaagaaaaatgatggaaaatagcttgtggcactatagcacccagactggaaaaaattgatttttgcgtgaatttgaaaccttggagaatctcgcttggctccatagtgttgtgtatgaagtgcactatagcgtcgttcgtacaaattcgctatctttttttttttagaaacatcatctttctagccaataaaagaacattgtaaaattctttattgacatatttgataaa

SEQ ID NO: 323320 - DNA, 997 bp, Cannabis indica
ttccacccctatcagatcaaaagattcttgtgtgtcatagagtactatggtgtattgagtatactcttgattcttgtgtctttcattttgctacagtttgagattattggggtcatagacccaaatcctcctaagctttaattaaaagctttttttccctgcttgaaaattaacactacgtcaccaatttcttcattgttaaacctcttcaaagcttgtcttaactctcaacagatttttgctatatcaacacccgatctttaaaaccaccgtggaaagacaaatggttgcaatatctaaatgatttattcttactttatacagccttattgatagttattatattaagacctccgtactcttccacgttttactttcattttaccaaatcacacattaaacattgcctttataatcatgtttatgttatggtttagagaaatgttggcataacaaatatttaattttattttattataaattaattttttattaataaaattataacaactattgttaattaaaaaaatatataatttattctacaatgcaccctttataagggatgtacagatgtatccctatctatttttatatctgaaataattttttagtccattttttctcatggtcgtgtacgttatagttatttaagacatcctacaaaataaaactttaagaaatacaaaaaaactttaacacgccaaaaatatagttcaaatattgtgttgcacgcgttactattttattttacacgcttgtgaaatagactttttgaacactgtttctatatggtaaattattttaaatttctcaaaattttgtaggatatcttaaataactataatgtaggggtgttcatccaatccaatccgcactattttgctcataatgcatccaatccgcactaagtgcgaatttcattttttggatccaatccaatccgcacaatagctcaaatccaatccaatccaattcgcaaaagtgcggattggat

SEQ ID NO: 323321 - DNA, 635 bp, Cannabis indica
tttagagcaatgctattagtaccagttgtgccaaacaccttcttgacatgtcgtgttgtgattggctaacgatattctctaaaagctattatattaaattatatgggacccgatacttagttgcaccaatagcgatattgacacataggagggtgctaggcaccactagtgccatttagcatttctctttcttttattgtatagatttaatctctcatttttttagtcttatttttgtattgtattattcttgtttagtaggtatttactctatcaaaataaaagacttagaaattttatctttctctcattcacttttattttctctcttcatcttattcttttttatttcttattttatattatgcataataatttataacattatcaacacgagtttctagacaaaataaatattctttaaaattcttgaattgtttcgaggtcactatgcactatatatatttagggatatgattttgtcccgtgatgtactttcacggaacgtattccgtggtacattaaacgggtctcagggtacattaaatgagtgtcagggtacgtttctactttttaaccctaattacccctagatcaatctcaaccgtcaatcaaataactccctcatttgacgg

SEQ ID NO: 323322 - DNA, 1034 bp, Cannabis indica
gtaaaataatttccaacagcaccatcatggaatatacctgatataataaaaagatgttatagtactcctacgtaaacataaaagagcaacaggcaggccaaagaaacaacgatacaaaaatacattggacgaaaaaatacaagtgaaaaacgaacaatgccaccaaaaaggacacaacaaaagatcatgcaaattttattaaaaaataatttttaaaagttgaaaaaattgaaaaatggcaaaaataccttttttcgtgcatgcttagggtttaaccctagccaaatttttaaaacttcaaaaaaatcatatttttcaattttaatccaaattaattttggtaaaaggctaatattcttaatttttttaccatcttttcaaataaaataattctggatcaaaaatcatattatttttcataaaaattttgtaatacacaatcaatcatcaattaatcatataaataaacatgaacacatcgaaatttatcaaacaccgttttaaatccatatttcatgaaaataaattattaccatagctctgaggccagttgttggaacttattttaccaatagctagatttaaaacatgtatattgattatagaactataatctaacaccctaaatatgaatcttctaaataatgaaataaacacatataaaattatagaaaactttatattggtggcagcagaatataatgtctctttccgtttagatctctaacccttgatcctttctgtcgcagagtatgatcaaaatctaaacctagatcttcttctattgttagaattcttcaaatcttccacaaaggcttgagtattggcttgaattgtgtggaaaattcctcaactcactaaaggttcaaaaattttagaagaggaagaagaaggtttcaaaatttgagaggctctttcctattttccaagttgtctgacaaagtagcctgatgagggattaggaaaataagagtcatctctttctatttataggatttcatctagggttaggatttgaattatatggaattaaa

SEQ ID NO: 323323 - DNA, 969 bp, Cannabis indica
aaaaataaatatatggagtaattcctctaaaaattattgccaacacattcgcatatgttattattttattttatttttgtaaaacaactaaaaatctatcatacaaataatagaacgacgcaacaacaaaataacaattaattaatgtcattataatgtttttatatgaaattattccaaacgatttatgttttattgtaaattatttctattatttttaagttgcttacaaatgacatgaattcaacaaacaaacagttaacaaacaacaaaattttacttttcataccaattgcaattgtttgataaggaaaaaaaaaacaagaaactacagagaaatttgattaagtttttgtttagccaaattagcaaacaaaaaaacaaaatatcaacattaaacaaattgtaatcattcagataatcaaattgagtataagattgatatattaaaacaatttaatattttaaataggaagggaatgccttgaatgtcaatttggattatcttgggagctccaatcaacaatttatcaacaaaatgtttgataatctataacattaaaataattatttcaatttatgttttacttaatttttttgaatttatgttgttgcttgccctttttttttttgtgaatgctttctcagaaaatttgttattgtttgcttatttttttttttggatcgatttttgtattgtttattttggtatatgaattataacttttttgtttttccttcgatttgttgttgatttgtcgttttttctgaaagcttcatgtgtatcaatggcagccccgccatgggaggaatgaatcgaagacgaatgagtgtgcttagaagggtaagtcgtatttttgtaataaaaaaattggttgtaattttgtttagatttctgcgttaacatataaacgttataattaactttttttttattgtctacttgaaaatttctcgcgtttttatatt

SEQ ID NO: 323324 - DNA, 588 bp, Cannabis indica
ttccccatcagagaaaatactctagaaaatagtgtattcttggaagatcaaaaccttctctgcaatctccaacaatggcttcaggttagtgcttccgctcatattttatcatcttcttcttctttaatttagcaaaggctttatagatttatgatttagggttttctatattaaagcacttttaggaatatgtttggatctgtgatttatatatttcttaagtgttttataaaccctaacatgtatagcattacaagagatacttctccatttacttttcatgtgggtttagtttaggaggaaaatttatttctctaatagaatagtactattttttttttttaaatagaataattaactttaatagaagcaaagggttctaccattctcaaaccaaaaaaattagtaaaatttgacaaagcagcctaaatagctagcatatgagttgtttcatttagaattctaaagatcaaaaaaataataaaattaggcaaaatatcatgaatatcaaataattgagtaaataagtgcatgtttgacatcataattaaaaaattgtttttaaaaacagaaaattattttttaaaa

SEQ ID NO: 323325 - DNA, 1061 bp, Cannabis indica
tgatattgtacgtacgtagttttaaggagtggagacgaaatgacttaatcattatatatacacattattacggtcggatccatattatatccaatgtatatataatatatatatatatgtatagcagtatgtgtacttctagtgaactatatgtacgtataacatgcatgattattataattaatccacatataattaaggagaaaaatatattaaccctcgctcaaatgtacataacctacatttcttttttaggtaaagattagataagtttggtaagatttatgtatgttggagagaaaataggaagacatgtatacatatatgtatatatctatattaattgactttgcaacttgcatgattacgagtttaagaaaaccaacgatcgattgggaagagagatgtcctgtttattctaaattattggccctttttatttgacatactgaatttggatatttaaatcagttacagaagcacttcatactcttgtgtactccgtatttgacttttattgcattatatatatatgatactatgtatcattatataatctatatatttcagtaaaataaattcgtctactgaagaataaattcctatttgtcataacaaaaatttaatcccaatttggagtttaattggatattacttatacaatttttaagttctctaataatattccaattaagcttgaattccttttaatataatacataaacaaaagaattacctttatatatctatgtcaagaaatagaaaaaaaaaattatgttataagaagcgatcaagattccctgtccaaatattgtatcccatattatgtctaaccaatataatgataacacatcatttaatttatttttgtaaagttaactcactaaaactaaacggagcaattctattaactacaagttttcatttttaatagttttttttttttgctgttttcataatttctttttttattattgttttcttttaaaattaaatattaacaatataattgctacatattttttttaattttttatattaacatctaattgtatagattc

SEQ ID NO: 323326 - DNA, 777 bp, Cannabis indica
gtggttggaaaactaagaaatttttaacactttagtctaatttgttagaaaggattaaaaatgatcaaatgaaataccttgagttagttaaatctcgtgaagaagttttagctgattagactaaggacttctctgtttcagacagtggaatactacagtacaagaattgggtttgtgttccagatagtattgagctcaagaataaaaagatactaggtgaagctcacaccactcattattttttacatctaggtaccaccaagatgtaccaggacatgaagcactactattggtggtacgatatgaaaaaggatgtgttcgactttgtatctagatgtttaacatgctagtagataaaggctgaacatcagagacctacaggtttattgcagcctatagcccttcccaagtgaagtgggaggacgttagcatggattttgtggttgggttagttagaaccaaagttttgtatgatttgtctgagaaatagtagatcgcttcactaagtcaatgccttttataccagtgaaaacaacctatgtagtggatcagtatgtagagttatacgtgaagtagatagtttgtctccatggggctctgaagtccattgtatcagatagagatcctaaatttacttccatattttgggagagtgtctagaaagccatgggtataaagctaaaagttcagtacaacttttcacccccagacagatggtcagtccaagaggacaaattcagatactagaggatgtgttacgtagtttgtgtgatggac

SEQ ID NO: 323327 - DNA, 711 bp, Cannabis indica
tatttatttttgtaatttttagttaccattttttgtagtcatgatgtttttgccaacaaatttttgtactggtaaaaattgggtattgtactgaaaaaaaaaagatttttttcaccgcatttttgccatgacaagagatcaacaaattaacgtaggtgttacaatttttgccagcgcaaaataaaaagtactggcaaatatgactattactgtcgtaataagacgttggtgcacgccggtaaaaaacattcgtggtaagtgtggttgtaacgtgttttgttggcgcattaacgccgagggaaaaatcttacttttactagtgcattaaagtgctagcgaaagtatcatttgatagatgagtatttgacatttgcgagtgcaataatatgggccggtaaatatgaactttttctagcgcacttttgcactcacaacaactggcctcttgcagttatcacatactaaggtataatgcatcggtaaaactttgtattttgaattatttattattttaatttaatgttttatcaaatttaaaataaaaatataatttaaattattatagatacataatatagctataattgtctaagtaattagtaaataaccatgtctaaatacaaacataagtatattgtcttaactaaaataaaaataaatactaggggtgaaaatcggtcggttatggtcggtttttacaattttataacc

SEQ ID NO: 323328 - DNA, 1162 bp, Cannabis indica
aataataaaccaagaaaaaaggataagaattgagtgagtgcatttgtaactttttcactattcctttaaatcagatcaacgtacttaaaaattttatttattattaaataaatacaaaattcacacacacacacaacaacacaacaaatactagtggagcggcactagcactacaaccagccccccatagccacaaaaagtactatcattttttttttttgaagtacctactaattattaattgttatttgcatgttaagttgctcaattttatatagatgtaatgttttgtaattagttttaaattttttagagtaatttgcggtataaatacttaagtttattttagagttgctgattaatacataagtaaaaattttaacggtaaaaataccttttgttaggattttggaaattccgtaaatacctcgacgttaagtgacagatcattacacatgtggtagtatcttattggtccacatcattaattttttaattattttttgaaatttcatataaaattatttaaaaataaattaaagattaaaaaaaatatcaagaacttaaaattaactcaattttgattcccgtgatgttgaactcatcaaagacgtgcctttgagtgttaatcttgtgagtgatagttggttttggaacaaggatccaattggtttttttactgtcaaaagctcctgtaatcacttacagtcggtcaatggtagttagaactcatccatggaggatgatgtttggaagatgttgtggaagattaaagcccctcccaaggttttacattttgtttggaaagctctttcgggttgtttgcctacacgtactcaacttcatagtaaacatgttcctgtggatttacattgtgtgttgtgcagctatggggaagagtcaattttctatgttttggttcaatgctcatttgctcattcttgttggctccgctctgcgctaggtgttggccactctgcaacaaccaatttctttgactggtttatggaagtgttgacagtaggaaatatggagttggttgaagaagctgtcatggttggttgggcaatttggaaggctcagaatgatatgctttggaatggtaaaagctgtagtgctgctgatattgtttagctggatcataccactcttcgacaatggt

SEQ ID NO: 323329 - DNA, 3598 bp, Cannabis indica
tattggcgccaaccgtcagattggcgccaatagttttgccggcgcactattgcgccggcaaaactttatcaaagcaggttcatagcggataagggcattttttaacaccggcgcttattttttaccggcgtgatttctcgccggtaaaaggaagttttaccggcgcatttactctacgcgccggtaaaaagtcttttaccgaccaagcttcccagataagctttgccggcgcacaactgcgccggcaaagctttgacggcgcagttagtgtactttttgcgccggcaaaagttgcttttcttgtagtgacttaagttaattattattattttcatcaagcacattatttaaaaattctaaattgctggtgttcaagtttaaatgggttgtttgtgtattgtcctaaacttgcaatactagcggtgaagggtaatatgactgttgcgaagataaaatctcaacaaattgtcgagcctgtggttgttgtggtaaattcggagattgttgttattgaaaaaaatttggagattgttgttgttgcaaaaattcggtgattgttgctgaaactcaatagaaaaaatatatagattttgtgtactaaaaaattgacccggagaaagttgctgcattgaacccccaaacaccattggttgctgagatgaactcccaaattgacgtcgttgcaactgtgatctttcaaagaaattagagtagcaaaattgagaagattgggaggagcgtccaaacatgttcggaataagaagagactggtaagaacttccctgcatgttaggagactgctgagtctgctgaaacggttgttgttgcagccttggacaagttgcactaccttgaggttgtgttcgtaaatattgttggaggaaactctcaaatcgtgggtcatacaaatcagaagtgtcttatcccgttggaaagtgttcacacaatctcttaaacatctcaaccataataccaacatcttgggaaagagtagaccctgcttgagattgagtttgactttaacttgaagagccatatgttgatttttttctccttctttcataagcggtaaccaactcctcgtatatagtcaatcctttgtccaaataccttgtccataaccttgtactggatgtcagatggcagctccaaggatccagaatcactgtcagattggcattgaagtctgcttctggccatctctccattcatttcatgggtcaattcatcctaactatagatgaaaattgtttaaaattcagcaatgtgataattttaaggagaaaataaaacattagtgtaactcacccatttttctttagcagcgtcattgaccaggttttgtctttttttctagtatggctatctttctaagtttggaagacatatttatctggctccttctgttttattattagtgttagattttttaaaattataattttattaaatgaattaataattcacttacaaattcatgacgctgagctgccattgattttgtgcctttagttgaggtgtacttcatttattttctatttttcttgttttgattggaactctataaaatttgggctcaaaaatagatcaataatctctttccaatgctctcttgttacatactcaggcttagcattgagtgccacctccaaattatgaaggttttttcgtaatattttttaaagtaagtatgcctaatattttttctttctaaatatcttttgcctatctcatgataaagagtcctcatcactttttcgggttctgggtgaccatcaatatcatatagtactacacttaaagaaattaattattggttaattgtccgattacttataaataaaaattatttcgaccatcaattgtttgccttcattctttgcacaacttgttccttaaaatgttgaggtatatcaacaaaaatctaagtaatttcctagcaataatgtactcacttcgacacccaactggcggacgaaagcttggttctccaaaccaacaacttttcccattgcaggatcaagcataagtggcaacggtccctgatttgcccgcctacgagtctctaatagtatattactagcaacaccacgaatttttctttttggcggtggagctgcctcggaagttgagggtaccctattaggatctagtggatcaaaaccatcaccgtctcccccgtgataagaagctatatcagctgacatcatcactctttaaatgtaaaattatatgactaaattagtatggatgtaaattagcaaaaaatataattagtttgaattaaaattaacatcatcaaattcaccatttacaaaattattacaaaatatttaaaacataagtaaactaatagttactatcacactcatcattttgagaaataatatcgtcttcacatcgatcaattagcaactcatcacattcatgctattacatcatcaacgtcatcatctacaacattttcatcagcctgatttacattcaaattttgtgtagtatcaattattgtcgtcactttaaaatgttgcaaaattaactctcctagatacatagtcaaccgaaaatttgatgagtaaaacgtctcggtggatgtcttcttttaatttctccatcaaagttggtgtcccttctaaatcgatgggtactgggtaagaatcttccgtgacctacataagctgtcttaccaatcaatcgtgtcgaagaagtgccttcgttacatgttggacaagctttgtatccttgaccactccatccagacaaactacttcgagcaggaaaattatttaccgtccataaaagggctgcacgcaacttgaacatagtgtttgtcctacaatctctcgtatcaactccatcaacccacaaatctttcagctcatccacaaatggtcttagaaatacatccatgtcttaacctggtgattttggtccaggaataagtaaggccgacatgaaattattgtctttcatacacaaccaatgtggaagattatagttcgctaacacgacagaccacatactgtatgctatgctcatgttgccaaatggattaaagccatcggcagctaaacctaaatgaacatttctaggttcagtggcaaaatcaggaagtttggcattaaagtctttccaagctaacccatcaaccgggcgacgtatcactcgttcatactttgattttctagtatggtgtcataccatatattttgttgtatgtcttgaactatatagtcttttcaaccgaggtgtcaacgaaaaataatccaacaccttacgaggcaccctttttcctgtagaattctctgaagttatccatcgactacttccacaaattggacaaacatctttggttgcatgctctttataaaataagcaacaatcatgcttacacacatgaattgactcatagcccaactctaattttttttagcctcttttagccttgtagtacgttgatggaattttatttctctttggaaaagcaagattcaacaattttaataattcatcaaatacgctgaaagaaatttttccacaaactttccaatgcagtaactttgctagaaagttaagtgaagaaatctaatggcatcca

SEQ ID NO: 323330 - DNA, 1989 bp, Cannabis indica
atttaatctgatttctcttgtattcactcttatggaactttcctttaacaatgagcaatcattccccactattctctcaattctcatctcttttttttttctgaatttattttaaattcaatgcaaccttaacttctgtcatggtcaaagtttcttttccatataagattgtatcaagaaaagtgttcatatacatcttgggaagtgaattcaacatgagtattgctcgatattcatcaactatgttcaccccaagattgttcaagtccagaattatactgttgtaatcatcaagatgcttcctcagttctttagattcatccatttgaagtgtatacaacttcttcttaagatacagtttgttagcaagtgatttctttttgtagattgaagctagtttgttccaaagtcccaaattatctgttagaatttaatgtcctaaataaaatgcatttcaattttatttacttattaataaaatatcagaaattattttatgttgcatagttcacatgattactttcatgattatatatttaatatataaattctattaaatcccaaacatatagttattactcataattataatgttgtcagcacaatagaaaataatcatgattatatgcttcaaactatttagtaccacgatttatcagtgcactagatttacactgaggtgataattagcgagtggtttacttacacttgtataagtagaatgtcctttctagagcattagcaaagtaaacttgtatctgatgtatcggctatacattataaacttatcgttaagtcctttataagttgatgtcacttagttaatcttagattaattgatctcaatcctgagattgttaggttctagcttaattgtgcagtcaaccgatcattctttctctgatcgcactggttgatgtgtcaacacttcttctttctgttgttaacaacactttctgcggttaacaatactttctgtagttaacagcacatgagtggagaaagcgtacacttacgacaaatcatcttttaccgtgaagaggctccacatgacaacttttcacgagactgtactcgtatttgtaggtgaaaattcgcactataacatgatgatcaacaaaacacattcaagtatgtccatgaattacaactcaacaaaatgaggatgaaccctcaatcacaattgaaactcaccctgaggaatacttgatcaaatacacaagcgccctatttacaaccttctacacacacttgtaattttagacaaaaactcgaaacaattcttgaatttcgtaagcataaagtaagatagaattgagagctgtttataagtgttggtgaagcctttttcgagttgtgcataaagccaactgactaactaatcctgagttgaatttactaacttggacaataattaagtgagtttaattctattacctatattcatatatatatatatatatatatatatatataataatatcaatgaaagggcgtttttcctttaagaaagtggtaatggaaaatttattacttaatctcggcttgatcgctttgtgtttgagatattaaataaatgcatggtttatttatagggattaggaaaagaagacctatttaaataaaaaatacgagggaaaacagtaaatttgttatgaaaaatattaaggtcttgtttgttttgtcagaatatggtttggataagctggaataatcttcctatatatatggctgatataatttatataaaagtttcagttatttttttaaaataataattaactttggtgccgtttggtaacacttttgttttctaattttataattacaaaatgaaagtaaaatttttgtttttaaaaattttgcttttgaaaaacaaaaatgcgttctgtaaccacttttatttttcaattttaaaaacagaaaacaaaagtgtgttctgtaaagttcattttcattttcattttttgattttatttatgttgggtc

SEQ ID NO: 323331 - DNA, 1286 bp, Cannabis indica
attattatggcattatcaaccttattattattgctccaaaaaattaattataaataaaaaattaagaatgtgatattgaaatatttcattagctgaataaaacctattataagatttctctctcagaaacaaatcgcgcttcatgggctgtagtattttataggatttaaaatcataaaattttatgaaacccaagaagatcattataataatatgaaatcctaaaaaattatatgaaatccaacatctttgatacacacaaaaattaaaaattgtaaagctatattaaatcgagatatacaattaatttaattatttgtcgacgactttccttgtaatagaatatgtcaagattcggtaggagagagacctataaacgaagagatatgtaaaaaaaaaatgagaaaattaagaaaaaacaaataatattaattaaagaaatcttagagtaacatgtcacaattttatatctcttatatatatatatatatagatatacagattattagctttatatattgatgattagtagattaattaattggttaatatttatcaatttaataaaaataaaaaaaaaagtataagagaattaataaaagaatagattaaactatttagagtgattttagactattaggtcacttattttttttattaattaaaaaaagagagctttgtgagatttgttatgaatttttgttgttatagatattttctatttaattaattaatttaaaaaattaaataagagaaaagaaaaaaaaaaggcaaaatagaaagagtgaattaaaaaagttgaataagattcttcaataagttacctataaaatcagtcacgaaaatttaaattaatataaagaaattaaagcatcaatacatacatataacaaagtaattattagtaaaaattattgtatattattgtaaacttaaatattgcactaaattaatcattaggtgtatatataatttttagatgaagaaaataatatatatgtgtaaactattaccttctataatctatattgatttataagtacctaaaataagtaagaattatattacattctaagcttatattggtgcatgtggagactattgtagcatgaacttatttcgtttaaaagggtagaggcgactgaataaggaaaaaaggaatgattcatcaattgtatactatatatatatatggatactaataattaggggtattcatccgatccaatctgtactttttttagtcaaacaacatccaatccgcactggaggcgtttggttgggag

SEQ ID NO: 323332 - DNA, 862 bp, Cannabis indica
atcattaaattttttttcttgttgcattggaatgatatttgcttcctttttgaaaaggattaatcattccaccaaaatggtgtaaagtgtattccattggaatgtcattccaatactttaaaatgcaaccaaacaaatgaatggaatgaaaattatttcctttccattccattttattacctccaaccaaacgtcacctaagtaatgtaacaaattagttggaacatcttcgtaattgaagtgacaattaagatataatatagaggctctaataaaattatgagccaccatattagttgatcgtttaatataaaaatagaaatatttctacaatcaaataacaaaaacttacaatcattagccacttaaaaaaagagatcattctaacaaaactccgtgaagcttgcacaacaatcaaacaatttgtttcaagattgacataagatagaaataaatagattatttagaacttttgttcctccgaactatgactatatagctgttaaaaagtacaagtcagaaaacacaatatgtgcactagccacaccttcgtaacttcattacctgggttcgttatagttttccatgtcatactctaaccacccaatggattggttcttcccaacttttattatgaactagaatttttcagtccatttaaaatagtctctgaactattcatagtgttgtaaaatgatcattattctatcatatgtggcaaataaacataacaatgagttttaatcaagagacattcgatctccattgttggttttacataattattgttttagtgagtaatcctccctaatggaggaacgttcattagcaatttaatcccgtagaatctcgaaaaataagt

SEQ ID NO: 323333 - DNA, 852 bp, Cannabis indica
ggtttaaaaaaatagtcaaaaaccgcaccacccgcaccgcgaacacccctactaattagtttgattagatgttggatgtattagatttttggacaccccatccaacttccgatctgatccaattgaatattcaaaagtaatattcaatccgatccaatcataattgcatatccaatgtttggcaatcgattataattggatcggtcgattgtcattggattgaatgatttatgtacactcctaattacacccataaaaagtccttttggtagatttttatatgtttttgcattcagaaaattattttaatctaatatttttttaatgatcgcatacgttgtaactatttaggattagttgtaaatttttaataaattctgaataatttacgatgtcggaaataaagtttaaatagttacttactatgcgtagaaaaaacagtagcgcatacaataaaataaataatttatattattttcggcattataaactaattgaaattttttgaaaagttataagtgatcttaaataactataacatacacgaatatgaaaaaaaaatttctcaaaagtacagaaacatgtagaaggtccaccaaaccatccttttgaagatatactgtagactcaccctataatgtataaagtaatttgtgacataaatactaagtttaactttggttgacgataaatacttaagattaatttttgacggtaataatacctaagttatatttctggaacttcagtaagtacctaaccattaagtatcaagtcaatagccacgtgacaattcctaattggtccaaatcattaaatttttattttttatttaaaaactaatttaaatat

SEQ ID NO: 323334 - DNA, 1212 bp, Cannabis indica
tatgtaagtaaatgactaatatatctactcacctaaacacaatctaaacactaagtcctaatctacacgtttaagactattttttttctcttcttcattttttcttctcaaccaacccttataatatttcataggagtgaaatcgattaagattgacaaaagggttgttgatttcgatacttctttgttgtccattaatgccaccgatggagttggtggcactaccattagtttttcagttccttatgccgttttgcatagttccatctataaggctgttgttttggattttgttgataaggccgctactcggaatattaccagagtagcggctgtaaagccttttggtgcgtgtttcagcaccgaaggggttcgttggacgagagcgggacccggagtcccgactattgatctagagttggaaggtaagaataagagcgtgaattggagaatacatggtgctaattcgatggtgggagttaataagaatgtgatttgtttgggatttgtggagggtgggtttgagccaagaacttcgattgttataggtgggattcaattggaggataatcttttggagtttgatttgacaacctctactcttggatttacttcttcacttctagttaaagacacttcctgttccaactcccaattctaggctcatctttaaattttccaaaaatgtcatttttctttttaaagcattagtccttgattattttatggcagcaacttttttcgtttttagtgtttgtaatttttattttttttatcatggctgttgtgatcgaatcacatagacagctcgagaagaatataaacacacaaacacctcaagaacacaataaacaaaaccaataaaacagagatcaaactagggaaataggtgtagaaaattaaagaaagataacatcaagaattaacgagttcgagccatgtacaatattttacatctcagttgaacagcagcctcaatcctcttcattaatcagaccaagtttcagggaatacaagtcttgtaactttccttagtacttgtgttcgatcactatctaactttctttttctctcaatctctctgaattggattacaagcaggggcgaccctaggttaagcgggttaggtctgcacttagggctgactcattttaggagcccaaataaaaaaaatatcttttaaaaaaagagataattacataaggtactatt

SEQ ID NO: 323335 - DNA, 915 bp, Cannabis indica
atatatagtataaaccgactaaaccgaccgatgtacaaccctaagttaaaccaccaaatatagttatcttccattgtcaaaactagttttgaaaaatgaataagcaacatcattagggttctaagacaatcatgaaaaagaaagttcaataaaaccattataatgactaatgatatctctattaatacttcttaaatataagaccatttttaaatgtaaaaattatactatacttaatataaaaaaaaaaatactttgaaatatatttacattaatttttaatattgtgcttcaatgtacaattacaacatttgatgcaaaattttatatttgttattaaaaatataaaaaaaataaaacaataaaaagagaatatattattattttttttattattggaagcaataaaaaaagaaaaataaatagcatctatagctaatatatgagtattattattggacactagtggtgcccacttttcataggtgataccatacgattggttagtgatatttcctagaagttattttattaaattatatgagacacgctacttaattacaccaatagtggtatgacaccaaaagagtgctaggcaacagtggtgccttttagcaatttttaatatattaataaaataataaaagtgacataaaaagtcaataataaagttgtacattaatggtatttggcagaatatttattatatgccaaatttatattatattttggcatactattagaccatctccaataaaaaaatgtaaaaaatgtgttatatttgacacaaaaataacttggtggtagatttacatcaaattttagcattgtgttgtaactttgatgtaaaatttaataagggtaaataccattttggatcctgtattttataaaagttaccgattggaccctgta

SEQ ID NO: 323336 - DNA, 2514 bp, Cannabis indica
tatgtatttttcgccattaatcaggcccactggcttagacgctgacctggagtgcacatgtcccttgccagaaacatgaataacaattagcttaaacaagcaatggatagtcctaattaggaactaagaatcaaagccaagagaactgtggttaaaactattcacatggagcaaccaaaagttttctattacaaggaagaagggaaattctgataataggtctatccaatggacttaagtaaacttcccgaccctagtataataggtttgagattatctgaacttatggcttgtggtatacctgataatttacttactctagtgtagataacttactttagtaaaattctagagcatttttctaatggctaactctaaaggaagtctttcgaatcctagacatagattttatttacctaacaaatattttcaaccattccagaaaagataaatgccaaggaaagaattccttaagcatcaacaatgagaggtctcatgtacgctttggcatgcatcagactagacacctatttgttgagtggagttatgagtaggtaccagtttaatccaggataggaacattagaagacaatcaaataaatcttaatattaaaagatgacctatatgttagtctataagggtgattttttgaaaccccttacactacactgagttagatttctagattttacattaatgctagaaagtctaaatctgggatggtgattactttaacggtggagcagtgatttttgcagaagtgtaaaaacctatccgaagtctctaactcaactagtgagattgaatattgaagtggccataaaggctactagacaattattcagcctaaggaaagtctatacatcctttggcgttattccagtaatggattaactactagtgttacttccagttgataacacatatatagtttccaaatagtaaagaatccaacaccctaagaggagtaaacatatagataggaatttcacaacatcaacgattttgtgactgaggaagatgtaatggtggaaaagattgatattgaatacaatttgtcagattctattacaaagataatactatatagtacacttgatctagacatcaatgagatgagattaattgaaatgcacttttaattttatataagtgcaagtggaagtttgttaggattgtataccctaaataaaacctatttttatataattagacttactaattaatgaaagatcaaaattgtatgtttaatatataaattttattaaatcctgaacatatagttattcatgattatagtgttcaacacagtggagaatgatcatgattatatgcttcaaactatttagtcccacgatttatcagtgcactagatttatactgatgtgataatcaacgatgtggctcacttacacttgtataagtggaatgttctttccagggcattgacaaagtaaacttacatcgaatttatcgggtatacatcagactgaatcaatattaatagtgaaaatgatatcataaacataccattatattttttctaaatcaatgccacttagttgatcttaggtcaattgatctcaatcttaagatggctaagctccagcttaaatgtattgcacgagttctttgacttgttcgttacagcttacctgtagtgcaattgagtaggagcgttaatcatagatgtggaatctatagcttctattagaagtaaaacaatagtttccttagaacttgacttaacgcgataaatgatagagcgcctattttagtaattatattagtttggtggaatatcattcacaagtttctaagtattttaaggataaatatatattaaaggataaaatggtaaatttgtccctactcaatgtaaaccgtctataaaggatcattaattgttttcattgtaacaatggattatttatatctatatttggtatatagagttattctatgtaattaagagtacaattgcaaatctatagtgaaatcaagaggaattaataagttaagaaatttacttggtaaattttggatatacttattaagagtttgattacataggcccatggtccccatattgtctatgataatatcatcttgtagactcaactaattaatttaataagtcaattagaattcaaaaatagactatatcttatttgagaattttcacaagtttgggcgattttgagaagaaaagagaattagagatttattttttaattagtacactttgtgggtctaattaataaatatatttaaattgtattttatttgataattattaaaataaaatttgtacttaaataattagaagagataagtggtaaaataggaaaaaacacattgtttcatttaataaagtggcaaaaatctaactccaaagcccaataagcaattcagccctagagttatacttcaatccaagtctcaattttaagctcaatctcatctaacctagccctaagtgaagcctatataaagaaagtgatgagaagaga

SEQ ID NO: 323337 - DNA, 1920 bp, Cannabis indica
agcattgctattaggcactaatagcgccttgtgattgattagtgatacactataaaagttattataataaattatattgaactcgctaattaattgtaccaatagtaatattacactttggaaggtactaggcagtaggcattactgttaccttttagcatttctcgtagttacatgtccacttaaacttagagcatttcaaatagagtgctataaatattgtgtatatgtattttttagctcatgttcataaaatttaactccaatagtaatgtataatgtgatctaaatttggcacatgtcaaaattgatgtagggttttttcctttcttgggcgattttttctctctggaaattttgaactcaaaaattcaaagtggagataatggtaactagtcgataattgctccattcatacccaagatggtggtccatgtgcttttaatctgatagcctaaattaaatcttataaaacacaaaaaagatccaacggtccgagaatacaaaagggttgcatttaaggccgtgtgcaggatctaggtcgtctaatgatgatattctccttgaaaactctatggacatgaacccgctgtcatctcgcatccataagcttcatgcactttttcaaggcgcatggtatgcacggactaaaagatccatgacatgtgtactttattctaggaagatgaatggattgcaagcttctgccacttactactttggaatctctagagtttgcacctgttcatagttctgcatccaacaatgaatttgggaggaggttgcaagccttcacgactcttgagccgtgaaggcttgggggtaaatgttatttgcgttactagataaatggtgtgtgtatttttcaaaggccaatatcagccacaacaagtccattcctgggcccagttaagtcaataagtccacccacttatgaagtcaaggcacaacttcgggaaagattgtatggtagaaggcgaagtgtccatcaagatttacctggatgctctcaatgggtaatccagacacgggaaattaaagagacacagggtcccaccatgtcaggggtttgtctctcacattaggcctgtggagtgatgccccactataaggcaaccaccttcttgtctaacgccatattctctgacatactcggtaccaatgcatcagcccgcgacacgtggcatcatcaaccagtcccccttgtacggacgatcgttatctcgtgaaccgggcctcacctaattagcctaaagtcaatatatattgtattttatccatcaatgagtctaactgacacctctaaatcttaccgcaagctcacccatatctgattctacattataaatagaacatgatcttaaggttcattaatgcatgaaacacttaaaattttggttgccttattaagcttaagtattttataataatttttcgaaaatctcggttaacagattttagtcatttatttaatttaatattttgataatttattatatttaaagtaatatatagagttttttgtagttaaaccttctcaactatcatttcacttgtatttaactatccaagcttaattttagtggtaaaatcctccaaactacttgttgtgtaccgaaatagtacgtattacatttatcaactcgcaagcgcacgaatctttattgtagtatggagattgtgaagaacaaggtcgaacccataggaattgcgtgaaatcgaagaaaatactaatttaatctaagctaataaaactctaacctagttccgaaaatggtgaggtttttggtaacaaaataaaacaaagtgtttaaacgataaaaatgacagtaacagatatttttagaaatattttgggatattattaagggttcagaatccacttaagtgtatataaaaatatttatctttatattgatt

SEQ ID NO: 323338 - DNA, 1542 bp, Cannabis indica
aaattttctaattattttgaatgtatatatacattatgtattaaattcagggtaagagttgcaaatgagctcggagctggaaatgggaaaggggccaagtttgcgaccatagtatcagttgtgacatcaatagtaatagggctcttcttttgggttttgattatgattttccacaatgaaattgccttgatattctcttcaagcaaagctgtccttgaagctgttaataaactctctctcctcttggcctttactattcttctcaacagtgttcaacctgtcctctctggtaatcttttattttttaaatttattgagtttaattaattaaattattttgttatactaattttcttaattaaattccaggagtggctgtgggatctgggtggcagtcgtatgtggcatacataaacttaggttgttattatctcattggagtgccgtttgggtttctgatggggtggggattccaccaaggtgttatggtaagttaattagtaacattatttagttatatattaaattattaacatgcaaaaattaattaagagattgtttatcttatacactaaaatatttcttatatacaaaatatgaaaaaacacaattaacaggggatttgggctggcatgatatttggagggacagcagttcagaccttaatattggccatcattaccattcgatgtgattgggagaaagaggtacatggcatcatctaaattcataattttccttttaaatttcaatttcaaaattttcaatagaacaacttcttctaattttggatgaaacatgcatgcaggcacaaaaagcaaataaacatgtattggagtgggcaagagaatcgaagcaagaagtgatgtagttacaaaaaaaaaaaaatgattattcattaatgtacttttgccatgccaaaaaatgaaaagaaaaatcatgtgtaatttggtaggcattctctaaggccgtatttttgtcacaaatgaaaatataatagtattatttataattttgaaataatccattaattaattcgggatcacgtaagattgatgaactattcctttcaaaaagattgatgaactaatattgcacttaatttattgtgaactagacttaatttagtgtgaactatgttagtgttgaaagttggttaggactttactgtttaaaagttggttattttctgttttgttcgttttgttagttgtactcctgtaattgcttccatcatataaataaaggcatatcagtgagagggtgtagcttttgctgcattattactctcctataaagaaattcagtttctttcttctctggtgctctgcaccattattgttgttcttgttagcatggtatcaatcgtcaactgacattcaatatgtcatcttcaacctctgatcctggaattactgctactgctgccatggccactccccctaatcctccttggaacctgttttctcactctctcatgtctaaccttacgatcaaactcgatcgtaacaactttctctcttggaaatctcaagttatacc

SEQ ID NO: 323339 - DNA, 1434 bp, Cannabis indica
tcacaataaaaagttacttataactaaaatatagtatttagatacaaattgtacgtcctaatttaacaaaaaattatttataactaaaatataatatttagatacaagttgaactacagcaagtattgtgactaaaattacatttttttttttatcactaatatttttagtaattttttttttttactttttgtcataaattttgttgtgactaagaataagattttttgtaatgtatataaattagtgatgtaattgtgcaagaattgttttaaataaagattcagcttttattaaaaaaaacatttacattcttaattattagtaattaaacaccttgattattgtcatcattattagcctaaatattagtgcaccttcattccaattctcagtataacctagctagtatgtattagtgttattgacctaaattattgttattatacataagattctctatcatactatttctacaccatcgattggggtccatggctacatgactagctagtataatatattattaatgacacatttttcatagttaaaaaacaattttaattaaaccaaagatatcattaccattgactttatttacaaactcttttaattattgtatattacctatcaaatagaggcttagagagtacttgttgtggggtttggttaaatgtgatatagatatatattatatatgtattatttaatataattctagtgataattaataatatttataaagaagaggtacatttttgggtcaaagactcaaagaaaaaaaagtgagtagatattgttcccgtttgtagcatagaaataatgggatgttgggtgagacattgagattttggtcctcccttttggagagctaccacattattatcaatgtattttaataaattatttaaattcgatatcaaattatagaagaattacctcatatactatttgtttttaatttttttctttttaaatttacggtttgagtttctaaagtggctgcagcgctagttgcaatagaggtttctatacgattttttgttgcaatttaggttgcagcgctagttgcaataagagtttctatatagaatttcataaaaatgcaaagaaaattgttttgaagtgtaaaaatgaaaaaaatccttaaattatattaataatagtttattattagaaattagtaatgctgatagcacacattgcgaattattaataattttttatgatagttattaaattaaaatatataaattatctaatacttaattatagttaacaatatataatataagaaaatttcgtagtataaccacttaaaggttaaagaagtgttttggtaacccctgtttgttttgttatttttaagagatttttagtttaatatgtttttatgattgtgtatattgtattttttttaagattatttgtaaa

SEQ ID NO: 323340 - DNA, 892 bp, Cannabis indica
ccatatttttatgatacaacacgacatgatccatattttaaaaaattaaaaaaaatatatggattgatttaacttggcacacgcgtacttaaaaaaatagtggtgaaaagtatatctaaaaaaaaaaaaacttaaaatatttaagtgttataaactgaaaaacttaaatatttttgacgtcaattaataattcaattatatcatatattataatgatttaataaattgaaaatatacaaaaccaaacaggtaaatatccaacaaacaagaactgaaaaatttatatttctaataataatatgttcaagaagaaaagtattatgatatattgaaattattcatttttctttttttgacttttctataaaatgttgtaatatcccatcatataatttatatatcatgttcatgtgtgtgttgaataataagaccacaaaagtcactgaactcacatcacatcgtcgattaatttatttattttattggattaggttaatttataggaagttttagatgcatgttttctaataatatatttttcatagtatcaaaattgtacatatttataatgtaattaaggattaacacaaagtcaacatggtcactgttcatcgtactattgcaacagtatgcagttacggtcacagttgctctgatctttaggaatttattgtttcaactttaattttttaattaaaaaaagaaaaatgagtcacaacgcctgtggaggcaatcaatattatctagttattcatgtacatgagctaccctacccatattatcaacttttttttttttaattaactaataatatagacacatatatttattagggagtatgatttattccggtgatatattttattggaatatattccgtgttacattagat

SEQ ID NO: 323341 - DNA, 1605 bp, Cannabis indica
tgtaaatttttgaaaaattccaattaatttacagtattgaaaataatattcttgatatttcagtttaccacgtgtgttcaaaaaaattcgaacctatttttcgaatttgtaaactgttgacctccaattgagccaatcgacagcggagtcgtttttatgatcgaaattatcacatgtaaacagtgagaacaagtaaataaaaaggacacaataattttatagaggttcgacccccttagttagcgggaaacgacttactccccttttagttgtgttgatatgagagataataccactcagatcacaagtgttgtgagttctagagtagctctctatgtcttataatagtgagaatgtgaggccgttcttgaataaatgagattagggagacttagtctctaatacacggctaatggcgtgtagaagagagtgagagctaggttagagatggtggaacaaaatcacttcaagtctcactccttgagttgatattgttttgggtgtttccatccattccctgacctagccggttaaagatgggccttagaacgactttctcccaaatgttttggagaggaatctcactctgttggtcggccaatggttggccaagtgggggtgttatcgagcaagagataccaggccgagcccccatgccattgggttctagagtctgcctgctcccgccactagatctgtgtagtaggacttgtctgccttcagccatgggaaattccatttttgttcctgaagaactttgttagattgtttgcttgtagaccttgcccgatctgttgactagtctccctctttaatcatatcctaacctctcccaacaattatgtcattgaactgccttatcaggtcactaactttcctgttacagcagtccaactttgcctgatgagattagaggatatactcctggtcatctatccatctcagaaatttacgtctctaatgtgcgaacgcattgcaaccaacatcacgtagttcttcagtttggctgacttggcatataacctctctaagtctggcgaattcaaattcttctcccaggtccacataagtctcaccaattgctagttcacaattcctgacccagtttccccagcataataccgggggccagagttagttgtggtgcacgggggttgctccacattgacaaaaccctctgtacgaggtgccaatgggagatctaccctgggcgatagaggctagtaattggaatcagtcgggttagcatggtcgactagaccagttgtatcggtcgagtttgttgggcctgctgggttggtaggattggcaggattggctacatttgttgggattgtagaaactccaatggtggctagaacacaaataatcaggattagcaatcatggggtcttgaggaagacccgatgaggtagaagttgtagtcggagtctctttgttacagccacaatgattgatcagattgatagacaacactctaagtgaaaacactaaattcttgacctcaaatttggccaaccgatagcgaaatcgtattcatgattaaaattaccacgtgtaaacaatgagaacaagtaaataaaaaagacacaataattttataga

SEQ ID NO: 323342 - DNA, 1088 bp, Cannabis indica
agatcctggtaaaataatatccaacagtactttctttgagtgtcacaactcaaacatatcacttacaagatggttgcaacacaattctcgagtgttgaaagaggatctcgaataactggctagcagatcgggggcacgccagtcactaaagctggtgatgggactacaccaacatctcatatgccaggtgggggcctcaaaaccagctccacaactcgtccccaaggctgacaactggttctagtactgaaaccatcaagcatgttccacttagggaaccacatgtggaactagaagaccccgaggaggtcgatcttctggttgaacaacttagccaaactgtggttgacttacaacaacaactccgagactccctcgacaagcaacatgagcagttccaaaactggtttgtggagaactggcaaaacatcgagagtcaacgagttgagcaagaacaacagatagctaacttgtctcaatagatagagaatcttatcactctggtcgcaggactacctcctttaggggtctttttgagttggttgaagagattccccgtcggccagatggccacgtgagaacaagtgccaaggaaaaacccttactacacgaaacactactaccacacctggtacctgtgttggttttatggtactaaattaggtatgcagcggaagagttgatactgatttttattgtaccatatgcccaagatcatgatatgtatatacattaaactaaaagtaaaaatatgaaaaagaacatttacatcttaaagcctatcaatgtatccttaattctttttgtatgttctatcttcagaacggtggtgacaaaacatacatcttaatcttccagaccttccaccacacacaaggactagtgcgggctagtaggataatagtgtatataaagttctcgattaaatttcaacacatgagcaagaactatttctttagtgatggagagaaaaaggtttaatggttagggtaaatagcggcaaaactcccaaaactttcattttggtttcacttaacccccaaaacccaaatttgggcggtgaaacccccaatactcgtattctgtta

SEQ ID NO: 323343 - DNA, 966 bp, Cannabis indica
atgagctatttcattctattcacattagcacaatgagcaaaagctataccacactaaaagaaatgtcaattaatgtcaaagcaatttggacactgaaaaagtgagtaataataataatacaaaacgtagcacatattatgatattaacaaaaaattgaatcaaatgaggttttttcattgtgtcggaaatgcacaagtactctggcttttcacgtgatcaacttaagatttgttctttgctaaaagacacactaagatctattcctacattttcattatattttggctaaacgatgaagaaacaaaaccaaaaagtagcaagcaaacaaataacaatgttttctaagaaaaaaaaattatttcataattatacaaagacaaaattttatatttttaatgaatttgctgttttttatttttttttgtaaggagttttttttaaacggagtgttgttttttattgtttttttgttgttgctacataaagtagtgtgaattttttgttttcaaatataatgttgtttttctgtagtttcaaaacaatgttgttgcttgagaaaatattaaaacaaatctgtaaaaaatattaaaaaaaaatctatttttaaatttctattaataagaggaaacggttttattcactaatggatattgtaattccaatgacgatttatttttctctttagtttttacaccatatattgaagtattaaattttgtttcttttatattgtgggacaaatttttttaaaaaaatactgtaatgttttttcaaaaatattgtgtaagttttagggtttagggtttatactgtgtactgtgttaagtttttatgtttattctacggttgttttctagttgttttactactgttgttaattgttctgttttgttttcttatcgttattttataaaaatatagtatttttgtaataaaattcgtatagcagtaaaattataaacttt

SEQ ID NO: 323344 - DNA, 1069 bp, Cannabis indica
ttagggaacaaaacccaacatttgggtggtttgtttttaaattcaggggttaggttgttatgatttaggttgtttagagctgagtttgttgttaattgaggggtgtgggtgaagttgaagttttagagctcaagctttgagctctaatggtgatttcatattttgagttgtttgttgtgttttaatgcttgaattgagtttgttggaacataaacaggtattctagagagtattgagaagttcgggtgtattttgagttgtgggaaacattttcgagtttcccagtgttgaaacggtcaactggttggtccccaaggaaccagacttctgattgggaaccggtttgccggttggcccatttttcataaccctagttttccccatttttgtgttatttgggggtattaccatcttattcatcgatagggttattcttagttttaactttaagtccccaagaagtgttttagtgtgtctctcaccagagttacaaatgatgtgatttagggtcctgtgaaatgtcgagctgcaattccacttagattgaccagcagacttgagcacggaaacgaagtaagatagcataaagtatatatatgtgaatgaatgtatgttattatcaatttacactactaacactgttaaatgtatagttataagggtgttggtacagtgtaggatttaagggaagttacagtgataccaacacgaataccaaggggtacgtcgtgcatttggtacaatacttagtaactgccgaaagtacaataattgccctaccaacacaagtacggagttggtactttagtgcatatggtacaatggtcgtacttccattgagaacgttcttaaccacttggtgagcttggtaattgggctcaggacaacttaagcataaagctggtatagcattgcttatatatatgttatgcatatcttactgggtttgccgtctcatcagtttgctaccttgtgtaggtaaaggtaaggctaagctataggagtagtgagttagagcttggcaaggtgtaacgccctaaataattaggcacgctacccaaaatactta

SEQ ID NO: 323345 - DNA, 1079 bp, Cannabis indica
tctctctacaaaacccacactccaactttttcctgccttctcctttttcccactcttcactaaaaatccattttcactaactatgaactactcccattcacaaccatccaacaacgtcgtttccatccctttcttccctcctccaccaccaaaacgacaccatatcaccacccccaatcccaaaaagaaaagatccaaatcagcccgaacagaatgcggcggcccaggcccagaccaggcccaaagcacaagtagcagaagagcccagaatacgacgtcgcttcgtgtcttcttttgctggccaatggtttgcccaaaacaacaacgaacggtcacgatcatctttggatgtcttcatttgagtgtttcgctgtaacagaagtaaccgacgtcgttttagaacagccattaatgtcgttgagctctggtgttgttgatttgaatttgcctggttcttcttcttcatcagaatatgatcattattattattctacttatacatatcatatacattaatattattattaattaatacaatttataatttgagtttgatagttttagattttcaaatatttaattacgactttatttatttatttttcacttgtgattttgttagaagtatactagtacatataggtgaagaggattagtggtgcccaccaccttctaaatgtatcactttgtgattggttaacgatattctctaaaagttattactaaaaaaaatgatactaagtaacattaataccttttagtatttctcatacgtgaaataagactagaaaatgatcaagaagagtgagatagtcaatcaactaattatttttatttaagattgattccattttaagacttgtcgcataaatgtgtgtcatctttgtgtatgatttatatgtgcacaggtgttcgtggtgcgggtggtacggtttttaactattttttcaaactaacccgcacatgcagtttttcaaattttccaaaccgcacccgcaccacgaaattaaaaacccacaaaaaccgcaccgcaaaaaatagtgcggtgcggtgcggtttttgtggtttatgcagtttgg

SEQ ID NO: 323346 - DNA, 1440 bp, Cannabis indica
aaataaaataaattatagttattttatgtctccaacaacacaattcaaaaaataaaataacaaataaaaaatttagaggaaaaaaaaattgtataaatatatataaaaaatatttaattttattttaaattgtgtgtagaaaaaaataaataagaatagaatatgcattttatctattaaattttacaatataattgtattatatgtattagacttttaaattactattttctttatattaaagtattatttgtatatataatttttttaattttgttataagtatgtgtagattggattggatcggttacttttacatgtcaatcaacatctaatccgcacaagtgcggattttgaattatccaatccgcacaagtgcggatatccgcactttgcggattggattggattggatcgtacggattggattggatcagttattttatgaacactcctaatcatatcatttatgagtggaaaacaaacatgcgatagaattgcatgagcatttttctatttgacctacaatatggaacgttcactatatagtatttattggaataaagtaatagaataaatgaaaaatgatcagaatcaatatttgtaatatgttgtttactaaaactgcttggaaataaaatgatggtaattgaaatatttaaattgactaaattattttttttgagttaaattatagtatatgagttattttgtaaaacatattttaaaagataaaattgtcattattaatataatattaaaaaataaataaaattcattaatgacattctttaaaaaattagttaagggaattgacttttttactatttattctcattgcttattagtaaacatgtcagtagatgaagtagagggtttaaagaatggattgaccctaaaagttctcatttaaggtttattggatttattaaatacttgttagagggagttacttatgttctaactcataacttcttgtcacaaacattaccattaggcggggcccaaaatttaaaaagtaataagacataataataaaaatgtaaattttttttaaagaaaaagtacatgtttttcaagtaattaaaaggaaaataatagaagattactattagaagttattttaaaattaaaataatttatataatttttaattcattcatatttttttggtaatgatattcaaatacttttgaaagtattttttaggaatttttttacttttagattttaaaataattttttctatggaaattcacataaaaactctcataacaactaatatagcaacttaaatcgcaattaaaatttatagaataactcacgtataaactacgggaaaaactaccggagcaactcaaactgtaaatttgaaaaaaaaaattatattctctttttttttgagtttttatttatatatttcaaagttttttttttatt

SEQ ID NO: 323347 - DNA, 673 bp, Cannabis indica
gccatataattttacagattaaccataaacttatttttttgtaaggagattaacaataaactttgattctcaattcaaatgttatctttcaattctctttttataaattcaaaattctcattccataaactttctactaatattttttaatcaataaaacgaaaagacaaactttaattcccgtatgaaaagtcaaactctcaatctcaataattaatagaaacaacatcaaatttcaagctctcaaaatctataaaaataaataaataaaaatagatctcatagacacaaactcgacagtggaaccccaataaaacactaaaactcaaatattaaaaatacacacgataaaattcgaacccaaaacttaacacacacatcaaaataaaaattaaactataaatgaatgaaactcaaactcaaatctgtcttttttttattctttggcttggtctccattcaagacaattaaattgggtaccaataaaattataaaactattaagtttaaaaatttgaggatttatgctactatttttgaattttggtatttatgagcaacaaatttaatattttagatatttatgtcacagattttttaattaaaattttaatataattttactaagtaattattagtaattaaaatacataatttattttatatataattt

SEQ ID NO: 323348 - DNA, 537 bp, Cannabis indica
aaaaaaatatcaacttttatttcaataaggtcccaacaaattttatatttcccaacacccaacaaaactcatggccacttaagatctccctccattagaataatttttccatgaacttagttgttcctcacatgccaaatttaccaagaaatagtcataagaagtttcaaatcattagttcttaacacaataaatagtttcttgaaaaaagattgaacatcaaaatccaagcacccttttatttggtcccaaatttcatttcttttctaagtatccacatagttatatgtatgaaagatgccctcttccacctcatagttatatgtatcacaacaagtattcacatttaagtccctacaacacaaaacattgttagtaggcagccacacgaagtttaatttttggggaactctcattttctaaaggatttttcagtactatagggcccgtttggtacgcaggattggactggattggactgaaaaggattgaactggactggacaagattggattatgctgaaagtaatcctgtgtt

SEQ ID NO: 323349 - DNA, 588 bp, Cannabis indica
tttttctacatttgttgattttgagaatgttaaggaagcatgaccctgcctatcgaatttcaatatttgggtcataatgttaattttgcacattaagtataatctgaatatttagtataatgttaattttgattctgctacatattctttcacctttgaatatattcttcatatttagagagtggattattaagtagacttcttataatattggtataatttaatataataatattagtttactttgaattaagaaagctatctaatttttgaattggtgcccaatatcatgtaagatattattttatttttaatttaagatgtctaacactaaaataaattataatacagataattcgttgtcattttatgtagtgttaatgttgatcactttatgctcaattataactagggatacacgggccacatcctctaatggggtgggaatttcctatttaaataggaaacgaggcgaagacacggatgagacttcccgttctgataagaattcgtttaatattttattttataatttatgttggtattttttagtatattagtattttttttatgaattataagttgtgt

SEQ ID NO: 323350 - DNA, 1871 bp, Cannabis indica
tgaatttataaatcaattagacaagtaaatgataacatgaaccaaatgacacacaaatgagtgataaatacttctgtttctttattgatatttaaaacaatagggattacattaaaatggagttttatttagggcataaaatccaacatgtgtgacagcatccaattgtgggatcaaactgaaaaaggtaaaaatgaaaattttgccaaggacaatgatcctattttcactgcacacactaatgacttacaagtgtgtaccaatttgtaagtatcttctactaaaattgaaaaaaaaaatatcttggtttatattttatgtaactagtctatttttttcaacatctggtaaatatcattattatttgatacactaaattattatcatctttgaaagaaaaacatgattttttgtcactttgataaaacaaagaaagatgcatgctttagaataacttaatttttgtataaaatatttgtttctttgtatttttttttaattttgaaattcatatatctatgtaaaggggagggggagtcgtgtgacttggcttatgggataagaaaaaaatttcatttatctttcttttggtaagtatcaacatgtacttaattgataaatttttgatgggtttcctcttaaaattaattttttattaattgtattttgttagattgttgaccttaatttttttccagcacttaattcaaatctttaaaatatcttgattaattgcactttgtttcctattatatttttcttttctttttcgtgtgtatttaattttaaaaaataattgaagaatcttttttaaaaaaggagcgattttcctttgcttggtgggaagtgaattggtggtaatttagttaacaaaattttaattaatgtgtatttttattgtgcaattaaaaaaaaattcttgtgttaatttcgtggtgttgattgatcttttctttctaggaatcttgtatttacagttgatctttttgtttaggaaacttgtcatataagagaatgaattctctttatagatagttgcataattttgaaaaaactgacttttcctttttctagttgttaatttcgatttttctatgtatataacacatcaaataatttttatttggcaggcattgaagtccaagtcgctttcttggaaagtttctatttttggcatgatctactgcagcagaacacgaacgtgatgccgcaaatcaaggatttttttaggaaagatttgtacagttgtgtaaacgtgtttgtggttgtctctagcatttctatgttctataaataggacctagagagcaaccaaacatttctcacctcttctagtttcattttttatatttttatctttatgaggagagagttttttttcgtgaaagcctagagtgttcagctaggttttagtctttgtttattgttcttatactgttcttagaataggttgaagacttgtcaaagccttaccttgggaggaagtaagtactcacacatcaaaagacgaaggaattttgctatttggttgtgttcaaaaatcagattggcaaagtaaattacaaaggattgcagcaaagctttagaggttgtctaaacttgtttaagtcatttgtatttgtaagtgtttgagactttactaattgatttcattctctatgtgtagtcccgtggactaagagtgtttgaaagaatactaataccacgtataattcaattgtgtgaagttttgattttctgcactgttatttctgttctgttactgcaaatttgtgatgggctatttacaaaaataagggaaaataaagataagttttgatatatatggcataaaaacttaattacactaaatatggcatttttttaaaaaa

SEQ ID NO: 323351 - DNA, 1112 bp, Cannabis indica
tgtgtctctcttatttatacttaatttataatacattctcgccaatctagcgagtgagtgtgaccagataactgtatctagatttctacgtcaatatttcaccatttaaaatatatgttttatgtttattgtattttaaataattttcatttatttttttaataatttattgaattttttaaataataaatcaaaattaaattatttgtactaattagagattgccacattgcatcaacatgacacttaacaatatggtatctatggctgccaaatagttgtaacggaagccactttcaccgctaaacatagagttatatatttaagtgaaataaactaaaaaactcgagtatttcattgctaattattcaattagtattgacgctataaaaactaaggtggcgtttggttggaggtaatgaaataaaatagaatggaaaggaaacaatttttattctattcctttgtttggttgtattttaaagtattgaaatggcattccaatagaatgccctttccaccattttagtggaatgactattccattttaaaatgaaaggaaagaccatttcaatgtaacatgagaaaatatttaatgatttttttatcaatttttttatgcattttaaattttattccatttcattcctattcctattcctatattttcattccacccaaccaaaccccacctaaatggcaattaagtacatttcccctagtatatatgacacgtttgagagctaacaaataagggaaaacgaaagaagctccatgtgcttgtggaatatgtgatacaacattttgatttgcatgcacatgtagatgtgatgcatattgatttgcagtagcacaattagcaaattaaaactagttaagcgaatgtaatcttacaaattttgaaaatattggaagcctaattgcatgtgctaactatgcatactaataaaatatggttcatgattttcataatagtactatatatgatcatgattttgctccctttctggtttaaaaataatacatattgtttgttaggattttatgctttaattaaatttattttaatataattttatttactaattaataaaagattaaaaattatttta

SEQ ID NO: 323352 - DNA, 1320 bp, Cannabis indica
ctgatagtgagacaaaattttctccatctaaatccagcctggatagttccatgaagtagatcacaaaattagagctgtatatacttgagttgtttgagagagcaataataaattgtgaagcagatattctcaaaaaaaaaataataataataaaacaagtcaccaagaaaaagagaaactatcaaatgatggaatttgtaaccacacaaaattcacataataagaataaaactttgattgtaacataagaattcaacaaagataagagcaaactaaagaaaaccaactcattccaatgtaaaatcaaaataaacatacctgcaaaacgttgttatagtagcaagtgttgccaatattctccagggcaaagtctaacaatggaaaatataaaataacatatacagagagaaagagattcagcttactgaaatgatggctgtgtaaaattcaatcccgatacttaacttcagcttacccaaatgatgatgtactctgaaacctagagcgagtggaaggctgtgaagcaggaggcttgagtttaaatgcgtatcaatttctagaggaaacgtagaggggacgaccgtttcttaaaagcatgtgaagattagaaaggcagttagaggaaatcacaaattccaattcaatgtggaaatacaatacaagtataatcctagcaagtagcaagtatcaagtagcaagcagctaaaaaggaaggggcttcattcggcttcttatgttggttctctgtactgacgagagatagagaaagaaaggctgctttgacagagacaaacaaagctgatggctggaaatggtccactgggcttaaacctctaaaatttataatttattctttcttaataaattataaatttttttaaaaaaattatattatacttcgtgtattatgagtatagcactaatatattatccaatccatcaacaatatctacacatatactatcaacaatatcagaaattctctaacatttgaatggaaacagcaattgaatatcaaaacaagacgacgagttaataaagtaaaaaagagaacatagatggccaaaatagtaagccatcatttgatttaaagagcaatgtcccattccatgtcatagtaagctctgccatacacaaatgaaatgagatgatgaaatcatagttgtaaatgaataaactgtgtattatgcactctaccaagtgccagaaatatttcaatttgtaattaattacttgttcacatgtctaagttttccacaatactgaacatgctcatcataattcactacccaaaagatatgcaaggcaatgcgccactac

SEQ ID NO: 323353 - DNA, 775 bp, Cannabis indica
aaggtgcagctatgatccccgggatcgattatgatcggattaacaatattcctactttatgtggcacttcttgtcattacaaagtctatccttccaccgattgctctaagtaagtttgtacaatctgttaagtttagttgataaaataaaattaattggtaatgagtgtagcgagtgactataattttataccgaacactttattactcgttacttttttgtaacattttaaactaccacaaaatagtattaactcttttatgtttgtgaattgatcatttgcagggtggtttgatgaattagcttgcattaatatcatatctgggagatagagttatcagctcaaatctagtctttttatgaataagaaatcagaaagttgtagaattattgtacatgaagtgcaatgataatttgtggtttgaattccaaataattaatactaaagttgttatcatctattgtctcctatcctatcccacttagctatggtattatcagctttgccattttggtttttataggtaggtacttgatcctattcctacatagtacatacataaatgaaataattaataataagaaaaacatgcatgaaataataagcagaaattggacaagtttctgttaattcatttatgactagtaaatgaagcatgaattaattaatctggaccttgattatgttgccgagcatcttcagacaacacttatacttatcaaaagttacacatcatttaagtatatattttttttattttttctttttttattt

SEQ ID NO: 323354 - DNA, 759 bp, Cannabis indica
agcctcagattatcagcctatggaagtgaacccactcctgatgcacaactatattgatctattgtaggagctcttcaatacctcctcatcacaagacctgaaatatctttcagtgttaacaaagtctgtcaattcatgaaggatcctcagttaagccactggttagccatgaagaggatactaagatatcttagtggtactatcaacaatgggctgcatctcaaaaagtcctctttacaagaagttattgcgttttgtgatgccgattgggcaactgatattgatgatcgtcgttcaacttctggtttcactatcgtttatggagataatcttgttgcttggcaatgcaaaaagcaacacaccatatcacgatcgggcaccgaagctgagtttagaagtcttgccagtacagtcgctgaactcacttggattcatttgttatttactgaactgcgaatcaagactttacatcctcctgtggtatggtgtgataatctcagcaccgttcttctcacagcaaacccggttcttcatgcatgaaccaagcacattgagcttgatctttacattgtgcgtgagaagatccttcaacaattggttcaagtaaagcatgtaccagctcaagaccaacttgctgatggtctaacaaaggcaatctctacaaaccggttctgttcttttcgttccaagctcacaattgaagatatctcagactctgatgatacttccaattgtaaacttgaggggccgtgttagggg

SEQ ID NO: 323355 - DNA, 998 bp, Cannabis indica
tgagacagaggtggtggttggagttttttaaggattatgattatgaaatcctttatcatcccgagaaggccaatgaagtggcaaatgccctaagcaggaagggtcccaggcaagtatctaacttagttaagatttcacctcatatgggagatgacatgatcagggcaggtattgagtttgttgtgggcaaacttaataatctgacgttgcaatcagatttactagacagaattagagctgcccagttaacaaattcagagttagtgaaagtctgagaagaggttctagctagtcaagctaaggactttacagtatcagataatgtattgttactttataaaactcgagtttgtgttccgagtagcgtggaacggagaaaagaaattatcaagaaagctcataccactctctattcactacatcctggcactatcaaaatgtatctagacttaaaacctttttattggtggtgtgggatgaagaatgacgtggtggaatacgtgtctcggtgcttgacttgccaaaagattaaggctaaataccaaagacctgcagggttgttgcagcctttgactcatcttgagtggaaatgggaggatgtcaccatggattttgtagttggattacctagaaccacaggaatgtctgattccatatgggttgttgtggatcaatttaccaagtccgcacattttctaccagtgaaaataacctttacagtggatcaagtatgcagacttatatgtgaaggaaatagtaaggttacatggggctcccaagttcattatatcagatagagattcgaagttcatttaaaagttttaggaaagtctccaacgagccatgggtaccaagctaaagttcagtacatctttccatccccaaacaaatggtcagtccgagaggaaaattcagatactaaaagatatgctgtgagcctgtgtattggattttaaaggctctttgagtaagtatttaccactgatagagttttcata

SEQ ID NO: 323356 - DNA, 800 bp, Cannabis indica
atctatgattagcactcccacttaattgaactaccatgtccttaatctgtatgtcatgagaagatccaatcgatcgaatttaacgaacgaattgaagaacataaataatacaattaagtttgaacctaacatatcaggattaagatttatagacctaagatcaaccagtgatattgacttagaaagatataacggtaagtttatgatatcttatccaattttaatatcgatccaatccgatgtatactcaataaaatgaaccacacaattaatattactcaactattgtaaagagtaagagatttccttggcctcaatttcttggacaaaaacttccccttaattggtttagaaattgcagcaataacctaaccattagaattgcgaacaatacctccaatacccattattttaccatcattatctaaagcagcatccacattaagtttcagcataccagtgggtggaggctgccatgtttgagtgttgacatttaaattttgaggaggcgtagtagacgagttgttgttcatgcaaaattcacgaaggtatgcaagagattttttcataaggacatgttgaggaagagttcgagagccatgaaaattattattgcggttgtaccaaatgaaccacatgagagagaggatagtctccatttgatcatcatcaaaatgagagaataatgaatggataaagtcactgctagttgaggactgataactctatggtatagagttatttcttatgttcttaaactgaaattattgtgagaagagtagtgaaaatgtgtttgtttg

SEQ ID NO: 323357 - DNA, 805 bp, Cannabis indica
ttttagcttaaaaaaatagaaagtatcattggagatacttttactatttataagctaaaacattatacaatttttttttatcttttacttttgtcttttttataaaaaaaatattttactttataattattattatatgaaaagaaattgtttatccattgatatttaattaaaagtctaagtgatggccatacaacttctttatctaagcctaaagcatactttgctaggtagtgagtagttgtgttggcctctcctgccacatagctaatagtagcttgagggaaagaagataacaagctattaatatctgttacagaaccttgtaaatggatgttggtaatggtagattgtttaaggttgtctaccaaaaccttacaatcagtttcaatgtaatcaatgctaagagaattctcaatacaccacttaagagattgttgaaagagcttccatcagaagaggagaaaaaacccatgtccaaggaaatgacgcaacagtaagaatgactccattacagtctcggactataaatcctagacccattttgccagttttgaaatcttgtgcagcatcaatatttaatttcaaatggctagttggtgacggatctcaatgtgggatagaaggactagccagatgtgccaaggaggatgtgggggcctgagtatgatgctggtactgttgtatgtgttgggcttcgtgccataaataaaactctatttcaatgtaatcttttctattcaattatcattaaagaaacaaatttatttttcattacttatttagtgtgttattttgttcatgt

SEQ ID NO: 323358 - DNA, 2797 bp, Cannabis indica
atgtacaaattttatttttgaataatttatgaaatatatatataaacgtaaaaatggaattaacgtattaatgagctataacatgtcggccgacaaacttgttagacgagcattactattaggaaccagtagtgcttagcatcttctcgacatatcgctttgcgattggctagcgatactctttaaaaactattatattaaattatataaaatccaatacttaattagaccaataccgatattgacacaagcactactagtgccctttaacatttctctttcttccttttgtaatataaaattatagcgtaatctcctatacatgatttgccaaaaattttttttatatatattgtaattgaccctaggccttaaaaaattattttggtttttggactaccctattaggagaaatatttttagtgcatccaaaattttaaaaatatgtcatacaaatgtagaatattattattatgataaaaaattacaaattgatttatttgtaattgtaggtggtccttgatagctagtcacttgccaggaagaacagacaacgagataaagaactattggaattctcatttgagccgaaaaattcacacattcagaagatgtaatactactcatcatattcatcgtgatcaagctcctactactctcccaaatctggtggctataaccaaagtaaaccttccaaccccaaagcgaaagggtggtcgaactagtcgtttagccatgaagaagaacaaatcaactagtaataataagaacaacaacagtaataatatcatcaaaaacgacatcgtatcatcatcatcatcaacaacaacaacatcatcaacaactacagcaacatcatcatttcataatgagaaagttactgtcagtactgatcatattattaatcttgatgataagcagaaacgacaattatgtcgttgtcgtttagaaaaagaagaagaagaagaaggaagtggtggttgtggtgagacagtagtaatgatgctagggtcagtatctcctgttcctgctactgctactgctgcagctgggggctcatcaagttgtgatgaagacatgttgggtggtcatgatcaactgttgttgttgtgttgttctgagaaaaaaacgacagaaatttcatcagtggtgaactttaataataataataaggaaaatggtgacgaagtttcaggaccgtacgattatcatcatcataaagaagaggaagaagaagaagaagaagatgaagcatctgcatcagtagcagctgttgatgaagggatgttgttgtgctttgatgacataatagatagccacttgctaaatccaaatgaggttttgactttaagagaagatagccataatgaaggtggggcagctgatcagattgacaagactacttgtaataatactactattactactaatgatgattataacaataacttgatgatgttgagctgcaataataacggagattatgttattagtgatgatcatgatgatcagtactggatagacgacgtcgttggagttgacttttggagttgggagagttcgactactactgttattacccaagaacaagaacaagaacaagatcaagttcaagaacagaagaatatgtgggataatgagaaagagaaactgttgtctttgctatgggataatagtgataacagcagcagttgggagttacaagataaaagcaataataataataataataatgttcctaacaaatgtcaagagattacctctgataaagaaaatgctatggttgcatggcttctatcctgatcattcatgatatcatgcatcaaaatttagatattaattatgtattaatatatgtaataaaatggtctttccttaattaaaaaaattataaggagaagatcaattaataggtgagagtagaagcttgaagtcttgttctaatagcttagtttgcgaaggtaaataaataataataataaaagtaataaaagttttgtggtcatggattagcaatttggtcactcacataatatgtttgatttgaatgctcagagatgagcaaataaccttgtatatatttgtctgtaaatatgataaatgattaattctggtgtcaataatataacagtggaattaaatatggagttttatataatttaatttaataatttttaattaattgtaatcttaaaataacacatttagaatgtattatgtatatgaaattattcatatttctttttgagcattgctattaggcactagtggtgcctagcactttctcgacatgtcgcattgcgattggttagcgatactccctaaaagcgattatattaaattatatggaaccctatactaaattaaaccaatagcgatattgacacatagaaaaagtgctagacaccactggtaccctctagcatttctctttctttttttttatgtctgtgccatatataaatgttatttattaattacatcacggctgtattaaatacatgtgtgcccacacattaataatgtattgaatatacatggccattatgggagggccacaactcttctcactaacaagtaatttaaaagagttggcatatacatggaaaaatttattaattttagttaaattgtcagtataaatacttaatattttagattttatatacttaaatactttatttattttttagagtacaaaaaatcttaaattttacaatttctcttccaccgttactacctccgttaactcataaatatgaacacgtagagggtccaaatacattacatttattta

SEQ ID NO: 323359 - DNA, 1042 bp, Cannabis indica
agtaacctggtacttttactttttaatatgactgagtgtgttgttgtgactgtattttttaataaagaacactcatatgttaaaaaagtcacctattagtttatttttaggcttttatttttcttttgaacgtcacctgatacttttacttttgaataagactgagtatgttgagctgtgattgtattttttcatgaagaaccttcatatcttgaaaaagtcacctggtagttcaattttaggcttttattttacttttgaaagtaacctgatactttcactattgaataaggttgagtgtattgagttgtgattgcatttattaatgaagaacacctcatatcttgaaaaagtcacttagtagttcaattgtatgcatttattgtgcttctaaaaaagtaacatggtaccttcacttttaaataaggctgagtgtgttgagttgtgattgtaatttttaatgaagaaccattatatttgaaaagtcaactggtagttaaattttaggcttttcttatggttctgaaagtaacttggtactttcatttttaaataaagctgagtatatagagttgtggctgtattttttaatgaagaacctttatattttgaaaaagtcacctagtagttcaattttaggattttattgtgcttctgaaagtaactaggtactttcactttagataaggttgagtgtggtattgtgacaccaatttttaacaatgaaaccctgctattttttttacttgaagtaacttgttaaataaacttatttgctttttgcttcaggaagcaacttgggacctgtaattttcttgaagaatgggtttcattaaagcattaattcattatggaggagagttgaatgaaaataacaacaactcaaattacaaagtggttggtgtacatgttctagataactgttcactacataatcttgagaatttgaataaaaaaaaaagtatcctgctatgtgtgttatgctttataaagtagttgttgggttttatgccctaaataaaatcaatataagaaatttgaa

SEQ ID NO: 323360 - DNA, 1143 bp, Cannabis indica
gatagcttgtgaagtaaggttctttaaattgtatgtagaaaaataggcttagatcatcatttatcttcataagttggtatccttctttcacttggcatttcaattgcagttgagtattttcttggttgcattctagcacccgttttagcttgtctactagttcttcatgtttccaatctgttgaaatgtattggccagtagcttcgtaatttacattattcattgtttgatcaaactttccattgcaaaatatgagaaacagaatggcatcttttcctgacaatttgaaaatttaagcattgtaagtcaactatgggataattaaaccttaaaataactaataatgcacatatgtaatacaaacaaaacttctcgtatgatgttattagtgaaccttatcaacctcttctttgagcgtgttttgtctctcgagattcagtggttgtcatttttgacattttgtaggatacggtcaatattgaggtgatggcaaatcacatttgagtttatcccgagcatgtctaaatggctccaagtgttgatcttagtttgccattagaaaagtgattaattactattttagttcttctcccaaacttttcccattataaaaacacttgattggattgttcagatctaaaatcacctctttcaactcttcaatcagcttgagttggttattatcatcacagatcctaggatccaagtcttttgtttccttctcgatttcttcagttagaattaccatcagctgatggctggctcctcttctattaagttccaccttgtagcactctcgggctaatagctagtcacctctaattgtccctactctagaatgtgtaggaaattttaaggacaaatgctttattgagcttattgcccccaattcaattaaagttgggtgacccatcaacacattataaacagaggggatgtctacactaaaaactcttgtatttgggtcgcagacagcggtggttcctgcatagttaagggaagttcaattatgcctaggcttgcaacactcttgcttgtgaacccacatcaattaaccatgcaaggtcttagttttgcctcttctaatcccatctttttcaatgtttccttataaaggatgttgatagagcttccattatctac

SEQ ID NO: 323361 - DNA, 616 bp, Cannabis indica
atagacctaatccaccttttggagatgattaattctccaccagccagtatggttccaaatcctgtatcataactatcatgtggtctacccaacttactaaagattctggctgccacataagaatgaatggccccagagttgaataacacagagaagtaagtgttgttgaccgagagctgacctattaccactgaggggctagcttgtacatcagcctgagttaacgcgaaaacccttgctgaactgggtttcattgcaaccttctgttcttccctcttgagttaggggaaatccctcttgtagtgttctggcacaccacactagaagcaccgttgccctttacactctctcaaatgatgctttttacaatgtgggcattctgggtaagtgtatcgggtttcagagctaccctcacgattgcctctaccctggttctcccggaacctcttgttctaacttgagccactggatacaataggtgcctttcttttctgatcagtggtcgagccactacctcccctattgaatcctaatgaaggaggagtaggagccccaccaacaacctgggtccctcgagacttctgggtgcactctactactgttgggttttatgccc

SEQ ID NO: 323362 - DNA, 981 bp, Cannabis indica
acactttacttaacattcaatcaaactataaactatctttatctcctattttaagtatgtgtagactatacaaactctctttacaacaaatttcacaaattaattgactaaactattaacaatttgtacatctttatactagacaacttcgtttctcatccgactctccttacacctgtgaatccaattcaagatcccgacatagttgtattaattgttttgaacaccaataccagcccaattttgtaacttttgcatgcattctgaccatagatacacaaagaatgaatattcatgtgtttcaatgccatagtcataaataggaaaaatttgagatgggagaagcaaatgttacaaaataacctatgaccaattaatatcagctgagcaaagaaaagtgtaccaaaacccaagctaaaattgatgaagacatgagcaatattgtcccttactcaagtgttgtgggatctctgatgtatttaatggtctgtgccagacttgatttcgcttttccaatgagtgttctaagcaagtacaacccaaggaaagaacattgaaaagctattaagtgggtgtttagatacttgaaaggaacaaataaacttgcattgaagctcactaaacaaacgaacaacacagtagtagaaaggctacaatgattcggattttgctggtgatagagatcacaaaaaatctacctgtggttgttttttcttaattggtgggaattgtatcagctagagagtccagctacaacttgttgttgccttatctacatcagaagctctttggataaaattcttaatgaaagaaaatgcatttactcaagaaaattctcactatttattctgatagccagagttgtatccatgcacagacactacaagggacggagccaccctcaaataaagggtggtcattgtaacgtccccgcttcaagcttccattgggtccttacacccacggaatgaatggctctta

SEQ ID NO: 323363 - DNA, 954 bp, Cannabis indica
taggatgttaaataacatacatagtagtaaatctagatcctggtaaaataatctccaacaattggccaaaagaggaagattcattataagtctttattccaagcccatctcatctaaatctaactctatgtgaatacctatataaataaagagaagagaattgaaatatttgagaaattttatgggtttccatcaatggtgaaaaaacgaagaaggtaggtcattaaagatcttgcaaacaaataggggtggaaaaatatttggttatgcaactaaaaaatcatcaagttaaacttcgatgtgtatctaaacttacttccccggaactttaaaatagcattttgatgaaaattgtaaggtctataattagttactagcagttgcctaagtccttctaaggatatgcctttgaggcagctaatgacatgttaaatgtcatcccatctacgtctgatcccaatataacctcagatgccctaatcatgaatttaagcaaggctagaattgataactaagatatgcatgtttagctattctaaaaatattaggggtggaccatcctgtggtcattaagacaagaaagtgtttgtttctacaaatactacttctataaatctgaaaacaaagtagccaagtagaggagatactatttgatttaaacccaaagtgttccatcatcttatactatataagatggtcccactgcctctcttgtattgacgtaagtcttcacaactgaagaagacaatatcactgatgttcctagatcaaaagtcacaataccttgtcgtagtgggagggtttctgggaacccaccctgttatgaattggatgacactagtgatgacgattcattgttagtttcaacattaaatggacagtccaagtaagaaactgtaacgcccgtacttttataaaaatattaattttgtttacaagcgttaaacgcggaaa

SEQ ID NO: 323364 - DNA, 1350 bp, Cannabis indica
tctcgcagcttctggctggtggctatggctaaaacgaggtctaaagttaaagggaagactagatctgtgggcaagaaatcgaagaagaagcaagttcaattgactcaggaagctatttcgactggggcttgatgtgaggaaaccggagtggaactgcttgaggtctcggaggaggaggaaactgcggacgacgagcctgccatggtcgatttgttccagcaacctctgtctcccagatcgtccctgaagcttttacagaggcaagaagctgttcagaaggactttattcatttcctacaggccaacaatcaatgtaatagtgatgtgaaacaaggtaaaaccccaaatccctcctgttttgagatctggtattgtgcgcaatttggataattcgtttaaatagtctgagaatgcaaacaaagtgaaaattactcttgatgatattgaggatgaaattaagttttggcaagcttccattgtttgttatgtgcttggtgcaaatcctccattacatgtactggatggatttgttaaaagggtttggaaggataagatagacagtgtgaagatgatatcttatggaattttcatcatcaggttcaactccatgacagatagagatcagattctggagggtggatacatatttttcaatcgaagacctatcatcatgaaggcatgggatcccaatgtgaacttcaagaaagaagatgtataaaaggttctgatatgggttcaacttgaagagttggatctaaaatattggggacaaatatcgttgttcaaaatagtcggtcaagtaggcgagccgattatggtggataatgttacaaaagagcgggaaaggttgaactatcctagaattcttattgaagttaggatagaccaacaatttcccgatatgttagagtttgagaatgagcatggaaacaatactcttgtaggaatcaagtatgaatggaagccaattgcttgtaataactgctttggcttgggacatttgacagatgattgcaagaagaatgctaaagtggaaaagaagtgggtagtgaaggaagatcataggccaaaacaagtaatagatgaggatggttttgttcaagtttcaagaggttccaaaggaaaagatcagtccaataagacagaggttctaagggtggaaaatacattccaagccttaaattctgatctggaacagcaagaagaagcagtaaaggagattgaagatgatggagaagagggcaatactggagggggggagatccctctctctccaatggataaactcttatgttggaatgtccgaggagccaacaatcaacaaaaaagagactaattaagcaatttatt

SEQ ID NO: 323365 - DNA, 783 bp, Cannabis indica
aaaaatttaacacgttgaaaatacgattcgaagagtctgttgcacgtgtgagttttttattttatgcgtgtgtgaaataaatgatttcaagtttgaattatatattgtaaattattcttaattttttaaaaatttgttgaatattttaaataactataacacacacgattatgaaaaaaaattagactaagaaattttttcggatgccaaaatagttacccgttcattcctttaagtgaggtacattgtaaaaataccttatatttttttgacaattttgaatgcatttacgaaataaaaaataaaagtgtatcaatgcattaagtttgtaataaagttttgataattaaataaatattgtatttagtgtaaaaaaatattaaataaatgtattgatatgctcatttttaaaatgcagcttagagtttctaattattaaatattaagttaggattaactttggtcaaaatgagactaatgatactactattttgtatgtattcgtacataaaagattctaaactctaatttgaggccatctaattgtgaataaattcaaagtcaatattacatgtaactctcacttgctttgcaccttcaataatctttttctaatgcaatttggcctccacttttttcaaccttattttattttattatttttaaatgaaaaagtggaagttgttgtaaaaagaagaaaaaaatgtaccatatgaaagtgtcacatgtttcgcagtataagcaggcaagttgaaatgaattttaagaaaaaaaaagaggtcc

SEQ ID NO: 323366 - DNA, 2560 bp, Cannabis indica
tgggtttggattttgtaagaagaatctttggtagatgatcaagaagattattgggtaagagtgagacttgaaacactttgagaaaactcaatagagaatctttctcagctgtattatacctcttcttgctcaattaataaagaggatttggtagtgttccagaaataggggttgagccatagatcacatcgatctatcatacttgaactaatacaaatcttggtgttgattttattattttactactttaattatttcttattttccatactctgttcatccctgttttcttcctaatattgttcgtaatttgttaatctcgtcattgttaattgtttgattgtttaaagtttagttcatttgattccgcacctttagttgtaatttttctacaaatatcctatttgatagcaactaaggatgagtgtttggaacagtttagaatttggaaaactcaggtggaaaaccaaacaaatcttaaaattaagaaccttaggaccaataatgggttggagtttattaattttaaatttgacaagttgtatcaagaatttagaatcattagacatagaatcgtagtgaagactccagagcaaaatggtgttgctgaaaggatgaacccaaccctgttaaacaaagttagatgtttactgctcagttctgaattagaaaaatctttttgggggaagctctagcaacttcaacctaccttataaatagaagctcaaaaagaatgatagacttacaaataccttatgaaaaatggtacaatagaacccccaacctaatgaatttaagaactttcgggtgacagcatatgtacatcaatctgatcgcaattccactgtaaactcaactaatttggagaatatatattcctcttcaatcgcggccgctagacaactcaactaacaattaccaggagaatattcctcttctatcgcggcccctaagtacactttctcagccttcttcccttgttaatttgtgcccctaaacaacaattatccgtcgagacaaagaaatacaccttccgtgcatcctccactgaaccaaatcttccgtacatggatatgatattgttgtacaagaaaggtgattgccagacgactgacatggtggtgagcagcagaggtggagctgacatgcttatttcagcgaggaaacggttgtgcattttcgcactagagtagctaaagaagatacttcgtacagcataagccagtcgaacacttaaaaaacaatcgtcgatttgatatcgtaaaaggcgaaatctttgaactaattattgaaaattgaactaagcataaatatcagaaaatgttctcttcccgcctaaagcgcagcgtttaatgcgaccctcatctctttccttccttgaattctcagaccgaaaaatatctaagtggcgttgcttcatatattggtgttacaagtatgcatggttttttttgatttatttaatttgacttttctaaaagaaaaaaaaattattgacattgttgtggattaaattaattcattatatatatataagtaaacatgatatatgtgaattttatcaatatagtatattgggatgatgattaagtgtatcaatatagtgtatttgttgagtgtatcaatatgaacgatgcctaagcattgatacaaatattaactattcactattattgatatatgtttaactattcactattatttattttagtacattttactaacatttccaattcaatttttattttttgaaactttactcaaaatattacttacgtaaaactaacatacgtgacttgtcacgtaacatctatctagtatataaaaaatatcagtaacacccttataaaaatataattaagataattttgatttcagaatgagtattcattttatataaacagcataaacttaagaaaaaaaaataataaattctgttaaattaatattttcccattactataaatttatttatttataagaagataataatcttacctacataaatatctgtcaatgaacatgtagctgagatatatgaagaccctttgaaggtaataatatgcttgaaaatattaatttaagcacctgcaaaaaaaaatgaaaaattcaagaataataagaaaaaagaaagtggagaaagttaattaaaatgagattaaagctcttatatatactttctttacatattcagtttctgatgatactttaacgagttgacgatggaagtagctctgagattaaattcacacaaaagaatacaccaataatatatatatatatatatttatatatatatataatatgtagaaaattgtgaaagaaacaattctaatatttattggtttgagaatatataaagagagatatctttaaaataatctgtggaggaaattaaatgcaagtggccagattaagactgatcgaccaagaagaatattaattattccacttttgtgacacattaatttgtttctatgcacctccatataggcggaccttagggtgttgagggagggctaaagctcatcctgagatttaaaaatatattaatatacaa

SEQ ID NO: 323367 - DNA, 1054 bp, Cannabis indica
gttgtcttttatcttttttctcaagagtaattgtttctagatatactaatcaagttgcccattaatctcaaatcttattttttttttgtcattgtaaacgattacccgttataataacagggaaagttttttttttttttaaaaaaaaaatccaataaaataactgtttttttttttttttttaaaaaaaagatatatttatgaacacgttgtaaaaatatttaatttcctgtaaaaatttcttcaatttcgttctagaatgcatgctcaaaagggctaattattgggctaggaatgtggtccaatatgaaatcaacccatatttagctttttagattttaggaaaacttaaaaaaaatactagaatttaagttaattttttcaaaaatactgtcatacagaattttttttcaaaaatactgtatttttataaaacagcagcgaaacacaaaacaagacaactaaaaataacagtagaataattaaaaaacagccgtagaacaatagtaaaaacttaaacacaatacacaatttagcaaaatggtggttttaactatttcatatattctttgggctaaatttagtacaaagtgttgttacaaaaaaaaatggtatatagtttcaaagtttcagatactaaacatggagggatttgttttgagttttctgctaaattatatcaatatttcctaaatacatttagcactacattatgtgtcttgtaatatattggatacctatatttattcaatcttcaatatttgtttattaaattatattttgttcaataagaaaagaaaagcctagtgaaattataatgtatgtgatattttatagtgttttggactggttggctttactcagcccaagaagataaggaaaggttatattttatttgttgttgattattttttgggattatttaagaaatacgaaaaaattataaaaatatagttgtacaaaattttaaatgtttttttacagctttttaagattatggtggcatttggtaacacttttttaataagttttctgtttttaaaagtagaaaagt

SEQ ID NO: 323368 - DNA, 757 bp, Cannabis indica
taataataataataatatagtttggaaatataaacttaaaattataataatttgattttttttttgccaaatttagggtttagaaaataattttaaaatatgatctaaattaatttgccctattttttgttttaatttattattttttaaaattttatattattttttatttatataaatatttttaaaaataactttaataataaaatttcaagtatatttagaagttgatgataatttagattttttaaaaaatagtttgataagattttgtcatgggatgggatggaatatatatgaaatgaaatggaaataaattgattttttttttttttaaataagttgaagtatttaagtgattttttactaaaatggtaaaaagactgttccactgaaaaataactagaaagaagaagaaaattctagtggatatttaaataataattaattttttgtttgattttttttttcactcataataacttttttattgtcattttccctataatgtttttaatttttattgaaaggtctatagtttgaataatggtgtcatgaaatttttcttatcaagattaaaaattactcaatattccttagaacagaatacgtaggccggccgattgaagatgataaggggattagctaaatcttctcgaaaaacttgggataattgcttaatttattattccgatgttataataagaaaaaaaaaaaagttaattacaactttggatccgacttatgattatcaact

SEQ ID NO: 323369 - DNA, 539 bp, Cannabis indica
atccccacatttcatttaaatcatatgttagataatactagataaccgcttaactgcttcttattcttatcctttttcgatggtcaatcctgatttggccaaaggtatctcactaaacccgagttaatttccttgtttatcttgatgtagaaaaaatactaagtgttggaagataattcacctcgtcatagctcttcatttgtattaatgttgcgaggtgactgtctagctaaatatataatccgaggctgcattttgcatgcactcattctattctaaaataataaattatcttttttggttgtgtactccgaggtagatgcgtgtctcgtcaatatgggtttaatagtcttttatctttgtctcacttaaggctatatagttagcgagttatgaatattttctattaacccttttattaacaagttattcttatcttgcatttaatgacataattatatcaggtggttcatattccactgcaagtcacgtgtcacctcctgaagtgtagctgaattttgggtataacaattgtccct

SEQ ID NO: 323370 - DNA, 1671 bp, Cannabis indica
aaattacaaaaatacccttaactaataaatgacgtcttaaatgcaataattgtcaaataatttcatataattatttatattataatgtaattactcaattacaattaatttatttaattacagttgctaatccatttattaattccaggatattacaagtgtagagaagcttttcaagaattaaagaagcaactaccacaatctcctatcttatcaaaacccttggacggagaaggacagtgaatataccttgcagtaactaaatttgcagaagtgttgtgttgatcagaaaagagcacaatacgtaacatctggtctactatgtcagtaaaaggctaatagatgctaaattttggtacactattataacaaatattttctaaaataactatattttagtaatgcatcacttaattttacatacatgctttattcatcttatgttttatagttgcaacgaattgtttataaaaaagaaggaaaaatatttgcaccaaagaagctataagtttcatctttggtgtgtatagtgtatggtatctattatcttaaattttatccatctgacatggtatgtcaacgtaaatcaagactgacgacacgtgaaacacaaccttgtcaatagcaggacaaagcctccttacaaggcatggcaaaatcatcaagcaacaaacgaaaggagtctgtcaagaagctgcacaaccatgtttgtcggccaaggggagtacgtaggccggccaagaggagcttgtatggtcagccagggtttgagcacaagctggccaaccaaagagtgattgtcagacccaaacatgcctgttcgaccaaggaagcctgacctttacaaggaaagttgtccaaaggctggtcaacacacgctaaggctggataacacatgctaagactgaccaacacttgccaaagctggcaggcacttgatgtgcaaccttgaccctagcaggcacttggccggtcagcttacatcctcgcaggcacttggcgtgcagcctgcagcctggcaggcacttggtgtgtagcctttgtctaggacaacaactcaagttgggaattgggcttcaacaacccacgaaaataggggagaaatatcaactattaacctattttggggggggtaattaacctatttattatttattattttattatgtaacaaatactttatagttcctattattttagggagtattagattattatcttcatgtaagctctcctatataaagaacattagctaaactctaatttctctaagtcttaagcgccctaaagctctcaagctctaagtctaaaaatctaattttatctatccctctaatctacacgccccaggcatggtagaagagactaagtctcattcatcacttctacttgagatttgcctactgattctcatattgtaatcttaaaagagtcactcaagaatccacaacccttgtgatctgagtggtgttatttttggtattaatacaaccaaaaggagagtatgtcattacccgttaattaagggagccaaacttctataaaaaatattatgtctgttttaccttcctattcttattgtgtgcacgtggtaacatcaataataaataagacttcgttgtcggttggtcaaaatcgaggtcaacagtatctaattatgtgctaaaaata

SEQ ID NO: 323371 - DNA, 1841 bp, Cannabis indica
cttgcaggcttcacatcaagtgtctgccagtctgcaggctacacacaaagtgcctcctagggtctggccaaccaagtgcttgctagggtttggcaggtcaagtgcctgccagctttggcaagtgttagccagcctttgcatgtgttggccagccttagtaggtgttggccaacctttgtaacactttcctttctaagtttaggcttccttggtcaaacaggccctttttggtctaacaatctctctttggtcggccagcttatgctcaaaccctagctggccctacaagcttttcttggctggtctatgtactccttttggctggaaatacatggtcatgtagcttcttgatggctcccttaactcctctcacttgatgcttgacggttctgccatgccttgtagggagactttgtcctgctattgacaaggttgtattccatgtgccctcaatcttggcttcaatggacatgccatgtcaggtggacaaaatttggaataaaattttcccctcaagtccttattcaaaaatctgtttggatagggacatcccagctctcgtcttgcctatagtagcctctgtcgagcaagcttgtctagccaagtattagatttttccatggcatgcctttagttcttggatcttctctctccatgtatgtgtcatcttcttttctttgacatctcttctttgaatcttccataggtttcaagctttttaagatattagaaactttttggttctcacactagattataatctttttggtatttgaatccgtatgatagttttagaatgtataatgtgtgattttctgatgaaaaagattcgattttggttttttttgtgattcttgactctttgagtcatgaagaacacgttaaagttttgaaaaatatgcattttgattcaaaactaaccctggccaaccctaggggtcttgtttgagaccaggctggccctagggttttttcatgggagttggccgattctagggtttcaccttagaaactggccggttcatgcctgagtttggtgatcctggtcggtttttgttggatcatgggaccctggctgaccctctcaaagcttgggaaccctagccaacctaggccctagttccaagtgggtggccagttttctgtcatcttttgacctcgacgagaatcttgtcatggccttgtaggcatatacaaccttagtctcatacgtggatcccttagaaactctatatgacatttaatggtgagtatattatagtcgaattctcaacttaagactcaacatttgtcaaagttgttacacttgaaatcgtacctcactaataccccgccttggacaatcacattatctagcaagtaccctttggtacagttgacaagagtcttatctatggcttggaaactgcaaggaacactgcctttttgcttggaacttaccaagaactctaccttgccttaaagattgagcctggtatgtggtacctatgggaactttgtccaattcttgtcaagttgtacggttcttatggggccctcaccttatgcactcgaaatggttttttattcatatttagccataacgcttttatgttcttgcttttggactataggcactatatttttaaacactactattgtttagccttaaagccttttattatggacaaatgaccagcgtggctatcttcttatttccataatatgtaagtatccagatttaccttttttatgccaagctaaagtatgcctccacttgacttagaggtagtttttgtagcttatactaagtgttaaaatttctccacacaatttttccatgctagttcaatgcattgtac

SEQ ID NO: 323372 - DNA, 868 bp, Cannabis indica
tctcgctgtctgcaccagaaaaaaccgacttgcaccagtcaagaaaactagtgtcctcggccacctgggtgcctatccccactctattccaagcaagggtgatcacttgacatgttaccaagcaatgcagagtagtttcattagcactttgacagaagggacaaagcaaactaacctccacacgcttagttcgaagatgtgtcattgttgggagacagtttgtgcctgcacgccacattaaatttttgatctttggagggatctttaacttccacaagctcttccaaaaagccgaggcctcttcttcgctccaacgcccattaatctgctgtaagatattataagcagacttaacagaataaagccccgacgagtcaaaactccatataacatgatctatgcactcggccacttgtaatggaatctggagaatgaggtttttatctctttcattgaacaaatcatcaatcaactcaacatcccaacacctcaaacccggagtcatcaaactactcactttgacatccgaaagagcaggatgtgaagagctaacaaaggggttgtggggatcgggcagccaagcttccccaacaacagaaatgttgttaccatcaccaacgcaccaccttgttcccttcattaccagttgttgagcctcccaaatacttctccaaacgaaacttggattattcccaagagaagcatttagataagaaccatgaggataatatcgagccttgaaaaccatggagaccaaagagtccgttctagtgagaaggcgccaaccttgtttccctaaaagagccaagttaaaatccctgagattcctgaagcccatacctccaacatctttatgcttacagagctt

SEQ ID NO: 323373 - DNA, 1392 bp, Cannabis indica
ataacataaaaaataatatacaaataataaaaaaaaaataacaacaacaatacaatataaaaaaaatatcaaaataccatattttatataaataatttaaaaactgtaaaaaatatttaaaattacgtataattattttttttttgtttattttaaaattaattccaattaagaatgtgtcgatgcgtggactaaaatggtgatcgaatcatatgggccaaggtgggctttacttctttgagtgtccttcccagaaatgaaagaatcagacaaaagaagatgcaggttgaaaagtctaaatatggagaagccattggaccagcttttgtttctctttctttctttttatttattattttatttttccagcttggcaaaaatattgggacactgtttgtagctggagatattgttgtttgtttcctttatgctcttctttttttatttattaatttactttttaaggtgggaaagtacaattaatgatttatttattatatttggtatgttaagcaaagtttttctgagattacaagcttgtttattagtttggatctcttctcttaattaattattattagtatgtgaataatggtgatgataataaatttggtgagatccagggtgtccaccacttgcttaagctcaaggcatggttttgttttatatttatactactaaggtaaggataagacctgtcctttttagacataaatataaatatacatatattttttatatttataattttatttttgaaagagatattttatatttatataaaggatatatttttgaaaagttttgaaagaaagtctatcgctttcgaaaaagagaaagaaaaaaaaaaggagaaagaaagtcctctgaataagtatatagatgtattacaaattaagaatatagaataacaaaaacagcattgtgactcgtgagaagtgagaaatcccaaatctcataatattattttttaataacccaaatctcataacaataataggtcttgtctttgttttaatgatttttgttgaccttttgagataattgtctatccaactaaaaacacccttggaaaataagataatcaatttgctagatctagtaagtatcactactatgtgaatttatatttatatacgcttgcccgaaagtaatttttaggttggggagtaaatatcaataattgatgtttataataatcaatatatttgttatgtccaatagaataacacaaaaataggtattttggtaaacttttatctagtttgacatttaattgagcattttagggtttttttttgaaaattttacatgaaatatccattttatacaatttattacaaaattactcatacacgcttatacctacttttttacttacaaagtttgttt

SEQ ID NO: 323374 - DNA, 974 bp, Cannabis indica
aaataggaaactaccaacaaaataggaaactactaaatacaagttgccctaattcttttacacctaatatacagctaatattctaacagtatgcatgtagaattataaaataaagatcagattaagaagttctcttattagcaagttgtttgacacaatttggaaagagaaactcttttatccatttattggtcttacatatgtgttgttgctgtgcaacatacattatttttgataataaaagcttacaattataaattctgctttcatttatcattttggctacccgcacgtagcatacggggtaggggccttagctcttttatactaattcctgtacggtgagctgtactggaacaactcctgaagagtagtgtttttacactggttgtactttctgagatgttctctattctagtaccttggtaggacaactagttccatgttctcaatgtacctaccaagtttgtacgcaccttgacttgttatctctctaactttgaacaaaccttcccagtttggtccaaacactcctactgtaggatccttggtattaaggaatgctctttgaagcactaagtcacctacgaagaatttcatttccttgacttgtttattgaattacctagcatctttttactggtaggcatgcaactttaagttagattggtcttttctttcttctatttcgtcaagggattctgccagcaagatgtggtttacttcttggtcatagtaggccaaaagtacccttgtataagtatcttttgggataggcttttccccccggcatgatttccatagaagcctttatgcacttctattagtagcccttcaactttggtcttggtgacacatcttaaaagtggtattgagaaaccacatctgtacatgacttccttttcaataaaaccacctcttgcaacttacaatgtcactcaggcaaactcagcctagtgtaccaagcatatagt

SEQ ID NO: 323375 - DNA, 823 bp, Cannabis indica
tatccatctcacaacactagaattgtggaatgaagaattaacatgatcagtgggagtaatcaatccaagaacataatttttgagaaatatcattaatattttctcaaaattctactacaagtattagattaattgcgattcacaacaatccttaagtttaatggttattgagaatccataactaatcattaataatccataagacattgataaaattctaacaattaatgttatttagtagctgcatacaattactaaataacatatgtgtggagccattcgccctttaagagagtttattggtttatccttaaaataaattatgagtaatttgcggcataatctccaaaagtgcctattgtaactaaccctcaattccaaaattttggtagtaaaacccctgaaacccgtgttctgttagtagtttaacattttcatctatttttgggtgttaagtgccatgttggaactttcactacacagtgtacacatggtataatttaattggtccacataaataattattcaaaattaaaaattcaaaaataatttgaaattaggaaaaataaattttaaaataaataaaatataaaacataattatattaaaaattaaaaagaaaaaccgtaattttgaaacctaaaaactagaaacccaaattctttctcagccattccctctcagccgcatctcccactctatccctctgttcattatcgcacagccacatcccatccatcctccaaccaccgctaagtcaaatcgccatctgaataattcacatgacctaaaaccccaacctgattcctttctctctctctct

SEQ ID NO: 323376 - DNA, 1235 bp, Cannabis indica
ttttgccctgtcacttcaagatattctctatgtgactctcttatgtcagggtattttaggtacaatatatataaaaagaggtatgtatcaattaaatataaaattagaagtaaatttgattaataaaagtggtattatgtggcctgtaacaatataacattacagctagcccagagtttgggtctcaatatgccgtttggctaaataatatgccatattctggtgtcttcgtcgtacgtagagtcttgtgattcacttttgtcaaaaatcaaataaaattacactaatactaatgaatccattaataaaagtaaaagaaaattatttattacgtaaatgttcattttcttttatattgagacacacgtctacatatatatattcaaataagtacttacatacaactggtttatgcatcaaaagtcacgtatataggaaacaattgcatcaaatcaattcattagacctttggtaagaaacattaatacaattacatatatttaaatactgagaggaaaaaatagaagttttattttttaaaaaaaaccacagttgttttggttcgatatctacacaacacacccttactcatgagtcaaatcccacgttaaattgttgaatattcttataacaaatatttatgagagtatgaaatcaataatgcaatagtaatgtatatatatagaaaaatgaattaattaaaaactcgaagattgcttaagaaagaaatttacctgaagcatcaataaagaataatgaaacaacgccaactcatttataatcaacgagaatatgcttcaacttttcttgtcttttcctttttagaaaaaacaaagaatatatattttgttaaatgatggcagatattattttaaatactattatatatttgatagagtttaagcccttacaaatttgtttttgagctcattttcaaaagatatcattccaatatcgaagatcttttctatatttatagttaataacaaatacaaaaagtttaaaaataaatgttgaattgttttaaagcgttttttgttttgtttctttatttttctttcttcaatatatatgagcattattaatataagtgggtaaaagtgggaagcataaagtctaatgttctaccggccacgaaaatgacttgtacaaccacaaggttgcctatatagctacaatatatagaagaagaataatcaaattatatagatggtatatgtatatatatatatata

SEQ ID NO: 323377 - DNA, 543 bp, Cannabis indica
catttaatagtgatctaatggctaaaaaaaatgtaaccatgtggttacaataaaaatgtaaccattagaacctcctccattatatatattatagtgctatattgtaaacaattttgtatcttgggattattaatttttttaacagttttttgatattttcaattgattatttgatcatgatacgcattttcagcattaaaaaaattaattaaacaataatagttcatcttcaaaaggattgtataaaataaaaaatactttcaaaagtgaaaaaattatgatagtatagagaggtgagatgatactttatttttctaacatcttatttttcataatttatagtaattttaatatttgatttcccattaaaaataatatgtaaataattgatttgttttaaaataataatactaataataataatattttaattaagtaaaaaatgaagttacgtgatcattcaaatagtgactatcaatttgtaagaaaaaaaaatacacctcaacttttctcaaaagacattttaataaattaattgttaat

SEQ ID NO: 323378 - DNA, 708 bp, Cannabis indica
atactatgttttagtcataagtaagttttcattgtgactaaaagcaacatttagtcacaaaaaatttatactgtaaccaaaaaatagtcactaaaagtagcaatttttttatagtgatactaaattaatattacttgtaatgcacgtataattagttatagcgttagtttttatgttactattcaataaatattattttttattaaaaatatttaatttaaatgcaatttataaaaaaagtatataataatatttaaatttattattaatcataattttaatttaacagtaaaacttttaattttataatattttttattttgttagaaatatcatacaatttttatttttatttttatataataatataaagattttttttttttggcaattgcaataagctaacagtgtcacaatagtaattcttaagaaacataaatactttttttattctattacttggaaagaaaacaaaaacagaaagatatttttctaaatatgtgaattggataaaaagtgatgataaaaaatattttttagacttgtgtaataggtttaaatttaaattgtaacacttaatatatcactaggttaatattacgtacgtgcaatgcacgtatacttacttatattcttaatttttattttaattatgtataattttagttgtataattagttttttttttcaattattcaataaacaaca

SEQ ID NO: 323379 - DNA, 1237 bp, Cannabis indica
atgattatattattacatgtacacacacacacatgtccatcacttgatcttaattttagtacaaattgtggtccccatctcctctcctcacctaccctcccatcaaatagcattatagtatagcatgtatttttgttcatgttttcaatttcaatgtttcactaataaaatatagtatagcataaattagctagaaaattatttgataacaactttccacaccatacactaatatatatatcaatcttatgatattaagatttacacttatattagaatggtgttgaatattctttcatttatttgatcccgaaattttaatatatttttctttttgttaaacaatatattttattatttaagttttaaatttcattatatatttgtattaagcatgagttctcctcactcttaatgttttattataaattaattttgattttttataaaaattattattttgtaaaatcgaattaaaatttttgctaaataatataaaaaaatatactttaatttgtttcggcatccaaaatatttttttagtttaatttttttttcatagtttaagacattttgtaaaattttaagagattaaaaaattgaacacactaaaaagtaggtttaaacagtctatttcacacttgtataaaataaaataatcacgcatgtaacaaattatttgaaccatgttatagacatatgaaatttctgtaaattttttaaaattttataaaatgtcataaataattacaacgtttactattaagcaaaaaattagaattagaaaatttctcaaatgcaaaaataaatagggtttttttatttttatacttcaaaatatttttttttttgtatttttacgaaattctacatagaaaattctatcacaactagtcctgcaacctaaattgcaataaaaaattgtataaaaacccctactgcaactagcgccgcaaccactttagaaatccaaactataaatttgaaaaaaaagaagttaaaaaaataatatatgaagtaattccctaaataaataaaggatgcatcgtcggtatacttattgtagaaactcctaaaaaaaatttatatatatttaagtatttaacaacttatatattagaatcaaaattaatgaataaatttatttttttgttgtgaaattaaaaattttattaaaaaaagaaaagaaaatagttaataaagtagtattattaagtatgttctatttacaccccac

SEQ ID NO: 323380 - DNA, 507 bp, Cannabis indica
ttttttatatttatatttattataatcttgattttcttagtatgataatttatattgtagttttttaatatattttataaaattttaagaaattcaaaataatttattgtgctaaaaataatattcaaatagcatgttgtatgcatgtctcttttcttagtttataattaaacatgtgaaataaattgtttgaaatatactttatatactataaattattttcaaaattcataaaaagttttaaaaatgtgtaagattaaataattacaatttatattgtcataaaaagatattgaaattataactacctgaatataaaaaatacaaaagtgctacaattatacatctattttattattttatttttttggtgggagagggtgcaccatattatttaatataagcagggctggccctagattaaggcgagttaggcctgtgagttaggcccgtgtttagaggccattcattttagaggcccgaataaaaaaatacttttttaaaaat

SEQ ID NO: 323381 - DNA, 985 bp, Cannabis indica
taaatgacaaattaaacatgtatttccaaaatggtaactcgagcttaatgtttaacaattttgttttaatataaccagcttaaagataatttttaatacaaatagatactgaaaatacaatcaatcttgtcacaatgcttttagattagattattattaagttttattttgaacaaaaaaaaaaaattaactcgtgaagagaatactattttgtatcattttaagtctaatttattttttacgaaatagaaagtctaattaatataatttttataaatcacataatttaaaataatatttatccaatttcaacaacaaaagtaacattattttgtttgttttgttttgttcttttagcaaaacatcaattattttgttggatattggtcttcattggaaagttatgggtggagtggaagtaatatagtgaagtagcaaatcttcatacgtaaaggctttcacatttgatttggtagccgttatttattttgttgaatttttgacacgtgttacaattatataatattatgttaaatttaatacacaataaatatattcaatacattttttgttataatttgcaacataaaatgttatattgtacattgaagcaaaataataaatattgtagtaaatatatcatttgtttattttttgtaccaaatttagtacaatatttattacatgttgtattcatgcattggaaatagttctatgcactaccactgtgaggtggcactagagatgaatacgagatgggtattaaggactcggttggcacatttttttgaaaagctaaaagctactttttaaaaaagttgtgataaaaatacatttggtaaacagtcaaaaaatagcttttcgaataatttttggagaagttacagctaaaagctgaagctgctccaaccaaacttttagaaaaagttgttttgattaaaagactataataatgttttttgtactaaaccatatttacttattt

SEQ ID NO: 323382 - DNA, 672 bp, Cannabis indica
ataagtccaaactctatccgtctaaatctcatgtcattcttccctacatgaaatcaaaccccatctttcttttcagtatctactttcatttttcataagagaaagctgtggacaaaagcgccagagaaagtcaactctccagcttcccagaagtgtctgaaagggctagccttaactgtatcaatcaaatcaagctgagtaaacttgaccttgatatatctaaacctgtaccccgataggtaagacatcctgtgaaatgctagaaaactagaagtttaagttcaggagccatctacaaaattgtaagaaattttgctaaaaatcaataaaatgaagaatatcgtaatatatatcgcaatatgttgctaattatcgtgaaacagaatcccaggtactgctcagtgatatttcacgataagttcgcgacatatatcgtgatacgtcgcaaaatacatcgctaaacaactaacatgtcgagaaaacatcgcccatagaaacaaccaacaacattttaaaatgaaatcgcaaaacttcgcgaacaatgtcgtgatatgtcgcaaataaaaaccagaactcaaacgggcgtcaatgaaattcaaacgaaatcataaaaattgaacataaatcaaataaatttctttacaatgaagcataaacaacaaaaaaaaaacc

SEQ ID NO: 323383 - DNA, 1334 bp, Cannabis indica
taaatgtaatcatcatggttacatatttaatgtgatcattgaaacctacttcatattatatatattttaaaattaaagaaattaaatatatttatataattaccgcccaataaaaatatttattcaaaagtataatatttttaaatagcattaatattaagtactttaagatgtgtaatactatactaatatggagtattgtgagtggttagcaatttcttatattatttagtaaaattaaaacatgtgggatctcatgttgaaatacaataataaaagtatgctgtcttttatgactttgtttggcgtaaattctataaactattttttggctctcagaattgaaaaaaaaaaaattcttctaaaggtgtttagataaaaaaaataataaaaaaaaaaattaatttgagaaaagttaagatttgtaacttcaaatagtaaaaatgaattttttttgttattaatatatatttgtaatatttttttttcaaatttttagtctattatgtaaatttttcattttttttttactataccaaatatgagaatttataattatttattttccatttttttttggttacatttttttttccgttaaaatttaactttcaaacataacttaagtactttaacggttatttttactgtaattatataattaaataaaaattatgcaggggaaagagaggaagaaaggtatggtacataatgcattggatatttgggagtttgatatcattatttgggattataaacatctacacaggattagagggttactataaaagaacatcaaaaagttcatcaacactttggactatccttttcacaacacaagtctctcttattgctttcctttatctctaccaagacaaaaaacaacacttggaaaagcaaggacttactcttcccaaccttgaacttgctcatgtctctcctcatcctcataataataataataataataataataataataatattaaggagctcttacctcaaccatgtggcaagaaaaatgctctcatgaacttgtttgactagaattaattatgatatatatatatatatatattctatatggatatttatatggtaatgactattgttttatttctatggtatggatggttttatagccatagataatagattaaatggtaataaataaataagtgtatgataatagttaatatttgggttgtattatcatatttttttttaataatatttaataaataaatatttatttatttataaaaaataattaaaaaagtcatacacatcaatgattaaaaaaatgttcatatactattttaataatttaatat

SEQ ID NO: 323384 - DNA, 541 bp, Cannabis indica
taaaataatttccaacagactcaccatcaaatctctgtcagtagttgggaataacaagttctcagtgattgaaggagctgttagtagtgcagatacgtaccttgcaccatagttgagtgctcaagctacgaagttgaataaacctgatgcaacaatttttactattgtgtcttctgaccggcagatgaaactgaatataagtattcttaagtttaactgtgatgttgctgtaatctttttcatttgattttatttttaatttttttgtcaaacaatcttagaattagacgactgattatttgactcggttttctatttttaatcgtgatcgtgtctccaaatgagggagatgtcccaatgggattgcagactatcattttagttaattgatattaataaaattgtatgatttatcaaaaaaaaaattatattataatattattcttcaatataaactatccctatccagaagaaaataagaaaattgtgagttggtacagttgtatctaaaattgaatgaagaggaaattacactctatac

SEQ ID NO: 323385 - DNA, 1459 bp, Cannabis indica
ctgtatttttttataagtttcatattgcagtatactgtgttaagttttcactggtgttctactggtgttttactggtgttctactgttgttttgagttgttctgctttgtgttttactggtgtttataaaaacacagtatttttgaaaaaatttccgtgtgacagtatttttgtaaaagttaacccaaattctagtatttttgtaagtttccctatatttttcttgtttgtcttttagttcctaaattaatgtataccatcaggtttcgaaaccaaccgtattattttttaaaaatagcagtattttgaacaataaaataccaggaagcaattttgcaattaaaatgtaaattgcgctgcttgatgtaaataatcctataatttaatataatagcttttagggagtattgctagccaatcgcaacgcgacatgtcgagaaggtgttaggcactacaggtgcctaatagcaatgctcatgctaagataaccttcaatgatggtataaaatttgagtaaatttagctttaaaaaaataaataaatactatatagttctttttttaaaaaaaaaatgtgcatacataaaaagttgtagacttcacggtcgttatagaataaatttatatgtacaaaagaagtcgaaatacaattacattgttggtgggtaaacacttactttatcacattatggactataaaattgcaatatctattaatacttgagaaaatacaactaacaaacaaaggagagaacctactacaaaaagaagcgtagttctcaagcccccaatgagactccttcccatttagcatattgataactaatctagagtcgctctccacaataataaacttgcacccaatgtccttagttactttcaaagccaagcagcaagcagtcacttccccacacaaagcatgtgaaaactctaaatgtgtcgtatgaacccaaaccaccataccatgatggttcctcgctaccactgcaatacacatgctttccaatcctactttaacatcacaattcaatttgagcaattcccgaggaaggggtgccaaacatccaacaatatcagagtaggaggagggaaaagagaaacttgatgatctgcataagagatacgaataaagtcaatgcattgtttcacattatctagcttattattgtgtttgttgtttcaggcccgctaaatattgtcgacaacaatcgaagcataaagaaacactccatctgcattaatgccttagaattttaagtcccaaatgaatttgacacagtcccacaaacaaatttcagttccacaaattggaaagtgaaattccgtattttaatattcccagtttgattatttaattaaatgattaattaaatgcggaataataaaactggtactgaaaatagttttctgtagttacagaatgcaactctgtaactccagagaaacccagaaaaacaaac

SEQ ID NO: 323386 - DNA, 591 bp, Cannabis indica
tcaaaaagtttttctcaactctcacaactcaccaaaaatgaagactttacactcaaaaattttctcaactataagtgttaacaacaatttttcacaagtttggaaagtgcataaaataactttaaaaatcacaactagataacaaaacatagcaataatttgactcaaaccccaattttaccatcatgctcggataatttataaaaaaattgacttaaaaattcaacaagataattacaattctccaaatgaatgatcaacagagctcaccaacccccaactcaaaattagacagtgtcgtcaatgtcacaaaaagtatgaaataaaaaaagataggaaaaagagacccaaaataagcatagaaaataaaaaagataaaataacttaaatagacttactaaaaacataaagagaaaacttgattagtcattggtagacagaagtgatctcctcaggtaagtctaccaactatatgtttgtactatccagtatcaaaaatgaactttcttttatcgttcgtctcaagaattgatgcattggtgacaccttcaggataaagaaagtatttgttctcaaaatcatggaggaaat

SEQ ID NO: 323387 - DNA, 1532 bp, Cannabis indica
aacataattataattatatagatatataatatcactgtgtggtgattaaattaaatagatgaaatttgtgttgatactaattattagatatttatatgtaattttattattttattttttaataattagatttaagaatgtgcatattattatcacgtgataaatatatttgtttgctaaaaatattatttattttttcaatttataaaataatggtaatttaataaaacaaatatcatttttgaaaagtaaagggtaatttgggcaaaataataaatgttctattccattccatacaataccaaacataataattcttattccattgttgattccatagcctttaccaaacaaaagaatagaaattccattccattctattcctattcctattcccattcctattcccattccattttcacttactaaccaaacgccacctataaaattataaaattatgtcttcattttttattataacatctaagaaattaaaccaatttcaaattccaactctaaagataaagattttcgatcagtgaacatagagtaccaacatatacctgtatatataagtataccatgaatattatgcatttatttgctatcgggttataatttttattgtcggaattataattatgaaaaattgcttcaacaccaatgtttcatattgttatggaattcattctatggtgttggagattatacagaaattgatggtagaagaacagagggaagagatgatgtcgtcttattcttcctcggagatcaacaaagtcgacaacttgaagcaatgtatgtactgcctttttggaagtttgactgttcgagtaagattttaaccactcaaaaatacgaaagaaggaaagagacgatgttgtattattcttcctcagagaccagcaaaattgatgaattgaagcaatgtatgtactgcctttggaagttcgagtaaggtttaaccactaaaaaacacgaaagagaaatgatttggttcataacttatatatatgacgatgacatttattcctcatatatctatatataatatatatagtagattccatatatgttgagtcactgacccatatattcctttaattattttttaaagaaaataaaatatcattaaaaagtatctaccaaaatgtacaattttaaagttttggcaaagctactattgcaaccaaatcataacatcatagagagaaaaaaaccaatttattcaacatattagagggaattattattattttgagataagggaggaaattattatgtgagactattaattagtttgtgattaatttgtggtgttcaaaattttcacgctaatgtaaatagtttgctgatgatactatttcttattgaggtgtttattggatcaaatcaaatagatttagactcaatctatctattccaattatttattggattttaaattttgtcaaccgaatcaatgaatgtattgaatttaatcggttctaactattggatgcattaactgattgtctattgaattatatttt

SEQ ID NO: 323388 - DNA, 512 bp, Cannabis indica
aagtaaaaaagttgatgtaggcgtgtaggggtaaaactgtaataaaatgtgcaaaataaatttttggtgtaaaaatttctaaaaaatactcttatataatttttttattaaaatatatcttcttttttgagtgagttgtccaatatattattttttagggtctaatggggacaggtaaaattaaaacaagtaaaataaagtacacaaatatggcttatttcttaactaaacaaattaaatatatgaggtatataagtagaaaatattataaaaattattaaaaaattgaatcaatttttcaaacaactatgtcatgcgataagaatttacttctttctcatgtgatttctctatctctcttcttggtctacttctggtaataatattgaatttgactctagtttctcggtctatatcaactaatcttatttgtcaaattttaatatattctaaattctaataaatatatatttttttttgttatatatgtactagggttgtacaaaaaaaat

SEQ ID NO: 323389 - DNA, 1137 bp, Cannabis indica
accttccatgtcaacctgcacgctaggtctagggtttgccccgcctgggcacaatttttaaaaactcaagtcctagcatcgttctttgttggatttgaggaatcgaaatgtaaagaagtttccgaaaagccaagccctagttgtcgtgtctcccaggttgactgagaatgtcaacctgggtgctgggtaccctggcactcaagattggaaatgttcaaatgttatttctaggcttgtagcttgctttgtggcatgtttctcatgtatctgagtgcaaaggcttagcagtttgcatagagataatggctaggggaaaggaactaatgcattctatggcacaaaactgtcaacttcggcactgggcaaggcccttggtactagtttgattttcaagatgccgagttgacatccttagcttcttggtccattgtttggagtcttgaatgacaaaactttgaaaacgactttgtgggatccaagtgcctactttggggactcagtgtccgagtgacactgcactatcctgggaagcggggccccaaggtttgggtacacgaaagccatttctcttgctggtgacttgggctgaggctttccactatcttaagttagtcaaaatgttcaagtgcccgtagctgtagccaatgagtggactagaaacatttatcctctcctcaacctacatattctatggacactttaacccctaaacaaccttaatacacttcgaagccatctttggcgttcagctctcattgatactgtctcagcggcgttgggcagaatgctttgaagatttttaacttttatagttatctattctttatttattgggtctctttctctttctatgaactcactgttatgtagaacgagggagaagtagattggtgagtggtaagtggagagagtaagtaaaatgaatttttattttatctctacttttcaccggctttctttatttatttctaattatcattatcggtcaacatttggggtgcgtttggaagtagctgtgtaattactaagtaggataattactagggtggtaattacacagtctagtaattacactatattttaaaatgcaaggtgtgtttgaatataaagtggtaattacatatgaattcctaatat

SEQ ID NO: 323390 - DNA, 856 bp, Cannabis indica
tgttccagtacggagtctccgatgcccattgcttgatttggcgatcgggaacatgccacactgggtcgcggatagattatcgtcctactattgttaataatgcgaaggagatgctgaaggagagtgagagtagtagattaatgctaaataacaatctcattaatgggtggtacgatttttccgacaaaaacagcatgtgcttcgcgcttatgtgcacgaagacgaagagaaatattacgacatgcatacaagagatttctggcttgtctaaattgcgtgtccttgtgcttggattgcctgttgttggggcgttctctgatttttcaattgatccgatcattgatatcataaaatttataggataaatcactaatagctagcacatgcaatactgtggggtgtgtactacataattttaattttgttaagcagtctgctaataaggttgtgtatgtactggcgcaatcttctcttgtggaggttgaccatacttttagtacgtagtgttactttacctactgtaattgcttccttagtttgcctctcgcctggggcacttaccctgtgtttgaatcctgtcgatgttaatttgtgtaagtgttttgatcaggttgtgttttgcttttgtcctcggtctgagaatagagtggctgatgccttagccggttgggcaagaggttctaagtctggttctcaaggtgtgttaagggacattgcccgtgtggcaatgactttgttctagttttgctttcaataaaaagatttatttagaaaaaaaaaaaaaaaaacttacttccttagttttggaagacttgaattaatgaagtttttgttagacttttatttgggcttacat

SEQ ID NO: 323391 - DNA, 477 bp, Cannabis indica
ttactaaaattagataaaagtccttaaatttaacaatcttaatagttcagggggaatttttaacggccaaaaaagttcagggggcatgatttagtacatgtcaaagttcggggagaaaaattgctgattagcctaaaataaaatcagttccacaacaaaacaagcaaaaataaataacacactaaaaattcagcaactagttataattaaaaaaaaaagctataatataaacatacccttatcttaattatagatttacagaatatttggtgagacattagaaaagcaatagggctgtatatcagtcggtttgggcggtttattctatatattttctaacccaatttaaaattcaggctgctaaaatttaagtgcaacccgcccactttaaaaaaaaaatttgtaaaccgaccaacagtttgggcagtttggtcgggttaacccgcccaaaccagccaaactttttttttttttttt

SEQ ID NO: 323392 - DNA, 1051 bp, Cannabis indica
aaaaactttttttttaaatttttttttaccaatagaacaatctcagagatttttttaattagatagaaaaatttctaattttacccattcatgggtaatacccattaagagtgcaccctaaaagaaaaaagaaaattattattattattattattattattattattattaatgaatggtacaaaaaaaaaataaaaagggaagaaagtatggtcgttattagagtaatcaaatgtaataataaggaggtagctaggtaaggatgttatctttgtcaccaagccttgatttgaatatacacaagcatgcagtcaaccaagttatttgtctcacctaagatagtctacaattattgctacgattttgggatgtgggtataaaggcaaaccaatagaaaaaaaggaaatgggaggatgtggcccatcggggccttgtttgtttgttaataattagtacgtggaataataagaagagtacagctatatctttcaattaatttctttaggacggttaataaaaaaaaataatactaagatgtgtagatcaagtaaaaatgtgcgaaacgtgttttggagtttcattgtgagataatggtgaattataattcaaggcgagttagagccttaactagatttttggtaaccgtaattgcactgtgatgaccaatcaaagaaacagataaacaaagaattaaaatatcttattctatcgattaaaccaacatgggtcaaagacctatccgtttttcttcatccattctctctcccccaagcagcccttttttcttctctatccttctttattttgatctttctctttcactcctctacacaagctcgcggtgagctcagatccacaagtcggcaaaattcttacaccccaagttaatttggtggcaatcggagctgagatacaatcgttcaaaagctccaaagttttgctaacaaaattttgaggccacattgtggccaattttgacgacacttgatgaaatagttgttggatttttcatttgaggttacattaacttttattggttttattaaaattt

SEQ ID NO: 323393 - DNA, 714 bp, Cannabis indica
caatgacatggtctccgaggtacgtatatacaatcaaataattataattatgatgataggaaaaatttatagtgaagtttttttagagttgtagttagaataggtatatactcctatatatatctgttttggtaaccaaaaaagtttttttattcactttattattattattattattattttttatgattatgtatgttgtaattattttgcatcacttgcaaattaccacttgcaaattttcaaaagattctgaatatatagagaaaaatcatggttcaaatattttattgcatttttctttatacatgtgataagtaactgtttgacacttattagagtatacctaaataactataatatttgtatatgatgagggatgtaccgaaacactcttttttgggtgtactattgataaagtaaatatattagaatgtattcactacaaaaaaaaatactatttttagtgataattttttaagggtaaatccattttgaaccctgtgttttgcaaaagttatcaattagactctttatattgttaaatgacaaaatagacatgtattttctaaaatggtacaataggacactgaattgattttttgtcaaaataaaatttaattataatccaatctaaaagtgttatgacaaaattgtttacattttctggatctgttcgtattaagaattattttcaagttaattatattaaaa

SEQ ID NO: 323394 - DNA, 701 bp, Cannabis indica
tttttccattttatgtttatgaatcgttacactttgttaacttttgaaatatacaatttttttcctatgcacaaagcaaggaaaatgaaattatttatatgtatgacatgaatatttataatactccactcacctattttttaattataaaataagagatgacccatgcaagaacaaaaaaataaaaatgaatagcttatctattactttattttggtcacatctatcacatttataaaacaaataataattttttcttttatgaaaaaaaaaggtgaaatggtaaaggatagttaaccaccacaaaaatgttatatattgttatcaaatttattaaataatataaaaatatactaattaattataaatcttcatattaaagtggtttaaagtggtattagacactttaatttactaaataataatgataaaatgaaaaaaaaaatcgatagaaaaaaataaataattacataaggcataattttatataaaaaaaattatatgtttacgtttaaatattttttttttatatatttttacaatttttcatagaaataacacaaaaataataaaaaaattacataaaagtaacataaaaataatatctaaataacatcaaaataacataccgataacaaaaaattaataataaattaacaagaatacaacataaaaagaccgcgttttctgtaaataaaaaa

SEQ ID NO: 323395 - DNA, 1376 bp, Cannabis indica
agtttttcagatgagagagtgaatgagagaagagagaaagaaaagagaaaggttgcaggggacataataaaccaccaattgcctttgattattcaaataaccggagacatatgtttttcgattatttgagtctattcagcttcgcgtgcaagcttacgtctttgggggtttcatcatagccgaggacataggcttttgaaaatcacactccttctaaagataaaactaaattttcattaagcgccgagcaaaaatcgatgaaacaagcttaagtagatctatgtctttgatttttattttatttttatgaaaaattccaagataaatttattaattgtagtactcaaaaacattttagtatgtgatttcaagtacgaaaattgactaataacttgaaataaaagtttttttttttcagagaggtaacaagttggaggacaacaccattaagcataggcagcaacaacgaaggaattagaataattcctcatggccttcttcacgcaacctgatagcatccttggcaagagaatgggcggctgtgttgaactggcgaggtaagtacttcaaggaggctttagggaagttggagaagaacaacctaatctaagaaacaagaccagaaagagcggagtggtcctgccaatcaccatttacttttgaaactaaatttaaacagtcggagaagatgaattttggcttcaactgagagtcaatacaccaagatataccctgcaacaaagcctgaccctctgcaaaaataggagtggaagccctaggcaagagatgattttccgaagcaataatctggtgttgaccaatctttaaagtgaaaccaatccccgttaagccatggttatggtctaaagctgcgtccacataaagagccgcggagtcctcatgaaagtcatctactggaaataattgggaatagtgcatgcgctgattagaggctgggaccgaatgaccagcgagattgtttgttgtgcctcattgtaatcctgtaaataattaaaaacatactcttccacattgttaggagcattagatttattgaataatattgagtttcgagtattccaaatgtgccaaatgagagcaacaaaaagagggaaatcctgctttgagatgagttgcattacttggagataaaattcctagatgtctgttcttcgatgatcacggtaaaaaaatttgaatcttgaaagcttccaaatgtttcttgctctggggcaatccacaagggcatgtgtgacaaattccatattattaccacaaactgaacaagagggctgcgagttaatttttttgtaaaacaaatttaaggcaaaaggtaaaatatggttgaaagctttccaagtgaaatgcttgatttt

SEQ ID NO: 323396 - DNA, 817 bp, Cannabis indica
cctcttacaaaaattattttaatactattaataatattagcggcagagcttagcagcacaccccgctgctaatagttatatatataaccctaaaaattttctctcctcgttcaccacgacgacgatacttcgtccgctcacctccaacaaccctttaggccattccagctcatccgtcgctcgtcccagctccgtgtagctcatctcacatcccctttgcagttcgcattcgtccccaagcagaatcggccatctccgctgtccccattcattttgagcggcccacaatcatggtatatatatatatatatttatatatatatatatatctacatattataaatataatattcaatacatgttttttaaaaatgattttgcttgcttgtttagggtggagtattaccacgggcaatgatgttataaattattatggtttattttattgttttctatttaagtattttttttttattattattattggatcaagttctgaatttgcagcttggaaatagtgttcacttatttgtatttgtaaaaaaagtatgttttttattattattattatgaatattagatatgtgttttaatttttggggatttttcatttttatacttcaaaacaattatttttaaatttttacagaattctatatcaaaatccctattgcaactagcgctacaacttaaattaacgaaaaatcgtatagaaatctctattgtaaccagcgctgcaactactttaaaaactcaaaccgtaaatttgaaaagaaaaaaaaagttaaaagaaacaatatataagggtaattccctt

SEQ ID NO: 323397 - DNA, 832 bp, Cannabis indica
tccaatcactcattatcacgaaagtaaaatcgagaactgacagcatgagatgtagaaatattaccaggagaagagtccttcataggttgcttgcctttggcagcaacagaagccttggctgctgaagatgcacgagaaggcgctggagcagatttggtcaagggaggctctggtttgagttcagtttcctcactgtccgaggagactccaatgtcgtcaggaatctcttttttagaatggagagacacggagttaacagatgagtcctctattggttcttcttcttcagaacatgaagaaatcgaagggggattcatcttaagtttcttcgctggaggaactggcttgtcatggctttatgtcttctcgatagaagcttgctgggcacgagtgcgagtggaaggaccagttggagttgatgcagcaactccctcctctgttccagcaggaggagatgatgtagcaggtggaggagactctttcgaatatgaagaggatgaagtccaacatttttagggtcgcacaaattttcttacgacttgtttaggaattcttttcagcttgggcttcacgggctcagattcacgctgaggaagcgatgaatctcctggtttcgaagcagttgcagtagcaggcagcaagattggagcagcaggaggatcattcgagggggttgaatcggtttcttccacccgtttttgttgccctatgttctttgttctaaccatgattatctgaaagaaagaaacaacaacaagaaggcaagaaaacaaaagagaatcgggtaggtggtgagaataaatgacaaggaaaattggtttaaataatcatg

SEQ ID NO: 323398 - DNA, 1630 bp, Cannabis indica
gaaaattagttacttttacccttttttgtttccttacaattttttgacatacatactccaataaaaataattaaaaactaatttaggattttttgtaccccttaaactttatcatgtaccaaattatattcctgtaatttttttatttgttaaaaattctcttgaactattgagattattagattcaagtaactttgtctaatttcattcaattttactatctcagtaattgtttatgtactaatcatgttctccagactttgatatactaccaaatcatattcctcaaactttgatatttattaagttatgtcccttgaattttcatgttagtactttttttatcgacagataaaaatcctaattagccaataataaaatatacctaacttaaaatatccactaaaatataacaattacattacttttattacgttttgtttcttttattattaaaaattaacatttttacttcctaaagtttaatcgataataaattttacctcattttattaaaaaagttaatttcaaaaaatataattttctattaattctaaaaaaattaataaaaaatttgataaaagtattaaattagttaaaaaaatatatatttaaacttaaaaaatctaaattattattaaaaaaatatttttaaactttagtttatttataaacacatatcttgcattaaaaaaaatacatattttaagaaatcaaaccaatattattaaaaatctaataaataatctaaacaaagtaagatattgtatggagaaaattaaatttatttatatttacaaactcatatcttagaagaaataaagaaaattattagaaattcaataaaaatataaaattattttaagaaaaataaaaattaaactaaaaaatattatatttacttaaacaaatttagattttgggaaaaaaaatagattcgaacttgtttctataaaatttagtttttacaaaaattaaatttcgaatatacttttttatatctaaatagatttttttaataaaaataattaattttaaaatttaattttttttaatttatgaatcatttaaaatgatttttttaagatctaattttttttttaagatctaccaaaaaaatgttgaatctttcttatttttatttggagatgatacaatttgatagttgtcaaagtttaaggaacaaaattgttactttataaaaacacgccaacatttaaacgaaataatatgacgaaacataacaaaaggactaaatttttatgaatgtaatagttcagaggaaatttttagtaagctttatattttaggggcaggatgaaatattgtcaaaaattcagggtgcaaaattacttattattctaaagcaaatgtttattattactgatttttttaagcaaaaaaaatgttattagtgttaggaaaagagtaggttttataagagtttgggcatttttttagggttatcacaataatttgtattgatttctctctaaaattagtatacaactataaaattagtgagaataataataaaaataatagttaatacataattaattaataatttcaattaaattatattttttgtatgtatctaagagaaataatgtaatttttttttttaaaa

SEQ ID NO: 323399 - DNA, 889 bp, Cannabis indica
aaatttatataacatatttttttgtatatatttgtaattataatgaactagattaaaatattatcattattgtaatagaatcttaacaactcacagcactttaaaaattataatttaccaaacactcagctcagcttttttccacagttctgctacagctgctttttcccacagcacagctacagctgcttctccacacagcacagctgtgccaaactggcccttagtattccattcctgagtaaaggaagcctgtgtaccaaacattccactttccaagtcatctccacatttttttaacttatcttttctgtacaatttatataaagttcaactattttgtctttttctaatttgtttctttctgtcaatagttaaagaaaggatcttttcttcttattttttccgattctttctcaactgttcatttctgaagcagagagagattcagtttaagcttactccaggtatttttttccttattttgtttctatatattcgggtcccaattagattttgagagtttttgatgagaagggtctgatttttttttttaagttgtagatttgataatttcaatttaatttgtttattgtctggtagattgaccttttctctttattcaatattgatttataatatgttttaacagatgcatatggattcgattctttttatttttggtctctgaataattttccaatttgctcacatgggtagtaatgattttcatctttctctttttgtgtatgtgtattcatattgttgtatggaaaattatgaagaacttaacacttcctgaatcagagtttattatatatttaagtgtaaatagcatcataagtgtccaaaattttatgtttgtaagcggcataaactcaatatttat

SEQ ID NO: 323400 - DNA, 1021 bp, Cannabis indica
tgcgttaggttgctgcgtagttgcgtgatggttgcgcgatagtttcccaggaagcataaatcctgggttgaaggtgtgtgtaagtggtatttgtgtaattttttatttgagctgtaaatttgttatttggcagcctaaaagtattttgtaatattgttacttttttggttaaacccacacaaaaaaaaaaaaaaccattaacaaatactaaaagttttctgttatttagtttttttttttctgtaagatagaaatattaatacaaaaagctaaaacaaaaatatacatacatctacaacacaaaaaaatttatttttagtcataacgaaaattttgagcaataataaactatcattcttatcttgtgactaaaaagtttgtaattaaaagtattaaatgcatataaatttatatttgaaaaaaattaaaagtatataaaaaataaaatattacataaaataaatttttacacatatttttgattataataaactagattataacattattattatcattataatatatcttaacaactcagagtactttaaaatttataatttataaacactcaactcaactttttttgacagttctactgtagttgtttttttcttaaagcacaaatacaactgttatttcccacaacacaagcatggtggcgggtgttattttaactttttctttttatgtactaaaattttaataaaaaataatatttttaaataacatgacaatgacatatcattgaccaaaaatccacatccacggtgcaaaaatattaaatagtctttaatgataacacagaaatagcgctaacaaaccattaagcatctccaaagagacaccaaatttggtgttacactatcaccaaatttggtgtcaaaaattatttctactccaaccacaacaccaaaaattacactaaaaaaatattccttattattatattaattttttaataaattaaaaaaataatatcatattaattaacaaaaattaccacaattgttatatttaa

SEQ ID NO: 323401 - DNA, 1166 bp, Cannabis indica
tgtttcacctgagcagtcatcaactttgtcagggcctccacttgggctgtcaacttggtgatagcgtctacctcatgcataccagcaactttctttgtttggcttctttaagttggccattgttggttattcatagtcatttcttcaagcagatcataagcctcgtttgcactctttcacataaatgccccaccagctgtggcatctataattgttctggtattaccaatcagcccattgtaaaaattatgaaccaacatccaattttcgatcccatgatgtggacattttctgattaaatccttgaacctctcccaagcctcatagagatattcattgtccagttgacaaaaattattaatttcccctcgcagcttggcagcttttgctagaggaaaaaacttggacaagtactttatcgccaaatcagtccatgaagcaatggagttgggttgcaaagacaccaacgaactcttggctcgctccctccgcgaaaatgggaataatcttagacggatggcataatcgttgacttcatttactttaaaggtctggcataacttcataaagttagacaggtggagatttgggtcttcagaggccagtccactgaactgaactgaggattgcaccatttggagtatggcaggctttatctcaaagttgttggcatctacggtagatggtcttatacaagattgaacccccgtcaaaattggcagaacatagtccctcaggctacggtcaagtggattacaatcgtttgtctggtcttctattgctcccccattatttccattgtttccgttattggcgttgtcagccatgattatttctggttcagcactcaatgtagctctttctaacctcttgttccttctattctgtctatagcttttctcaatctcacgatcaacaagcacttttgaactagctccttgacgtcacatataccaaaagcacctaaggttggatagaaaaaattttcagacaaaatagttagcaagaagtaagaagaaaatctaaagcagaatttagtctaatttttgtaatatcaatttttaaacaataccccggcaacggcgccaaaaacttattgtgaaatttaatacgcaagtgcacatatcgttgttcaagtaataaactcacacgagtgaggtcgaacc

SEQ ID NO: 323402 - DNA, 983 bp, Cannabis indica
cataatatgccttagggttggatgagacttattcttggttggagaattttcctccttcgatttactctgttattgtaaatgactattctcattaatttataataacaaagttatcttttcgtaaaagaaaaaaaaatcacatgtgtacatatagtaaaaaaaaaaatcttttaatttacatggcatttgataatggctgatgccatttgtttaatgaagtttacctagtgctcggcccctccttgtaattagcatggaggtggagttcttcgaaaattatttccctaaaaaaaaaataaaaaaaaaataacatggcattttttttaaatacaagatagtattggagcacacatctcaaatgaaggttctgtattgctgacaatttctactttaaataattcactttaaagtcaactaccgtattttacaacgatggttcttcctcatccatgagaatccccttttcataattttcttttatgcaaacttccattgataaaaacattgagagcacgaagttatactttcaaacaaatcagaatttcaccattccacaatacctcactttgaacccctaatgctttgttagctaagataaaagataaggactttgacttccaaacaacaatgataaaagtgacttacaaagttacaatagcccacctcaagaacaggactctgaatggttttaaagtttctgctataaagttgtacccccaccgtctgacataagagatgcagctgcagctgccgcagtgggaacaaccccagttgaaatatccggctttgacaaatgcaggagcctgagaagacaatatcagaagtgtcaatgattacattcaaaaattaaactcaaacaaaagataagtataaatacttctactcctgatcaattttcgccttatctaattgctgagttcaagacaagctagctgtttaaacgttcttataacaatctagctagtttgaatcatattatcccc

SEQ ID NO: 323403 - DNA, 588 bp, Cannabis indica
cacaaggtgcccataatggagatttgatgccacctctcgtggtaggacacctaggagtaataataggcggaccccatgttgttggaaaaactagcaaagctaggtagcgctatgctcggacactccatcacgagcccaaaggcaaagtcctaggtgttgaagaccgaagctctaagtagcacaagcccatagagcccaaaatctccttcacagaagaagatgctactccgattagctttccgcataatgaccccttagtcattattgtgcaaatcagaatcatgactctggcaagaagtatggtggacgacggagcctcctccaacattcttttcaatacaactgttagtgttattattttgtgacagtgtttgttctgctcaatgtctagttgtatctggatttttagtctgttatatctgcactaacgtttgtttacgagagtctcatttaagttttagttagtgccagctggacttattttgtggatatataaatagtcgatttctgttagtaaattggttatccattaaatcgttcagacagttatttcagttgtttgtgcagagagagtcgtatcttgtttct

SEQ ID NO: 323404 - DNA, 712 bp, Cannabis indica
aagtaaccatataaggaactttcgatatgcagccaaataagctataaggaatttaaggagaacaaaatactatatgttcactttatcagaaatcagaaaacaaaaaattttggagatcaagacttttgttctttgtgtttatatgatatgagtttgtttatttttttctaagtatttttagatcagggtttcgagcttcatatgtatatatgtgtgtttgtttgttagattagaattttctttaaattttatttgtgtgtggtttgggtttgaaaaataaattacagtagtggtgttggttattagtggtggtttcaatacctgtattgatggtggtcggtggtggttcgatttgtggatgatggtggtggtactggtggtgatgttatgaactatgaaatcaataagaaaaataaaaacagaagaaaagaaaggttagagacaaaaacaaaaagaaaatatgattgagaattagaaattttttttttttaaaaagattgcttttcttttatatttattcatttattaatttttggttttttcttaatttttatttattttaaaattgatttgattttatttttaaattttatttatttttatttttttaattaattatttacgttagaccaataaaattgtgccacatgtaccttgtatcaatgtggatgtgccacatgtaccttgtatacatgtggattgccattctggc

SEQ ID NO: 323405 - DNA, 483 bp, Cannabis indica
aaaaaaaaaaacaactacaaatttagattacattatcatttatacctaaagaaattacctcaaggtttcaagttgcttagttcaaaagacacgaaaaaaatattgatgaccaattacgagtatctaagtgctgactccaaatctgcaggattagaattctcgatttggtatagtaaagatgatgttacttttaaaagagaggagaatatgataaatatggatgctaggtttttgaaaaaaatatatggtttattaggtgtatacgcctatattacaaatcatataataggtttaaatttcaaattaaaagtctaactaattacctattaaaattatcagtattgtaattactattaattgatatcaatttaaatttaaattatcctaataaactagcctagccgtatgacaagtctaactaggaccggccctgaaataaagtgggccataggaatttttttttatttttgggcccttatgtta

SEQ ID NO: 323406 - DNA, 773 bp, Cannabis indica
ccgcctatgcctagggccggccctgtgtacaactaacgatttaattataattgaatagtgaatattgaatattcaattgtgttcggattagattgatattatttttaaatatgcaattagatcgaataggatgttagatgaatgaggtgtctagaaatctaatacatccaccatgtaatcgaactaattagtattttaatttagtttagatgagtaattagattttatattattatatgtaaaatatatatatatcaaaattatcattaaaattttatttttgtcggatttgatagatccaatccaatacatattagatgaatctgatccgattcaaaaaatactaagtttaacatgttggataaacttgaattaaaccaatagaacatcatatgaatagaatcaatccaatttaatatctaataaatgttaaattaattgaataactgaaactaattagatcggatcggataataaaatttattattcaatatataattaattaaatctgaataagtctaaaaacgtactatcaacactcttatattagatgatatgagattttatcctttcttattagaatatgaaatttctgagatcatgcatttagaatatttatatatttaaaatatgataggaatgggtcgacttttattttctttcttgaccaattcgacagatttacattaaacaaaaagtaatgtacaagaaacaaagtttaaaattcaatttgttaataattatatatgttttttttaatcataattatatat

SEQ ID NO: 323407 - DNA, 1221 bp, Cannabis indica
tgtttaaacaacatacttgtgagtagatctaagatcctggtaaaatatatttccaacagttttatgataatcaagttcagtgaaaaaggctttcaagtctccaactttggggttagcaaattttttatcaaatctttaatgaaaaacagtagtagtgtgtccaggcttatgacaaacttgacatagtagtcaagaaattgaaggaggaccacgaccagggaatctactagggggtagatttttgtagccatatgaaccttgattctattgtacataggagcgattggaagcaccagaaccatttcttgatgtgttaatgctaaggtgtctagacatcttggaagcaagatcattgatattattatgcttttcaatcctactttcatgagttagtaacaacaattgtatagaatctacaaaaagattatcaacaaagttggtcacatgaacaacaatagggtcagattcaagacccaatccatttatcaaatgcatgattaaatcactctcttccattggatgaccagttttggaaagataattagctaatgttttgaccttatcatagtaattagagattcaaagattacccttttgaattgtcgatagctaagatttgattaggagcaatctagcttttgattgactggtgaatctttattcaagggcatgccaagcagcaaaggatgagttgtgatgagccaaagatccaaggacagtctctatcatggacgaacgttgacaactgagaattgatctttcctcttccaggtagtgcattcacggttgagatcatcggtaacaagtcgctgaacaggggcgatgccagtaagtaagatgtcattgaggccatggccaatgatagtaaatcacttgagatttccacgtaagatagttcatttgatcaagacgaattgttagagaagaattcaatgaattctgaaaaggattctattgctgcatatgagcaattggctgaatgagagcatttggtagtgctggagtagaattagtgcgttatgggtttcaaggatccatgtgtgaccggagtcaaaggcttcgtgataccataaaagagtagcttatctgtacaattcctatttggaccaatttcttgaattgaatttcaaagaattgtaaacactactcagttcttgaattaagcttccatttatatgtgacagtcagtagtcccgggatccgtaaggggaaacaccgggt

SEQ ID NO: 323408 - DNA, 801 bp, Cannabis indica
tacgacataaatattaagtttaaaatacgattgcaaataaatattaaatttaattttttacgataatatgacgattaaatattaagtaaattttcaagatcaattcttgattggtctaagtcattaaatttttttacttatttttaaatagtttaaatataccaataagataatgacacgtgaataatgaattgatatctaacggctagatgcctacggaaatttaagaaatataattcaagtattattactgttaaaaattaaacttaaatatttatttataattaaaagttaagcataagtatttacactttaaatgactctaataataaattattattggcattattatcaaaatgatggaaacaaattgatgattgcccaaacaaattaattgacatctctaaagaccactacaaaattgataactagattttgctaaatttaaagcaaaatagaccagtgacttcaaccaacaaaaataaataaataaaaaaagaaagaagcaaaatagagccaaaacaattaattgagagcaaattgaaggaagagtgggttgatgacttgtcctaaatcaaatataggtaggtggctaaggtctaaatggcccctttaataaaactagttgagttcccttatatatacgaagaaacatgcaatatcaatgaatcaatcttcttgtcatcaagagaaaatgacaagtatttacataaatagctaaactaggacacataggggtgtttattcgatctaatccacacttttttggtcaaacaacattcaatccgcactaagtgcgga

SEQ ID NO: 323409 - DNA, 678 bp, Cannabis indica
ttttttgaagatgtaattgcaacaacccaagagaagggaaggaagagatacaattacaagctttgaaacaagagagccattaaactctctttatatgatccctatcaatgcgtagagcgtccctcgcttcattatgtgccgacgtgtttagcacataatgaaagagaacgaccattgaattagagtttttcttttacttttttaatgcaaaaaatgcagtaaagttactttttttttgtcgagaacttttgatttttaaaaatgaattaagttaaagctcatactgtttttaataatatttatttcatatttcttagattttttacttttatcaaatgtcacatttctcattgttcaaaattttgtgtattataaaaaaaattactagtaacatatttaatttagtacattcaggtacactttaattaagttgcaccttcaaaagtcattaatatctatgatcatgaaatatcttcattttatagggacaaaacaagtatgcctaccatagaaattttttatacatctatgcaagtaatcacataaatttcaaacatttaaaatagaaaaccccttatgactaattgaaatttcttagttaatacagtaaaacctctatttaagaatactctattcaagaataacctttaatttattataaaaaaattaagtcccaat

SEQ ID NO: 323410 - DNA, 1558 bp, Cannabis indica
ctcacgagtatgtaggtcaatattgtaagctcttaaagaactcattatctaccctttccagtgatacaattttgatctgttgcacccgagaagaattttatctttagcatctcaccatacactgcttatctcactgtcttattgccaatgtgtaatgcgagattgatattgctcgttattcattatcacttcaagaaaatttaattattactatgatttttttcgtaatttctgtgtctaattatccacatgtcgtgtctatatttatggctcgaaatatgggtataacaatttccccctaaaaaactctttctagaaccgaaaggtttttttttacagaagttacaagcagatattttcatctttttcagcaatgagtactttctttggtagtttcatcttctataaaaaatttattccatcattaaattgtgtgtcttttcaactgatggggttttaaactatccttttgtattattaggattgcaccccagctgcttgatctaaatttgaaaactgatcaatggctctccattcttcaatatacaagggtttttttaccactgccttcttctttactccattcgaaacaaaaaaaccagagagtataaacctattttattcaaaaggttcttgcaagcccagcttgtctttgacctattttcttcatgtaatcaatgccattttttttcaaccacactcctgttatatcccgaacccctattatcggagatttccaatgagaaactaccaatgctattagagaaacttagaagctagtaagccttcgttttccattctctttctttttatttccattgtttctattaaatgttcatgtatgaatttgttctgaagtaataatgtagtttaaattttagaaattctcttccctgaatttaattattttccgaaatttcaaaatcccgataaacatctttcttttccttaagaaaagaatgtctatttctggttcgaaactggaattttttagagtttttttaaatggttaggttctggcttaaatgcattatccatgttctttgacttgtttattaaagttgaccaagtggatcttattaataattacatcgtgggaacatggtagtataattgagtgggagcgctaatcatagatatgaaatctatagcttctataactatttagaagtaaaacgatgatttacttcaagattggcttaatgcaataaatgattgagcactcactttagtaattatattagtttactgaaatatcatttataagtagctaaagtgttttaagaataaaatacattgaagggtagaatggtaaattgtccccactcgatgtagatcatctatagaggttctttgtttatttggattgaaacaataggtaattcaaagtgtatctatttttggtatatagagtgttctatgtaattaagagagcaattctgaatctatagtggagttaggaagaattaataagttaagaaatttacttggtaaattttggatctacttattgtggcttgattacatagggtcatggtccccacactaactaggataa

SEQ ID NO: 323411 - DNA, 902 bp, Cannabis indica
caatcataatgagcctaaaaaaattgagaaaattacacccaatgtaaaatttataaagtttataaaaatatgaaaaaaaaaaaaataactcatatgggtatatttctagtatatggattttctaaaacgctttatagttgatctaatggctactaattcaggtctatactaagtattgtgaaggaaaatgcatgagattagaattgtttcgatggatactagatcaacgatctccatttatgattttcttgctctgttttttgtgttcactctcacttcgattcaaatgtgataaaaaatagtgtgtgtgtttttttaatcatttatgtatgtgtgtaatatcaattataaacaattaagaatacttattattacttgtctctacttaaatttttttttaattataaacaattaataatacttattattcttttgcatggcctgctggcgcccatgtgtgcatagggtcgtggcctcgactgagtccataagcaacgaaaaattatggcttgcatggccacataggatttgtttagatgaaatcaaaagttaaactcaagaaaacaagatcaaaacaaaataaaaaaaaataccaaacttggtcaaaaaaaatctttagcatggtctgtaggcgtccatgcgtgcgtatagggtcgtggcatcaatcgagtccacaagcaatggaaaattgtggcttgcatgaccacaaaggatttgtttggatgaaaaccaaaatgtaatgactgcatttttaatttgaattagtaaaggcaattagcactaattattggtaattttataattacttatgaatctaattatttgtgggtcccgtttttagaaatgggcattagagttataatttctcaattttggagattttattaaactctaggggtatt

SEQ ID NO: 323412 - DNA, 1464 bp, Cannabis indica
ttaatgatgaccatcataaatgcagcccacgcacttgaagcacgtgccattatgccaataagccaaccagaggcaccaaacaagcctcatttatccttcgctaaatgaggcttggggggtaaatgttgcccttgatttttccctaaatacgtgggcctggataaggatgacacgtggatctataagaaccaacacttacgaaaatcgactaagtcttaggcgaaagaggagtatctcaagaaggtgtgtcatggagtagacataagaagtatgtttactctccaagaagccgagggcatgctaaggcagttttgggaggtacatagatctcttgaatagtcacctcacatttaatgccgcatgagagaagacgtattcaaatctccataaacgacatgacagatggtgtaaccccccttttttggctattacactacaatcaaaaaggctagtgacggctattttatgaggaatcacatcgataaagaggataaaagattatatccacataactcttaagatacctatggtataggtcatgtatttcctattttgtatctactgggaatatgtgcccctatgaagctaacatagaaagacaagtgatctattcttagggatcaccccagagaaaaaaaggggtcaaacattctgggtttaaaggaatcaaagagagaaaataggagataaatccacgaagaacattctctgtaataaatactcgcattaataaaaaagactcgtggactaaggctccttaatgccccaaccacgtaaaaatcccatgcattaaactttctacagctctccctacatattatttaattggttggtgaaaacctcagtcaacaagtacattttggtggaaaatagtagaggtcgacgagctcggtttgacaaaattaaaagtaaatccaacttttgacaacttttgaagtagaactagacttcgagctaagcataaaagttctatatctcattctcatcttttcaaaacatcttcaatcgtccaattcctaattgtattgaagaagttatggtcaaaatactaatctaaactaggaatggcaatttgggccatttttgcaggccgggttgggcccttggcccgatgcggggactttggcccgattatattgggttcttatcgggcttcgggcccggccaggccccactcgacctgattttagcttttttttaaagacctaaattcctaaaaagacaccattcccaaattcttcattttgaactttgactcttttgacttcttgttctctcttgtacatttgggaatgtatttcgatttatagttgtgaaggtgagtcttgggatattatatatagatatatatatatatatatgtggaatacttcttaatgggtattacccattaatgggttataaataaatttaactataaatattaattttaaaaatattgaaccattagatcttggtccgata

SEQ ID NO: 323413 - DNA, 1119 bp, Cannabis indica
gtgaaatttagaaagaagttatgtcaaagaaaataagactagaagactttgagactgtgaagctcacaaaagaatgcagtgccattttgtagaaaaaaatgcctcaaaaggtgaaagatcttagcagttttaccataccatgtaccatcgaagggtcctcatttgataaagcattatgtgatcttgaagctagtattaatttaatgcctctttcagtatttaagaagttgggggtaggagaagtgaaacctacaaccatttactcttcaattagcagatagatcactaacttatcctcgcagagtaattgaagacgtattggttaaggttgacaaatttattttccctactaattttgttgtgttggacatggaagaggaccgtgaaattcctattatcattggtcatccattagttactagaagagtcctaatcgatgacaaggtggccatctgacagggttaacaatgaagcggtcaaattcaacatttatcaggcactaaggcattatgataacacaagtagttgtcactgtgttgattccattgaagtagtggtagaagagacgatgagaagggagttatgttcaaattcattgcaacattgtctaaattctgctcgaggataattacaagcaatctattgagtaccatcaaaggttgaatccaacttcaaaggaagtagtacgagctgaaattttgaaacttttaaaggttggaataatttatgctatttctgatagtagttgggtgagtactgtgaaagttgtactgaagaaagaaggaatgaaagtagtaaaaaatgaagccacgtgccctggctctagacctctacctcggccatagatatttaggggaatctgagctccctgaccaccacttgttccaaccgccctcctggtattttgcctggtgtccatactaattagaacagcctgcataaccaagagctagtctggtcagatcgtgattaagtaaaaacttactgatgccgcttatttggaaattaaaaacatgtgcctattctactatttgtctactaaaatgcttccataacaggcttttcttaaattatactattaaaataaactactaaagcaataaaagcttactgaaccgt

SEQ ID NO: 323414 - DNA, 636 bp, Cannabis indica
tttctctttttttttttaattaagaagaattgaaataaaaagtaaaaggtttaattttttttttccttgtaattcgcctgtaattaagactaaagtgacagatgaaaagtctcacctgtaattcgcctatatatatacatatttcagttatcaaaaattgtgtacctatactattatataattttaacttatactgttatatacaaattttttagtgtcttttatattactcctatatatgtcgagaaatactaatgtcgtcactctatttaaataagtttcaggtgtattttatcattactatatatataataaaaagatatcttaaatattaccatttaattaaatacattaattaagttatttcttacctatgatttttcttgtctgtttgttatctacatattagaatcatcgatcactacaaaaaagttactttacaaaatttgtaactaaaattaaaaatttatgattaattataaattattattattattatattgtgattaaaaaatttataactaaatgtattaatcaccaaaattaaaattaattgtgactaaataagttattagtcacaatgcatgttaagactaaaaactaaatagtgacattctttttttctttctttttttt

SEQ ID NO: 323415 - DNA, 1004 bp, Cannabis indica
tttagtaatgtttttaatattatcttggactttaatgattaattaatctattagtactaatataggaaaatcattttatttttaggaatattcttgtgtagttattgtaatttattgttgcatattttagggtatagttaagagttttattctgttattatttgattttatttcccttaaaagggattcttgtacatgttaaatacatgtatttttctgagaaataatatacaaaaattaccctctttgttgacttggtatcagagccaaaacacaaccctaaaccctaatcccagcctacctttatctaatccaattccaccatgtctgaaagtagcgagttagccaccacaaaaatcaatccctctgagactactattattccaatcaaatctaccactactgaatcccactctgtctaaatcaccactattcacttgaatggtgacgactttttgagatggtataaatcggttaaggtgtatatgagaggtcgatgaatgatgtggtatttgaatggtgagaagaaggctccagcagaggaagatccaatttacgacacttgggatgctgaaaattctacgattatggcatggcttgttaattccatggaggaggatatcatctcgaattatatgtgctatcctacaacaaaggaactatgggataatgttattgagatgtattttgatctcaaaaaccactctcaagtattcaaattgactcttaaacttggactaataaagtaaggcaaggatagcattatgaagtattttaattcattgaagtgaatatggcaagaattggatctcttcgatacctatgaatggaaatttatggaagatgacaaacaccataagaaaacaattgagaaaactaagatttataaattcttggctggtctcactgttgagtttgatgaggtaagggggagaattattggaacgcaacccttaccttctattggcgaagttttttctgaggttagaagagaggagagtagg

SEQ ID NO: 323416 - DNA, 1629 bp, Cannabis indica
aatataaaagagaatatatatattaacaaattaaaatgaatccaaacaaaaaaaaaattaaaatgtaatttatattaaaaaaatttgtacacgatatatacatgtgtatactattttctttttaatagaaatgtgagtttttagtgttatgatggtggctctatttctttttgttctacatgtatattcccaaagaattatatataggcatgtcaggtcaatgttattttcttatatacaaatacatgagccgaaatttaaatttttttattatgagagtaaagtaacatgtgcttatatattgcattattatatttatgataatgtttagttgtaggtaataaaatagaatagaatagaaattatttttatactattttttttatttagttgtattttaaaatattcaattattatttttattcttattcttatatttatgtttttatttctgataactaaacactattttactattttagtgattatatgataaggtctcttaacaaaattgaaaacataaataaatcatttttattttaaaagtataatgtatgtatttacatttttacgtagaataaacaaaattctctcttaaacttaatttattagtttcttaagtttatttttattttttctgtaaaattttttatgtaatacaatatattattttgtgaaatatttaaatatatttcttttgaaagtaaaattaaaatattattagtaaatttgtgatatggtatattcttttcttttttattattgtttgtaatagtatttttttaatattaaaaataaaattttattcttttttttctttgtaaattatatatttatgttgctaagttttttttgaatgtatatataaatcttctagaagagtatagatgtaattcaacagcaaaaagtccaaaatattgtgacttttaattaagttacagatatagatagtttttttaaagagtatttatatatataataagctattgttacgtgcaatattccacgtatacttacttatatttttagtttttatttttatcatgtgcatttttaaaattttataaataaaatagaatccacttatcaatattttattttttaaaaaataaataatatttaaagttttaaacacttaaagaaaataaatataaagtttaagaatattaaaattgaacatactctaatattaaaaataaaagtaaaaaataataatattacaaataatatattaatatttatatatacttaaattaatctaaaatgaataatatcaatattatatatatttaaaaaactaactctactaacaacgttaaatttaacaaaatatttttatattcttagggagcgtttggagtgaagttttaaaaataatttgattatagggaatattatgaaagagaatataattgtatagaaatgtgtaaattgtgtttagctgcatagggcaatatgtaatcatattcgagttcattgaattatactgtttagtttagtacaggaatcttctatattattttaaaaaatttaaataagaaaactttttattatacctgtttaatgcttattatacataaaataaaaaattattattaaagaatatatttattaattagtaaatattaa

SEQ ID NO: 323417 - DNA, 980 bp, Cannabis indica
tggtcaaatcccataactccgctcaatcccgatattttattttctcaaaaatatttcccactaagaaataaggttctaaacttacccatgtgatcgaactagccatccatcgcattttttgttgtcgaggagcaaaaattacaaaaataacatatttcacatataagtcaaataatacccctagagtttaataaaatttacggaattgagaaattataactctaatatttaattttaaatattttggtccacaattaaataaattcataaataattataaaatagcagaaattagtgctaattgccgttactaatccaaattactaaagcggtcattacaagttagatcacaacaaatgaaaggctagcaatctgataagaccgttcaaccagagaactgatagaataggctaggatctcctcagagatccacttcaataaagacttgttgatagatcagggagggtctatcgacatgctgatcaaccaagttccttaggaactaggacaaatcttccctcgcttaagggaagaaagacctttcatcaaaggtcaaacggtgaaaatagccagaacccagcaaccagcagcacggggggtcagccgaggatctttgggttagcaacacccccatggtgcagccaatggtcgcctagccatcggcaagagcacccttgcccatctagagaatagcacttcctccccaaggggagaaaggtgcccagaggtcaatcttcaactgaaaaggattgggagcaggtggaaacacccaaaatagcgattcaagaagtttaaccaatcattttagacttctagatccaccaaactctagcaattggtgtgatcttcccctgtcaacacataaccaacatcaatcgagtacggagtcacaagcagccaaacccgacctttgtaggtcttgtcagccatggaggagcgatgggaagccagaccttgcccaatgcaggtctggccagcca

SEQ ID NO: 323418 - DNA, 586 bp, Cannabis indica
attgagttgtagacagttcaaacttattatacagattagaaactaaggcaatagataaaagagatttgaattcagagtcccaaatatccatttgcattttctcgggaaccaaacaaagacagatgaggcaagagtaagggaaagcaagtaagtattgacagcaagggttgttatagaacgtaccgcctgaggatgaggagaactgcgcgagacgccattaacggtggtttgggttttggggtttgattgttgtaagtctttcgttgaggaatttagacaccgtacctacattcgaattacaacttgctactcgtttggtatagtttcatattagattgtatcgtagtgtattaatataatactttaattgatctttatttgtactaataggttctgtaaaattataaattctttacaataaactcgaccctaactctgaccatgacattgactcggacttagacccgaactgcaaccttggaccctagactcaaacccggattttgaactcgaatcctggacttgacccaaactttggaccataatcgagacttggaccctgaattcgaacctaaactcgaactca

SEQ ID NO: 323419 - DNA, 790 bp, Cannabis indica
ggcataaaacccaacacaaagctgcagaaagagtcagggagtttgaaaacagacatcgcataggtgggaatggcttggataacagccttaagaaggatttcctttcctcccttggaaaaaaatttaccctgccattttgataggtaagaccaaattctgtccttgaggggattgaaagaatggtttttttgatctaccaaagcattggggcagtccaagatacttatccatgtggttggtagtaggaatctgtaagtagtcctggataagggtctggtaagtgaggctagtgttaggggaaaaaagtagagaattttttaaaattaactagttgccctgatattttctgatactaggcaagggcctctttgatagcattgcatgctttgatatttgaacgacaaaatagaatgctatcaaaatttcttgctttaattcactgagcttttgatctgtcatttgcccctcctgaattctttcaacaaggttgattgtagcgtgacctttgcaagcttccttgtgataaactctataccagctcgttccatgtcttctaataattcccttgatggtccttgtaaagtggaaactagtcctggacctctacgactgcgtgcatcggctaccacattggcttttccaggatggtacattatctcgcagtcgtagtctttgactgactccaaccaccttctctgcctcatgtttaactccctctgggtgaaaaagtactttaaacttttatgatcagtgtagatttcacatttcactccatagagataatgacgcc

SEQ ID NO: 323420 - DNA, 658 bp, Cannabis indica
aaaaaattaacaaaagttagtataccatgtaaattttccaactctaaacccaagccagctaaacgcttcattcacaacaaaaactgagaatgagccatcaaagaaaaaatgattgtgactttcaggacttaaaccacacatatgatggcactcactggtaacagcaataacacataaacggatccttgtaacattttagaaatttaattataattaattaagacatattttataaaaaaaaatagataataaggctacaataggttagggaatttcttcataaataatttacaaaacgtattttgttacttacggaaattttattaaaatatttaagtaacatatatgctattaatgaaataaatttaatatttattaattttttttttacataactaacaaaaataaaataaaatattgttattttatgtctctaataataaaataaaaaataataattttagaagaagaagaaaaaaaattagtatgtaaaaagatatgtataattttattttaaattatattctccttacatataaaataaaatatacatttgatttattaaattttaaaatatatttgtatcatttatagtaaattttcaaattattatatttttacattaaaatattaattgtatatgtaatttttttaaaaa

SEQ ID NO: 323421 - DNA, 791 bp, Cannabis indica
agatcctggtaaaataaattccaacagggagaacctttccttttgttttctccctaatttgtgtgggtcccactaatttctccctttccaaaatttagtaaataattttatgggaataaatactataccattcattcacattccctttaagtaaacctgtcataaaagaagaacacacaccagagagaggcaataaacatgcatatacgatactctaccaaaagaataggctcaatcactcgaagtaggtttgggtcatggtcgtaataataaccatctttgtagtacccatctttcacataaccatcatcgtcgtcctcctcttccctatcttcaaggctttggtcatcatcgacatcatcatgcaagttttcagcatcttctcgattttcagcattagcagtaccttcttctcttacgccgcctggttggagactgggggcgagggagtctacctcctccataacagtatcttgaggagctttctttcctacgttattccaagtaaacaccatggtcgaggtggtgcggcagctagcaaactttcttcagctcttaataaaagcaccaaaatatttatcgaaatttgttgaaactaaatagatagagcttcaaaaagaaataatacagttataatagacaaataatttttatgtagtttgggcgttactgatccctagcccacaagtcagttatattgaccctttgggaatgcatttgaataatacaatgtgtatttacattataaactctagttctttactccttttatttctcttgaagaagaagaa

SEQ ID NO: 323422 - DNA, 556 bp, Cannabis indica
atattaaataaaactaacactacgtggcttggcacgtaacaatcacctatatatatatatatttatatttgatttatttgattaaaagaataattaagcgtccaataaactaatgaaactttcattttaacctaaaaactatttaaaattatttgaaaatttactaataaaagtgtcctattatagacttacctaattgtgattgtgattgtgatggtgattctcgtgtttgtggatgtgtgggtgggacagttaatggaatattcaacggtttcttctgttgagcgcaaacgacaaccaaacgcataaaacgacatcaaagtggtcccctaccccttttatttattaataataattattattgggagtgtgcttagcatgagccatgagtaataataccctaataaagtcccaattccatacatgaatcaagatattttcctaagatatttatataataataatgtatattttatatctttatatattaaaagtgtttatctaacgacaattcttggtttaacgattttttttttatttagccttacacgattaa

SEQ ID NO: 323423 - DNA, 636 bp, Cannabis indica
tttatcggttttttcggttcggtttgagtgggttattcggtttgggcggtttacgaattttttgtacagtcctacttaaagtacaatcaaaatttatataataactcacatagaaactatcgaaataattcaaagtgtaatttaaaaataaaataaaaataatatataaaataattttcctaaaaatttctttcattataataaataataattattaaaaaaaactattccaaatgtgaatgaaatcaaagtagaatgtaattttaaaaacaaaaggataaagtacaatgcaagaatatattttacttatattttctattcatttcccctcattttttatttttgtactttcaataaataaataataataataataatatttttaaaaataaaataaaataaaaaagaaaaaacagtagcagagaggtagagaagagagtagagctctgttctgtttctctctgttacttctcgtgatttctctctcttctttctctctctcattcactacccccaaaacccaactcctctttctttcttcactgctcttctcgtgtcctcttctccccacacacaaaaaattgggctttataatacatacacactacaactctctctctctctctcctctcctct

SEQ ID NO: 323424 - DNA, 770 bp, Cannabis indica
aacaagttcaagctgcgtaaccccagagctgatctgtcatacatgggcaatgcagcttttgtggagtgcacattggctcgaagaaagatggtctttgagagctaactgagtgtagaccaaactgccgcctatcgagaggggtcatcattagggaaccatgataaggggctggccgacccacttactaaggaggtgggtgtctaggatattaaccaccagtctggctagcctgttgatgttgtggcccaccttgactccgacgatcaagattttccagctttagactcggctccacctgcccctacacatacatagatagtatttttcacttattagtattcaacatcatgtttgtataatacagacaatattttcatgatctgtatggcttatggtcttttacatttagaacaatacttgttttcgtgttccatgtggcctatgacctttttagaacactacttatttttagccccagagtcttgatgttcgtatctttagcctgtaggccctctatttttgaacacttctattgtttgaccctgttttctttttatcatgaattgtgtgaccaaccaagaggtctttaattctggttatcttcttatgaccttcacatataagggtttgaattgactttctttagccaaagtatgctggaggacttatattattttaaagcatccaaacaacaaattgtataaaaactcataattttttaatggtaactatttgttttccgtattctttttcaaataataataataata

SEQ ID NO: 323425 - DNA, 1204 bp, Cannabis indica
agaagaagtggagctatttgctcgtgttcgggagcttgcccttgaatcataattgttggttctgaggagatttaatcaagtcttttgttcatctctgtgtaataggcctctacctaccacgtgtcccgcattacagctgccacgtatattgggagaaacttggggcaacaacttagaacaatcggttactaactcaatataatattaataacatacataaggaccattgctacagtatcgcgggaccaatccgtggttcccaaaaaaaggcacaaaattgactgcctataattactggaaatattttacaaaaaaatttatttttagtcacaataaaacttgtgactaaagtgaaaaagttttgattaattataaattattattcttatgttgtgactaaaagatctgtggctaaaaatattagtcacaaaattataatttgttgtgacttaatgtgtatttagtcacaatacttatagtgaataaaattaaattagtggcaacttgtatttaaatatcatgttttagtcataaaaaatttatgttataactaaaaaaaattatcgatatagattgtacttatttaatttgttttttttttgtattttttgtaacaaagtgttatttaattttattttttttttttgtagataaaagaagttgcagaagaaaccaaacaataaaacatgcagcaaacagaggagactaaagcgaatcctcatggtcatcctctctcatcctgatggcctcctttgcaagagaatgcacacttctgttgagtttgcgcggtaagtgaagaaaggaaacaccaggaaagttggagaaggagagcctgatctgagcaacaaggcttgaaagaactgaattatccttccaaatgctattaacctttgagactagatttaggcaatccgagaagacaaatctcggcagtagctgggatgaaagacaccaggagaggccatgatacagggcttgggcctctgctaagatgggggaggaggcgcctggcttctgaattgatgcagaatcaataatgcaatgagggccaaccttaaaaacaaaaccaagacctgtaatacataggtgttgatcaagagcagcgtcaacatacaaggctgaagtgtcctcctggatggtttcatggcaggaagatagaagatgttgatgagaggctgcgtgggaagtatcttgagaatgcagg

SEQ ID NO: 323426 - DNA, 1121 bp, Cannabis indica
ggcttaattggcacgtaacaatcaaaaaagagtacgactataacaaaatcgtaagataagttacttttgtcactacttttttttttaattaggatcatatgtgtaacaattttaaatgttaagaaggtttcgtcacaaatatttttgttatatatataaaaatataattgtgtacaatatagatatttaaaatgtgctgtaaattttttcaaaacttggcagatattttaaataaatatgtcaaatattagcatataaaaaaataagattaaaattaccagaatgtaaaaaacataaaaacgtaaatactcaatgtctattttgaagaggacggtaaaatcacctgttaattaatagtagctttggtaattaatccttgtaattaatttaaaaaatgcttatttatatatataaagtgtaacgtagtagtgaagccttatatgtacagtagtaaatatcactttctctcttttttatcatgattccattaacactagatagccacacaaaaataatgatgtaattttttaaaaaaatattacataatatattaatttgtgtgtgagacgtttataaacttctcataaatattactactaatagtaagtttataatttaatcatgcatctactattaatagttaagcattttgtaattaagacaattaatggaataacttcatttatcgtagggcttttttcataaatgtacaacaaaaacaaaataattacaaaaaatgtgcaaaaaaaaattattttaaaaatttatacattttgaaaacttattacatgaaaccatacatttttaatatgtttattaaacctcaaaataaacaatttcgtaaaattaattaaacagttttataaaaataaacaagttaaattatttttttattaaaagataaatgtttattatctattttagtatgaattattataatttaataagatttttttttaataaaatacaatatcaaaattataaacattaatgtatataaatataaatcaatacttaaaatattaaaaataaacatgacacgtagagtgatataataaaacatatgtgaatattattattttgtttactaaagtagtatgtttaataaatagaaaacaaaa

SEQ ID NO: 323427 - DNA, 826 bp, Cannabis indica
ttatttcatatagtattataaatttgccatataagtaattaattacattctgtaatgatgatatatataccactttcagatcagagaagaaaaaaaggcagcaatggtacaaagaggaattcaccattaaacaggagaaggttgctttgagattcaatttgtttatgcttgttgtttttattgtcatcaaatttgagtgattgatttcggaaaatataacatcgtaaaatttggaaaatgcttgtcttatattcttggtaggtggatttcgatttgtagttatatagaaatataattgcatggcaaaaatgaattgagtttaattgattgggtattcttgtaattgattaggcttaggcataggcataattacataaaacactaatttttatatttttacgttcaatttttttattttatatttttacgttcattttttcttaatataaaaacacaagaaaacaacaagacaatcacatgaaaataactaatgccctataagactaacaagatatcctaatacaaataggaaaagatataactttaaaataaaaatattaacaatcttttctatcttttatttaaaatataaaaaggataagtaaaatctttagaatataggattaatatctagagcgaatatctctatcttcatgggcggttggatctgtctcgaaattgtagttcaacttgagaattctagaagggtcgttgtggatccggcaattcatgcagcctgtacggcgccgtctgcacatgttggccagccagccttatttttagggcctagcctgttggcttttgtgccataaataaaaccaattac

SEQ ID NO: 323428 - DNA, 1124 bp, Cannabis indica
aagattacacattataaacaagatatagctttcattatcaataagcttagtcaatgctcttactgttgttcattaggattcttgtaagagctattcaatatctaagggtactttaaatgatggattgtaataaaccaactctatctttttctatacaaggatatattgatgcggattgggatatagttgtttggatgatagacgtatacagcactagagttatgctataatattttggaaaaaatctcatttcatggtcaataaataaacaacaagttgtagcagtttagagctttggctaatacaaataaagaggcatatggttaatgtctatattgtaactcaatacttttgtttctgttgcacatgttatttgagttgacaaccaaggagcttctcccttagaagctaatcatgtttttaatcaatggtcaaagcacattaaaatcgaccttcaatttttacaagatcaaatcatagaaaagcaattggagctgcgatttaatatatatatatatatatatatatatattatattcttttagcctacgtctacaccgtccatatatataactcaactcacctaatgcaccaccgaccacaccttcgttttacccaacaaccaaagaaaggcatgtaagctttttgacattagtaaataaagtttcaatgttgtgagattttttatatatgcaatttgtttttttttcttttcatattgctaaaaaaacgtacagatcgatcaaagatatctaaataagaacaacatcaaaaaagaaaaggacttcagcacgtgatttttcactcatacaatgaaatattaaaaaaaaaatctttgggtatgcgtggctaaggagtgatgggtacttcaaaatattatgaagatttgtacatgatgtgtactttggttactttagtaaccaagaacatgtttcatgtatcacgtttatattaatatatagatatatatatatatatatttatatagatactagcaaaaagttacgtgcgaggtacgtacactaaattttatgttaatttttttctatgttagttgaaagtgatacaattaaaaattaaagaaaaaatattattagttattaggtgagattattattatgtgt

SEQ ID NO: 323429 - DNA, 837 bp, Cannabis indica
ttttttttgtgcatgatttagggttgaaatatatgaaactattaatatgaatttaggattaaagatctatgatttttgagtttggattagacttgggattggagtaatcggatgtgttttggagaaaatttgaggtttttgcctggtccgatacatgctcgatgcaagcctgatatatttttgttgttggaaagagataaaagttgaagacgatagcccgatataggctcgatgctgggcccaatatagggtctgatagtgtgcctaagttttatgctttttttgttaaggctcgattggatcgatgtatggttcgatatgaggcccaatgtatagtcacaaaatagcacaaaaatagacacactatcgagccttgccttacaaaaaaggcataaaacttaggcacactatcaggccatatattgagtctagcagcaagcctacatcgggctattgtcttcaacctttatccctttccaacaacaaagatacatcagacttatattaggcctggaacgggcctccatcagactaggccaaaaacctagattttctccaaaatacatatccgaccattctaatcctaaatctaacccaaactcaaaaatcatgcaaaaaaaaaatgatacttacctttgacgacattgttgatggagaagacgttgggtctgtaggtcattgggtctgcggtggtcattcagttcgtgggtcattgggtctttggtcgcggtgatcatggagagaaggaccgaggttgtgggtggtgggttgttggttgagtccttggggtgagttcagagagagagagagagagagagagagaagaaagagagagag

SEQ ID NO: 323430 - DNA, 915 bp, Cannabis indica
atatatatatatgtgatggagatggtccaaattaaatggatgagatgcatgtgcagatggggttggttcagaaaaatgtaacgtacataaaaaagcaaacatggtggaatttggaaataaaactagagctaggtagcttgtagaagaatgttgatctatgacatctacttattaattcattgtttgtgtaaagtgttagagaggggaataaatataggtaggttgcaagatgtataggaattgaaataggatgatgaaatgatagggtgagagggttagagggtccaccattattggcgtatgcaagtaagtgatctgaaacatgtttgcgtgattgacgttaataaagagatcaagtttcctttcttaattggagaaagattatttattatgatctctcgaatcttacttactacccacatttggactctaaagtttattttcttcaaagaaatctacattaaccactttaaatataaagctacgcgctctactcatgcagtacatttcaatcccctataattatagcaatttttttttttaataatatatataattaagaaattatttacaaaataataagcaaatattaacttcatatcagcaaacaaatgtcgtgtatatgtattcaattattagtagggtgtttttaaattcattcaatctaatgataattgatgaatcatattataataaacatataaatgttgaatatttaattgtgatcacataagattgaatattatttttcaatatcatccaattagatattccatggaatgtccaaaaattcaacaaattaatttaacattcaatttaactaattaatattttcatttaatttaattaaatgagtaattagattttatattatacacaaaaaaatttattatataaaaactaacattaaaattt

SEQ ID NO: 323431 - DNA, 600 bp, Cannabis indica
gaattcattgtcaatggtttggtcaatctgaactgctaataattctccagtttagtcacaatttttataattctcgctagaggttcaaccaaatcaatccgcctaattctttacatatacttgatatattttttctattatgaaatattgatatttgggaacaattttaactaatatcgaaacaaaagtattatactttaaatgaaatcttccaatgggttaaaaaaaaaatcttccaattacactcatatctaagttcaccctatttcatttttaaaaatcttattcttcttttttctttaaaaaaaaaaaaaaacccaatattattacaaaattaggtctaattgaaataaagaagtaccccatgttctgtttgaaggagaccatcttcctcccttttaatctttctttctttctctctctctcaattgaaaatcctccaatctactggaattgaaaaatcttttaccttccgtcgctcctgatctccccctctgttaccatgatctcttgggcatttgatatggggttcggaattgatgggaatgaaaatgtcaaactaaattaaattttagtaaccatgttgagaatcatgggatt

SEQ ID NO: 323432 - DNA, 1029 bp, Cannabis indica
aaagggttttatttagggcacaaaacccaacaggttcactttgatatcaaggagaggatattgaacgtatataactatatgttcggtgccgtcaataagaaacgtgcattggatcatgtcaaaacttattctactatgctactgttttctttggagtatcttgatgtttattcttctagagatgatattaatttggttgaaggtccatattcagttggaaaaagagaactattgaattacaagtttattaaagggctttcaagtcaggtcaataggtaatttgtcctattttgatcttaatatttttttttatagaaactagttttattatttgctctgtttttaatgtgtcaattatggtattattttgtatagaaatcgattcatggactttatctttcctataatttattgttttgtttcatgcagtgactgtggagtatatgtcattaagtttgctaacttatttattcgtggaaaaattgatgacattccatctaagatggcaaatatggtcgcaagatatcgagatgatcttactatcagtttatttattcatgctagaaggaaaaaaatttgtggttatataacagatgatgaagtgttgaaaagggggcaaaaatcaaaggataatgcaaatgataaggcaagggataagacaaaggttaaagcaaaggatatgacaaagagaaagagaaaaggcaaaggcaaatgattacaaatgaatgattagatgcttataatactttttttttgttggatttatgtccctatgttgatggaaaacttgtttcttttggttttattttgtatttggtacttaaagatagtgttatatagttttttagtcgttatcttttgtaaagactgatgttaagttttagtggttatctttttttgtaaagactggatgttgaatgaatgccactttatattatgagtttttatttgtttgctctatttttttttaaattgtttttttttcttcattatattattttttttatagttactttgaatgtgtagtta

SEQ ID NO: 323433 - DNA, 784 bp, Cannabis indica
aaatatggtatttaaaattaataataacaaaaacatgaaataataaatactataaaataacaaaaaattacttaaacccataaaaagttagcaaagataaagctgccatatatttcaaagaaagttaaaaaaatacgatattaagtgtaattttctcttttaattaataacaaaaaaaaaaaaaaaaaagcataatgaatccacccacgtagcaacacaatgcttttctttttctttttcattaaccattactaatgaccagtttccctgtataagttaataagagcaatcttatcattctttattttattcatctaaatatatcattaaaattttactttatatattttatatcaaacttttatattataccatacattcatttttttaaaaaaaatatattactaattttttaaaaaaaattaaaatattttatttattttaaatatataatattaatatttacatatatccttttataaaaaaataaaattaaaatcttaaataattaataaaatatatttagactaataaatatagtattttataaatataaaatatgaataataaattttaaaaaaatttaaaacatctcatgaactatatttttaatttttttttttaagattctccatcataaaatgtgtgatcttattagttgtgaaaaaggctttctttctttctcttgttgatggatcaaaacaattttctggtgtacttttcaaagtaggtgaataatttatagatttttatatagtgtgtaaaataaaaattatatatattt

SEQ ID NO: 323434 - DNA, 998 bp, Cannabis indica
taactaataaatttgattatattgaaatgggttttatttgggacacaaaacccaacactcacagcgccccaaacactgtccgacatgctaactagcgcagacaatctctgtcaattctccaacaatgagaatggttgaggcaagcgtaacaacaatggctttgacaaacttaatggaaaaagagggaaatttaatgattttttacgccacgaagtctaagggataaggaggagaagtgcgcatgcttcactctcttaacaaaactcccaaagtaaagcatgcccagacagcccaggagggcaagtcagcaacaggtaatcacaaggctggcctccacctccaaaggctggcctcctcttgccaaagctggcaggcacatgacctgctagatcctgataggagcatgacctaccaaatcttggcaggagcctggcaagcctgaccttagcctgcaagcattgtatggccagccagccggcatcctgcagccccatgacttcccaagcgcagaggcaggtgtcagcaaaaaagatatgttatataattataactcattgtccatgttacaatatccataccctaatatacattgtttgtataaatatatattgtcaccttttattataaaataatataatacattggctaaaaatactaagaaaagttctataatgcacccccttaaaatggatgcaccgttacatctctatctattttagtatccgaaataatcctttagtcaaatttttctaatggtcatgtaaattatagttatttaagacatcctgtaaaatttatgaaattcaaaaaggtttaatacgtcaaaaactgcgttcaaacagtgtgttgcatgcgtgactattttattttatacgggtgtaaaatagactatttaaacattgtttttatattgtaaaatattttgaatttcttaaaattttgtaggatatcttaaatagctatgacgtacatgaatatgaaaaaaaataaactaaaaa

SEQ ID NO: 323435 - DNA, 2331 bp, Cannabis indica
tcaaaaatacaaagtaattgacttatgcataaataggctaccctcttattgtatgccacaagcttgatgtgttccaccttctaatcgaatcttgtcgaaacttcaagtgctcgaactccctttgatttccttgaagagtgcttgcatcctctcaaggtaagacttaaaaagcaatctctcgaaaacttgtagaaccttcttcccaaagtagcactattgtccttttttttggcaagtcaatatgtatatattcacaacaaaagtcaaatacaaactagagccaagctcaaaaagaaacattaattacaagctcttatgaccaatcacacccacaaatggaatgaataatatttttcacaataattacatggattgttggaagtttttgctcccacaaaacaatattcttacttttccaaacaaaatataccactgcagagataatgcacaagaaaccttttcttctatctttcaagattttccttttctaaagcatatgaagtagtttttttcagcttttttccattatagttcagcccacaccagtccataagatggtccaaaaccttcctgctgtaacagtagccaaaaaaaagatgattcaaatcttcctttgcatctccacaaagaagacaatcatcatttggaagcaacccaaattggtgcaaccaatctctcgttggtagtctctcaaaaaaagctaaccacatggtaattccatgttaaggaatactaaatctgtcccaaatcataatatatctccaattatacatctgaacattataattttttttttataaagactaggcgcaatagtaaagtgaaagttttgaaactcactttgagtaaacataatctttatcttttcttttgtttgcacaattctcttccaataccaacttgcttttttttagaacttgatagtcccaccaatcattttgctgaatatacaccgaattgatccacttgacctaaagattatcttttttattctcaattgcccaaacatgttttccaatagcgcaaagattccaaacggctatatctttaaaaccaaggcctccttcttttttatctctacaaatctcggtccaagcaacatgtcccgagccgtttgacatttcactccctttcgaaagataagctcgacaaatttgattaattttgttggtgattgactttggaaaaatcaccatttgtgaccaataaacatttattgttcttcttcttttgcagacttgaatacagattcaagacaatttaaaatacatataaacagaataagagacaaatactctcttctctacaaaacaaagacactcttttttctgaagaaataaatataatttaaagtgtatgaaagagatacatgacatagctggtataaggtatatttataatcaatatacatcttattgacaactacacacgttttgaacaagacctcaatttactagacaattccctaaaaaagatcttcaatcagcccaaaaatttctgtttctgtacctacataattgtataaaaggaaagtcttacttcggttttcttcacaagaagtctaattaaatatattaagaaactcacacaagatcaaatatacacagctggatagatagaaaaaggataagtcatccaacttaccatttatgccttattttccataaatagaatagctaaacatatttttctttcatatataaatcaatcaatacaaaaatatgaaaactaaataaatacctcagccaaatttaatcaataaataataaaatatttttgttaaaattaaaaatgtcaaaatagaattaacatacctaaagtaattattaatattataattaaatgattggcataatataaatcataatagtttgctatttgataatgggataaggtctaggtaaaggtacctgttggttgttttgttgtgttttgtgccctaaataaaactcatttcaacataatcatgtttacctaattaataaaagatcagaaatcattttatgttgcatggttcacatgatttatttcatgattatgtttaatgtataaattctattaagtccagaacatatataaatatatatttgttcatgattataatgtcgttagcacagtggaatataatcatgattatatgttcaaaagtttaattctcatgatttgccagttcattgactttagactgacatgataatcggtaataaggtatacttacaccttggataagtgttatgtcctttccagggtattggcaaagtttaccagtatcagatgtatggagtatgcattgaaagggaccgatattgatctcggataagatatcataaa

SEQ ID NO: 323436 - DNA, 571 bp, Cannabis indica
ctctctctctctctctctctctctctctctctctctctctctctctctctctctgtgaaaatctcaatctcatctgaacagagttctccaactcctaaaaacttccactcgtcgtacctccaaaggtgagtcgtgggtatatatagccttaggattaagatcttaaattcggtggctacaagaaacaaggttgttaagttagttaggaacaactaacttaatcaactccttatttagcaaagactccatatcaacgtaagaactagggccttcgagagcataaatgagcttcaggacacgagggtcacgaaccttactaaagatgcttctggatatgataaataacagttgaagtcgactatctggagctgtcattccagaaggaataactagccagctggaactcctatcgagagaactgaagaatggacccggagtggaatgatacttattcgagaactcccttccgaactcgactatcattccacaagacaccattcaggaccgcgagaaaactgatgaatgcggagacattttcatttagaggaactataccacacatatataaaaa

SEQ ID NO: 323437 - DNA, 1258 bp, Cannabis indica
aatagttgccgaaaatctcggtcaataacggttttttgtaaaaacaatactaaaacaacaagaaaactatattaaagtaataagaaataacatcaaaacaacaaacaaaaataacaacaaattaacaagagtataacataaaaatacatcaaaaaccgtatttctgtaaataaaatcataaaaatattttccgtacaaccgtatttttataatttcttttattattatgtgtatttgtgaaataatctcaattaataatcttctatttttttggggttagtttagcctctcaaacttctatattgttatcaaatttgagtatctgttataagactcgttaaataattatatggcgtcatggtgactttacctactctagccatgtcaattttctcatgccatgtcacaatgacatggcaaaattacattgatactattccaaacgccactattattgtaacctattttagatttaaaatcaactcaaaataaattcaaatttaatataatatcctactagtttaagcacactattatgttatcatttgttaatcaaatgatttgatgtaaaatcatatttaattaaaattttataataattaaatattttcatagataaacatcgtaaatgtaaattgttacaaaactcgagattctaaaatctattttttaaaagtgaacaaaataaaagtgtcgcagcgactaacaaatctgagctcatatttttttcgaagattcgaacattccaagtctaacgatctagatatatacaatcttcactaagcttcattactcagtgttgttctgccctagcctttacctacacacgaaacataaatttgtgagtcgatagacacagtaagaaaaatataaaacataaacatataacctgaattgtaatataggcgcccatacacctattcacaagcctaaaccgtgtcaaatgcgtatgattttcgaatgttctggacatgagtacagctagccataataccatatgcactcagtaccgcgaaagtactagtgtaaatgatcatccaacccaagaactatcgttgaggaattcatatcgtaatcttccaagccagcctcaacactcaggaatagagtgggctattagatcttataggatgaaaaaaattatgtattacagagtattctcaattcatgagacactgtaatggagataggcttgatcacaatctcataccaccttgaatggtgtatgcgtgtgagatgaggagagagagagagagag

SEQ ID NO: 323438 - DNA, 655 bp, Cannabis indica
agaaaagcataacacatatagcataacaccgacttataaataggtgcccatacacctacctacaaggcttcaaataaaatatgaacattctcacatttggtatgactggtcatgatatcagtaactaccagagctttgatcgcactgcgggcccgatactatatttgtatcgctgtgatagcatcaaaatattcaaaagtaccattgacaataatatctttcttaactagtactatgctcgtactaccaacccagtactatgatcgtaccgctataaaaatggcaattaatactctatggaattaagtattagccagaaccagtattatgcttgacccagtactatggccataccgcaatgatattaattcatacattctagcaaacataaatatataacacttgctagaagtgttgggttttgtgccttaaataaaatccaatttgtaacaccctgctagtttaggcatgttaatgtaatttttagcttaactgtgtagctcattgctagtcaacgaatttattgaaaattgtgattaattaaaactttacttaattaacaataaacattaaaatattatacttatcataaactgggataccgttttacaaaatatttacaaaagtttcactgtgaatattacaaaagtttgtc

SEQ ID NO: 323439 - DNA, 2056 bp, Cannabis indica
agtatatttataattcgctgacttcacggtcttaagcgggaaaaggatgtacaaactgtcgatttctgtattgacgagaaaccatcttgcctcggaaggacaaatcccgtaggagacataaacaacgcatagcgaggcatctgcctcgttgtatgtaaagaggtattgacgagcgaattggctataagaacacttagcatataatatacattatagtaactaagtgtgataacttgaaggacatgattgtccagtctgcaaggccttatggtcaaagagagcagttcttaagtttgctcagtacactggtgctcatgccattgctggaagacttgtgaataaaccaagttgttcatgtactaggcgagacacctcaccgagatacatttggtagcgtgtcctaatccatgtcagggttgacctctttaaaaaacggtttaaatcacagcggtgtgatttttaaatattaactatatttatttgcatggagcgtaattaaagcccacaattttgggaaatattgttttgagatttgaacttaaatgcaattaactgccaacctatattactacaaataggggcagattatacaaaaatggaaaagaccagagagaaaagggagtagactgattgtataccctaatttttttatcagaaatatcaaaataagataaactcatggactatgcagagttaactgcaaaacaacgtaaaaaaaacctggtgtgattatttttattcttcttaaatttcttataatttctgtgccaaatctattacgaaaataggctcataattatttacgaaaatttgcgttaacagtttggtgctttcattgaaagcctacgtgataaaaactcagaaaaatccttcctaactaaagaaggaatttcttgtccgtggatgagaatggggaaaacaacaacactcatcttgaagagactactcgtcgtcctagaaaagagccaatgggctcacggaggccacccaattcatgaacaacgcgttcaaaacgatcaacacgttcaagaagaagccaatgtggtgatgatcaaaacctagaaattgggaatgaggaacccgacacaaatgctggcggttctacgcctatgagtgagggtgcctatgaccccattagatacgtacggttggtcgagttggaaaatcgtcaactccgacagcgttcggctgaggcaaaccaacgaaacgctaagttggaaagggagggaggtagctgcagccagggcgacacaagaaaataacacacaaaaccaacatgatcttggagttagaaggttgtgaggtagacctcgggactcaagaacgaggaggcaggagacaactcaggaaaacccccagaacagtaaggaggagaaacctggggaaactggggatgctcttgaagatgaacaacaaaatgacaagggacctcgtcaagaagtgcctcaaagaccctggggatccataacctaggggaatgaaaataatgatttaccaaaatcttctcgtaaaaatgcgagcataagataacccaggactagggaacaggaaatccctcgtggtaacaagagaaatccttgaacttaacctaggacaagtgggttgccatcaagacaccgtcaacgtccttctctcactgatagggaggaggtgtatacaaaccctagcaagggacatgtatcgaacctttccataaaggagaaggaccgtacatgacgaggaaagttctagcttaggacatactagatctcgaaatcacaatcgatctacgcgaggaggggataggccttgacttagtgatgatcgagaaagcatgagttatacaaggagtagccaatctgagagttactcaggcgcaatgtcaacaagtaactatgatcgaagacggccagatcttcatgagcaattgaattagaagaagccgaatttacgcaagcaacatcaattctaaccaaaagcaagaggatcaaatccaattgcaaatcagcagttggaaaacaaattcaacaaatatcaagatgggaaactgcctgattacgactctgatgaggagctc

SEQ ID NO: 323440 - DNA, 449 bp, Cannabis indica
taattagattaattattaatgaataaatgtgttttaataatgtgtagtttagcatatcattatcgaagcagctacaatattttggagaatatcaatcgagaattgttggaatggtagggcaagcaaatgcttcgtccatattttcaggtggactttatatagtgagtgcagggactagtgacctaattcaaaattattatattagtcccattcttcgagctacctatccaaatattcacaactatttcaacactcttctcagaaattatgagcaatttattgaggtacatttaaatatccatttacactatatatatatatataagacaatttaatcacaaataaaaattactggtaaattaaatataatattcaatacaaattaacacaattagttaacaaaaattatgaatttcgttattaattatttttatttatggatgataaac

SEQ ID NO: 323441 - DNA, 1410 bp, Cannabis indica
cgcctatggtagttagggtgttacaaaaagtcttgatattagctcaagtaggacatcatcttcttgtattgacttgtatattcacctagaacataacctacaactagttgggaattgtggtgtaagtttaggtggttagcctgcgctttgtgtgctagcctaaggcctgtattcagggcttcatgttcagcctcgttattagaatctttgaaactaacttcgttgcctcgtgcatccatttcccccgaaagtgtccttggtgcaaggcctgtatcaggcaggaggtcaatgcaccttctaggttgagctgttttgctcttgttcttgcttcttctttggctcctgcttttctcctaaagttaaagatattttgagggatatgcttctatgattagccatgaagttggcaagagcttggcctttgttgtccatgcttggttaataggtggcctcattaaggtcgagtcttggtggttcacttgagtggtcggctaggtgctgcagcttttggtgacacctatcaccatgtctggttggcatgcattactttaggagttttggaaggagagtgaagcatgcacacttctcctcattctcccttaggcttcatggcataagaaaatcattgaatttccattttttccatcgtgttggtaagacccatcattgtttcggtttcctcaactattcacatttttggagaattggcagagatcatttacacgtcggatagtacttatggcactatgattcgatgtgcctattcgacactattttgcctcttatttaggctttccggatagcatcttccaactttatgaagcccttaactcgcttaagaaactccttcatgttgctcgtcgagatccttctgatatctttctagaagtcactcaacagcaggatgcctttgagtaaggtcgtatatctgctttcttttgtctgacatttgaccttgatggccttagccatgaaccgttgaatgtagtcctttaaaggttcatcttgtctttgctttattttgacaagatcctctagtcgtgaagatatttgtcttaaagcagagaactgaatatagaactctcgggagaattctttccaagaattaaatcttgctggggccagcttgaaataccattgttgagctatttaagctagatttgcaggaaagattcgacatcacacatctctagatacttattagagatctattttgaccacaaagtacttcaagtgtacgaggggattttccttccttgtgtacatcttcgaagttggcatcttgaatttgggcaagggcaagggcaaggcattgatgtatgccgagaaaggtgagccccttgacttgacaactcaaagtctgatggttttgggttggccaaaccctttagcatgtcctgtatttgatcc

SEQ ID NO: 323442 - DNA, 417 bp, Cannabis indica
tttgcagcaacattagtgtatatatatctcctatcaataattaatacttcatataattataatatatcaaatttgacttaccttataaatatagtttgacttaaaatactttcgattttaatattatatttcaagatcttgtacctttaaaaattatatgaaatatattgatcgataaaatcataaaaattattaagtttcactctactattatattgatcgaaaagaaaaaaaaattattaggtttcactttacatattgattgaaaaaaaataaataatatttacaattaaaattcttatataaaatttagggaaatttttatatgtatacattatatgcattaatattacaaaaaaaacgttatataaaaacaatccatccatataccgtgacacgtcatcacccataccgtta

SEQ ID NO: 323443 - DNA, 964 bp, Cannabis indica
tgactcttacatcattcatcgagctcttcatgcacttctcatctcttttcgtcttatcaatacaacctacaacactgataataaaacatggagtgttagtaacctcatttctcattgtgtagctgaggaaatcaagctgtaaaaggagaagcgtgaattttctcacaatgtttctcaacttaaggccaacaaaaaagattgagaaaatatgaatagaagcaaccacaaccaggggctaggaatctcaaaaagccaagcgagagagagtcaaagctcaaagtggcaatgatgttggagtcgatattatttatgttggcacatttattcttgaattacagtttagtgttcaaattgttttgagcaataccttctatgttcctacttataagaggagttcaatttcgcttccgcttttggtttaataatgatattgtttttcttttgccaatcataatgttgacattatgtttaactttagattaggaaaaatatttttatttattattctgatggtcttttaaattgccattagctcccttaacttaccctcttattttaaggaaacatcattattatgacatgatagattgagtcatatttcttaagaaagggttgatcgtttaattaaatttgaaattcttcctcatcttgatgcttctggttgggatacttgtgttgattgtactcgtgaaaaattgactaaaataagagagacagttgctaaccgtagtcaatctttattagagattatcctcactgacatcagtggaccttattccaccacgtatgcagaaataagtatattataactctcatagatgatttttctcaagatgactttacctatttaatcaaagaaaaatctgacgttcttgataaagtcaaaatctttcgaaatgttcttgaaatcaattcgaaagtcatcaaagttgttctttcagatcgtggaggagaatattatggt

SEQ ID NO: 323444 - DNA, 872 bp, Cannabis indica
aattggttaattactagaaaatacttggattacaacacagaaaatctccatctcataaaattcataacaattattattaattatttttttagcacaacaatttataataattaaatttagagttgatgaaatttgtaaaagtttataatatgattaatataattttttttttgaatgatgattaatataattttgattactttgtgtaaagatgcttgatattagtgtttactaagttaaaattatgaccagtacttctagtacactaattgaattttagtgtttatttattattattattattatttataaatttgatttggctaagttgatgtgtcaaagaacaaaatttataagttctgctgaaatgagaaataagcgtattagtgaaagtttgagattagagtttgccacgagtgatatgttagagagacattctttttacacattatttgttctacaatgatttgttaatattttggggattttagctttgctattttatttgccaaaaatgaattaaacatctaatttaaacttttaataatattttgacatgtttaaatacttttgttttggtattaataatttagctgattagaaattttgtaacttttaaggtcgttaaaaatgccccttgaactattaagattgttggatttaaggacttttgtccaatttagtaaaaaagactaacatggatgaaagttcagggggcatgatttagtacatttcaaagttcgagaggcatgatttggtatatatcaaagtctgggagcatagtttaacacataaacaatcactaaaatagtaaaaataaatgaaattagacaaaagtccttaaatccaacaatctcaatagttcaggggta

SEQ ID NO: 323445 - DNA, 669 bp, Cannabis indica
tttttttttctttttcaatttttcacaattttacatgattgctttataacagatgaagtgaaaccaatcctacaataacagatgaaattccaatatattaatagactaataaaactaaaaaaaaacacattttgtgatgaaaacaaagggggccttttgttttttttttttcggcatttttacaattaaatttgtaagagggttcaattatgcattatgtgtaaagattgatttattctagttccaattcccgtttttaattttcctttgtgatttgcttgcagatttggtggagctactgaaaagaaaaaataataattcttttttcaatttagatttgggttaccattatagtgcaagttttttcgagatttagattcgagagcatattttcttttaatttttagaattagaaagatttttttttttaaaaaaaaaaaattcaaaatgtaattgttttctcattttgtaacattttgcatctaatttactatttttaaaatttcacgtattttcaattaatatttttttcaaattaagcatataactaaatatacttgcacgtaacttctgcgtagtatatatatgtatatgaaatgtctatagtggagaccttggttttgtccctatggtaggtatacttttctagcccttgattattgatctaat

SEQ ID NO: 323446 - DNA, 774 bp, Cannabis indica
aggtacctgaaaactaccccatccagtccactgaatcccttaacggttaaccgtttctattggaacggttagcttatacctagtagaaatcacaaacctcaacttttctcgatcaaccccaaatctaaaaatatcttacaaaacacatattagcaccataataaacataattcaacagaaaattgcatcattaaagatcaaaaaataaaaataccattgttaagttaagcttaagcttaaaaactcaaactatattacagccatcaaaccttctcaaaatcaacaccaacaaacatatcttagaccccaaaacctaattttaaaaacatcaaaccttaacagaaccgaaatcatgaactcactcaccaaaaccatgttttaacctaaaaatcagagggggataaattgatcagtacccgttttaatagcacattaactaaaagtacctgcaaaataaatttagttgaaatataccttcttttataattgaattacccaatataccctcacctatctatcaaattcttttcagtccctaatgcagccactttagattcaaccctagcaactaaacgcatgcaatctgtagtctgccatagccaacatcgatcaacctcctctgccatctttagcgtcccttaacctccagcacaaaaacactacaacttcgcaaccgtaactgcaaaagctaaagtccttaactatttgaaggtatgtaactttctctttccattttgaattagtattagtttctttctccaaatcttgtttctt

SEQ ID NO: 323447 - DNA, 544 bp, Cannabis indica
caataaaaatgtaactattggaattctcttattattttatttgtggtaaaatatatacttttaaactttcacttttttcaagtctaacatgcctttttaattatttattatcatgttatttattatttttccgtttcgaaatattagtttgacgtttctattagttcttataagtaacctatctattataattcttaatgcaataattaatatttattaaattagttaaatatatccataattattataataaatttatgttgaaaagtatttaactgattctcactacaaaaaagttgtcaccaaaaataatattttttttatagtgtctgctcacacacagtacactaccaaatcattcatacaggttgaataaatataaatatagattttgctcacactcccaaatcatttatgcaagttaactaatataaagtctaaatttactcaaaactaatttatctatttttctttctaaattttaactttcctattttttatctattttttctctatttttccttttttttttctctaacttttc

SEQ ID NO: 323448 - DNA, 955 bp, Cannabis indica
gtgagttttcttaagcttaagctccattaaaaaatctttaaattttaacccttaatttttatcgcatgaactcatccgtagatagaaacattgagtgccacattcactatattgacttgttattatatattgaacttaagattatatttttactagtattaagatagattaccatcaatgcatgagaaaaatactaggggagtttaagtcccatccctcaaaaattcatgctttaattctaattgaagatttagagaaagaaagcctttgcatggcaaaagggggagtcaaagtcatagtcacagcaaaggaccaagtaaaggatacatcaacaacaaagggagacctaatccagaagggtcacaagacatagaaggatatttaattgtgggaagcctagacatttcaagaaggattgctatttcctaaacaagaacagaaaaagctagttcaatggacaaagagacaactacaactcagaatccaaaatccctaaacatagaacagatcaccaaaatgcaaatttgagtgactattattaagatggagaagtttatgctgttggatcatctttagagatgattggatattagactctaattgtacttttcatatgactaataacagatccattttgactgattttaggaactcaaaaggtaaagggatactaggaaatcaccaaagttgtgatatcaaaggagcaggaacagtggcattcaagatgcatgatggggtcactagataactaactggagtaagctatgtccttgacctatccaaaaacttattttcactaagtgtgcttgattatttgaaaatagagatcaagatcaaggatggacaaataagatttgcatggggtcaatgacaatcatcaaaggaactaagaaggaaggtctatactatctagtgggagaacctatagatagaagcaactgttgggttttgtgcc

SEQ ID NO: 323449 - DNA, 697 bp, Cannabis indica
ttttgaaaacagttttcagaaataaattaaaataagaattttgaaaacaaccaaatgttattttctgttttaaaaaccaattcaattttaatcaatattatttttaaaaaacactaaccaaacatgacttgtgttttaaaaacttcaaaaattattttttgttctcatatctaaaaataattttttaaaaacaatacccaacatgctcataatcttttgatctccttaagaaaaagtttatataatgaattgttgtgaatgattgttaggctgtgttctctaatactttttcaattggtcttttagtttttgaattaaaaattgaaaatactttcagaaaaacatgttatataaatatatttttactttttaatttttaaaatgagaaaacaaaaaaaattactttaaaaaaaattatacaaacttttttaaattataatctatttgtatttttttattagtatttttggaccttactgctctgacgttggattcaaatccggatcccgacccagacctgaacttgttgcgataattttgcacacgcaagtgtacgtatcgtttcaagtagtagactcactaggagtgaggtcgatcccacaaggagtgtagttaagtacgttaaaatcaaaattttacttctatttgattaaataaaagatagggaaaaaaaaacaatgaagtataagaaaaagag

SEQ ID NO: 323450 - DNA, 773 bp, Cannabis indica
attacaggttaaagaaaaatgtaaccatatgttacaataaaaatgtaaccattgaatagtcacccattatcatatatatatatatataaataatatagatgcaattataatatataaatatatatctttttgaagataatatttattaatttatttatccataacttgtcgaatgatgacctctcttctcacaacaaattaaggaagtgaacacactagtaggttgatggccaaaactttttctttcaagtcactatattgcacttcaagacaaaattacaagcacatcaaccaacccccagtacaaatttttcccataccaattttggtctttcaaattcaaacctatcttccttatttgattaaatccttctagtcgatgtataattatttgtttcttaaacagagcaatataccaacaaatatcttttacttcctgatgccacaaagctcgatttctttcaatccaaattcaaaatacatttaaaactgaaatgcaccgatccaatgccaacccagctccacatttccttggtataccttcggctaaactcacattgaaagaataaatgagtgtgaattttaggtttatgaccacagatcatacagttaggatctacattgaagccttgacaaattattttgtcctttgctcttaacctcttccaaatcaccaaccaagttacaaatcagtgtttgggattagttcttaaaaattactttatgtttttaaaaactgaaaacagtttttagtttttaagttatgaagtcaa

SEQ ID NO: 323451 - DNA, 896 bp, Cannabis indica
aaaagtctattttgtagtagtgtggtctggtggttcttcattttcggcaagatctggtctgtgcaatttggtggtctggtggttgtcggtctctctcaatcgcggtcgttggtctctcccaatcccaactcggtggtggtcccgttgctttttctatgcggatttccaaattccaatttttccagtctggtgggattgaatgggtcgatttgtgcaattgggagttgtcgggaatgtgtgttgggacagtcatgtagttgggtccttgcaccatcaagatagaggggtattgtggctggttagggatggtggaggcttactttgtcgtatttttaattatgttttatctttaattattatttatattatttttgtgctgactttttgtttttataatagggtgaccatgtttgatgcataggtggattcgggtttggtcccgttgtttttgtactatatttaatggttaatcgatatataatatcgagaattatggtcgtagtttgttgtgttattcttttttattctagtttgaataattgggtgtctcaacctaatttttattaaaagatctttcgttgattgtcattatatgaaaatctagtattcttcacattattttaatatttcacagccgacgatttaggaattatttaatggaagatactgctagaaattttatccctcttattgtaaacaacttaatttatctatttatattgattttgctcgatgaacaatatctacatgtaatggagtaagtttgatttacctactaatagaaatttcatttacctttcaaatataaactaaagggattatttcacaaatacacaaaaataaacaaaaaaaaaaataacaaaattacaaaactatggtttcacggaattttaaac

SEQ ID NO: 323452 - DNA, 811 bp, Cannabis indica
tctcttgacacatttttttttcttgtgatgtagatcttgttgttgataaatcaataaaaggattattctgataaatagctcttctatagagttcgttaatatcaaatttattagtttactattatctatttaaatgattggtcttaactctagagcaagaatgagtaatagacataaaattatctatatagttctatatttgttggaataaaatgtttagctaattttgtgcgtctaactgaaaaaattatttcttcttcaaacttttcaattttcttattcattattcgtgggtcctccttcttcctttccattctattaacgaataatttataataattcctaaatccctaactattctcgaataacacttgttttaatagaaatttctcgatttggaaattcgtcgtagccattagtaaaaaaaataatattatcttggcctcccttgtgcaatgggatgaaataaggatgctatcttggggtttttgaaagctaaaatgcagaagcgcattcaaagctgggagggtcgtttcttgtttatcgctgggcgtgaggttctaataaaatctgtagcgcaagctttgccaagctttgctatgtctgtgtttttactgcctacttgttcacatttggaaagcattatggctaagtattggtggaggtcaagttgtaggaagggtgtgagttggtttagttggaggaaactatgcaaggataagaaatctggtgggatgggttttcggagtttgcatgagtataatctctcgttgttgggtaagcaagggtggcggctacttctgcaccagga

SEQ ID NO: 323453 - DNA, 1275 bp, Cannabis indica
ctacaaatctccaccttgacttcgaatgtacctaggttgcaaaaaaattaacactttgatagcatagcatttccttgagtcttcactctgagatctgcaacagattaagacaatgttgaaacttatcttttggtaaagctttggtgagcatgtctgatggattatctttagttgagacttttaggagcttgatctttccatatgcaatagtgtctctgataaagtgatacctcacatctatatgtttggttcgttcataaaacacttgattcttgctgagatgcaatgcactctgactgtcatagtatacttacactatatcatgttaaattccaagttcccttgtgatgcctttcatccatagagcctcctaactgcctctgtacaagcaatatattcagcttcttgttgaaagagcaactatggactgaagatctgccttccaactgattggttgttgttaaatttgacgacatatctagtttgtgattttctggagtctatgtctccagcatagtctgagtctacaaattccacaacccctcaattctcattgtttggtccatagattagtctcacacttgaggtgccttttaggtatctcataatctatttgttagctttccaatgttcaactgctagttttcccataaacttgctcactatgcttactacatgacagagatctagccttgtgcacaccattaagtacatgatgcttcccactacacttgtgtctggaactttctccatgtagcttttcttcttcctctgtgtagggagcttggtcactagacaatctaaactgttgagtgattggggtgtttactggatttgagtcagtaacattgaacttggacaaaatctttgagatgtatccttgttgagtcagtttgattgttctcttagttctgcttctagttatttcaattctaagaattttccttgctgcacccaaatatttcatagggaattatttgcttaacagtttcttgattttgtcaatttttgttttgctcttacgtcctattagcatatcatcaacatataacaatagaaacactagtccttttgtgtttctcacatgaacacaacaatcataggaacttcttttgaaaccaattttggtgtataaattcatcaaatcgtttataccattgtctaggtgactgttttaaaccatataaggacttctttagcagacaaacatggtcctcctttccctattcctcaaagccttcttgttgcttcatcaatattgttggaaattatttt

SEQ ID NO: 323454 - DNA, 911 bp, Cannabis indica
cacctaagacaacaacttaaggagtgaatacaatcacttcacacatttagatccacaaaaccccagcaattggtgtgatctaccccatgttaacgcacagtatccactagccaaccaaggaggagtggagggccaggccctgcccagcatagggcttgccggccatggtcagttgccaggcttagggctatccgaccttcagtatactctctcccagggtagggtcggccaaactctggtcaatttggggatgcagctcagtcaagaaaggccaatcaactagacccctacaacaacgaatccttctatgcaagcacacagatcaaatagaagacatgctccagggcctagctggtccaaaccatttagaacttgagttagataggtcaaggggatcaccgttctcaacatacataaatgcctcgcccttgcccaaattcaagataccgacttcgaagatgtagagggggaaagaagatcccctaggtacatctaaaatactttgagatccaaatagatatcaatcaagtatctagagatgtgcgatgccgaatctttccagcaactctagctgaaacagccaaataatagtatttcaagctcgccgtaggaagatctaattcttaggaagagctcttccgagagttctaaattcagttctctgctttaagactgtaatgtcccggaaaataaataatatttaaatagacatatttcattaagtatgtaattattttggtaacgaagtaagattatgatcttgcttagggtaattattgagaatttactcaatgaaataaatagcgtaatttattaattacggagattatattgggatatgtgagtactgtggatattaattttaaaataaaatatttttcaggcccaacaattgtggaaatttagcgatg

SEQ ID NO: 323455 - DNA, 1189 bp, Cannabis indica
tcaaataacactagaataacccaaagtcccctttctaaaaaagaataatccaacgacttttcttatgcaggggcatcatcggtcaagccgaattcaaaaggctttacgtgtgtgtacaacatatatgctgtttaattgtttattttatttagttttttcttttacaattccaaaccaagaagtaatttccttatcttaactgattaatttgtttgtttttaactgttggcttttttgtttgaagctattgggtatttctaagtttgaaacttatttgatagcttgcaataacaagagagggctccacttggcacgaagaaaatgattaatataataactagttatgagattgtgttgttttttttttttttttttgtaaacgatgagattgtgttgttgaggaagccaaaaggaccaccaccattcagaaattagttggaaatatatgggtttcattttccaaaatgcaggcttgaaaactcgatgccatatctcttcaaggcattgccatttcctttgacaagttgtcacatttatttaattaatttgataatgcatatcacacatcacacacgcattagatttattctccaccaagtttataactcaaataatacaaaatattttaaattattaaagggttaatgctattttggatcaatgtattataaaaaattactgacggtatcttttgttttattaaataacaaaatagattatatattgtctaaaatagtacaaataagatcttgagtttaatttttgattttttttaatataaccaacttgatcaatacaatttcgagcacgatcagatgtaaaaaacgtaactagttttgtcataacacctatgtatcaaattattattatgttttagtttacgaaaaaaatcagttaatggtactatttattttagaaaatacaaggttaaatttatcatttaacaaagtaaagggctcaattaataacttttataaaatacaggatctaaaatagtatttatctattattaaatatacatgtataaattagataatgaccttcactggaatatggctaagattgtcatcttggtgttttttgggtagggtggtttgaaagtttaagtttcgctttttcgtgcccgagccattctttattttctcattgagagtagagatggaaatttataccgcgaggatgggtaacc

SEQ ID NO: 323456 - DNA, 711 bp, Cannabis indica
attgattcggtggcttgactttgacacaataccaagttgttgttgttttactttttttaaaataaacggacccgccttacacgtttgcaatatcactttcatcacatacatattaatttttttatatataaaaaaaattgaaataaagttaagggggtcataaattaatacctttgttttttttaaacaaaaattaataccttgttaataagttaaaaatatcccgtttcaaaaaaaaaaaaaatcagttgaagaaaatcatccaaaaaaaaatgtagatggatttgatgttacctggcattgacgatgaatcaaagacgtggagactaggcaaagtgaacggtcctgatgaaaagacgagtatgtacgtacggtgagatctgacagtggatgaaatcttagggaggatgagagtgagactacttactgtaagccttgtgatctttttcttcgtttggttcctcaacgcacactgtccttttcaatactgacaacaccaaaccatgaagtatggtaaaagtattaatctaccattttatttttatttttcaatattttgaaaatattaacataaataaataaataagctaccatgcccgagttttatgatatcaaaatagcttaccacaacttttacatttcaccaaatggtctcttcaaattttgccaataatataacttcactgtgtaccgtgtatttttttttttttg

SEQ ID NO: 323457 - DNA, 1680 bp, Cannabis indica
atgagggagttatttgatctgagggctgagattgatctaggggtaattagggttaaaaaatagtaacgtaccctgacactcatctaatgtaccatgagacacatctaatgtacccccgaatacattccgtgaatatacatcacgggacaaaatcgtgtccctaactatatatccacactattttttatgtatacatttttttattatatattaaattttaataaatatattataaaaattgaatataaatatccacacacatgtttattgtagagagtgaaatctacaattacagaaattaggcattagcaaccaatcaagaacaaagaaatagacaaaagttcaattgggagcactgatggggtgttagccagagggattccaatgctcaagtcagtatgattgtagtaaaaaataacaataacgggaaataaatgaaatgtaaatagtagtcggacggatgagtggacaagcggacgggcagactgaaggaacaaatatggtagtgaagcttaatagaaaagtttagaaaggaccactatatgcttcagtcagtgagtagtgtgagtatcgaatgttcgatgccctgcgtctaccgtatggtttcttttaacatgtgtcctcagtaccgttgccctccgtccacatcatccattagattcgttcaggttggttgcttccctaattttaagggaatagtaactgtctttctgactggttcaatatttacttaattccacctatttcgctgactgggtaggcttggacccggttgcagggtgaactggctcatggtccataaagctcacctgtttgtctatttcaaggcccaatgagtttgtctggctaccttattgggcctaataatatcagattcattactgatgagcccgtctgacttgcatatcgggcttcttaagcatgttgtaaatattaagtaactttttacctctacactttgtccctcactctccaacgagaattcattctagtttgagagtttataatatcaaaccaggtgttactattgaatagcctgggtgttggccaagtggttgacctacctaagttaagcggtgtacgcgtgtcttgctgtttgagacaagaaaattgcctgaatggttcgagcatggcggttgagtagtccttgctgcatgcgtgtatgtggctatcttggccgagtaatgtttatgtgaataattagttcttcaaaaggtctcttatctagaccaagtcgtcttgttggtcaaattagttagacagacgcttggatataaattgcttataaaagtcataggttgggccaaataaaaatattttgttgtctatctcaaaatacgagatgagaggagtagatagacgtacatatatatgaggtgtaagaaaatagacgtttgattgcgtaaagaaatatatgtatatatacatatgttgtaaggagataaacacatatatggtgtaaggagatagacataaatatatatatatatatgttgtgtggggagatagacatatatatatacatatatattgtagggagatagatatatatatagtgtaggaagatagacatgtataatagggagatagacatatatatatatatagtgtaggagatagacatgtatatggatatatattataaggagatatacatatatatatggtgtagggagatag

SEQ ID NO: 323458 - DNA, 666 bp, Cannabis indica
agagagagagagagaataattgggaaaaaaagagaaagagaatgagttggattctgatttatagaggctctggactttgggaatagggaagtaggaaaacaaaaaactcataattcaaaaacattaaaatattatgccataaaaagtaaattcttaactttttttttttttcatatttcgtgtagattctattgaaaaaatttaaatctgttttaaaaaaagagttcttttatttttacgctttaaagcaattttttttttttataatattacaaaaattcacacaacaactaccgaaacaagcagccaaaatctaaataacaacgtgcataaaaaccatcataacaactaaaaccataaattaaaaaaagttcaaaaaatggtatacatggaaatattctcaacataaggagtactcttaggtgatgtttgctttgatgtaatgtaatgtaatgagaatgataattgtaatatgaatagtaatgtaattaaataagaattgtaataggaataatattatgatgtttggtttaactctgtaatgagcattgtaatgaaatacataagttgtatattaacaaaaaaagttttattatttttaatatttaaattttttaaaaaaagtaataaaaaaagacaaaagagatatttcttaacaatgtaatc

SEQ ID NO: 323459 - DNA, 1031 bp, Cannabis indica
atggaggccgccaatcttactgccaaattgatgctataaatagctcttaatcaacacatttattaggtccagaaaaaactaagtcaaccaaaaaagaaataataataataataataataaaagaggattacttattattgtcataattttcttcttttattaatgaaattaaataatccactaggactagtctatgatatcaccacaaggcaccaaccaataacgaaaccgctaagcactactttaaagttttctttctttatttagtgcatttgaatgaggaatgcaacctatttggactattgccatttattaattcacactttaaatgccaaatacatgactcaaatttaaaattgagaaatttgaagcaagaaaacaacacttaaaatacacccttttatgacgtttttcttttctctttcggaatgttggggtaggtatcgtttactttatttatttttcatttatttatcttactttattttttttatcgttctactaaattaaaggctttgttttcaaaatgccaagtaaaccttttttttaattgatatatagagatgagtttagccggtcccataagaaaggaagaaaaaaagtacatattggtctactcacccatttagttaccatttggatacacgagaagtgcagtagtctttcagtcctttcttttttagttatatttgatttatttttggccggacaccttgttgccatttcagttttaatgttaattttgaccaaatgaactgttatgaaaagaaattaaattccatgaatcaactttgaatcttcaaatttatatttcagaaaatatactttgataaatagatatgacataatattgggcattgcagtgtgttacgtgcagtctatgatggcacgttacaagctaagtgatgcccacaagttggccaagtggtggcgcatgttgtggtgcatgcaggtggcatgctgatgcttagtttgtatgcagtggcattttcgtaaatatcttcaatattgtccggatcgggacgggactt

SEQ ID NO: 323460 - DNA, 1067 bp, Cannabis indica
gaagcttggatcgtcaaaatggcgcgaaaatcttgagaagatggaacaatgtggcttcaacctctagagaaggaggagcttcctcaaagtttttatttctaatgagagaatgaaaaatgcaaagtgaagagaagtttcccccaaaagacttaaatagattctgtggagtcattccttcacttgccacacagtactcaaccaaaaagcatgtagaagtacaatgtagttaattaatgagatcagacattcaagagcaagtatttcaaagactaaaaatgcagcaacatttattcagtaaagggtatatcagttcaaccttagctgataagtccctatccacacagacgtctacatagggacttgggggcacatgttatcccaatttttgcccacctgatgtggcatgcttatgtggacaatatcagtgccacgtggtagtacatctcaccaacaaggaggccaagtcagcaccttagctaatggaggtcccaacactcaaacgggccgatgagctatagaccagccacctcaaggggctcgctagccacccctggccggctttatggccggccagcctgcatcctgcaagtgtatggctggctaggattagacctggcaaaacgttggtgcacaaccttacacgtggactgcaagctagactgcaaattgggtcttagtagcccacgaaatagacaaaaactacctatttttaaggagaattttagtcttttgtattttaccaatttaatatgtaaatatctcttactttatctgttgattagggtttaagctctcttatataaagagccttaactcaaccctaaaatcctaattaattaagtcataactaagggagatctaagccacaaagctctaagtctgataacatttcacacacacacacccactatagcatcccccaacccttgagatatgccatctttgattcctactttgtaacctatcagatcctaccatagtgatctgaatgttgttatcttttggtatggttaggtctttttttggcgatttagttgtcaaaatatttttcaattaaagtgcatttt

SEQ ID NO: 323461 - DNA, 1725 bp, Cannabis indica
agaaagatacaacgtaagtttataatatctttaccaagatcaatatcgatccactctccattcatccgatactagcatattttaccgatgccctagaaaggacataacaattatctaatgtgtaagcaagctttatcgctgactatcacatcagtgtaaattcagcacactaatgaatcacgagacattaaaatttgaaacatataatcacaattatctttcactgtgttgacatcactctaattgtgagttacaatatattttaaatttaacagaaattgtatgtcaaaccataaatatgaaaaatatatataaacttaaatgacttctaatcttctattgataacaaataagattatatggaaatatgttttatttaggacataaaatcctaacagagccatcattttatggagatataagggcccaataaaaacttaaagcgatgacgttacgaagtagtatcagagtctgaaaatcacgattaatttattactcttgctttttttttttttaacttatattgttaattaatactttatgaattatatatatttagaacacagtttgatatataatccatatttaaggacactaaggcgtgcaatacgagaatcacagtgacatgtttggacttaattaaattaattaattgggaccaacttataataatattacttgtaaaaaaaattataataattaattttaaaaattgaataatttttttaaaatgtgtccgtacgacgaatatacctattgccaccaaccaaagctttggcatatgcaaatcctgccattataaagactcaacttgccattaattactgattattaattttaacatatatatatatatatatatcgatacactttttatttattttgggattaaaaaaaaaattagtgtaatttttttaataattatctatgttatataattatttaagacatattataaaattttaagaattaaattcaaaataatttataatatagaatatagaaagtagtgttcaaaatcaaatagttgtttcgcacacatatataaaataaaaaaatcacgtgacaacagactgtttgaaccatatttttagcgtgtaaatttcttaccgaaggtctcaaaattttgtaaaatatcttaaatagctacaacgtacatgactataaaaataatgaactaaaaagtttttttatgcggaaatagataggagtatatcgttgcatcccttttaggagggtgcattgtaaaattttccgtatatatacacattatagggtaagtttacagtacacctctaagagttgttttgttagactccctatctatttcggtacttaaaaaaaatttagttcaattgtttttcatgatcgtatatgttatagttatttcgaactacctgcaaatttttagaaaattttgagcactttacaatactaaaaaaagatatacatattatgttgtacgcagtactgtgttttcttatacgcatggtaagtaactgtttaaagcttatttttggcattgtaaaatgtttgagattttcttaacatttacatgtggtcaaagctacaacatacgctatcatgaaaaaaatacactaaaaaatatttttgaatgtcgaaacagatgaaaaatctactagaacaatcgctacatacaattttatttttagtcacaataaaatttgtgacgaaataagttgcgactaattataaataataatt

SEQ ID NO: 323462 - DNA, 1294 bp, Cannabis indica
aaaaatattttttttcataaatattaaataatttactgttaaaagtaaccaatccaatccccacttttgcggattggattggattggatttaagctattgtgcgaattgaaatattggatccaaaatataaaatccacatttagtgtggatcagatgcactataagcaaaatagtgcgaattgaattgatgaacacccctaatatatatatcatataatataaagatatataatataatatttgagtatatgttacatgataaattgtatatatacgtgagatttataatatataccatgtatataatataagttatatataatatacatatattgagtatatatatgatataatgtatatgtgtgagtttatttatttaaataatatgcatataatatatatttatgaataaaaatattatatatgtagatagttcctctaaattataaagttatatattcctagaaaagttacttactcgcgaaagtagattctggaaggttttattgtcctatcgggaagggtcctcagaaaagttagccttcctccgaaaaggagttttgaatggctagttgttccacctaaaaaagagttctagatagttgactccaactagctctatcctatccagaagttctttctgcgaagtgtttttgaaagctctcatacacgttttcagaagcaccatgctgtgaagatttcgctcaaaagagagttgattaagttaattattgcctaactaacttaacaacctcgcttcttgcagccatcaccgattttaggatcttgatcctaagcctataaataccaccaacactcattttagagacaacgatcaaagtgagtttcgagatagagaaagaggaaagattgagaggtagagagagaaaggtaacgagaaaagagagagattagatttggatttttgtatgaagaatcatctttagataaagaagattcttaggtaagagtgagagttgaaaacactttgagagaactcatcacagaatctatctcggctgtaatgtacattgttcttgctcaattaaataaagaggatttggtggttccagaactggagtagagtcatatatcacatcaatctaccaaacttgaacatgtatataatctctgtgtttgatttttattatttctttgtcttttgttttcatttctagttttatactatgttcatccatgttcttctccaactattgatcgtgatttgtatttttatcattgttacgttattttgaatttttgtaccattagtttataaatttttctctacaa

SEQ ID NO: 323463 - DNA, 663 bp, Cannabis indica
gtatattacatctaattttgaaaaatatttaataaagttgaaacaaaaataaactaatttaattaatttgttctattaagtggagggtgacctaaaaactactaaattggtagtaaaatttaatttgtaagataaaaaaaaatatttactgacttaattacaactttgaaactatatgtaaatacttaatagtttaaatgcagtgttgtagactactaattaattttactacaaattaatttttaaaataaaatttaattgcataacttataaaaacttaaacatttgaataatttaatatcatgtttttttttcatagttaaaataatattccaaaatgatattgttcaacaaaaactttaaaaagatatataatagtaaaatcatagctctccgatctatgacatctggtcacaatgatcttctttgtgtataaattaacaacctatatattagaaaaactatcattattcatgtcattaaataaaaagactttatggtaattaataagaagactaatgatatttttgtaatttattatagtagaacgaaaagagtattctctttttatatagttactagttgggtctaacgtgcttcgcacgtgagcccatagttcaaatattttttcaataaatttgcaatatgttacttttttagacc

SEQ ID NO: 323464 - DNA, 1223 bp, Cannabis indica
aaaatcaatttcagtgattaaccttccttctattggttcataattagttttcatcaaattactgttttatccttctaattacttcatcatttagtgccattaattcgctagcagaagtataatttagatcttatctaataattattaagtagagttaataattttattcgaaattgtaatacatgtatacatattatatttattctaaaataattttattatgatatagtattaattatttttttttttttttatttttagggataattacataagacacaattttttataaaaaaaattacttttttgcgtttaaaggattttttttatatatttttacgatttttcatacaaacaacacgaaaacaacaagaaaactacataaaagtaacatgaaaataacatttaaataacatcaaaactataacaaaaaatagcatacatataacaaaatatcaataacaaattaataagagaacaacataaaaagactgtattttactgtaaataaaaatcaaaaaaaatcgtaaaaaatatttaaaattccgtgaaatagtattttttgtaatttttttatttgattttgtgtatttgtgaaataatcccttatttttattcttgttatttttggtgtttttttgatttttttttttatcttagtgtacctttataaagttataacattttaattaaaatataatttacttaaccttaagtgtatttttagatagaagtgacatagactcttaatatgactatacctaatacataaaatcataagaaaaataaaaaacttcataagaaaaatatagtatagtttacatatttaactgactagtaagaataacgaaataattatttatcaaaacaaatctttaaaattgttccaaccaaatccatcaatttattaataaaattatttccatctaaatcctacaaactatgaaggtgacaactaaggttctaaaaatgtaatggcaattttcattctaaaataaaacaatggttactgattgtaaccatttgtaagctaagatataagataggcttactcattcaatacgcctatgtgaatagtattctgtttagcttgtgcaagtgagtacaggcagggccggccctaggcataggcgggctaggcccgtgcctagggcccacacttttcgggggcccgaaataaaaaataaaaaaaattattaggcttttatttaagtaaaatttaa

SEQ ID NO: 323465 - DNA, 870 bp, Cannabis indica
tgggccctatcatgttactaggtttagacagatgaaagaagtacaaatgtgagcaaaatttttagtcttaaaaatttctcagaaatagttgtgttgctgcacaaatgcgagcaaaatttttctatgcccaggattcttctagttgtgggtactttatcaatttcttccttattcttcttctaaattttcttgatttcctatctagaacgaattacccctgaaggctttcatttttgcatagtaaatctggtgggaacctttctaagtagtttatgggggaggctttccttgctccctctctatactagatagtttgggtagctaactgcttggttttctttctttccatggaaatcatgtccaaaaagctcgaacaagaagagcttgagtcggaagaggaggccaggagcaggagaatgatccaaaattgatgttgaatgacattccattgaaaattgatcagtacattaataaattctggatttatggtaacctccagaaatacgagaccctataagggcttgaaagtgtttcggggttgtactggaataggctctctgttcatggagagaaattaagtaaatgtgctgatgggggcttcggcatctggagttaggcccatgttgcgatgggtgcacactgtaatgaccgtattttagaatatggattagtaaagacaattagcgttaattattaatattttacaattatgcatgaatttattattttgtgggtcccattattagaaatggacattagagttataatttctcaatttctaagattttattaaactctagaagtattatatatgttaaatatgaattgtgtaatttttatgatttttgctcggcgacgacgaaaaaggcg

SEQ ID NO: 323466 - DNA, 595 bp, Cannabis indica
ttcaaaatgtcctgaagaataaggatattgtatgcaattgagcggcccttgacaaacgctccctagttctgactcactaagtgtggaagaacattagcaagccaaaaacaaatcaacttagaaacacacttgtataagatagtgcagcagacaataggtcgatagtctacagctttagtagggctatcagtctttgggtcgatagtcttttgtttttattttttattttttttttttactaaaaaaaaaaagttaagaatttatgggaaaaaataaacttaattaagagtatatatgtcataaaccaatatttacattgcaaaagaaacttataattttaaaaattataaagaaaacactataaaatgatttcttgttctacaaaaaaacaaccatatttttacaaacttattttaaagtcatatcattttctgaaaaaaatattttgactaaattttggagcatttattttcctatatagttttctactataaaaagaataaaaatgaaaattgcatgtgaaaaacatatttttggatattctcaagaaaatagacatattgatgtattgttttttttttattatttttagcta

SEQ ID NO: 323467 - DNA, 824 bp, Cannabis indica
gattttctctaaaaagtgagggacatatatatatatgttggaggtttcaatagttatataactataatagttacatttattttttagtggttagattattattaaacaattgtgattaatttaaaattttattaaaaataattaataaattacgtataatttaatactaaactgattttatttattttcttaaaataaaaaaaatataattattaatttaaatctaaaaataaaatttttacttattatagcaggtcataaaaatactcacgcatataaaatttatatatataaataaaaaaatatgtcttattctacaatcttttttcacaagttaagacaaatatgggtataaaatctcacatattgttgatggacttgttcatgatagtaagtgtgcaacaattcatgatgtcaacaaaaacatgtataacaatatctactaagtatttgataaatatctactaagtatttgacaaacatgatatgcatatttattaagtatttgataaatatcgatcttattaggtatagtagtctttaatattagtatgggatgatattataataataataggtaattagtagttttctatagtagttaaaatatatgagatttgatattgagtcgcactaataataatataatactttttaatagtacttagaacatcacgagtggacataccatgtaagaataaagttggtcttgaaattgggtgggccttaggaaaataaaaattattgagccatttattttaaaaaaatatgtagtaactttgaaaactactgaaaaatatgtatatttttaaagagaaaatatt

SEQ ID NO: 323468 - DNA, 803 bp, Cannabis indica
taaatttctcaaaattttattaattgtcttaaatagctataacgtagatggacatacaaaaattaagctaattttttttttagagatgcaacaaataagggtgcatagatggattcattttaagggagtacatcgtaaaagtaatatatttaattttataaatacaaataataatatcaatatctataaatataaatcaaataatcataattaaaaaaaaagaatgttgtagctatagtgccatgacatatatgttgtgacttgtagccacacgacatatatgcggtgaagtttgctgctacattggatagattatatacaccaaatcttaattttagtgtaacgttggagttgctcttgagtattttataaacactcttaattctgacatcttatgacgagtaattcttctccacaagtacagcaaaagtccaaagaataaaagatagaaggaaagaggttttgataaaataaataaatataaacaaaatattaaatagatagttaaaaaagagagtaatttatggtataaatatttaagtttaactttcagttacaaatagatatctaagtttaatttttggcagtaataaattgtcacgtggtaatccatgattaatctatgttattaaatttttaatttttttttttaaaaaaatgagtttaaatataccaataagaaaatgacacgtgaataatagtttgacatttaacggctatgtgcctacggagtttcaaaaatatatctattgggttttatgccctaaataaaattcaatttcaatgtaatctattttattcaa

SEQ ID NO: 323469 - DNA, 885 bp, Cannabis indica
gtatttatacctcagagtttggttaaaaaccctaagtcttcctttatagctattaagtagtgttttgggataaacacttattggtttatcattgttatgagatagggcccgggatcatcgatcgttctccaagtaggtcggccaacatacctgaactgaaacttgaggtaaaaaaagtataatgtaccacatggcatgacaggttctgtaattgttgattgtctgattaggcaatggcaatgtgatgacacatggatatgatatacgagctcaccttattaggtgatgcgttacacttggcggcgtaccttattaggtacgggcggcagtgatatgagaatgttaggctatggcatagattgaaaatattgttggatttcttcttggcggcgtaccttattaggtacatgcaggagtgatatgtgagtatcaggctatggtacaggcttatttgattacgcgatgtaacatattggtgccagattgtggcacggctcacctgattaggtggtgcagtgatattatatatatgatgtcacattatgacatgagcttgcctaactaggcaatgtaatatatgagcgaatctctttttatgcatatgcctgattatattatttactattgaatgttatgatttaatcattttataataatgaaatatataattagttatttaatatatcattctttaatacttttcttgccgagtttgtgcaactcacgggtgctctgtggtgcaagtaagggcaaggaaaagttagagcagtcatgcggtgacattcttctttagcaatgtacatattgacccatcggcttgcgtgtcgagttgtcaggagttgtttttgttagactataatgtagtgtatgtaatatagcatatac

SEQ ID NO: 323470 - DNA, 1245 bp, Cannabis indica
aggaggttgacttgatgtgagtgtggactttataaaaatatataaagtaacagcttggttcatgtgagatatatatatatttagatttcgagcatcttctattgaggtggtccactttgttaataagaattttatttttctttgactcttttgtatcccatgggataaattttgggataaagtggaaaaattagaataaatcaatctgcattctgacttgacaatgtttctttttttttttaagaaaaattaatgggaaaaaaatgagtatttagtgattgatgaataataatgtaagattcaagagttgttggttataaagtgtagtaggtcaatttagtgtggcatttttataaagaataattaatacgtcttatcgtcaaagaataatatgacattgtttacgtacgtactacagactccacattttatttatttatttatttataaaaactcttttttgtatggtttatttcagatcacttccatattttatttccaatttctgatttataccgttgccctttttttatttagaagatcttcgtatagtatttttttttttttctttattgagtcaaaatataggatttgttgatacttgtctttgttgaattttgctaatctttccttatgattattattattattctattttatgataagcaatagacaaactcaaaaaatactacaagattggcttgacaaatggttttcagtaaaattgtcatttattagacccttaaaaaatcaattcaactttctctaatttggggcctggattttttttaaaggaatttggggcctggacttaagggatccataatagcccaaaccagtcttacttttggagaatcttcgtttttataattttaaggcaaaagtttataaaaatatatcttttttcaataaaattattttatgggaaatatattaaaaaaagtttaaaaaaatataagaaaaatattataaggtaaccaattacctaagcaggtaactggctgtccttaactacttttctcacttttttttttttggaaaaattaaactatattttgcacaaattatatgaaaacccagcaatttcctttatatttatatatgtaaatggtcatatattattatttattttttaaaaaaaaaacaaaagatatagtggtgagattaattaatgtcgaaattatacaaaatatgcctttttctcttaggaaattacataaatatgatttttttaaaaaatatata

SEQ ID NO: 323471 - DNA, 1593 bp, Cannabis indica
  modified_base (280)..(280): a, c, t, g, unknown or other
cacataaaataagttttgggataatggtaaagtcaattcataaggaggtcatgagttctaatttcaataaaagtatgtttactttaatatttttattttactttttgaacatctaccaataacacttatatttaatatcttaattattgaactaaatatattttattgttattattttgttttttttttttttgctttatactatatttaatactaaaatataaatttacattaacttttaacatgttatgcaatgtaaaaaaaaaaaaaaaaaaaaaanaaaaaaaaaaagaatgcaccctcattataaaaaaagtatcgcccacctcaacttaaatcctgaatccgctactgtccttgggtttatatttttggtgtgataaatcttgtcaattattgtcttattacaatgatatactttaattggtaaaaccaaataaataggtgtattatccttgatcctgagtctatttataagactgttgttgtcgaatctgactatttggtctgtgcaagctttgtccaattcagtcaatttacttttctccttttggttttatctgtttggattgtaaatatttgcttcaaaccctttctgtttctaatgttgttattttttttgttaaacggtatgagaacaaaacagttcactgattaactagctatcgtctttttcattgagattgttcccaataagttaagggtcattttagtggctgattgctaatgaaattgattaagatttatttcaaaaaaaataggtttattatcagtataatatcatgtcatgcacatgtcaaataaacatatttgtttaatgtggaaatattttcaatttcaattgtgttgccgaagtacttaatatttttttattattttatacattgtattcgtgaaataattttgcaaagctaattcttttattacacttaagaaaaaaaaaatattttactatggtgatgggttttttttttaactaaaaattaatttttattaaatcaaatcagctaccaatatagcttctaaacgggcggaaaacacaatcaggaatggaaccaaaagaatgagccaaaaagttaaccacctggttctccaatcgtttaacaaaattaattgaaatgagaaacaaaagagaggactgcataatagcaacacaatccgtaattaaaagccccaccggagacaacaccctctttttttgttgcacggcttgtaccaacagcagtgaatccgactccataaccacaaactatggtgatggttaatatcatgtatattaatgtgaatttacttttttttgaacatatatatgtatttacttaatattttaaatttatacatggaatgtaatatatttattttataaatggaaagtggcttgattggtgtagtttattatgatttaatattttagtttttgaagtattctatatagaaaaatttacataatatatcaacaaaatttacaaaataaatcgtaaaaaattttatttttacattttgaatttttttatttacaaaaatatatcttcaacaaaaataataaacagtttttcagttattatgaggttattttataatttatttataatt

SEQ ID NO: 323472 - DNA, 661 bp, Cannabis indica
attaaaataaataatatatatatatatatacacacatacggatatatatatataggaatggagggggtcagccataatttggtcataaatggtggtggtggcggtgtctggtggctgtcgattaccagtggtggtcaaggaaggaagtcagtccaagaccgacggtggtggagtgactcactaagtcaagctccatttcgacccaatacgggatgtgtgactcgttttggagtcgtgaggcctgaggactagttggtcctcctttgtaggtctgtgaccacgagcacctccaggaggtctggttgactccacctactctggccatgggatcatcaggtccccacggtggcctttggtccaacctgaaccctctcgggttctctcccctttgtgtatgtgcattgctttgtatggagtccatgcacacgtgaaaaaaaaatcatgtggctcacttttgagcctcatggcttgtagctgcaaccctttgtggttcgtggctcgtcattcgaggttcaaaagttgtcatcttgatgacgctagggtttactcctaaaacccgagctcactcatcaatggaggtattgtggactttttgatgttacaatttctaaccaaaatttacaaataaatttaaaaataaaattacatcaaaacctatacc

SEQ ID NO: 323473 - DNA, 641 bp, Cannabis indica
actaaagttcagggggcatgatttgatacatgtcaaagttcaggaggcaaaaatcctaattagccaacatattattaataacttccatatcccaatcccaagatatctctcgcccattagccatcaaacacagttttaccctttactaattaatttttgttttacataaaatatatttttttattctaaagaaagagatataaaattaaaatattaaaaaaaaatatatttttttataataaatagttttgactaatatgaaactgtcacaaggagaaattacaattttttattatatattaaaactttttaacactaaaaaccaattttggttaaagaattaaaatacaaagctttaatttgtacactaatagtgcgagcccaattttgattcaactaaaagagttgttgtgttagttctattagcgcccaatttaatccagattatgagagtttgtgtgtttgcgttaagaattgataaaacatctataccacaaaaacctactaggattaggaatgcacatttttcctaagggatggaacccgcggggacctgtccctaatgaggcgggaatatcccgtctaaatgggaaacgagacggggacggtgattactttttgtccccgaatgttaaacgggg

SEQ ID NO: 323474 - DNA, 845 bp, Cannabis indica
gtattctattcactttttttgtgtttatttttttaaagtttataccattggatttatagatgtacccattgcctaattttaatatttttaataatttttaattagaaaatttaagttgataattgacattttttaatttataattagagagtgatctctttttacacaaaaaattcaagcaaaattatgaaagtgaagattcaattgactcgattgatggtagcaattctggcttttgaaacaaaattccttttaaagattggggctcgtgctttgttttgagttttctgtttctaattagtgatttttacaaaaatattaaattttgggcaaaaatttactattttactgccacacgaatttttttaccaaaatactgtctttttataaaacaatcataaaataataaaacaaaacaattaaaaataactgtagaacaactaaaaaacaacagtggaataacagtgaaaacttacattatatttttgaaaaaaaatatgccccacagtataaaagaaaaaagtaagaaatttgagtatgtggtgtaaaaactcctaattattatgttcaaatatccatttaaatttatttcacataatatactacttgattcccttaatgcatgggtgagactgtctaatactcatatatagaaaatctgtcaactactattattattcctatcaaaattttatgaagctaattcaacaaaaatagcagtaaatggtttagaaagtctcactcaaagaacatgtgtaactcacgtgctctcatcactagtgtgtttatatatatatatatatatatatatacatatctattctatataagtgtgcctatataac

SEQ ID NO: 323475 - DNA, 1750 bp, Cannabis indica
agagcattgttgctgttttggttatgggtattcttgttcaagggtttaacggtataagatttttatacactattacacattgtatgcataaatatataaatatatatacgcataatacaatatagtttgcagattttggagaaagactgaaaggaagataacttagagaagtgggtttcagaaaagctttggtgatttcccaccacataacccctgagaaataaaaaaaataaaataatatgaatatagttttttcttaaataaaattatatttcagatggttattaatattctacacgaaataataactaccaatttatttatttatttatttatttattggaataaaactagtaaaatttcattaaccattaaaattttcgattgtagtttagtggaacaattctccaactaaagcacacgattattagaaaaacaggaactccttacaagataatgagctactttatttgcaaatcgtttaacaaaacacaaattaacatgattataagacaataatgaagtacgaacatcttgaactaaaacaccaaattgagaagacatgaaaatattgctttaaataatttggacacaaaccaaactattagtctcaataacaacttgcccctaagagtgtcgagcaacccaacttaaagcttccttaatgtcaataatctgagcaatctccgattgaacacgacccaacttgccaatagtgtaagcttcaaccatgtttccacaataatcacgagcaacacaaccaactccaaagcgacactcctgctcaaacaacgcgccatcaacattaaccttggtctggtttgtaaaaggtgtaacccaacgctcagttactcgacttccatcaaggaggcgagacaaagaaaaacatttcctctcttgagcgaaactgtattgatcaagtgaaattcttgctgaagcaacgatattggcagcaatctaacttttttgttgccaaatgaaatcgtttcgggcccttcaaatcgcccaacttacaatggccgcttcctccatttcaccaactctgcccctgctctgcaaacccagcagccaactacagaagtcttcatccctgctactgtcgatatccaccatagacctactccagctagctcgagcaaaagaacagaaaagcgtagtatattgtttcgtcatgtgaaagacataaaagggcagtgtgtactaatgggaacatgtcgtttttagttgaaagcatgttggcaaagaacctgatgtagctctccacaagaagtttcaatccttaggtggtattttaagattcaaaatatctctccaaaaactagtagagttatctaaggaccaagttcttaaccagctgcaaatgcttataagcactttgaactgcatactgtccttgtttatcaaattttcaagcccaagagtcatttaaagttgagtcactcaactggtctccttcttcgaacaagtctttgatgatttcttcatcccaaactcgagcctccactctgaacaagctgttaacagttttattaaccagtgcatgatgtattgaagtaacaaaactattgtgattattaggtagccgtggatctcttaggatggacacattatcacttgtgctaatagaccaaaatgcaactgccaggatcaaatgtaccaatttatttatttgtgtgctgtaaaaatgttcatgtatttttttcttttttttttaaaaaagtaatattaatactatatattttcaatttta

SEQ ID NO: 323476 - DNA, 2676 bp, Cannabis indica
  modified_base (38)..(38): a, c, t, g, unknown or other
catttttgaaaaaacgcatgtcctttgatttcagcggngttgcagttttgaggtacatcaacattaatgaccatcttttgcacttccatttcaaatcctgtttgtaggatcaagcatctctctaatccaacgaaactgatttggagagtaaataagaaaaagaaaccacctttttattatttcttccattttaggaattttggaaaacttttaagctccattgctgaaacaccaacaccgagtttgcttgagaatttgcatgccatctctgtccttgaaattttttctgctagtttcctcggacttcacaatctcaaagagactctaactgtattcaaatattcacaggtcgaagagctgtctatcgccccaaactctaacttcaaacattaagtagctttttttttttctttatatcttacatgcttgttacgttgcatttctcgatttaattactgcatcatttgtttgtatcctttccatctcatttggttttagtaatttttagggttgaattgtatgtgggtcaacattagcgttcatgcaatacgtaagttttttttaggatcttcaactcaccacttcaggttttataaaattctttccttggattaggattgctttcttcttgcagcaatgtcacaatctggttcagaaatttatcctctagaagatttagatcttgaatttcctacagaatcactcgtcccttacaaacccaacccttcaaaacccacatccaaattagagttaaacgatgctagggttagggaacatttagtgagaccctattaggacgataatgctagtcaccacaagcacttcttgcaagaatcatcgaaggcaaatgttgtttcgtacgagatgcagcttgtccagaacctcccagtgtgtcctttattcctttggctaagcctttatttttacccaaagtcacgatttcttttgaaccaggtgacttggactttgaaataatgtctcccaagccacatacatcaaagactccccaggatcctagcatcacttttgaggcagagttaatagaatcgaaggtgtgaactatctcaggctacataggtgatatactaaggacctgtggaatcaaacttgggcgagtatgccaagttaggtcagtacgagctggtgagtttggttgttacccccctacgcgcattacagttgacacccttgggggagccagtggtgagaccagtaccagtagctcgattggcataggtgcttagagtcttgaacacattagtgcagaggccataattcccctctgtgacttattcaaggattacataaaccacttcgggcttgcaccattccaactaaatcccgtctcctacagaatccatgccagtttgatggtcttgtataaaattctggagtgggagtgccctacggctgtggaaatcgagtatctttactctattaaggctattccagcgaggaagaatgtcgcagggggtttctattatcttggtactcactctagtgagcctaaaattattgtagacttgtcaaacaaaatatctttcaaagataacttcttttggacaactggcctctcctcaatcagcacaaccaccttctgcaaaatttgtaagtgattgttttcattaggctcggttagattaatccttgtcttttcattctaagttttttgactaaggttttgttttttaaagccctttcgaaaagactcgtccttactcccgagatggtcaaccgacacaggctcttgctcactcttccccacggccttaggtggtgcgacttacttctaaacgaggccaatctgagatatgctgacctccttactgacaaatagtttacttatgaatataaatttcccaagtattcttcttagcagtaggttcccattccagagggggataaggcttgggatcgcgtgactcgggcacaaaaccttcaaaacactttccctcgggaagccggtgaaggagcatcctaaggtaatcaatgtggttggtcaccgacaatacttagggctgaacgtaacacattaattacttttcgagatagcctccttaatttttatattaggaattcccttctcgtagaccgaatttctcataggtttgatagctggtaccctagatttcacgtcgagattaactataacgagttgtatgatggtatagccgagcaatatgacaccgtgatagatagggcaagtcatgtagatgcaagctaggatttagaaccaatcgagccatttaatatattcaagattacagcttgtaggaattttagttgatactacggtctttttacctcctcttctagtgatagctcgccttctagttgttttggtaaatttcataagtagaagattacactccacacttccctttcattggtctttaaataattttaacactttattttgcctcgcagacatgcattttggggatgttatgcaccggaaagggaagaaaaggggaaccaactcagggcttcctacagatactgaggtggagccttctaaaagtcaaaagaaaaccactgcccacaaaaagaagaaagtgtttgagcctattgacctcgaggctctgaaactgagacccatgaacagactactcctcctccagttgatcccaacaccaaagcacctcctcttgatacaactcatgcctctgcctcctc

SEQ ID NO: 323477 - DNA, 743 bp, Cannabis indica
atgaggaaaaaaaaagttggattgaatcggatgcccaccctactcatctctatccatacctttgtattttttttaataattatttcgtttttacgtacctaccctccctcacagaaaataattcttcattttaatttctaacactgtcacacacgtcattgaactttgttaccaaccgttttagtaatgtactttataagattaagttgttattaatttataactcaaatatttcatgccagggaaggaattaatttttttttcttgtgttcacaaggaccgttggagataatttcttacttaacaataacataataatcaccaaatttgtcctgggtttaatcgtttaattaaaagtacatataaattattagtttgtgttcgtccttcctttcttcttgttttccttctataatttgtgtatataattttgattagcttaaacaattaaattatcagtcttctaaaagcgtctacaatatatttttcctttttttaatgaatttcctatatttttaattgttttttcttaaaaaaaatctacaaaggtgttccaatgtttgtgctaaatatattttaaaaatttaatacaaaatatattaggtgcccaatttgacataattaatagaggaaattacatttaaaggccttgtttggttaagcttctatttttacttagctaaaagtataagataagtataaatcttgacttatttttaccgtttggataactattatatata

SEQ ID NO: 323478 - DNA, 1037 bp, Cannabis indica
agattgaacctaatcatatcaggatttagatcatttgataatttgcattccaactatagataagcatatatagttcggaacgtgctttcaaacaatataaagaactacccaaacagagtcccaagtcaaaagttatggtgaaaacaaatattaatacatctgccctgaaaacccctagcgggccgcggcacacaaaggccatgctgtgacttctgggtaacaacctagaaaacccaactagcgggccgcaacatgcaaaacccatgccgcggctcctaggtaaaattccagaaaaaccaattttcaacctaatcaaatttgaccacaaattcatggcaaagcacaacaaagcatgcatataatcaaattcactatttcacaaaataaaacaaacatcaacaattaatcttaaactcaaaactaagctccacattaaattcaagaacaagatattcaaggttataacatacacaacaaattcatacctaaatcaaagcttcaaaactcaagaatcaaaggccccaatgtgaacccaaaatttaagaatattaacccagaaattaagcttcgatttcaaccctaaaatctcactaaaacaagctagatgcaccaagcatgatctcaacaacaaaagtacactaaacacaccacaaactatcaaattctcaacaacatgcaccaatggttcaaaatcatcataaacaacatcaaacaccacttcaaagaacattcaataatcagaatttatacttaaataaagggaaatgagaggtgttgacctctcttttagccaatgatagtgagtctaattttataagtgacaagtagtttaatacgattgaaatattgtaaagcaaataaagccacaagaattttatagaggttcagccccgagcatttcggtaatagcctaatcctcgttatttgtattgacttaagaacaaggagaatagttccttttcttagagctcttacaacagtatctttgaatatgaattcttagacaaaatcttacgacccttttcccagtgaatatg

SEQ ID NO: 323479 - DNA, 1226 bp, Cannabis indica
aatatagaaataaaagtaaaaattaaaataagtaaataaagttgatatacagtataacttctattagtaaattagtagttatataattatattttgatattttaagaaaaaatttactatcatactcaaaatcaatgtcatgtatattggctatgttagttttgggaatgaatatatttgaaagtactaattttaggaagagaaaaaataagctaagaaatattttaacaaatataaggaatgtaatatatataaattaaggattgtatttgtgttgacttttctttaaaaaaaaaaaggtataaaatgaaatgtattccacatgatatgatgccattttatgtaatccaatcccaaaagtattatgttacaaaaattaatggggcttaaggcgtgccaacaacatagcatataaggcaagaagaagtggatatccataactttcaattttatttcaaaatattatcaaattatctaaatcacttcaaaaatgacactctaatgtagtctttttttttttttttggttatgctctctatttaattaatattattttggattatatattttacaaaaattattaattgaattatgtattttgttaaatagtaaaaataattttatatttttttaaaataatataataggactctaagtttatttttcgacatttttttttttaaatataatcaacttgaagacaatttatagcataaatagatatagaaagtgtaatcagttttgtcataacacttctatatcgggttattattaaattttattttgataaaaagtcagctcagggtaggagtgttcataaaaattgaaaaattgaaactgaccagactgtaaccgaatttttggttccacatttggcggacgatttcggttacagttttttttgatatggcgatcggttttgattttcgaaataaaaaaaataattaaattaaaaaattgtcaaaaccgctaaaaattgctataaactacccaaaactgtctaaaattgtcaaaccgaaaaaccactaaaaactgcaaaaaaccatacgattggttttataaagttacaatttctaaagggtaaatagcggcataagtacccaaagttttaagtttgtaagcggcataaacccaatgtttatttagcggcataagtacccaatgtttgtaaaactgtaatttttcttcaattttgtcagttacagactccattttaaatttattaa

SEQ ID NO: 323480 - DNA, 1015 bp, Cannabis indica
ataataattaaacctcttaattatctgctaattcccgtaatttaactatgcagtcattacaattaacctcccgttaaaaagatttcgtcctcaaaatcaaatttgaaaaacttaggacactgagcccacaagtcagattctaatctgcaggtgtttcccttcaacttattgtatctttaagtatcttgacaaatactatagttctacttcagataactttaccttttttatcgagtatcttaacccatttctctctataggataagtctaactgatgttctcgagactaaagatatgagttaaattttccaacatacaacatgaaaacatcttttgtgctataaatgctactcgtaagattaaataaaaaactattatcctaatgttctcgggaaattctaaaattcctaggaatctaaggcatatcttactcttgttaccacaatatttctcctatctaggaattttacgtttatgagtttcggattaacatgaactttattgtttgtgttgagaagcaagtaccctaaccataatattctctacatgcttattagtctactaaaatgacttcaaatttagatattttctgtttcgaacttcaaaacaagaaatcacatgcacttcacaccgtttaacatcatataaggaaccatccttattaaactttgatatgtgttgcttgcacgagaacttaatcacaatagatatttattccataaactcttgtaattcatcgcgtaagcttgtcatacatattttaatagtccctcgagactagctatttgtttaagggtaggaaactgtgctaaacgttaactgcataatatcggtcctctatagatttcgctaacacctaaagatgaatttcaattttctatccaaaataatagactttagagccgcacagagtcataatatctcccttataattttccatactagctcttatacccaagtagtaccataccaaatcaaacatactcatggttctaggtaatccaactacaagatt

SEQ ID NO: 323481 - DNA, 2691 bp, Cannabis indica
gttttatttggaaacaaacaaaatataaaaaagaagaaactaaaaagtccaaaccatttacaagttactgaccattactaaaacatgtggggggcaccatatagtatataataataaagaatggattatataaatagaatattataagaattggaaagtttgggggggccatggcctctatagagtgtcaaatagatccgcccctgtttgtgtatcttatgtggcacttgacaaatctatatgatatttaactgtcaaatagtcattgttttaacaatattgtaacagaaggaacttttgctgctttttacataattatttattatttgtttaatgtattgtttggttcacatgtttgtttcatgatcatttatttgacttataaattcatcttaatctttatcacattattattcataattattgtgttgtctacacttatactcacactttagccactatcaaaactgagctcatgttgtctcgaacatttgaacactccaggtctaaccgtccagatatgtacaatcttcactaagctccaaactcaatgtggttcaactttagtcttgcctttacatacacatgaaaactgagttgacaaactcagtaagaaaagcacaaaacataaacatatttttgacttgttattaggcccccatacacctaatttccatgaatctattactcgcgtccaacacgtataactgagtctcaaacgttcttgactatagtatgaacccgatagtttgagtcaatcattaccctacccccgctacccatatgatactaagactagaacgttcgtacgataatactattaaccatgatatcagcctatactcagtactctagttgtattgatgcgatagcgtcaattagtacttatgccaaacatacatccatcaatgtctaatataactctacgtatactgatacttctatttcagtataatttaataggcattcataaacatgcacgtaaacatgtaatcacataagcatatcattatactaatcttacctcgatttcgaattcaggtgtgtcggtcaacctgagtgaatttgctgctcgacagtttataggcccttaagtcacaatattcgtaaaactgataagtgacacgctaaatcattttctgggaacttcaaactcaaaactaaatattttcctatcgatatctagcaagacaaagtcataagcattgaggaaatacaagaaaaactacgaaatagggaacttgcctaaaaaatggcatgccatttttgaaaaacggtaggctatttttttgggtcctacactaggaaaaatggtagaaacagtctgtcgtttttcactagagaaaaacaaaagacccccaaatcgaaccaaaactaccccaaaacttccaataaactccaaaacacttatacatgccataataaaccattttcatgcaatagaatctcaaaaaacacaaaaataccaaaatcaccattgttgaaccaagtttgagttggtcaacatcacaaaaaaacctcaaattcacttcaaacaagcataaacaatctcaaaataacctcagaaagctatactaaagttcatccaacctacacaacaattacatcaataattgcatgtttaaactaatcaaatcctgcaaaaatcaaaggagaattaaggctagggcttaccttaatattatacttcttaattgcttgataaaacctcttgatttgaagaaaagaaactgaatttttcccatggtttctagctaaattgaacaagagaaagagaagaagccaaaactctaattttttaatttttatttttttttcctttttcttctaatttttccaatcacttagataattcttagttatttaccactaaaagattagtgccaagctgccacaaagagaaagggccacctaattcacaaatacaaaaatgactaaaatacccccacacacataaataaatggtaaaatgacataggggtaaaatagtccgaaactataaccccgactacttttgacattctcaatgtctaactaaattgccctgctattctaaaaatgctaactcaaactaaggtaaccctatagacaatacgtcgcgttccactgttaccgatcataaaaatataaaaaaatgtaaaatttatatataatataaatagcacacctagaattcaaatatatctctgaaattataaaaaaaataattaaaaagttcactagtgaaattagaccctaattatctactaattctcaaactaaaattaagtggtcattacacaggcgattatcataaaccagatatatttgctacgttaattatctactaattctcaaactaaaattaagcggtcattacacaggcgattatcataaaccagatatatttgctacgtggcaccgttctttataacgtcacatgttgcatcacaacttgtttaaatatttgagcagaatctaaatataggataatatttacaataatttttattgtgatgtacgtcgctcagtttatactactacatttaataaaagaaaaaaaaagtaacccgtccgatgagttggtcaggttaaccctcctaaacttaccaatatatctttatatattaaaagtgcctatctaacggcatttcttggtttaacattcttggtttaacagaatatacttaaaaataaaagaatattctgtta

SEQ ID NO: 323482 - DNA, 537 bp, Cannabis indica
gctatagcaattatttagttgattggtataacattaatgtgactatttaagttcagtttttagtataaaaattttttgtaatgtttttcttaagaaagtaaaaggaacatttgttagaaaatatcaaatataataataaaatgataatacttgaggcatgcaaataagacattgtctttaaagatttataaagtaatttttcaagattcaacatgtcttctgattacaataaaaagaactaggaaaacagaaacaataaaataataataaataacccaacaactctcttaaagttatcatgtatatatatgtatataggagctagcactgtatgtatattatgttctttctatctataattataatgatacagatatatatatataaagaaggaatagtaatacattaacgttactattaacgctagcgctagtggagaagaaagtgaatctttgcaattttttaagaatcacacttcaaatatatatatatatctatatatatatataaattgccaagtcaaaagataagtttttt

SEQ ID NO: 323483 - DNA, 722 bp, Cannabis indica
aaaaaaaaaaaaaaaacctaaagcaaatatgttgcttttaacaaatattattatatgcatcaactaataataattatagattagaaagtgtaacgctcctattttacctgtgtagtcttatgtttatatagtataaacgagtatgtcactttaagagaaaatttttaagtaagtcatttatcctaagattgttctaggtcaatcacacaatttggaatttttaagtgatgtgctaccaaaaagaaaatgcatcttgtcgatataagcagtactgatcaatccattaatttaagcccattcaattgagtagttccatacttatatagccttagaatcatcacactttacctttcctaggcgatgtgagattctaggttcgacatcctcctcgaccacacttccggctgggccaatgctctttgataccattggtaatacccccacttcacctatgtagtcacatacctacacaatatatacggatacgtcactttggctatttacaggaatgacgattggccctgtaaagcaacacgagtctttttagcatgctttgtcctcactcacacacttctcgagaaaactttccaagagatcactcatcctaaggttgctctaggttaagcccttggagttcttaatgttaaataaattaacccagatctatatgtatataacatagaacacataataaagatataataattaggtatgtgtacctg

SEQ ID NO: 323484 - DNA, 1646 bp, Cannabis indica
aacataagtttatttaacacttactaacacacacagacttccatttattacaaagacacaacaaactaaacacaattacataatatagacattaattgctccacaattcaacttaaaactcaagcttaaagatataaaaataactctaaatcttagagttatcaataaccccacgttgaaaactcttattcagcttcgaattagatgggtgagctgcggtatgcccttcctatgtcgcggcccgtgtgtgaaatttctcacgtctccaggcttccatttgacacgtgccgcgacatgaggtttccatgcctaggtatgacccccattttgatacagttattttttatgtgatcttttttatcttttttttatcttattccttcgatattttctaatcttcttctgttttaaatttgtaaaaataaaagataaaaaatgtaaaattgctcaaaacaagagtaaaagtaaattaaaaacacattaaaattatcctaaaaatagtactaagaacatcctaacacgtgcttttcgagctagtctatttgtgcttacgtgtcgtgcctttcgtgcttcttgtgtcatgtcgtgcttaaaaatatatttttcgtgtcgtgtcgtgtcgtgtcgtgctaatttgtagcatcgtatcgtgttgtgtccaagcctatattttttcgtgcctagttgtgctcatgccttttggacttgtgccggtttcgtgtcatgtcaaaaagcatgacccgtatttacagcactagctggggttcaccttggaccctttgtaaatattataatacaagctaatacggattatttgttatgtattaaattatatgattcacattgtattaaaatttatggccgtaataattaatataatacaatattttattcaaatataatattacttattatttaatacaatacaattcttataccatctaccaaataaactctaataataatattataataattttaataataaatttcatctccatcttttcaatattattctccatctttttttaaactctctcttcattcatcctattctcccttaaataggaccataatagtatattgccctagttgtaacaattatatgtgaatcatctcaatatagtgagccattgtaaactggtcccttaagaatagaaactctaattgtgagtcattgcaaactggtcctttaagaatagttccaactgaactaggtatattcctagtcggccagaagaaggggccaaccattttgttgcgactgaatcattttttataatgtcataaggagctatggctctaaaagagatgtagtcaggatattaggtgcctttgatttgagataataaaataaaaataatttttattttatttttttgtttgacttcatttttaagtattaaaatatcatttttattctaattatgttttgatttttttcaatcaaattacatcatcttgttatgtgagtttgagtttaaaaaagtttgaaaagaatagacttagaaggaatataaatctcagtattagaaaagattaacattctactattttaatttaaaaagtggaatctaattaaaaatacaaattctttcgttattaaaatttaatttaatttatggtaaatagcggcataaatactc

SEQ ID NO: 323485 - DNA, 532 bp, Cannabis indica
aaatacataaaaaaaaattattacaatttctctaattttgcattagaatggttatttcttctttttaaaataaaataatcatttaagtaaaatgatagaaaattattttattgaaatgttattccaatactatgcaaccaaataaaaaataaaatgaaaattatttcattttcattatatttcatttcattacctttaatcaagcgccactttaatgtacaatatttttcttttgtatttcttcatataactaataattaatttaataattttttttatataaatttatcaatggttcccttctcatttattgtattgaccatcttctcttacgaacaaagactacatttgaagtctttttttaatctaaatctgaaaccacttttatacccaaaaaaatctctaagtacagcaatttgaacataatagggtaaataccattttggaccctgtgttttgcaaaagttacagattagaccctgtgttttattaaatgacaaaatagaccctgtattttttaaaatagtaaaaa

SEQ ID NO: 323486 - DNA, 1009 bp, Cannabis indica
tttttaattttcataattatatttttaaaagtgagaatagaatacgagccattttaataatttaataatgtagctctagttttttaaaaatatttttttattaaaaaaattaatattttacatcatactatgacatgaattcatcttatttcatatcggacttggaaggccgaactaaaattcaaattcagacctcggatccagacttagacccagacctctaacccaaactcagactcgaacttgcttctgagtttggatctgggtctagggccacagttcgattagaggtgggatgggtcaagagtccaatctaaggtgggatgggtttatgttcgagtccaaagtaagagtctgggtcccgattcgattatgtaagtaaaattgtaaaaattattactatgttagactaaaaaagttaatattaaaaataaaaataatattttaatatttttctgttttctaatattaataatgaatatcaccctatatataagactttagaattgaaaaataatggtatcaattaagttttcatacacaattaatgtggtgcttattttctaacattctctcaagataatagtgttatttggctctttttgactcacaatccctaaaattctaaattaataaagtatatgtgtagaaggggtatttattaaaccgcttaaatcgttcgcactgcaaaaaaatatggtttgaaattctttacgatgcggtcgcagtttgaatttttcctaaaccgcgcggtgcggtcgcagtttgaattttcttaaaccgcgtggtgcggtgcagtttgcggttttgaattattaatacgcggttcaaatcgcactgcaccacacattataaaaatacaaatttttatatttatttaggtccaatatgtgaatgtccaacttaaagcccactaattattgtattgttgaaacttatttttttttcatatttattttcaagctttatgatatttttgacaagtattgctcaagctttgctgtatttg

SEQ ID NO: 323487 - DNA, 980 bp, Cannabis indica
gaaggataccaaccattgaggataaatgacgatcccaacctattcttctacatacaactaaaatagaaagaatcttatttaacaaggtatccattatgtgtaaacatagttagcaatacaataacaactaacaacacctcctctttgcaatgagcaactcattagttgcacaacaattgtatgtcatatccaaaatattaacagaaatataaagcattattaacattatatttgacacattaatgtgaagttccaatttttttcttattatattgtttattttgttgaatcttctaaagtttcttatgactaaaatagcgcaattttcaaggcccaagataagtgttaccatggggactcgaactctgaagaacaaccgaatgagaaaccttatgcaaagcattccaaccaactacaccacacactcggtggtacaataatcaagcatttaaaaaataaaaaataataagtgcttttgtataaaaaaaaaacttataatcctcagagatttttatatatatagaataaataagatttgtacctcctaaaaaaattagtaataagaaaatttaggacaatgttaggacaaaactataaagaaactagaaagaaaccttcaggtgctcatcaacttggttctttcttaactttagggagggaaatattttcagcaacattaactttcgatttcttcttaacagggcgaccatcactttttttggtaggcgggacaaagtctaaatcatcatctttaataacgggccgtttgcctttagatttgttggcaagagatttaacacccatttttgaagatttttttagcaatggtgatagggaagatgaagaccaagtaatgaccatttatagaataaaaaaaaagaagaaaaaaatttcaaaaaacgtggtacagaagatggaggaaggcagttgaggaagatagacgaaatttgttttctttttaggtattaaaaatggttttg

SEQ ID NO: 323488 - DNA, 510 bp, Cannabis indica
agcaacataagtatttaatattttttaaactgtaatttttctaatttcgtcagtactaaatctattattgtattaaacaggatacatataaagcttaaattctagatcattagatctagacagaaatatgtagtatcaactacttacaaatatcattttaataagttcaaaatggagtatgtagtgatgaaactggagtaaaattatagttttataagaattgagtacatatgcggctaaaaataaatattaaatttataccgcttataaacttaaaacttagaaccttcaaaagggacatttgtacaatttttgttttcattttctgaatgtataaatctatattgtagtatattgtaattcttaaaaaaattgaaatatactaaaattaaaatataaataatcttttatatgagtatttattactttaattatgcttgtaagataaaatatatttaaattttaatatgttaattaaattattaagaattttttaaaatttaaatatat

SEQ ID NO: 323489 - DNA, 768 bp, Cannabis indica
gaacatagcagcagcctccattcttgggtgaaaagcatccacggataagctttgaaaaactagacaacaaatagtgtcatcatggtcacggattagagctccaacacctatgatagccccctgcttgatcccttgctgcatccatatttagcttgaaaaaatcagcagctggtggctgccatttaggcaaagaccttccagccacagatagatgtgcttgaacattgtgacaatcagaatcagttactgttggtttatgagttgtggccttgtgatattgattcaaatgagaagtaaagaaagaacagataatatctgctggtttgggcttcgtaccatgtatttcttagtttcgttctgaccaaatacaccacattagacatatgatcttctctaaatcagcatcattgtgagcagcagcaatgtgggagaagatatcataacctttaatgttaccaatattcggtatagatacatggaaattgaactttctccaaacaaccttagcacgatcacatcgaaatattgcatgtccaactgattcccacgcgcacttacaaagtgcacaagccgtagaagaggtgatctttcggtgataaagattcacagaggtagggagagcatcatttatgaagcgacaagcaaagattttaacttttttgggcagccttagggaccaaaacctgttccaccattgacggttggaagatgatgaagaatgtacattcatagattccaaactcttagctaagtggtagccagatttga

SEQ ID NO: 323490 - DNA, 1067 bp, Cannabis indica
catgcactcaacatagatcccaaggtagatctagtccgacaaaagcacagaattctagatccagtgagatcagaagcagtacaaacagaagtagacaagctggaaaacatttacttcttcaaggaagctctatatcccatatggctagctaatccgatcttggtcccaaagcctaatgggacatggagaatatgtatagatttcccaaatcttataaaagcttggccaaaagactgttttccactttcacgaattgatcagatggtcaacgcaacttcggggtatgagctttgaactttcatggatgcatattctagctacaaccaaatcaaaatgcatgtggctgaccaagagcgtacaagctttcaaactgacaaacgaatctattactacaaggttatgccctttggtttgaagaatgttagagccacctactagcaaatggttaataaaatgtttaagaatgtattggggaagaatatggaggttgatgtcgatgacattctggtaaaatcaaagacttccatgagtaatcacgaagatctagaagaagcctttaccatcatccgggagtacggaatgaaattgaaccctaagaaatgcacaattagagtttcttcaagaaattcctgggtttcatagttagtttgcaaggcatcgaggaaaacccaaaaaagatcaaagctcttctagacatgccttcacccagaatacacaaggatgtttaaaagttaactggaagaattacagcacttaccagattcatttccaaatccacagataactgcatacctttcttcaatgtacttcgaggaaataataagtttgaatggacgattcagtatgaagaagccttccagcaacttaatgaagatctaacacaagctccaatattgtccaaactagttgatggagagtcgttgttcctatatctggcagtgtcagatcatgctataagttccgcattagtgcgataagaaggaaaggtacaacttcttgtgtaacgccctaatgttaaggcacactacagtgcttaaatcaattaaagtgctatctttgctaaccaa

SEQ ID NO: 323491 - DNA, 1411 bp, Cannabis indica
agaggagaagagtggagaggacagagagagagaacaagggagagaagaggccatattgcttctttctttccatatgtttgagaaatgaggtgtgtatttataggaggctcattgccataaatggttgggttgtatgctctaataatgcctccacattccctaaagattagcactatcatttcaactccacatttaccaaaactatttttaactctaaaccaacccataattagatttttcatttttcgtttttttttttaactaattgtaatagtgtttacgtagcttactttggtatcaatgtcattccattcattttattgaagaaaaaaaaaagtgcaaattgcaccttaaggtgcctaaaaccaatggtcataatatttacttattttcttgccgtacatattcgttcaatattgattgttatgttttatctctagcaagaaaaaaaattacttttatttttataattaaaatattaaaaaataaaacttttatcaaatatgactttcgtcaataataaattatgtgcaattattctattaacaattattaactatccaataaacaaattgcttaaatgaataaaacaatgaacccataaaatattcttctaataaaacttaattctctctaaaaaaaactaatagaaatgtggaaggaaacttcaagattgtacacgtaaaaagttcttttaatatgtttcgttgctggttgtattttttttttatatattaaagcgtttaataaatacattttttgagttacacaaagttagaattcgatatcaggaaccccacacacatcccataataactctttattgctacttgagctaacctcaagtggttgcatagcatgtggtttgaatgaagatgattttgtgttgtggaataaaatgtggaaattgaagctgccacaaactacaaaggttaaaaacttgttgtggcatgttgttaatggttgtctcccaactatggtacaactgagttctaagcatgtgaaggtgaaccctttgtgccctgtttggctattgagtgaggaatcaatccttcaaattctttgactggtgcgtagacaagtttgaaatggtgaacaacgatatgaagtgtttgttggtgacagtgtgctaggctatatgggagactcgaaatgattttgtttggaagggaaagacggtgaaggttgatgacattgttgtgtatgcaataaagtaccttgattaagagaaaaatgctcaaaatttgatatagattcatggtggtctaattttttaggcaaataatggggttgagcattggattttatcacagccaaatagtatcaaagttatatagatgtggcattattttgatagtggtcagagtttttggatttggattggtggcttgggatgctaatggatctataa

SEQ ID NO: 323492 - DNA, 1227 bp, Cannabis indica
gggggtattaagattatattagaatatcacaatcttctatatttagaatatgtatatcctgtgtatctctttgtgatttggtgatctttgtgatttggtaaatgagataatagccataattctagggtaatattgtatatatatatatatatagtacctaaaagtgaatgaaaaagatcaaggaagcatatttcaccaattttgtcaatactagacaatcattcaaatttaggagagttctatacaaattttggtgcgcattattccaatcatggataaactactagtgttacttcatgatatcacatatatgcagttgccaaaaagtaaagattctagaatcctaagaggagtaagcatatatatagatgtaatgatgaaaaaggttgatcgttaatacaacctgtcagatcctattataaagataaatatcatatactacacttgatcaagacatgaaggacatgagattaattaaaatacacttttaattttatactaatgtaaatgagagtttgttgtagttttatgccctaaataaaactcattttaatataatcttatttactaatcactaaaagatcaggaatcattttatgtttcttggttcatatgttactttcatgattatatgtttaatacataaattctattaaactccaaacatatagttactcatgattatagtgtagtctacacagtaaaaattaatcatgattatatgcttcaaactatttagtcctcaaagattcccaatagtgcttaaaaaaaggacaaataatcctttaggccaaggggctttaaacctgcttacgaaaaaaagggtagaacgaattttctcccgatctggcttaaccacaataccgtcattctcaactgaggataacaaatcatggataagagtaaagatctttcatattggattgcccgtagtccgtaaagatactattgaaaaaatttaggaattccttccaaatgctggctctcaaagagacccaattgccatgtctatccaaaatagtttcaatagtatttctcttatttcatatgggcaacataaaaaaaaaatgttgaacacttgtccccattcttcaaccaataaatttgagactttttcttccataataaagctttccatccttaagccttcattaaggtgacgtttagttgaaggtaataaaatgtaatagaatgaaaagaaaataattttcattttattattttgtt

SEQ ID NO: 323493 - DNA, 1531 bp, Cannabis indica
atagtgggacgaaggccattaatgaaagtactaagttgtatttcaggtgaaacattatccagaggagccagaagtcggataaactgcctcttgaatttgattattgtaccctcttgccttaccgccacaaattgatcatataaagaaccagattgtgtatctcgaaagtgcctcaacaccaattgtttcatctcctcccaactcaagattgcttgctttatattctcaaactgataccaaaggagcgtgtcacccgagaaagagataaacgttgcctcgaccttttcttcctcgtaatggcagcaagcaaaaaatcactctgcttgcataatccacccgtcgagattttccccttcgaaggttggcatcttgagtttctggagtcactgatcgtttcgatgatggtggttgtaataatttcgttccattggggcatccactattatgggatttctaccactgttgaagatgcaggaagcaccaggactcttgtcctcaagcgcatctcgagtgtcggatcggcagaaggcttctcccacatgttcttggacacttcttgattgtccgtgatcatttcttggttgttcttggacctttcttgactgttcttgggcctccaaaatgagttgtagctgttgttgcaattgttcatgaagctagcgactcatttcactcaccgagtcattaataattgtccagacggaatttgtgacagtttccgtgaccgattctagaattgattcctagaccgatagcatcgtcaacttcaaagcctcctcttcaagggtggactccaattgactcttctctactggtttctttagcattgtcagtagctcaccacaccaaattgatacaagttcttagattagaaatctactatcaagtattagaattcccaggatgaaatccctcaaagaattgccttttatttatgaataatgatcaaattacacccagctttcaagaggccaatctctccaagtacacaacctttcaagagagttgctctctccaaaaaacttcactcaattcttaatgctctacacccttaactaagttctaatctcctatatatagataataagcttgccacatcagcagatttaattaaaccaaagtgaccaatacaaaaagataactcaacccttccttaaaacaatttgaataaaactcaactaaaagacttaagcctggcctttaagccctctctttctatggtaaacaaatctgaccaggggcttatcagtctaaatatataatatagtaactacataaaatgtacaacttggtttcccattctaaagggacaccacttacttagattatctattgctagagttttcaattatgaagtagatattttgttttatatcaaaatatatttgttaccacggtttccctctgccacaagtgagggttatcaataaacatgagcaaggtcattctaagacaagtgacctctatctctttttcaaaaaaagaaaaaaaaaatcttaacagataccaagaaataaaagcaatattttct

SEQ ID NO: 323494 - DNA, 651 bp, Cannabis indica
acataattaataagtgtatgagtttttacagggtaaacatttagttcaagtaatttatttcatttatacaaggtgtcacatttttgtgcaatgtaatttaattagtagccctactatggaggaccacaagtcaatacttcctccccatctaaacaaatagttaattagaatttggtacatgttaaaatttagagatataattagataaatattaaaatttaaagggtacaatttagtacatggataatcgttgtgttagtaaaattgaacaaaattacacagaagttcttaaatccaacaatctcatcagttcggtaggaatttttaacgtcttgaaatgtttggtggcataatttggtgcatgtcacagggggaaaaaattctaattaaccaaaaataacctcatttaggaaattctatgttacactacctaagaataggtgtattgatgcactccttttgtgtttttgacaactagatagtaggggtgttcattggatcacatccaatggatttggatccatccgatccaatctaattgaattgagtcatctgattcgatcagatccaatggatatattggattggatcggttccatttattggatgttttaactagttttttattggattagattggattggatccat

SEQ ID NO: 323495 - DNA, 880 bp, Cannabis indica
aaccccatcttccaactcatccataatatttgaattatcatcatttaacacaaaatcagccttaccatcaatccccacgtttgctccttatttttaggagctgaaaaaatatctgcagattccctcctagccgtgcacccaaacccactatcctctccaacaaactccatagaattcggcctagccaaaaatcgcccccactgccgctgtcggactgtgactccggccagcaaacgccacgtccgattcagtaccatcacgtaaccactgcgacccaaccaaattatacctcctccggggttaagccctcatccaaaatccataaggttttacaatttcttcaatcggcatatcaaaaagcttggagaaaaatttttcagaatgttcaataacaccacaaataaaacaaaaagtaggaacaaactcatatttaaattcagcccgaaaacatggatcatccacgcttctccgaagcttcttccttcattttaatggtacagtaatgtcgatagtaactcggacacgcatgtactcacgccaaacatgctgaaaattcttcgggtccaacttgataaacgttccaacaaaacctcccaaacgttccacaacagaggccgatttaaaactggtttgtaggccatgaatctgaacccacatatcaagatgattgataaccaccttcttaggatcgtcacccctttgtagccttcgaaaaacaaactgttggcgattgaaagtccacgggctacccccaacgaccctttccaaatcaatctcgtgataaaactgaactaaataccgattagaatcaatttattagacgtagactcatttttctggctgccataaagacgccataacatgtctcatggcttcaaaa

SEQ ID NO: 323496 - DNA, 714 bp, Cannabis indica
gtttcaagacatgaataacatttgcctttaagaggggaattagagacaatcaaggactccataaatacccgacagaaagccgacaaaaagcaactaatgaaactttaataaacttcaccaactctcaacaacacacagcataaacaaaccaaaaggaaacacccaagaggacacggcacaaaacgccaaccacacactttacctcacaaacagaaaacagagaataaaagaaaacaaggtcaaactcaggaatacagacaaagaaatgaccacaggaaacaacgataaagatgaggcctttagaaactactacgccaagcagacaacaaaaccccttgtgttcacattcactctcactctctcactctctcactctctctttcactctcactctcactctctttctcgaccattgtgagttaacttggcacttgaatatagggcacacgcattctcctatagccacctgaactagctttaagggattgattttcacatagatacatacacacaaatttaaatatatatactaacttatttattttagtaataaatacatatatattttagtgtaaattatatattgacatatatgtatatgtgtttgatttatatataaatggagatggaaatagattattattggatattaagaaacaatagtcttttttaatttttttttctatgaaatattaaataatttattattaaaaa

SEQ ID NO: 323497 - DNA, 1700 bp, Cannabis indica
aaaaaaaatatatataaaaaagtatggcacgaatttaagcctggatatgaaaataagctggcttattcaaaacatatggacttacatgaacaaaacactatatgaatttaagcacaacacgaaaataccaaagctaccttttaaaaatagtaacacaacacggcatgacctatatttttctgtgatacaacatgacataatctatttttcaaaaaacatggataaatataggtcaggccaatacaaaacaaaacgcgggaacttacaacattattcttaaacaacataaataaataataataaatatatatatagctttgttgtttttctttctaaagtatgctttcgatttcgcacaagtagggacattataataataacagtaataattaattgataacatatcattactaaaattatgatgttaaacgtggataaacattattgttaccacttatatttgcattacataattacataagttactcctttttttctggtggaagccaggaacgttactcttgatagataaatataagagcatttctttttatttattttaggaacgggttctatttttaaatgactattttctttgtagaagtaaatatttaaattatattactataggttataataaaatatatcatgttgattgtacctgttaatatattttttttaatataaaaaaaggaagtttggttattttgatataatgttgaaaaatgctaattaagtacaattagactttcagtccaattaattattctagccattgctgtctctagtggttgggatacaagaaaaattagacaaacaatgccttaatgggacataggatgtattcatggcacaacttgaaggttttgaagagaaaggtaaagaacattttgtgtgcaaattaattaacaaatctctgtatggcctaaaaacaagcacctaaaacttagtttgataagttgaaaacaacattgataagctggagattttagaattctacgacaagcactttactcttctttttcaaaaatgcagatactataatctatgttgatgacattattatcactaaaaacaacaatacaaaatatattattaaacttactaggaaattcatatcgaactattatattatttcttgggaatttaagtgtaaaaagatgaaacagggctcttcttaatacaaactaagtacattgaaaaattgttgagaagaactaatttcatcaaccttaaaccatgctctacaccatctacagctagcagcaagaccaatatccctaaatgaaggagagcctttacacgatcatcgatgtcgcagcttatagaagcatcattggaggtcagcagtacctttgtcatgctcatctttacatcttttatgcagtaaacaagccgagttagttccgaaaagctccaaccacagtgcaatagagtggtgccaaacttgtcttgagatatctcaaaggaactatgaataaagatcttcatattagctgtgatactcgacttaacataacatgtttcactaatgcggactgggcatgctaccttgatgacaggaaatcaattgttggatattgtgtgtatcctgggaacaccttagagcatgtttggtattattttctgttctttattttcaaaaaattatttttagaaatgagaacaaaaaatagtttttgaagtttttaaaaataagt

SEQ ID NO: 323498 - DNA, 676 bp, Cannabis indica
atttattgaataagcccaatactaattagacctaaataaaaactatcaaagtgactttattattttagcaacctagtctattttaattatcaaaatcaaatgggtctctatatgcatttaggcccaaagcaaatatatagccacatgcacacactgatttggatggatcctatcatgttactacatttatacacagatgaatgaagattacaaactttacctgttacaaattataaatttgacctactgacaattggactatggttaatgttatgtgcattttcacaagtgtgacacgtggaaattcatcaggaaaaagtcaagaaatcattaaggctacccaagtaccttgctctgtgctccggaagggtaagagccctaatcttacgcaacaaatttccgtaagataagccttcccggatgcgggccacaagaaagacacctatgagctggcaactcactccactttagaagtcgggacattatgctcctataaggaacatggatcttaccccaagatacaccggtctggggtacacctttaacccgcggaagcttatcccactcgtgacaggctacaaacccaatgacaaagctctttttgatacgatgtcagaagttgtcccccacgccattgcttagtaaaaattcataaataagatatagtctaatttta

SEQ ID NO: 323499 - DNA, 966 bp, Cannabis indica
ctagcactcttctatgtgttaatatcgctattggtttagctaagtattgggtcccatataatttaatacaatagttttatgggagtatcgctagccaatcataacgcgacatgtcgagaaggtgctaggcaccactaatgcctaatagcaatgctataaaaaaaatatataagtcaaatattaataaaagatcattaaataacttagttaatgtaattataatctaattcttcatcatattcatgattaagtttaaatataactcaactttttctgattatttttttcttgtaaattattcaagtttctggtttaggaataaaaacaaattttaggaagaaaactatttttggtttagttttgaggaaaacagttgttcaagttcagttttgtggtgtgggactcgtcggcttctttggtgattgctgttgtgaagaggaaaggcggtaaggtagctccaaaggcaaaagtactcggaataaaagaagctctcagttggctcaagtctcattgtttcgctcacactctggaggaaatacgtagtcaagtagcggtgcaagccattcgtaataatattcaaatatatttttttttggtctttgaaatttaatttttgattgtaagagattattggggtctatgagaaatgtttctttaaactttgtaagtttaacagtttgttaaacgtaactttgttaaatgtttcttgtttgaaaagcttgttgttatgttgattgtttgttgaagaagggtgataatctttctaaattattatttattattttgagtgatttgctcttaattaattgaagttgatttgattatttttttttttaaaaaaaaactaatgttaggaattcaaaaacgtatagtcaaattaattaattatcattttttttttacaaaaaaaagtaacaaaaaaaaaaaaaaaaacgtaaaaaaaagttaaaatttttaatttttaaa

SEQ ID NO: 323500 - DNA, 808 bp, Cannabis indica
ccccccaaaactgtgaatgcataacctgtgagtgactttctggtgtcaatgctgccagcatagtctgagtccacaaacccagacaattcttcttgtgaaggagactcaccctgacctgttcaaacccagggatgccatctttgaccctaaagatccatttgcatctaattaacctctgtccaggtggtcttctaactatcctccatgtcttgttcttgattagtgactgttttcgctcatcaattgcctgtagccatttcttaccatcctatccattcattgcttcttgatatgatttgggcactgtgttatcaatgtcatctgtaactaacaaggcatatgttgaaaaatcagcatagccaaacttctcaggtgccctgatttctctcctagttctgtccctggcaagttgatagtcatctaagctgcttgtagtctcaggttcctttctctaattagcagtgggagtttggttctgagactcagttccttgttcaagttccacttgaacactttgaggaatagcatctgagtcagtggggatttcctttattgtttttagtggcttttcatcttctctaaaagtgacatctctactgattatacatttcttgtacccttcctctaaacaccaaagcttgtagcctttgattccatcagggtagccaagaaatagacatttaagagcccttggttgtagtttgtcttgcctgatgtgtgcataggcagtgcaaccaaacactttgagatgttcatagctaggagcttttccagtctagagttcttgaggagttttaaagttcagagc

SEQ ID NO: 323501 - DNA, 1300 bp, Cannabis indica
gtgagggataccattttcaccacacaagtgcatcttcctagaactggaagatggccaagtcacccgatcatttccaacgacagccataaaattcaaaatactctcaattaccgaaagccactactcaaccttcatgacgtctggacctcccaaaaaagctgggcatgcctctttgtaaaacctctcatacaaaggttccatacaattgccaacaataggttgctctactgacactgttggaaccaaagcagcaggcacttgcggtggaagcactacaggagggccctactatcttaatctaaatttcttcattttgttgatggataagggtttgcatttcagcaaacctttgctccctccatggcctctatcgcatccatggggattcaaaggattttgaactccttgaccgcccctggtcttgaccatgttacctcgacttctcgtgtttcgctgggcatccatattataagacttagcctgcaaacccagaatttaggtaggtcagacaacgaccatgtgtgctataaatactacatttatggattttaaggcaacgtattcaaataaataacatatgtctatcgtgcttcctaatatgcttctctaatcatataactatctaaacaattaaaagcttactgaacagtgagtcgagcttatctttgatgatgattgtacatgtcttgatgatcttaggtagacaacctggcagctctaataccaacattgtaatgccctaatgattatgcacactacagtgctcttttgattactatgcactcctttgctaaccaaagggttttctcaaaaatcgtgataaatttaaaccttttcaaataataagaaactttaataaccataactttataaccaaagaaatatgtctggatcccgctttttgaacttgtttgcatattcaaaataaactttataactatgtcacacaacgactacaaaataagtctatgttgttttgagactgaactctctaggtcacaccgtcttgatatgtatgatcatcttcaagctcaaactcattggtactaagccttagccattcccttacctaaacatgaaagcaataactgtgaattgatagacccagtaagaaaatcacatagcatataatataatactgaattgtatttaggcgcccatacacctaatcataaggcttaacaattaattaagaatgttcttaacaaaggtacgagctttgtaccacatgcactacatatcgctactgtactagtgttggtagggtctgaatcgtaccccgagtaccgctaagtgttgt

SEQ ID NO: 323502 - DNA, 1139 bp, Cannabis indica
tttttttttttttttgcttttgaataatactttatatcttttatgtttctatttaaaacccaaaaagtatggaaagtaacccatattttattttttttgtcataattaatcaaataaaaataaaattttattatttatataattaataattaaggccatcttttttgttttgcctctattattaagggaaacataagccaaaaaagataaccctgtttttaagcaattaattaaagtgaaacaaaggtttattatgtatgaaatagttaggaaggaatctaacacttttttatgactaaatactttgtatgaactattttatttaaacaaatccaataataacaattaagttaaatatatttttttttaattgaagaaaaatattgtgatctgtaaagaattattatgatataaatttatattaatatataaagaagataatattgagttttaaatacaaagtgaaagattgtgttcctatcaatataatagtttgtttttgagctacttgttctttatattaatgctttcttagttgtcatatcttcttatctttttcacttttattttatttttatttttcacattcattagaaaataattatagtgtaaaaatttgataaagttgcaagtccaaatacaccaaaccatatacaaattttttattgatttatatatttaaataagaagcataatttaaatatatgtgtagatatatatgaattttgctttttcaacatatgtatggaaaaatatgtcatatgtgatatgacatcttttgaaagtggaaaatttgcctttgattttagtgacaaatataaaaatcaatgtaatggcatttttaattatacaaatagtataagcttagatagctcagccaataataacaaaacaaaactagtttttttatttttttttttctacttcttttttaaatatctgattatggtaaaattttgacaacttgtttaagatatattcaatctatatttagctacaaactttattcaatatcataatactttaaaatcatacttattaaaaaccataaacactcttacaataatttattggaaatttatacaatacacttaaatacttatataattgttctagtagattatttgtctgtttgtggt

SEQ ID NO: 323503 - DNA, 1311 bp, Cannabis indica
atatgcattaaagttcaattacttagctatcagagatattagaactttcaattggtatcagagctaactttttcatgtgaaaaaattctgatcctatagctaggtttgaatttttttatcgatttaatctattctgagtgagttgtgtggatctgtattggtgtaattttctttcgaaaactaatctccacttcaagtttcatctcattgtgcaacatagtttattatttgactttgtgcagattaataggaaatagaaatatttagagaagatggatctacctcacaacctcccatgttagaagaatccaattaccctttttggaagactaaaatgagagctttcttgaagtctgtggatgaaaaagtttggatggcagtagtcgagggttggtctccaccctctgtactcgatgatgaaggagaaaagattaagaagtctagtgaatgggtagctgaagagatggaacaagctaattttaattccaaagctctacatgctctttttaatgcagtttccacgaatcaagtcaaagtgatttcaagctgtgaagttgctaaagatgcttgagaaaagttaaaaatcaataatgagtgtactaaggtagttaaaaaggctcgactgagatccttagcaaaatcttttaagaatttgactatggaagaagatgaatccatttttgaatttcatgctaagatgtgtgacatctataaatgaatcgtatgctcttagaaagatctactccaacaagaaactagttagaaaagttcttggggttcttcccaaaagatttatgtccaaagtgacatcaataaaggagagtcgtgatattgaagcccttgacctggatgagttgattggttccttgcaaaattatgagctaactcttgatagatggtacaaaggaaagaaaactaagaattctaaaaatgaaaaaactaacatgggtgtagcctttatccttaaggaagagaatttgaaagaggttgacctatttgaaaccttcacagatgcaaatctagctctcttggccaagaattatgctcgttttctaaaaaggaacttcaagaaatctaattttggaaacaaagaaaatacatcgagcaagaacccctctggtttcaacaagcattcacaacatcatgagagaaatgggaaaggaattcaatgtcatgaatgtgctagttttggtcacattcaggcagaatgtgccaacactctaaagaaaaagaaagtcttaactatcacttggagtgataacaaagaagaagagtgcaacaccctaactaacataggcgtattacgtgatt

SEQ ID NO: 323504 - DNA, 1387 bp, Cannabis indica
ttaggttgggtcatatgaatttcctcctcaagtgagtcatgtagaaatgcagtttccatttgttccacctcaaccctatccatgactgcctaagccaaaattactcaaattgatgtttgcttgactattagagagaagatttcagtgtagtctatgccctctttttaagtgaatccctttgctaaaagcctggccttgtacttgtccttctttaccctaagcattccttctttccatttcaaaatccatttacaactggcgagcttcttgccttctggtttcttaactatcacccaagtttagtttttctttagagatgacatctcttcttgttgtgctttattccaaatcttacttttgctactcctcatagcttttcataggtcatggggtctgtatcaatttctcatctgtgggttcaacagtttcaccttcatttatttgtagcattggttcaggtattacaccagattgatcattcctcccctttgttccatcttccacttgaatctgtgcaacatgaccactggtggcaggttgagttataggggttgttctcattggaatttcttcttctctaaagaaaacatcccttttgattatacatcttctgaaactaaattctaggcaacataacttatagcctttgacaccagtagggtaaccaatgaacatgaatttgatagatcttggctccaatttgtcttgcctaatgtgggcataggcagtacatccaaatactttcaagtgttcataagattgttttcttcctgaccaatatcttgtggagttttaagtcaaaggctactgagggacatctattgattagtaacatgttgttgtaacatgatctcccaaatttcttctcaagcccaactcctttgagcatgcatcgaactctttcaatgagtgttatatttattctctcagctaatctattttgttgaagtgttttccttaatttcttgtgcctaccaatgccttctttttgacagaatttgatgaactcattggaacaatactcaagaccattatctatccttaaaatttttcactttctttccaattttattatctaccaactttctccaattgatgaatggttctaatgcctgatcttttaatttcataagaagaacccaatctttcttgagtagtcatctacaatgctcaagaaatagttttctccacctagaaaaaggatactcttgtacgtccccataggtctgggtgtatgtaggctaaaggttctattgtggtatgcattcccttgccaaatttcactctgaaactctctcctagaacacattcctcacagaagtattatctcccacttaattttcctttgagtagaccttgctttgtgaattcttcaattcctctctca

SEQ ID NO: 323505 - DNA, 828 bp, Cannabis indica
acgaaacgatggaagtggaaaaattttcagcaatcgactaatcaaatctttcatcttcatcttccatgactgagagttacattgaatttcttaatgtaatttctctccaaaaaaggaatttttgagtttaagaatattgggatgttctcaattgtagaaaaacaataggatttttaggtttaagaatggaatttttgagtttaagaatgaaaataaaaaattgcaattgtttaaaatttaacttgttcttatagcatttctcttttactaatagacagatatcatagcgaaaagcctcaaaggtccaaacccacaccatcgcagcctttcactgaaaacctgaaacccaatttgaaacaaattgaagaagagaaaaagactccaatttcagggcatcgaactccggtgaattcgaaaatttcagcctcgaaatctaatttccataccgccaagatttgtactaaatgcaaatttgatcggctcgaaacgtcgtcgtattgggttggacagatcaagttggttgagtcagtaagcaagcgcattttgcttcgcttgctttcttcaaactcgcaattgaatccaaagcccagagaaacaagttatgacaagaaccatttttcattaatataccaacggtatcagtttcaagttccacatggatcgctaacaggttactcttatcagtaattaatcatttttctaaggtatttatatatatatataattcatacttttacagacctataaaattcgtcttatccctataattacttttccattattattatctttatatatgaaaaataaaaagaatattatgttaaattt

SEQ ID NO: 323506 - DNA, 2331 bp, Cannabis indica
taattagttatatttttgcatttcagttacaaattttattatgattaaaaaaaaaaaaattagagtgagggttggcatattataaatttataatataaacttctaactttttgctgaaactatatatttttactttactcgatgactctaaatagatatgatctattttcggccttattagttagcactgatttattttttccttttaaaaatgtgtagaaaagttttttaattaactaattgatccatatactttgatgagtgttttacctaattaataattgattaaatttaaatacacaattttttttgttgggagtgttaaaatgttgagctttcattatcgaaataattttaaaaaatgaataaaaatatatttgaacttaatatttaattgtggatgatgacagatatgtaccaacaaagagtaacagagaagtgtggggtttagaggcagaggtgggaagactgataattgaagtagtgaaggagagaaagaaagttgggttatttgggtacgagaaagatttgcttcaaatggttatggaaggagcagagaatagtaataaggaggttattggggaaggagaagaggccagagagcgtttcatagtagataattgtaagaacatttacttggctggctacgaaaccactgctgtttctgccacgtggtgtctcatgctcttggctgccaatcaagattggcaacatcgtgttcgacaagagcttcttcaccatctctcccaaactcatactcacactcccaattatcacatgcttcgcaacctcaaacaggtactatattaattaattaagactcaaaataaataaactattttataattaatctcatatttacaaaaatatttagtttttgttttttaaaaaaaatgatggggatacattcaaattacacaaactttttatacacaatgtacactttattatttaagtaattttttaaaaaaaaaaatatatatatctaagcatgcatgttattgtgggcattgttccacatggaataaataaatggtagagaattgagtcatatataagaacatggctactccacttatttccaattggttttgagatagaaccccataattctcaacacatgtatatatatataaatgaatttgtaattattattatcatatcttgaatatgtcaatctcgctttcaactaagtatcggatcgcatataattttacctaatagatgtgctaacatatatatatatatgataagatatagtaaatatagtggaagtgtgcaagctataaatacatttttgtaatcataaaatatgtatttgatcatgacttgaaattggaaccaaacagaacctaaaacaaggaattaatattacgtacctcaacttttgtattgtaatataaatagcaccaaaaattatttaatttgtaacattataatatgctataatatatgtatctatatacattttctatacatattttgtttcttaattagcttttatattattttttaattaattaaattattgtaatcatgtgtagctaacaatggtgattaacgaagcactgaggctttatccacctgtgacggtggtgtcaagagaggccttcaaggacatgaagttcggagacattaacgtacccaagggcatgaacgtgtggatcatggtactccccctacacaccgaccctgaaatatggggccccgattcctacaagttcaacccgaatagattcgccaacggcatcactggcgcgtgcaagctaccgcatctctacatgccctttgggatgggccccccgggtgtgcctaggccagaacttggccatggtcgagctcaagttgcttcttgcttttctcctgtccaacttctcctttgccctctctcccgcgtaccgccacgcgccgactcttagattggtagtagagccggagcacggcgttgatctcttggtcaccaagttgtaggattaatttatgcatggtatgttgtaacttaatagtttgtggaataaaattaagatatgttgactcaagtggctataatttgaagatagaggtggcaattcatcaatatgataacacgacacgaatttaatatgaattagtagagatgagggttatgaaaaatagacacactaaaattagattgaacttaaataacatgattattatgattattatttaggttggattggatgtgttgggtgtacattcaaagtcccacattggttagaaatgggaaggattttgggtatataaagatgaacactatcttcattggaatgagactttttgggaatgtgcccaaaaacaaattcgtgaggg

SEQ ID NO: 323507 - DNA, 867 bp, Cannabis indica
tccttttatagtgatttcacctcattaattgttcttcacctattcggcctatagtgatagagtgccatgcccacacatagcaagtcaactactcaatcatagtgcgaaagacggtggtaaccaaacccaaaggagagaaagagatcgtggttcagatcttgataatgctctgtgacaaaaaggaatcaagggctagagatttgaacgcaaggagtcatattattccgctgcaatcaatgtaaggtttcataaactcttatgtgtttaatttcattattgtagagatattcatatttaggatgttaatgaaacatacttgttagtaaatctagatcctggtaaaataatcccaacaataaccagctctcctaatgcacagagcacccaacaaaatataacattttaaccaaaaaagtacaaaccggtatagtgccaacgcaaccccccaaagcacgagaattatggcatgtagacatgagtttgaacttttggaaaggtgaaaatgggccacgaaggatgttgcacatgtggaatgaagcttgaatggtgtaagactgagagatggtgaacgaagatgggttcgaggggaaatcaaaggtggtgataggctttgacatctcgattgggtcgaatggagagggttgggaggggtcttacgtttaagcgtgtggaggacagttggtggtggtcgggttttgggcagaatggaaaaaagaatggtagggcttttggggtctggcgtggaggaggaaaggtgaagatggtgatattgcaagagattgagggagatctgtgtgtggctgagcaagaaagggagcgaccaagagggagaagatgttgggttttatgccctaaataaaactcttt

SEQ ID NO: 323508 - DNA, 919 bp, Cannabis indica
ttttttatttatttatttttattaaagacatcaatgttattttgagaagggaacttgaataagttaatgtaattcttttttttttaatgtcaaattgttaataacccacgtggccacccttccactgagtctagaatagatgtatcattgcccattattatattttttatttttttatttttaaaagtgctcaattcaatactgctaattattatttttattattttaaaaaagaaaaaagaggccattattgtattttgtttggtatattttattagtgatttggctggacatgtatggcttggttttttatgggggacattcctttttgtttattacaggtctcaactcaaggcatgttcttatatacacctcatactatatttgtgttttctttttcataaataataataataataataatttagaagagttcacactctccaagtactctctacaatttagtattacaatgtataagagaatagctgaaaatagggtcgggtcgggcatggattaaagcggggatgaactaacacctatgattcacttatcttagagataaaaaaaaatatttttctttaaaatatatattttttaaataaaaacctaataatttttatttgttaagacccaccaaatctgaaggccggctttaaaatgtatccgtgtctagtatttttttacgcattaatattaatgattttatataattttatgtaataatttttaaaaattagggaatatattcatttagtaccttgtgtttttatgaaaaatatatttggtaccctatgtttttaataatacttaattggtaccttatatttttaaattgtacatatttagtaccttaaaataaaatttaatcaatacaattttattaatttaaccaaacaattctcagttatatgtaatc

SEQ ID NO: 323509 - DNA, 699 bp, Cannabis indica
cgactggattgggttgaggagcatgatctgtatgtggatgcaaatcgtcagcgaattcgtttattggtggtggagcaacggtagcatcgaccactggaggattatgtgcagtggaggtagctgagatggtggctcgagtacgcaccattgttgaagatgaggaaagcttcaattgaattcttgaagcttgaaggaggagtcgtctgataccatattagtagaaaacaaagtttttcttttattcaaaatgaagaaatattcgttgcattgaaacagagtagagggatgcaatatatatacaagcacagtaatgtctaactaacataaccgacttaaccaaataaactaatttaatagtcattgagttttttttttttaaaacaaaaggcaatttataataccattaatacaatttgtgcaaattgtatgcaaaaacattgtactaaaataataacaaaaatataattatcttaaaataataataataatattatcattaattcgtgtgtctaagtataactttatttatttatttatttatttattttgtaaggatgtttctaagtgtaacttaatcttactgatttgttatataatattttgtcccatttcataaagagtttaagcactattgccttttgatttaaccatgattgtcaatctcgtcattgtagtttttttttaaaagtaaattctatt

SEQ ID NO: 323510 - DNA, 662 bp, Cannabis indica
ggatttggactcatctgatccaaaccaattgaactaagtcatctgatctgatccgatcgaatggatgtattggattggatcggttccatccattgaatgttttaactgatttttttattggattcgattggatccctccaataaatctcatagatgaatccaatccatttaagccactatttaggctgatttcattaaaaggaaaaaaaagtatatgaaaaaacataatttaaaacctaataatctaacatagataataaaataatatataaaataattaaatatataaaattataaatattaaatatgattggatgtacattggatgatattggattggatcggttcggttatccattggatcggatatctcatccaacatctgatccgatccagttgaatttttaaaatttgcatccgatctgatccaattatgattggatattcgattctattggatcggttggctgggattggatcagataactttctgcacacccctagttgtaagaatggaggcgcggtacgtttagaccactggcgccggcagaggttcggctgtcattagtagaagagagggagaaagagatgagttagggttttctaattagagagaagaaaggaatgaaaaagaaaaaaaaattgtttcagattttttattt

SEQ ID NO: 323511 - DNA, 1426 bp, Cannabis indica
agtggtattttagtaattaaaataacataaaaagtataaatattgtctttaccttatggaggtatttttgtaaataaaatgtcaatttatattttctatgtaataattccaaaaaaaaacttatttttttttctatttttaccaaccactatagtaagttaaaaatagttgccaaaattataaaatcagaaaattttaatttgcacatgatcatagtattaaaattgttcttaattaactttttatttgatattaaggtttttaatatttaccatatcattacgtatttttctatagatactaatacgatatatatttgtatattatatgtatatgcaactattttacactatttgttttaatattttttcttaaattattttatatttaattttagtttgactaacagtcaaagaagactacagataaaaatagtgtatatacatttggggtgggggccagggccacccttggctacaatatacctcccccctgcttgtagtcgtcatactattgtctttcctaaatctcaatcttaatcttagatttcattccgaattttaaatattttcattaacacatttttgagatctaaaaatagctataatagtagtagtaccttaatcatatatacatcatcaaaaataaaaatttaaacttatcacttaaatatttctcctagaattagaaacttgaatttaagaaaatatttagtacatatacatattattttgttactctatatcattttttttaacatatactaaataatttacaacttgaattcgtatatatatactcatactgtgtaaaaatataactaatataataaataaattgtaaaccaatatttaattcattaggttaaagctcattcaaccaataattttttaaaatgaaagtattttatatattaaaaaaatagtaatatatatatgtaaagaatattaaaaaaaaaaagtacagaagatattttagttattatttagttattatttattttcattttttgaaaatatgagagacatttttttgaagatattttattcaataactatgaaaattgtaattttagagtgtatatatatttatagatttatagttttggaatattttaattattatttctctttcttattattagtttgatagttaatatttttttcaaaaaaaatatagtagtatttaaaaatatttattggtatagttaattgttattattattaaaagggtaaaaatcattttggaccctgcgttttgcaaaagttataaattggaccatctgttttgttaaatgacaaaatagaccctgtattttctaaaatagtacaaataggaccctgaacttattttttgttcaaaataaaacttaataataatctaatctaaagatgttatgaaaaaactagttacattttctgtatct

SEQ ID NO: 323512 - DNA, 1099 bp, Cannabis indica
tgtggaaaaagtaaaaaaaaaaaagcgttgaggttaatttatacttcaagaggaaatcaagtctttttaaaattgatggtccagatgtccttcattaagtatcattagatccaacgtctatggagttgaaatggttgaaagcattttcaaattacccttcaatcagcttcactttctctgttagacgcaccccagcacgtgcgtagtgaactaacaagggcatttaatatgttgcatgaccgccatgctagcaggccctaacgatccatttgcccatgaccgattacagctcacaaaaaagatgcatcctaggaaaaggttgtaagctcccaaactcgcggagtcccgaaagcttgggataaatgttatacgagtttttaaacaagagacacgtggcataattagaggaaaagatttatcaacctcctggattaacaaagatgaccatcatgattcctcccagagatgtcgcgttaatttgggaggggtttaatgaatgcttgaagcaaagagctatctttggcccagttagcatctgtgggacgcagaaggactatactcatccctaaactccaagaaatcctggaacaacagtctgactacatgaaggccaagtgaggactttctgaactggtcaagaacgataactcctacacgaatgtgaattgccacatcagatttatatagaaatcgacgtacaaacagttattcctttttctgatacaaaattagatcttatcccttgtgccaggccatggtagggtgcatacgtacctagggacacacctttttgcctgacgtcttgtctacagagtaatttataaaggagaaacttttagtcaacatgtgccctaatccagatggtactacttaccattcatgtgcactggacgatcaagaaggttcttcaaggccaggcgcttgaagttgtattttcctacccttgcaataggttgtggtacaaaacccttggtgggtaaagggaatgcccttacccacatgtaagcctataaataccaccactttttaagtacaaacggtgaacaaattttatactagccaaattgttgggtattgtgccctaaataaaaccctttac

SEQ ID NO: 323513 - DNA, 804 bp, Cannabis indica
tgtttatgctagcgcctcccactcaattgcactaccgtagttcccaaaaagtacgtataacctgacctaaccatgcaacattaaatgttgtttctgatctatattaataagtaaatctgattatttttaaatgagttttatttagggcataaaacccaacaattagtactctcatagtcacatgattcccttataacttcttctttttttgagggggagctccattcattatgaaattgtttagctcattttggtgtggtgtcaatgcttcatgaatcataataagcattgtatttgggaatggtgtgatgaattatttttatgatgatgatgatgataaggtgaatctcctacttttaggaggtgagggagattctttgtgtttgtgggctgaatagtgggctctacttctatcaaccttcttcaacttcccatgtgatctttcctcaccatacctaaccccattcctcttttgtcccctcttaataataataatattctttacatttatatttatgctattttcatttgtatgtgtttatgtttttgaaaaacaaaggagtagatatattagaatcaaaatagagttagacttgatggttattatataaaatgtgtattggtatggaatatggatttacaatcccagatacattaatggcgaaaacccacttcattataggctgtaaaattatatagtcttgattttttctaggggtttttaaaccaaatattgaaatttttattttttttacttttttactctagggcaaaaattttctaaaaaaaatactgtgtaagttt

SEQ ID NO: 323514 - DNA, 1105 bp, Cannabis indica
atatcttggagttttgagattatcgatacttgagaacatattgcacagatatggaatccagtccttctttgattgagagtaaattaaatatttcttttagtattgatagcaatacttaaacatagagcactcaatttctattaatttcttttgtatgtggcttacagaaatgttaattagagtatcaaggtactaattgataaacaaagaattagagaggttaatagacgaagatacatcgctctattacgttataattatttaatggaggatctcaactcatgccatgccatgactatatcaaaacatataaattattgtgattaattgcttctaatttctaaaatatagaaattatacgatttgagtgtgaaactatgatttattagtgggataatatagttaaatttgttcaaccaagagttagcgaaataattaatttattagagcttagaaatacaaattcatttgtccccaaactgtagtttgataacaaagacaaagtatttggtaaaatagaaaaatactaatgattattttctttataaaaataaattaaaaaagtattaatttatttattacaataaaataataaagtattattttatataaattatttttaagaaaaaaataatataaattattatttataaaacaataaaatataataatattttatagaaaattaattatataattatttatttgataaataaaagatgatataaaataaaaggagagaaacaaagtatagttggactgcataaagagaagcccatcacagtctatggagtgtgttgtggttggcgacccagtaatagtatatggactatgataggcgtctaagcccaaccctaacacaagcaaaaagttttcttgcttttcagtcaataggtttttatattgaaaacttacaaaaaatattgaaatttaatttaatttttacaaaaatactgtcacacagaaattattttaaaaatactgtatttttaaataacagtggaatacaaaacaaaaccactaaaaatagcagcagaacaactaaaaaaaaaatcgtaaaataacagtgaaaacttaacattttacacagtataaaatttacaca

SEQ ID NO: 323515 - DNA, 1358 bp, Cannabis indica
ggggttgtgtcgtcagactttattgcgtgtggcagttccaatacgcttcctcccatgcggcataaatgcgagatgactgttcagataaaatctgacaccacccggaggtgctttgtggccatcttgctctccgggagctcctgagacttacatgccttctccgggaggcatgtccgagataatcctttgctttcaagaagacttagctgtcttatttaaccgctaaacccttcccatccacgtatcatcatcccgttggtccacgtattttgggtaaaatcgggggcaacagtagtaataatattaatatcttggacccgaacctgaaccctaacttggacccgaaccggaaccctaacttgggacttgaaccaaaacccaagattaggaccccaacccgaacccagacccagacccagaattagacccagactcggaccaaggctcagactcgaacttgggcccagactcggacctagaatcagacccgaacctagaccgggtcctggactcgagacctagactcaaacccggactccaaacccagacctcgaactagacccgagacttaagacctggattgggacaaggacccaaatttgggacccggagccaaacctagatcccgaacctagactcgggacctaggactcagacttgaccagtagtcggtttcaactgagtttattgaaactatattataactttatacgatctattaatacaagtcagtatcaaacatagtattgtattacataatactaatacaatataatacaataccctccaacacaatacaatacaaatatgatgtaccgaatgagtccctatgtatataccaataaaattaagcataaaataatattgaaaagatttgtaatataattttaaaagaggtgtatattgattttatttgtatttatttacgttataattatttatgataacttataaaatttaaaaaaattcaaataatttacagtattagcaaataaaattcaaatagtcatttactatatataaggaaaaaataagcaatcatatttaaattttattttaagttatttgaatttttttttcgtttcaaaaaaaaaaaagtaatttgaaattttttaaaatgtaaaaatgaccttaaataactgttcgtgataattaaaataataaactaaaaagctatggaaaatatcaaactccctaaacaattgtttatggagagtgtacaataaactacccagtaatatttagttatttatagttcgaatcccgcttagcatcaacttgggaaaaaagatatggatatgtaaaggagaaaggtgaagtgaaatgtaagaaagttgaaactaaaaagaagaaataag

SEQ ID NO: 323516 - DNA, 767 bp, Cannabis indica
gtacaaacaaagaagatacatcataatattatgcatcaatcaaaacaatcacaaatatgaaatggcgatatataattcaacattctcaatcacagtaagtgtgaaaatgagcatgaattgctcagttgagttccttctagacaataggtcaggggcggcgttaagagaggcacatgggggagctaggttagaaaatataagatggatactcatgtactcacaatagattacagataaaattgtacagaggcacaaatgttcttaaaagtttctctattttagttttcaaaaattgttcacataaatattttaacttatgaattgataacagcagaaagaaatatatattgatgcaaaatagcatgtttggtaccattttgaagcaacattgctgataagaactcaaaaaggagcttcgacttggcttcccatggcttcaacttggggaatcgtcgggcagagtatcgtcgggagctgagaagaaaggagatgccgtcgggagagtatcctcatctgaaatttagggttattgttgagagagagagagagagagagaagatttagggttattggtttgaaattttcagccttgggtccaatattcgaaccagcgcctgtcccaaattttcattttcagtcaagaatattgattaggtataaaatgcatcttttcccaacagttattcactgttgggaatactaagtattccccacaattataaatcgttgggtatacttagtattcccaacagttaaaaaccgttgga

SEQ ID NO: 323517 - DNA, 1232 bp, Cannabis indica
atttacggcataaaacccaacacaatcaggtcagtgtttgttgtagggtttaatatagactgagggtggttttttggtatgggttgtaagggatgagtcattttttcagcacaggtgttattgggggagccattgtctcagtattatggggcatatgaccaacagaaacaagattagtgcatgaaacaggattagtaaaaaatgtagcaataggagtaaatcaataaggagctgcagtatgtacctgtgcaatttgtaaattgtgaggcatgccaggataatgtgtctcgttgaaaaggacatttcgagcaataaacactgccatttttattttcacatagatagcctttgtggacaggtgagtaccccaaaaacaaacactgttcagatctgaaatctaacttgtgagagttatatggtcttagatgaggacaacaagcacatccaaatgattttaatatagaatagtcagtcttgctgtgaaacaagcattcataggagctgatattgccaataataggggttggtaatctgctaatagtgtaagtggcacattagaaggcatcccaccagtaacttagatccaattgggcctatgccaaaagtgtcagccctgtttcagtgatatgcatgtgctttctttctgctcgaccattttgttgatgagtgtgagggcaagggtgaaaacaagataccttgatcagctaagaacctagcaaatggtttatactcacctcctccatcagcctgaacactctttattggcaaaccaaactgtttttccaccatactcttgaattgaataaacatgtcaaaggcctgggattttaatttcaatgggtaaatccaagtaaatcgactaaaatcatccaagaaatgaatatagtatcgaaatccatcttttgagggttcatgagaaggactccagagatcagtatgaataagggcaaggggttgggtggctctttttgaagaattggagaagggaagtctgtgacttttcccttgctgacatgcattgcagaattggaattgttttaatgtgccagtgtgtggaatggtaggtagtaatttctgcaatgtggacatggctgaatgtcccaatttgtagtgctagagattgatttttgagggtgttgatgttggaaattatttttactaggatcttagatctactcacaagtatgttgtttaacaccctaaatatgaaatttctaaaacgataaaataaa

SEQ ID NO: 323518 - DNA, 754 bp, Cannabis indica
attacagaaatgaactccgaaggagcattactcactcaataaacacgatcaaaaatagcaccagtagttcttgactaagaaatgagttactttgtttgtagaccgtttagacaaaatttaaagaaatatcataaataaaagctattttcttcaattatatgggacacaatactaagcgtcggtatgacactgaggagagtgttcggtaccaataataccttttagcaattctcttaaatatataatttggacaattaattactatttgatgacaggcataactatacctagtaaaatttaatggggaagcaatctatgagtgattgagtatatccaatttttaccacatttcggatttttttttttattgtattattgtggattattattactaagtattggtattgtgagctttactatacactatcataaagtatataaatagtattggatactatttacttttttttttttaacatccatattaatttggtgcctattaatttatttgactataaaaaatttaatatcatttaatatcatttcaattattgatataatttaatatcatttcagttattttactttaataatattaagtgattataaaaaattgtctttttttttgttgttttagagcaaaacaccttatagtcagttaggcatcatatataatatagcaatgctcatactcttaatatctttgtttctttctttcacacctttttcatacatttatataaatatatatata

SEQ ID NO: 323519 - DNA, 796 bp, Cannabis indica
gatataagtgttttgaagcagctaatggggatgctctacacacacataattttatactatttaaattattattatttataataattagatccaaaatatgaatattatgctttgaatttgacatgatgactcaaactatgcctaaagcctttttaaaggaaataaaagtcatctttagaaattaaaaatatattaaaaagaaaaaagaaagtcatggtcatatttgctggaaagtcttttgtgattatggtaatgtacaatttatttatgaatggatgtgtaatagtattctctctttttaattaagtattaacaatatattgaagaaaatatttactaaaatcataaatactgttttggacactgtattttttaaaatgttaaaaatagaattatgaattaatttttttgtcaaaaataaaatttaataataacccgatatagatgtattatgacaaaactggttatatttcctatatttaaattatttttcaattagttatattaaaaaaaattgttaaaaattaagttcagtgtaaaatatatagtctattttatcatttaacaaaataaaaagtttaatcagtttttacaaatgttaggctaattttagtctaagttttgggtcttattttcggttagttttcactctttgtttctagttttaggactatattacgcttgattcttttgtttcaggtcctcgggtgtttaaagaaagtatgtacaagaattgaggaaaagtggtgaaagaatcgagaagaaaaaccaaaaaattgtgtcgctgcctgttcca

SEQ ID NO: 323520 - DNA, 1704 bp, Cannabis indica
tcactcttgtcagctagcaaaaaaaatgaaaggctgactttttctctaggtgcacgcgtaccaatttcattaaaaaggtttcggtattggcagcattaaattattaaaggtcatttagataaatattttaaaaagtacgtatggtgaggtaaatatttctatatttaatgcattaagtgtacaagttatatatattaaaactcttatttattttttctatattttgtaaatagccttagcaagaattcattataacaatagaaacaaacaatagaatgttgtcctattacttattaccattctaatttcagtccacaacaccaaataattaaataaatggaaaaatattaaaagtaccttaaacagggtttatactagggtttttataccacatattaaaattttcaatttttttatttttttactgtagggtggaatttttttcaaaaatagtgtgttttttttttcaaaaataatgtataagttttatactgtatactgtattaagtttttactgttgttccatgattattttttagttgttccactatttttttaattgttctgttttgttattttacagttgttttatataaaaacaatattttttaaaaaaattcagtgtgacaataaaattataaacttttacaaaaatccaatatgtgtgtaaaaaccgttatatactttacaacaacaaatgttagtcttcctttcgttgggcccaattcgttcatgatggaatataagataagaagagtggtttggaagcatagattgttgggttttatacaaatgggtccaatcctgagttagtaagtaaccacaaaaccttatgggccaaggaggaaaatgatcataaatagatagaataatggataatttacatgtatataccttattttacaattaaattgcacaaataatgtttctattaaataaaatttaatttgtaattaatttctaatttttctacgataaaataaatttgaaatgtattttaaataataagatattataatataatataaaaataactaacttattattaagatgtatacaattaaattttacaggaaacaaaaaatatatctcaaattacatactgattagttaccattctacaacttttatttagttaacaaatcaagtatatttttaaaattcaaaatacttatataataaaaaaaatatgggtgagtaaatgtatattacataattttatttgaatattactataaagtatcttaaataaaactatttcatatatatagttacttgttatattatatgaaaactaattagtttctacaatataaatttaaaaggtaactaaaaatataatttcaaaataacgaattagcaatttaaatattaaaatattttactagtaagttatgtgagttatttttttctactatattgtgatttattatatagtttattaaatgggcttgaatgtaacatatatattgttataaaagaaaaataaaaaattaatgtaaaagtatttaaacaacacaacaatgtaatataatttaaaaataaacacatagatttcaaagtaacaaaatatatacaattaaatggtatataaaaatagtagcttattatgttacatgacaactcattagtttcaaaaataaattttaagattacccaaatatatttaacataataagataccataatacaacttaaaataaa

SEQ ID NO: 323521 - DNA, 842 bp, Cannabis indica
gttttttttttttttgttttttttttttttttttttgttcattagataattagtatgtgagttcttcatatgcattttttctttgtatttagtcattaaaaagtagaataaagttacattagttctgtgaaacttcttaagtgtgaatgctttatattcttttttctttttccctttattttttacttgcaatacttagtttttttttttttttggtgggttgaatactattgattcttattcttttcttattagcttttttttgagaaccttgcaccatactcactagaatctttagtagaatttcctaaccctttcttttattattattttaattcaagtgattttgggttttctcgtttttatttttcttcaattacaaaaattgacttattgacccattgcattttacttgccattgaccttatcctctttttttcatctcaaattttaactattaattttctcaataattataacaataaacatagttactattattcaaccaacaaatttgatatccaatcccacatatattatattttaaattaaaatacatggacatagcaatgttctatctcatagggtgttggacactattatatcaatccttagcattattttaattaatatttccaccacttttgacaatttgttgatccatacaacctatcataacatcattaataataaaataaaatataatgtcattgatgacttaacaaagaagacttaaattcaaataaaataagaccccaaatacttatatactgtataaatgcatctcaatttaataatttttatttcacataaaatatctatttttaattatattagttttt

SEQ ID NO: 323522 - DNA, 2013 bp, Cannabis indica
tttatatagaatagatataattgaagcgtttaattactagctagtattagaataatttttatattaattaagtatataattatttaattggtttttttagatgtatgaatatttcatacttattataattgattttaaatcaattatttaataaatataaatattttataggaattattatggtcttttgattcactaattaatttattttttaatttattgtgaaaatattttggtaaataattgtagtaaagatcttgataaaagatctcacatatataaatatagggtctggatactcattcaatgaaacacaattagggtcggccctagggctaggctcgtgcctagagcccacactttttggggcctaaaataaaaataaataaaaatttcattaagcttttatttaataagtaaaatttaagtatattgtaaacaacaaatattcataacttagttggtttaagtgtatgacatattatacaatgtcatggattcaaatctcataacactatttttttaatatttcttttttatatagttctgagggcccaaaatctaattcgctttaggcccatatattctcagcaccgactctaaacacagtaaattcatttaaagagagttgaaaaagcttagaagcccaattacccatatactaattggttttctttacttttgcatattcaaaactcgtgtgggattgaaagtcaaagagaattaatggttggaagtatttaattcttttttcatacaatatatacatatatttagattaattacttcatacatgatgatatatatttcatatcatttatttaaaatttctaatagttagaagaaaattttcttaataagtaatgagaatcaaaagtaaggtaataatttctttatatataattatttacttattttattaaaattaaaaaaggaagaattttattaattatatatatgataaaagaaaaagaatactagataaagatttttatttatttttattattttttaatattaaatatactataataattttgttttttaaaatatatcttataaaataattatcatacattatagtttctataaagggtaatttagttaatttatgtatttcgattgcgtttcttaatacagtaaataagataaattattattattctatttctaaataaatttagtaaattacgaatattgattctaattattttttatttattctattatatttttctattaatttattttaattttaaatattgtgaaataaatgtgtcattattgattttattgtatacaagtaagaaatgaaaagataaaaaaaatggagcttttgggatatgggagggcatttgtggcccactcttttttatggtgtatgattggccttgtagcttttgactatcaatacacgcgcaaaaatataaaatgaaaaatcttctgtggtcctcaatgattgaatttatctctacctagttagttggtcatctacaccctatttctctgtttattagtttgattctgattctttagataccttataaatctaggcatgcttttttatgaaaatatattcaaatatatgtagggctacattaataatgtatgatagatatatgtttttctacaaattgtacactatttttgcacaattagaactgattgtaagttatattttgctaaagtaatcttatgatatatgtcaaataaaaaggggtatcactactagtgcacaagttattatattattattgttataattaagtattgaagtcatataatttaatagagtaatttgcaatataaatacttaagtttaactcccaattgcaaataatacctaagtttaatttttggcggtaataatacttaagttatatttttaaaactctgtaggatcctaaccattaaatgttaaggcattatccacgtgtcattttattattggtatatttaaattaattttttttaaaaaaaaaaattaatgacttggaccaatcaagaattgac

SEQ ID NO: 323523 - DNA, 517 bp, Cannabis indica
attaatttatttgtacctacttagtaattagtaatagtattgttatcttattattttttttttttataaatttgaatgtaatctatagtattgatctaattattatgggtcggaatctatatcatgtttattaataattaatgagaatcaaaagtaaggtaattattctcttatatttatttacttatattattaaaattaagaaagagataatttgattaaatatgaaataaaagatagggaatacttctcccaccaatttggtaaggaatgtaattaaggatcatggattttatttatttttattttactttttaatattaaatatataatgataatttttttttaaaatatgtcttacaaaataactatatatcatatactatagtttaactcaaaagggtaatatagttcatttaaacattctgatttcgtttcctcataagtaaacatgataaatcactattattttattcttattattcctcatttattttgttacatttctccattaatt

SEQ ID NO: 323524 - DNA, 519 bp, Cannabis indica
cgatctttatgtgtcgcatgagagatatactttctcgtcgcatataatcggtatatgcgcgaccagtactaacttctctcgatcctgcttttttcactatgttgggcatagtgtgcgattagactttgtcttggtcgcaccttctcacaagttttatgtcatgcgaggttagctctattggagctatatattgacacatcatcttttttctatcgggaattgggttcatgtgtcaaccttttttgagattgtactcgtatttctaggggaaatattcatactataacacatgtcccttgtttcgcgatgacaagtgtctgtcaagcggcaaaactattttgagggacaggctagttgatttgtcacattatggtggcgtttgggtatcttatcaagggttgttgaaatgatggctgtaattatgattttatcttcccaagataccacgtcatcgaatcctttgggatttgtgcatgcacaacttgaaataatcaaatattactttaagttagcttacgt

SEQ ID NO: 323525 - DNA, 688 bp, Cannabis indica
tttttcggcatcgaccgctactctggtgatttttctggcactggtagcaaactctggcgacttttccggcatcattgacaaataaagctacctaaataaataaaaataataaatatgggatttgaaaatctaatttacatatatatggcatatcaaataccataaaaaaaaataccatataaatatgtcaaacttaaatgtactatatttataataagaacctttaaaatctcataataagtataattttctctatacataaataaagtataaagtgatttaaaaaaaaacgtagtaaagagtatattttttgctataaaattttatcaaacactatagacattattttatttaataattatttatttatttaatattcgtaatactttagtgaactataatatgaagaatagaaaatatttttagggtattagtggcaaaactatttgaactatacgatttgtgacttaattatataaaataatttttggcgacaaaagtacttgaattgtacttttattttgatttttacacttcctttaaaataatattattcaatgccaatatatactgttgatatgtatacaggtggcaaaatttaagtggcccacaatattttaaaattatttctgttaattccatttttggcatattcaattgacaaaaatattttattattctttgtata

SEQ ID NO: 323526 - DNA, 797 bp, Cannabis indica
gatagtgacatatgaagctcattggtaaagagtggtaaggatgctttatgaagcatcaaagtcgattttttcgtataagacaaataatgtatatgtgaagtttgattacgtattaaataattacttattctgtgtgatgctttcatatgttgtacaatgttataatattacgttttatgcaatgtttatgttttatctacttttcttgctgagtctttatcactcatgagtgctttgtggtgcaggtaagggaaaaaaaaacctagaccagccatgagtaagaggtctccagacagtgtacatatcagtcgcgtgtcttggctcttagtggataggatccatcttttgattgtattttgaaaatgtaaccttattttgtaatagttgttttgcaatatgttgtagaagtttataaacaaggggattcccaaaacaagtggtattttgtaaaaaaaaaaattaattatgaaattcaattgttttattaaacattttaattgaaccacattttcttaaaccgttagtttataattataaaataattaataaaagcacacacaaggcgcccttacaacttaaggcgttataattaggtatctaattctatatggagtaatgtacagacggggcttctcaatgctgatcttaaggtgtgtcaccaaggctgaggccaagcaactgattatagaagggcatgaaggcttctgcgacaatcatgcttgggggcaaagccgatcgaaaaagatggggtactttgggccaacaatgattgaggattcgatggactatgtcaaaaa

SEQ ID NO: 323527 - DNA, 582 bp, Cannabis indica
atattgtaatttataaatgatttttttataaaaaaaaaacattaattacttgttcatttcaaaaattcaatcagaaaagttataatataaaatgaattagctatacaaatttattattttatctattttatcttttacaataatttataaatatattataatttttacaactaattataatatctcagaatcttattgtttatctaaattttaacgacgacgatgatgtgttaagagtaacaacacgtgacacaaaaatactgggactaaattaatgaagaatatgttaagtcatgattgttggagcgaccgttaattatgaaatgtggtcatgattgttagaataaaagtcagacagttactcttactcctagcttgaataaggtgggtgtctccaagatagaaaaacaatagactaacaccttcataagtacgatgaacaatcaccacacacctacaggccaagttagtaaggggtagaggacactaccccccaccatagatatgaggacattctcaaaggtagatgaagacatccacacaacactatgaatacccataacatacaaggggtctcggggg

SEQ ID NO: 323528 - DNA, 899 bp, Cannabis indica
taagtgaggattattttttttttaacaatatgtataatatacttcattgatgtttgtgatgcagttctctttacattcccagaagctgcaacttatctatctatgagatttttatattgttagtgtctatatttttgctgtagaaatctattttataaagataattttacctaaattgatgctttaagtaaaagagatctttgcttcggaaaattctttactttgttaattttagtaaatcatatgttcatatatgatactactattataatatttgtatgtatatattttaaataggctaattagaattatttttacatgtactaaactatgcactctgaacctttcaacctgttaaaaattttctctgaactattgaaactgttacatttaaagacttctgtctatttttattcaattttgttaatgtggtaattgtttatgtactaaattatgcccctagaactttaatatctattaaatcatgaacatgtactaaattgagcctctaaatttttatccacgtcagtaaaattagataaaagtttataaatctaactatttcaatagtttaggtggaatttttaaccacctaaaaaatttaaggagtataatttagtacatatcaattatctcaaaattgagagaggttaaaaatctaaattatgtataaatccaattcaatttttaaaattttaaaaccagttatgtatagggaactagtcacattttcataaacatattttcaaagggaaatttgacaatacatgcttaaaaatagcacgtgttgttttaatatgctagccaaaaaatagttcaaaaaataacctccaattaagattaatcccaataataccctccccatttcaaattaccactctctctctaactctctcttt

SEQ ID NO: 323529 - DNA, 1537 bp, Cannabis indica
ttcaataggtaattacaagtgtgatttcagatttcaaccacagaacttttggttgataatctctaatgatattctctctatttatctttctcgatctctcactaagtctctttcttttgagctccgaggagcttctctctctaccctctcactctaactcagctcgaaggagatgaaaaaaggctttacgttgttctctcaacttggatctgtgtatctataggttgtagaagtagttgcagttagggagtttagttgctgagctatattttgttcttcttgttgtaatctatttctgttagtttgtcgttactaaaacagtttgagagtctttgtatttgagtgtctgtattggacttggccttagggcacacttgcaagttgcaatattctgttaaaagtttgtaataatgttaaagtctgtgatgatcttcagcttacaacaagagcatttttaatgatcgcattttgaagaatgtttaatgagggagaaagcttaggtcttaaaatataaaaatgtaatatcgttataaataaaagaatgttatttttaaaatttacttatgatttttttaaaataaaaaattaaatgtgcaatatatattagtttaataaagaaaaaaatttatgtatgtaataatgtgtgagattataaattataattatagttgaagtgtttttagaagtaagagtgcctcaaaaataatgtgaaaaagagataaaataaaacattatctctttggatcattcgagatgctctaaggggttttatacaagaaaaagaataattaaatatatgtctaattaggatttttgtctcttgaattttgatatgtattaaataatgtcccttgaatttttaagccgttaaattttttttctaaactattgaaattattaaatttaaggatttcggttgttaggctaattttagtctaagtttcggatcatattttcgggtagtttttactctttgtttctagttttaagacaaatttacgtttgattcttttgtttcaggcccccagatgtttaaagaaagtacttacaagaattgaggacaagtggtgaaaaaattgagaagaaaaacaaacaagagactttgttgcctaatcttgccgcggtgaggaaaaccttcgctgcgacgcggattgacagagagttttacaaaattgtagaaattccttcgtcgcggcaaaacctcaatgacatgatttttgggaaattttgtaatttcacgaattttaaagagaaggcttaattaaaaaggagttcgtgaaaagtgatattcattcagaattgaagccctaaaaataaaggcggagacttcaagagcggcttgtggcgatccggatcgatctctgtgtcaattttaattatggatttgattatggatgttatgaactaaactcttatttagggagatgatgaatgttaattgacattgtctttagttaataataattactatttctcctttcttgattgtgaaatatccatatttgtgttcaattacatgtttaagattaatcacctt

SEQ ID NO: 323530 - DNA, 914 bp, Cannabis indica
tttatttttattttgtttattatgttttttgcttatgtataaataactaaaaaaaattatcaaaaaaaaatgtgttaaaaaatctatgatggtaagatgctcgaccacaaatttagctttatttttcaaatgaaggaaagaatgaagtgatggtaaggtgcttggccacaaatttaggatttttaatgagagaagtaatcagaattatgatttacaaacgcactcgaatcgtctcagagaatgaggaggcagccatgacataatctcctcttatatctcctctggcacatactcaccaccaaatcttactatttgatcttgtaggaattttaagataggattttactatcttgccccctacaccaacaaacaaaaccaatcaagtataaggtcaatttcgacctttccctgttcaatgacttttcaaagtcagagaacccaaaacgacagcgttttgtgtttgaacaaaacccaaggctcgagaatcttctcagccactttctctctttctctgtcttcacttcgaaaccctagcagagagtttctctctgagaaactcgaagctaggtttcaatctacccagaaaatcaagccccaaacactatacacagatcagatctacaatgatctgatctgtacacacccacacacacaaatagaaaagattagggatagaaaacaccagaaatttcccgaagttcaccaataaaattggctacgtctccgtttgagctgctcctcgaatttgagagctcgattccactatcaagatgtttcaatcatacaaccatgaagattccaagtcacaggtaataatttcagactggtaatctccttttaatacatgtattttgtgtttaatccctctctctctctagatctaactctcttttgtgtttctgtgcatgtacgag

SEQ ID NO: 323531 - DNA, 1154 bp, Cannabis indica
ataaacatatttatcacactatataaacattaataccattctcatatgcctgtatgacacaaacctgcatgttacgctcacaagcctatttatgtctatgcaacatagacctacgtgttgcgctcacacgtctaaatacaataaggccttagaacggttcatctcggttctagttattgagtccaacccggttatgccttgaacacataaccctgaaactcaatatactcatatatttaacatggcatagcatttacacaacatatatcactagggtaataaccctaggctattaaaccgctcatgttagggtaataaccctaatctcggttattatttactcacatatatcatttccaatataagtgccaccgcacataactctacgtgctaactaccgtcttacctaatgtcccacaatggtagagattccaaatccccgggtgctcctaaccaagtgccagtaatcctagtcacaattccaggatttacacaaatagggttaactcctgattccacatttataaagtatatacatggcattcaaaaatacagataatcacatagagctcggaacgagctttctaacgatatataaaactcccgaaacagagttcggatcacagagttatgcattttttaagtttgcattcgaatctgcctagaaacacgaggacgggccgcgacactcaaaagctgtgtcgcgacacctgggttaaattcccaggtcacaaaataggggcaggtcgtggcatgcaaaagttgtgtcgcggcacctgggttccaaacccagaaaaccagcaacgaaactttgagtttcaaccccaaaaacacctccaaactaacccaaatcataaccaaaacttaaaaccatcaaatagatttttaataactaaatagagaatttaaaatacaatttcatgcattaaaatccaactataaaactctcaaaactcagattgaacaacataaagcataagctctaacattgagctataatccaaccaattccaccttcaaatactcacatgatcaagtcaagaactcatgtattagacaattaatttcagagacaataaacagaatataaacactacaaaaatccctaaaattctctctaatctcaatctaaaacaaaacccaaaaagctccaa

SEQ ID NO: 323532 - DNA, 2130 bp, Cannabis indica
aggaatttaatttgattctaagtatatgtttgattatgattttagtattcggaaaattatttagtttaaacctaaatggtatgtgtatgttttgtattttttttcaagtgacaatatttattgtaattgtttaaaatatttgaatgttttgtaataaattttaaattatttaagatgttgaaattattttagttacattcaagtactaccaagatgtattaggacttgaaactcttctatttgtggcttggtatgaaaaaaaaaacatatagtgaaatatgtatccaagtgtttgacttgtcaacaaataaaagttagaacattagagacctacgaatttactaaagcctttaacatttcttgagtggaaatgggaagacattactatggattttgtagtttgatttcctagaaacataggcttgtatgacttgttttgggtattatagatcgattcactaagttagcacactttttgacagcgaagacaacatatacagtggatcagttacataattgtatgtaatggtgatagttcgtctccatagagctctgaaatccattgtattaggcagagatctaaaatttacttccaagttctaggagagtctccaaaaatctatgggcacgaaactgaaaattaatacagtttttcattcttagactaatggccagtccgagagaacaatacaaatactggaggatatgtttcgagtctgttatggactttgtgggtacatagagcaagtatttgccattgataaaattctcctacaataatagttatcagactataataagaatggctccctatgaaatgttgtatggaaaaaagtgtcattctctgatttattgggataagattggagaaaggaataatatctaggtctagaggcagtacagaggatcaatgatgctatcgagaagatcagggctcgaatacttgtttcttagagtaggtatataagagctatgcaaatccaaatcacataaatataaaaattttaggtaagagattatgttttcttataggtttcacctatatgaagggtgtaaaacgcttcagcaaaaaggacaagttcaaccctaggtttacgggaccattcgagatactagaaagggttatataggtagcctaccgattagctttaccttcagcattgtttatggttcataatgtatttcacgagtcaatgctgagaaaatatgtataagattaaactcatgttctgagttatgaaaccttggaactgcaactatagatttatcctataaggaacaaccaattcagattctcaacaggaaggataaagttctaagaaataaatatcattggttaaagttttatggaggaacaacaaggtggaagaagccacatgaaaactagagttcgacatgaggacgtaatatctagagatgttcaagttagatttgggagacgaaatcctttatcggaggaataatttcaatgactatatgattagacatgaaaaattaataattaattaatatttatagtaaataaaattaaactgtaattaaatgtgatattatgtataaagactatgttcatatattattattgataatatttattaattattaatctaatatatttattataaaaatatttgtgataatactcttgatataatgaatttattaaaatttaatatataattttataaataaaatagggtaagtatataaatatatatatatatatatatttattctttatttttaccatatacaatttgtatataaaattataaatatatttggcatagttaataaaatgtataaactatacataagtttctatgtgcctacaatgtaactaattaaaataaaaatatatagaattataagtttttatgtgcctacacacgactcacacaatattctataaaatctctataattgtgtaataatattgtatttttctgtattgtaataataggcctattatttctaaatgcacatattaatccataatttattgtagtattaattgattgttaattttctatgtctaattatatatacagttaatataattttttattgggggcttatttttacactttaaaacaatttttttttgtatttttacgaaattctatatag

SEQ ID NO: 323533 - DNA, 1230 bp, Cannabis indica
ttacggttttgtgaacaatcacaccgtaaccgcctggtcggtttggcagcaggtaaaaaccgaccgaatttcacccctactctaaacctatcttgaaaatttgtgattttgcttgaaaattgcttggattcaagcttgtttgtgggaatcttggagcttgggttgttgagaagcttgaggcagttcctacaactttgattcttggatttgagttgctgaaattgaaattgaatgttataattttaagctttaggtgttcttgaaatgcatgtgtgttgatattagtgtatttatgatactctatgcttgattgtgtttaaagattgttgtagatagctttgtattgtgaattaaagggaattttgagtttagattggttctctaattaatctgtgcagctctaaatttattgctgagattcgttcttgagttctagctcttgtgtgggtgtttatggtggatttttgctcaaagtgttgagcttagttttgtgtagtgatttactctgaaatttttgcttatgggctgtgattttgagccataatttggtgtttcaactctctgtatgtatattgatgtttttaatttattaattgagattttgattatgctttgggtatgacttggtgtgtttgtgcatgatttttcgaagctggaaaattgggttttttgggtttggaacccagggaccgcagcccagcttttgggcaccgcgacccgaccctgttgaaatcttgggttttaaacccaggtgtcgcggccccgtgtggggagtgccgcggcccacccccttgtttctaggcagattcaaacgcgatattcgaatattcataactttgtgatctggactccgatttaggagttctatatatcgttggaaagctcgttccaagctctatgtgaatatctgtgctttgaatgccaatttgtattctgtgaaagtggaattagggattaaccttgtacttatgaatcttgaatttgtgactaggattaccggcacttggtcaggggcaccaagggatttagaatctccacgtttgtgggacatcaggtaagacagtagtttagcgcgtagagttatgcacggtggtgcttgtattggaaatgatatacgtgagtaattagaaactgggattagcgttattaccccaatataaacagtttatgttggatatattttaccaggatctagatttactaacaatgaaataaacacataagagttta

SEQ ID NO: 323534 - DNA, 1347 bp, Cannabis indica
tgtatgccgagtgttggtcaattactgcgaagtcagccattgacttagccaccatgggagtggttcccaaagtgattgggagttttatcattccttttaatgcgatgaaagctccaggaaaaccataaatacttgatacaggtcgcggatctttctcatacaaccccatttgcttgaaggcctggaaattcaagacattcacgaaacttccattgtgcacgagtatgcggtggacattatctcgcccaatgtttgggacgatgaccagcgcgtaagaatgtgggtggtggacccacctcgcatcactttccatgaatgtgatatcatcacattcccttttgaacagctttttcggtcgttcactcaagctgttcacattggtgagcggcttatctttggcttctcttacatatcgctcctgcgacttcttggaatctcttgcgatatggagtccgccaataatagttaggatattgcaaggagtcctcgaaccacttccattttgattttcttctttgtcatccgctcggggatgactttcctcatttttcttgtatttgttgaactttccctgcctgattagttcttcgatttcgtcctgcaaaaaccaacattccaaagtagtgtaaccaatatctttgttgtacttacataatttcttagggtctcttttatcgcagtttcccctgattgggggaggctttttgaagaccccgctcttttcttcgatggcgtagatatggtcttgaaggactgccaactctgtataatttacaaagcacggaccacctttcctcttcggggaggactccttctttggaggggacttggctaattttggacttcgctgtctttgtggactgcgtcttctcagactccttcctctggaattcttccctctaggactgggagatcgtgaccgcggcactagtgacttatgtttgtctttgcccttctctaactcagctagagaattttcaatcctcttatgcggctccgccatagcgaagaactcgaccaatgattcaggtcttcgagcctgcagttccttccaaaaatcggttctttgcaggacacctgttatcaacatacatactagcgaagactcgggagccttctctacttttgtcaccttagcaattaaaacgtttaaaataatcttgtaaagactcaccagattcttgcttgatattagccagagtagtatagggtggcctataggtcatcgtgacttgaaaatgcgtgaggaacaagtcgacaaaggtctccatgttgagatagatgcctccggcaattggctgaaccatcgtgggcatttctcaacgttgctgcaagaatgcgacactt

SEQ ID NO: 323535 - DNA, 2355 bp, Cannabis indica
taacttaggtattattactgcaaaaaattaaacttaagtttttatttacaactgtgagttaaatttagatatttatgctgtaaattttcttttttttttacaataatttttgttggtcttttttactacattttgtggtgcctgacataaataacggtatgccaccatttatggtatttaacaaattttatagtattttcttataatgataatttttttacaacaacttcggtggatttttttgaatgattttttttttcttgtgaatgattttttatgtataatattgagtacattattatttaatattattaatagaatattattgtttagtacattaagatgtccaacactataaaaataataattgtgttatgctatttttagcctaagtttcgggtcgattttggagttgttttcttctcatgttatctttttagaatagttttacgtttgacttttcttatttcatgttcctgaggtattaaagtttaaattttacgaactggtaaaaagacggggcaaactggaagaaaacaatctcgaaagctagaaattggtctatagtcgtgactaattatacggttgcacctatggtcgcgattaaggggcttggtagagatgacgattttcgagattgttctatggtcgcgactatgggctaaatacgagatttctagacagttttgtaattttaccattctaagatatctacattattttctatataagagttttgtgtttaagaagctagatactcagaagtagaaccctaaaacctaagaaggaggcaaaggaagcaattttagcgacttggaacaagattaccaactagttcttttttccctttttatttcttttttatgttaatttttattttgaattttattatggatgtgaacatgagttttatgaactaaattcccaatttaggaatatgatgaatgttagttgatatctcctcaaataagttaatgtgattattagtttttcttccatggattgtgtgatttgttcttatttgctttaactacatattttagactggccatctttaatgtgatttataatcctaatataaaatttgtgaagtgaatactagaaatactttaataaaacaaacataggtttggtgtaaaacgagggtatttttacatggcttatgtgacatttagattctataattaatgcaatttatatgttaatatacttcagagatgcaagtagataatatatgatctatgatcttaatgagttgagaagagttagggttcctttaataatctatcatcacttaaagaagaaattaataatttacattaacaattgagtaactgaaataacaagattcatattcctaagcaatcatccatagtcaattacactttgtattgttattttattgtcttttattttcagttaattaattgcttaatattattttttattctaccaaatagaaacacaaatctaatttagtggtactcaatatcaattccttgtggatcgacctcacatgtgtgagtattaaactgtaataggttacgtacacttgtgtagactataataataaagcaacaagtttttgacgttgttgtcgaagaattgaataaatattgatattacaataattagattaaattctactttggttaattctttctacttattgctaactatttcttttcaatttctcttactctattgtaggtatctagggtttatgcgacgtcaaggacaaagtgtaacaatgcatattgatcctgaaattgaaaagacttgtagaagaaacagaagaaacaagaggctagaaatgagtatagtgaaggttgaaaaagaaatagtcatgactgacaatgccaatgtcagtaacaatggtaacaatgtagatgcagtagaaaactaggctaatgatcgtaatccacctgaccgcagcttgagagattatgtgctaccaaatatgacaggagctagattctgtacaaggccacctgctaccgaagccaacaattttgagatcaatccgaccatactgcagatggctcaatccacagtccaatttgggggactaccaacagaaaacccaaacatgcatcttgctaactttgaagagctgagctaaacatttaagatgaatagagttagtgatgaagtcgtcagattgaggttgttcccattctcgttaagggatcgagccaagatttggttggtatctttgtcgctaaattctatcaatacttgtgaggaattagccccgaagttccattccaagttctttcctcttgccaaggttgccaagctaagatctaaaatcaacaacttcatccaacaagacaacaaatctctttatgaagc

SEQ ID NO: 323536 - DNA, 2370 bp, Cannabis indica
ttttctaagtatgtaaacaaaataatatgcttttaattttttttacagacaatttaataaacaacataataaaatgttgtttcccattattttttattttaaattaatttatttttcttattctgattctaattataataaatgtaagattatagcaataaatacttttttcgatgagaagattgttgtcatggatatgctctattgataattactaaaaacaatcgtagccaaattatctcattatttatttaaaatatggtactctctgtgcattgtaaatttgtaagaaaccaaacgtacatgggatgatagtacaatgtacgtagaatacccataacaattgtgcaaatcaagtcttcaaacatatctaaaaaaaatatcttatcttgtttaaaaagtcaagccatttacaacactactgaggtcacatcctaaatatatattaatttaattccaaaggcacattaattgttaccaaagccaacaaattgtcaatctcctaggtttatttaaattacggttcacttatacgtggggtgtggtgatgagtctggtccctaaaaagtgtagtttttccgattttcaccattttcttccattccatctatggtatattaaagaaatatataaaccgtcaacgatatattgtcttatatttatgtataaattcctctctatcggaaataattgaagctaacatatataataacaaccacctatatacatatctgtgctctttccaaaaaaaaaaaagctgtcttttcttccaactcaatatcatggggcggcgcggaacgaagctgcgggacctcgtgggagcaatcaaggacaaagcatcacaaagcaaagccgcgattttctctcgacccaatactctctccctactaagagccacgacccacaacctccacgcgccgccgaacccgaagcatttagcggcagtactagcgttcggtcactcctcacgcgccaccgcatcagcggccgtggagatcctgatggatcggctccagaacacgggagacgcatcggtggctctcaagtgcttggtggccgtccaccacattgtaaaattcggtaccttcattctccaagaccagctctccgttttccccctccacggtggtcggaactatctcaacctctcaagattcagggacaactctagtcacgtgacctggcagctatctacgtgggtccgctggtacgccgagtacatcgagaacctactttccacttcccgggtcctcggattctttctcgggtcgtcgtcttccgccacggaggaggagcgagtttcggcgtgttggaccagtgatttgattaaggagattgagtcgctggcgagtttgttagaacggatctgcgcgcagcccgagttggatatgagtttgaacggtaacagattggtgggcgatattaggggattggtgggtcaggattatttgtcggttgtaaacgaggtgtcgatccgagtcactgagtttggtgagagactgagttgtttgagctttgtggactcggtcgagttgatgtgtgcttttaggagattggaaaattgcagagagaggcttcaattatcgtctaatttggtgaagaaggacttaagtgaaagcttttgggatctgattcgtgagattaaggagaaagtcgggcaggaaaaagaggcccgggaagataatttggtggtggcgttaaggaaagataagggtactgagtcggctcggttcggggaccgagttctaaaggtcgataactcggtccgattctcgtccggaagatttgcctccaattacatgtcttctatgccattcgtgggctccacgtaatagtcgattggtaaatcaattttagaaactatgttgtaaaaattagacctgagacattttcctttttgaataatgtattattaaaaaaatatgattggttacttattttgaaattatattcatcactaaaacttaaaatttaatattaatcactttcttttatgtttcttattacttaaaagacttctctaaactcacttctcaccaggctagtcactactttcagccaccatgctagtcgaacaaccttgttcttttcgttctttatatatatgacaattcttctagttaatcatattttgacacatcattaagtaaatgttgcttaatctttgtgcaacacaggagattattatggttttgcgttttgttttttctttttaaatttgaaaaaagtaatcgtatgtgagggaaaagccaaacattgtcgtagtgttttctaatttctcctattgccattgaagctttagtattagtttttggaaacaggaacctaagtccatttggatggtaattatattatttggtataattttct

SEQ ID NO: 323537 - DNA, 1325 bp, Cannabis indica
attcgaaaaaatttaacacatcgtaaataggatttaaacaatttgttacacgtgttactattttattttagactaattagtaatttttcctcctgaactttaacatgtaccaaattatatccctaaacttttttggtcgttaaaaattctctcgaactattgagattgttaaatttaaggatttttatctaatttcattcaattttactgtttcagtgattgcttatgtattaaattatgctccctaaattttgatatgtacttaatcatgcctcttgaactttcatccatgttagaatttttttttattgaaattagataaaaatccataaatctaacaatctcaatagttcaggagaatttttaagaaccaaaaaagttcaggagtataatgtggtacatgtcaaagttttgggagaaaaattattaattagtttttattttatatgcgtatataataaactgttttcttataaattattttaaaattttataagatattttaaataattataacgtggaccggtataatattcatgagagcattttttaagaggtgatattgtttttagttacataaaaccattatctattactaatgatgattaaaagaaacatttccctacactatattgtatggtatagtggataatttagaagaagcatttttaaatttagatttaaaaagtagggatgaaaaggagacacgtaatcacaaaatttggcggttgaaaagaaaattggttactctctcttctccttctcccacagacacctgaagttgaagtttgttctctcagtctcagaacaaccgaaaagctttaaaaatggcgataagagcagctccaatggctagcggaagcttattaagctccgacccaccattcttccaacgcatcatcaacaatcgtcactgctttctctccccccgtaaccccacccactccactcccaaacctttcctctgcatccactttgaacccaccggctttgcccttggagttcgtcccacctttcgccgccattctaagctcttgtccactctccctaaagctgccgattcaactcaaccctcttctgtctcatcaccctccgccgataaaaccattattcccgacgaccaattctccgtcgccaaagtatttaatttgttctgtcctttttattttaaatataatataattcatgggtacagaagattaaattgttttattgcttgcaggtttcatttggtgtaataggtctaagtctaggagtttcactcttggggtatattctttttctttctttcttttttttttgttatgtgtaatgattatatataa

SEQ ID NO: 323538 - DNA, 505 bp, Cannabis indica
catctcacatgcatgttttgaagacaaagaaaaacgatgatggtgccagctagtccagtaacttttatgttttatttcttctttttcattttttaattcgtaattttaatggtttattctaacacaatacccaattgagcaccatatttttgacttgcttcaactaacaagtcccatctgttatatttatttatttattttgagtgaccatctgttatgttttataagtactaaatagagatcacacacgttaacatttaagttttaataacatatacaaatatatataattaagggtgattctggaatacattgcttatttgattgtgttacatgtattttattgattttcatgtttttactttttccaacctatgtttttattattattattattattattattattaaactgtaattgttttttgaaatttttacataaaaaatataaaatataatctttattacactaatatcactatacggttatatcaacttttttact

SEQ ID NO: 323539 - DNA, 756 bp, Cannabis indica
ggaataaaacaaggccacaataacactcttcactatgactagcaagatattcgaccagctataaattttgtttttcatgagcagcagcgccagttcgaatagttaagggattgagagatggaattcacgagagcccagcaagcggcaatcaacaaccgttcaaggcaggctattgtgctgatcaggagagactatcaggtcaccagccaacagtcagtgattgatgcttatattcccaataggccacgacacgagctagaagaacgaccagctaaacatactcaacaaatcccaattaatggactgttcaatctaaggtcgcagagtcaaactgtgggccaaatagtaaaattttaccaacttgttacttaggaagaaatgatcagcttaacacatatcctcaaatagagatatcgggccaacccataattcacaacgatcaagcacaaaggcctttaggcacatcaatatttgatcgactgggtaccgtgtacgacctcaagaatgatctgaatcgtaaaagaggattggacaaataggatattcctcctaccatacaatcagacaatacaaattactacgtgcccgatccagctctaagagatcctcaggtgacacaggtctatcaataggcaggtcaagttgattcattagttcaagcacaaatagatcaacttaagagcctcgttcaaggcctgaccagctcaaaactcacaaatctagaacttgaccggactagaggatcaccattctcac

SEQ ID NO: 323540 - DNA, 858 bp, Cannabis indica
tttttttaattttcattttttttaacggttttgcttgttaccttcaatttttatagcttataatttgcttgtctttcatttgggttttgactacatttcacagcccaagataataagtattgttattttttcttaaactagtatcactccattttcaaaaataataatacaaaaaaaaattagtattcttgatgtacaatgcattttgttaacatgaagtgaagttactcgagttataacagtcgacttgggaaaaggtcctcaactttgttcctaggtagacttcggggactctggaatgggtattgaatctcgttgttttcaagtgcccatcattcagtattctaagtaaggaagtcaagaagaattcaagtccaaatcctactggaaacttaaaggagtcgatcagacccctagatgttaatctaagcgcttagggtttcacccagcccctaagttgacaacttggctagagtttccgttttggggattgtcttagtgtgtagatgaccccaaacgttgcacttagacattaattagacatgtcacgaatatatttgaggcaccaaaattagattcggaataacttcaaacttgggcacttaagtgcgcaaggtgcctaaagcaccaggccgatgcccatgttgacatttcgttaacctgtgtcgtctccaatcatcaaactgaagatgcttttattttctttgtcttcatcaaaaatgagaaaacaagtgctttcaaaaaataaacaatccaactttgagggaaaacaagtaattaaaatacataaatatgaagaaaaagtagtaagtagttaagtagttgtaactaactatttaatagctacaaaaaaaaaaa

SEQ ID NO: 323541 - DNA, 1095 bp, Cannabis indica
tagatgtatagtttttatcaagttatgaaagtaacaagaaatgacttagtatatgcgctgattgtacatctaaatatataatatgtcaagtcgtgataattagactgttgaataatttattaatttaatcgacgacttgttaaaaagacatgtaaaaaaataaatgttatattatgattacacctatttgtcccttataacaacataatgaagttgtcttgtatattttaaatgtacatatcattgaattgatgatgaggaaatataaagtttgataaatataatagtgactcttgaagagtgtatatattttagagaataatataattattttgtacgtgtatatgaaaaataaaacttgtaatgattattatatatattgtagtgattttacaaattatcttaagaaagtttcatttaaatataaattatagcaaacttgaagttcataaatggagttattttgccatgattaattatacgcaattaattgtaaaataatttgattaaattttattgaagaaccaattttttttttcattgttaatttataatactcaaaataaaaatatacatatattttgcacacagataaagtaaaagtgtattttaatattctataaattgaataataatatatgtataattttatttaatttttcttttatacttatttataaattaaaattatatttttattgataattattttactaactagtaaaaagttacgtgcgaggcacgtatactaaattttatgctaggtattttttattatattaaaaggtaatacacttaaaaatgtttatctcatcttggttcaacccaattttatgttgttcccataggattgtgtgttagatatgagcttagaagaatagtattcgttagaataggtgccagcaatagcggtgctgatgtgagtttttatcttctgggaaaaaatctagctacttcgacattacaattacacctagccttttaaaatgagcatcataaaaaaatttcaaggattataaattgaaaaggatatcttgttacttttggtgtgcccaacaaactctctaacggatgacattatatttcgcatatccc

SEQ ID NO: 323542 - DNA, 1041 bp, Cannabis indica
caagagagagagagagagagaagtatccaaaaacaaaagtttcaaaaaagcagtctttctttcataaacaaaaaaaaaaaaaaaaattgtgaagattcttctctttcttttctcagatgcagttcaagaaagctgtggaagaataaaaagagggtcatgtatgaatccataaacacggccaccaaacgtacaataatatacatatgtacataaatttagattcctggggatcctaaccaataaggttagagagaaaaagggttttggtggaattgtcaaaagaaactccggccattaaaatgaatgctgtaacggaaaaaggaaaagaggttttattggtttggtttgggtaagagagatagggggaaaggtgtaggttttaggtgaggcttgaaggtgatatttataggggaaatgaagggtttcttttttctttttcttttattttgttgggatttaaaaaaataaaaaaaaaaaaaataaaaaaatagttttaccaatcccaagaagaatattgggacctaaagttacagattactcattcctaccctgcttttgattttatttaaaataataataatacaagctctacttgaaaagctgactacatttgattttgatccgatcagaatagaaaataataacgaaataataattagtttattattaatatctcttgtatttttatatacatagacagatcatgtaatgtaattgtaaattttgtgtaatgagaaaagaaaagtcataatgaatgtatgtgcggctaggatgaaacctactggatctaagggtgatggtcaccgtagtgtgggcaatgttgtgggaccctcagtttcagatctgtccgtttattaagcgaaaaatatggtaccacgcgctctcaggaaggtggattatactactactactactgtctgctgaggtgaaactcgactggcaccggataccaaaaagtattactattggctaacaagatgtttatcattttataattagttaactatttttataatttttttttaggttaattaagatttt

SEQ ID NO: 323543 - DNA, 943 bp, Cannabis indica
ctcttctaaaaaaaaaaaaaaaaaaaacagctttcatagctcggttagagtacttgtttagtaagaggagtgctggagttctgtaagtgtaagggtcttgatattttttttatttgatttcgttgactttggaattgtggtgtgtgattgagattttgagattttgtttgggtgttgagagaaaatattgggacattaatgaggattttaaatataatggatctttgttgattgaatgatatggaaatttctgcagaatttgacatttatgggcacattttgtatttgataaccttattatttagcatttagataaaaattgatgatttgattattataatgtaatgtgatggaaatgaaatgagtgagggaatttacgcgagttttgtttatcttaaatttttctataatcttactatatttacgagtcttttcttctcttgattcacgtctagctaagctgatgtggggataaatggttgataatcaagcaattggtgtatatgtatatatatttgttgcagaactagttctgtttaatttatgttttagtattttttttagttgatttctttttattttttaattagaattgatttttgagttgattccctcttatttttctttttgaaacaggtttcctcttattttagttaattggtttttgtgtataagtttttattttggttgttttacggaacaggttttttttttgtttcaaatttttaactaattaataaatataattgagttctttatattatattttgagttattgtataatttttacttttggaattaggaaagagaaatttcctcttaaaaaaaaggaaagagagatttttttttggagaaaattactttgaaattaaaaaatgggtcaagatgcaatggcataaataaataacaatagggttataggttttttttatttttttacatt

SEQ ID NO: 323544 - DNA, 840 bp, Cannabis indica
aaaagtgctatgacaaaactgtttatattttttgtatctgttcgtattaagcattgtcttcaagttggttgtattaaaaaaaaaagttgtcaaaaattaagttcagggtcctatttttactattttagaaaatagagggtccattttttcatttaacaaaacacagggtccgatttgtaacttttacaaaacacagtgtccaaaatggtatttatccttatttttttattttattttacttcaaatttttatattgtgtcagacctatttttttttttgttatttttctctattttgaaaaaaataattatagctctcatctaatatgagtattataagattaaagaaaaaactgattatagctagagagaatagatatgtacaaggaacacaatattatgtacccctaattaataaattaattaattactctcattaaaaaaataatctaattctattcttaacatcatttttacaattaagtgtatctctaattactaatatttttttatacatattaaattttgttcctattcatcttgatcaattctcatttttgttcttgtattttctcatttctctaaaatgaactataaatatttaatttaatgcacatatatcattactctgtataatatatattatatcgagtttgagggtgtctaaaagaagtactttgcacaaaattataaaattattatatcacagctcgtttggaacgtcgtattaagtcgtattgtattatattatattgaatttgattatatatcatatttttatataatactatgttaaattttaatttatactaaaatattatatatttaggtgttcataaaa

SEQ ID NO: 323545 - DNA, 859 bp, Cannabis indica
tattctatatatggtcagattacgattttttaaatatttgatttctcgatttagtttttgtcaagatattctgacaattaattatggcagagaccttgatgaaagagagcttgaaagcctgattacccatactaacctatttcctttttcttttgaagatctaaagtttatatgggattgaatcttaaagaatcaatgtctacaaatatttgatcatttatttgtatatgttcaatctatattctttattacgcattcataggattgttcataaatactttaatgtttatgagattagtttagcatgctcttagtatacacaataatttttttttgaattgaaagaatctcttcacttttaccttatggcgttttttctctaacctattatagttaccatttaagaaaaatcttatttatgctataacttttgatttataattaactataggtgatatagtttatttactatatactataatacattatttgtttgaaaacaaatagtatgatgacaagaactctaactaccaatgctaagagcagccatggctaaataattgagcataaacaaataattcagtcaaaaacaaacaaatcaagcaatcaacttcaaggaattttaaggtaaatattttattcaaatgtaacatgtactaaaaattatcactattatacttcaaatggctaagacatattacatgaactatttaatgcagctaattattttaatgattataaattattatcaaatcctagaataatttttaataaataccaaatcacattttattatcattcatcattggattaaaatttaataatttaatattttaaaattaatatttataattatttt

SEQ ID NO: 323546 - DNA, 809 bp, Cannabis indica
cctagcccgcctatgcctagggccggccctgttccccatgcacatgatatataactgttctcaaatactcacaaaataactagaaatagctagcttatataatataatagaaattttctcccctttaattatgactgttagggcttctttggtacattgagatgttttgtactatagtataatattgtgtttgtttgtattatattgtattgtatagggttgttcaaaaaaaaagtacaaattgtacaattcgaataaactgttcaaactaaatcaaataaaccgacaaaaaatacaacttgaataactttacaaaaaaatttaaatttcccaatgaatatattgggagggttgaatattattttaacctgtccaaataacccgaataaacagattaaattgatttacatatttttttatactaaaattatatcattaatataatatataaattacgcgtttgatatagttaaactactttatattttattgtatttaatttaatatttaaattttataattgataattttgattgtatttgaatattgaaattgaaatttaaaatgtaaatatgagtatattttttattctatttttaaaaaaatgttatttgatattttaatgtttgttcaatttatatttactttttaacattaatttaaactataacccattttaatcttgaaatgtctatactatatatttatttttgaaaatcaattatttgagcatcaaaaactaataataatgaaaaaataaaaaaataaagatttgtttaaacgggttaacccgaccaaaccgacaaaaa

SEQ ID NO: 323547 - DNA, 801 bp, Cannabis indica
atatacatatagatatatagatttgccaacattaaaaaaatataatttaaaaaaaactttaattttgaaaataaattaataatttttttcatttgttagatttttaaataattaataaaataatatatattttactttaaaaaaataactatgtgggctagattaatactattaatcacccattatacaacattcacaaaaattactacacattcatatagcctataatacaacattcttaatgttttctaaacgatgtgggatttttgcttttcctaaagaactttctattattgagttaaaattaacaaagtttcttaaaaaatacaaaaaaataacaaaaaagaaaacatagagaaatgaattcttagaatgccacctcacattgtcttgtgcattcctttatatttatatatagattttgataaataataaaataaagaattaaatttagatattttaagaaaaataattaattaattaattaatttaatgatgttagttttaattattaattttcataaaaaaatagcaaaattcttttaaataaaaaggtctttattatatgtaaattatattttgttagttaaataggacatgaacatctaaattagtcgtaaatgtgtcatgaaagagttataaatatgttaaacttgtcaaaattctgtgttttataattgccaatttattaattaatttattaattgtaaaataagaatatttgtactgacacagttattctgtagtctacagattacaactctttaactgtagataaaccagaaacaaacagtgcagaaa

SEQ ID NO: 323548 - DNA, 495 bp, Cannabis indica
ataattaattaaatgatatgcctaagatatttaaattattgaatatttgattggtttgtattattggtgggacacaccacaccacatgaaaactgtccaagtgtctatcatgcacaagagactagagagtcagacacaaagagcagaaaagtttataattggtcaacatttttatatatacatgattttgagttatttgtacaacaaaccagcagccatggccaaagtagtgctcaattattctcttcccaatcttattccattaaccaaacatgacacaaaactctttttcaacttaaacaaaatacccacttcatcttcttcattatttaatcaaagtagtgtatcaagatccaagctttacacttccatttcatctgtttcaacaaatctcacagacccttttgaggcagagcttgaaagtactcaaaccccagatgggaaattcgattggtacagcaactggtgtccgattatgccggtttgtgatttgga

SEQ ID NO: 323549 - DNA, 2890 bp, Cannabis indica
ccggtctctgcagcgatctggcaaaataagaaaagagagttaagtatgagagatcagatgccacagcgtaaaactaaaagaaaaaacattaatagaggcttaccgcggtcatagcagcgctcatatcctgaatctggtagatggagtttgtggaagcgcaggctgcgtatcttttggccgagagttgggtcagctttgatacaaagtggctcgtcaactcggaggcaaaaggagcaagggtaggaccgacgaagcggttgaaccagtcgtccatgttcaggtcccaagcgttcttaaaggcctcctcgcgtaaggaattttgctgagcctcctgtaagacctttttcagggcttctacctcagcattcccccttgtgtactcggccatagcataattgtgcttggccatctagagttgctgcctctcctcatctgcggggacgggagtaaggatgatatagggaggtacaatgtattcttctgcttcaggcggaatccccgaatcagagctgacggccggagtgttcaccctcttactctttctggaagactctgcctcaacaattttgcccttgcgttttcagtacaagggggtcaggatctcaccctcttcctcctccttctcgacctctccgtcctcatcgatcaagatgatttggcctagaagggcgctagaagaagacctccctggggtcaccaactggtcaggcgctggaggaagagcagagtcagagctgtaggtctgggcaagagtcgacaataggtcctccattggcctggctgcttcaaaaagacaaacaaactaagtgtcagaatggccatgagaaaccatgcacacgaaaacaaagcagtaaacctagtcctaccctgactatctaactccgccctagcaaagacttgcactacaacactggcttcatcgtccccaagaaagctatcagaggggagaaaccagctggaagacagataagctgaatgatctaagggaataggtgcaggagatccggatcccatctgggatcgtcccagaaaatgacctaagttgaaaaaataaaaggctttggcatggaaaccccaccgagcggggggcatcttaaatctaaggagacgctcgtcaaattctataggcctacaccgggaataatcttgggcagaagggacgtgatggaccgttaagggagacttaccaaatccggatgtgctggcatcaggaggcccagtattgggaaccgggaccagcaacttagtccgagaaggcgtccgttctgtacccgcttccagtcgaagggtcctcccggcggcagcctgagccttgatataggctaactcatgttctctcctgaagagatacttctgataccggtcctccaccgaggctataatttctgcccggagcaccttttcagcgttcggggtacgaatgtttgggcaaaagaccttagagaggttgaagtcgtccaccgattaactccctgagatgagcttggcctttcgacagttctctgttgtgaccaactcccccacgttaagaccatttctgtcataggtggagaaaaccttggcatgttggaggaccagttgggtaggagcagtgcgaagtagaggagggatcctgacccactccgtgaggaggtccgggcgatccacggcttggaagccggaagagaagaagaagcggtaccgatactccttaacgctcttttaaaaattaaaagggaccaggccctcattagtaagatgggcccgaagagtgaaaaaaccactcttttttggagacagacacaagttcataaaaatataaaatttcaatcgggctaggtgaagcccagcctctggataaataaaaaataaataagcctaagagcaggtggtaagcttagagaataagttggtaaggcgcgaggccaacaaaaacaaggaaattaatgaaataatcatgaaggggaagcatggctccggacataagatgggtctggctccacgctccaaaacccccacagttgtggttgggcttctttccgtcccgaggtaagcaatgaaagaccccagacgcggacagcttaatcccggcaactatcacgatcttctccaactgatgagcgcagattagggtggagcagagttcatccgcttcccagccattagagtggcacgtgtaattctcttgggcaaccgggcccttcataacttcctccatggttgccagagcagccgcccccttcttagaagagttagttcctgacgcaggagtagacattttttgttctaaaaaaagaaagaatccagtagttagaacctgaaccaaaccctaatgttaaaaaagggaatggggatcccctaaccactagaaagaggccccctccggatgtttgccaaaaataaaaactcaaaggattttccttagcaaacatcgggtgcaaaaatcccaaaggcagcgaaagtagaagaaaagcaaaaaagcagaatgtgggaacaaaaatcttcccgtgtcctaaacagtctttcgacagaggggtcgattctaaagaagaatggaggaaaattacaaagacataaataaagtagattctgtgcatcaaacaacagattcagtcaaagttccttcccagaaatccaccgctcaaccaagaagttatatcctaagatgcaaacaaacaataaaaggcacaaagtgtccagaaaacttacatgaaagttgagagctgggggtcggcgttgaaagaaaagcaacaagaaatctatggtgtctgaaattttttctttccaaagtgttcttgcgaaaaaacggcaaagtaggggaagtaaccaaatgaaggataaggactagcttttataggccagaacgggtacgaagcagttgttgggttttgtgccctaaataaaacccttt

SEQ ID NO: 323550 - DNA, 2330 bp, Cannabis indica
cccaaccacgtaaaaatctttctcttactttcttacagctccgtaattctataatattttattagttgccgaaaatctcggtcaacaataataaattagattataatattattattattataataataaatcttaataactagcagtactttgaaatttataatttaccaaacactcagctcagcttttttctacagttctgctccagctactttttctcacagcacaactacaactgctttttcccacagcacagttgtgccaaactggcccttagtattccctatagttataaactgttgggaaaaatactttttaacatgtaatttttttatgagattttactttatttaaataaataaataataaaataattaattagagtgaaatttataatattatttcaaattttactttattttaaataattaaataataaaattatttattggggtggaattaaatattgtatcatattttactttattttaaataaataaataataaaatcattaattgaggtgaaattaaatattttatcagattttattttattttaaataaataaataataaaatcattaatttggatgaaattaaatattgtatcaaatttactttattttaaataaataattaataaaatcattaattagggtatatatagaaaaagttctaaccataatgagaaaacctaattcaaaacactaactctcacagccgcacatctcaaagcttctatctctttctcttagtcgcacacagcaatggaggagacgatgatgggctttgcacagggcacggtggaggagacgtcgacgggctttgcgcagggggtggtggatgacatggtgacgggctttacacagtgagggttggatcagggtgatcgtcggggttactccatctctcgtgttctcggacaagtcgtgtccggaaacaaaatccatggattttgatgggtccagttgagtcgtcgtctccgtttatggattactaaaatctctaatggattcgtgtacaagaagattggtaatatttaagcatagaatgaaattctcactttcaactaagtatataaatatatagttagtttactgacaattttcttgactgtgtaaatatttctcccacccattaaattttcagtgtgtactctgttctcttttagtgtatttcatattaagttttaattttaaaagattttatatttttatttatccatgtgaatgcattcttgcttcggttggtcttttttgtgttggtccatttcgaaaaatcattgagagttaagaagaatgagatgaaatctgatatgagcaacttgaagaccagctgagtttttttattgtgaagaagaccattactgtgaagaagaacatcactgtgctgaggttggagacattttttgtttagatattaagttgtattgaaagtattattacatattttttgtttagagattattattattacatatttgtttaaagattaagtcgtaatattgatgtttattatttattttcaattgtattttttgtttagaataatattgaatatattgtgaattattaaaatatattattttttatttaaataatattattttttttataaagtaaatattattaaatatatttaatatttaaaaatatatatcaaaaagtaatttaattaaatttttataatatttttgccaacagttataaattattatttaaagtggtttatcgaacagttataaactgtcatttaaagttctgctttttttatgtacacccacataactaacagttttaagaactgttgggaaatagtataaagacaattataaaccgatggaaaaaacaaattttgtagtagtgatgatataaaatattattactcataaaaatgatatatttattatttgagtaattttaattatttatatatgattgtattctcttctcgtctccaatttctcaaaaaacaaattattatatatatttttattatttaattccattttactaattaacaaaaggaataattacataaggcaccatttttttaaaaatatttatatttttacgttcaaagaatattttttttacatttttacaatttttcaaaaaataacacgaaaacaacataaaatcaacaagaaaacaacataaaagtaacatgaaaataacataaaaaagacaacaaaaaacaacaaaaataacatacatatacaaaaattaacaacaaatgaacaaaatttcaacataaaaagaccgtattttatgtaaataaaatcaaaaaaatcgtaaaaatatttaaaaattccgtgaaaccgtatttttg

SEQ ID NO: 323551 - DNA, 622 bp, Cannabis indica
aaacctcttccatatatatattaattgtatactatacactcagattgtagagtataatatctcttttcattccactacataatttctttgtatataaaatatatattaggagtgatacatttgtctcataagaacacatataatatataacatataatatataagatataatataatatatatatatatgcatacattggctatttggggcctatgtatgcttgtttgatcaaggccccatatcatgagacattaaattcttaattaactataatgtgtgtgattagatgaaatataaagaagccactaaggatagttttgtaataataagagagaaataaaacaaatattatagcaaattgtaatattgctgtgctatactcaataaaaaaatatgaattatctcgtaattatcttacttacttataattttaaaaatatatattttaaacaagtagtttgatacatgaaaaaaaatgaaattatctaattaatttggaatgttaatagctgcatatatatatactaggtgaatgtacgtgccgagccacgtattgctaatttcatttaagattttaatctttttaaaattttaaatgtattttatttttaaagattacaa

SEQ ID NO: 323552 - DNA, 931 bp, Cannabis indica
aattttttttatatatacaattacattgaatataatatttattcaattaccaaaatctatcatgtagttacttggtatcccgagaaatcttttggaaagtgtacacttatccaataatattatagataaatcatgtattaatttagtgtaattaaattaatattattttatttattctagtttgaaacaaattttgctatagttatgggaggagcatttgtacggaaaacaaatttatccgatacaatcctttctcatttaaattccaatttcattaataaagtaaatccaaatttaaaaatgtatataaataaataatgatcatcacaattttgtaccatcaaattaaaagggaaattttattttttcatttttaaaaactaagcaatctaatcacttttcgcgcggttaatttaattatttttaatattataataaatagtattatataataaaattataaatatattatcttatttaatattattattaataattttatttattagaaactaaatattatttttctctatgtctttccttgtccacacaatgtccgcacagtaagtttggattttgtacaaacttcaaaatcacatggtatagtactacgaggaggatctggccggctactattttcactacgagggatttttctttcttgctttgtcctttggttccttgaaggtagtggaggcctcaaagcagttacctctacaacttcatcaacttgtaactccgcatcaccatcctcatttaatttaccataggattattattgtaaaaggaagcatcaaactcatcaaacaggccaaatatattgtcaatcctatcctcatctatattagtaggagcctacttattcaaacctattgctagatctgtttttgggacaaaactcccaacaacacttcttggggggacagttggc

SEQ ID NO: 323553 - DNA, 880 bp, Cannabis indica
tatatatatatgtataaatgtttaacttttaagaagatgaatacatctacacatacacacatgtatatgtaaacgaacgtatcaacttccagcccatttctaacatatgcaaatcaatcaggcagaatcgatattatattttggtccaatattattcttcctaattaattgctaaatctttaaattatgttaaatcccatatcaaaataaagagatacactcctttttctgtagccaaacaaaaacccacgatccaatcaaccaaaatctacctaattaagcacaaaacaaatctaaagagaataataaataccagatcgaagcttaaataacaccattttaacaaacatcattataattgaaaaatgtatcgaaaaattgagaagtggagaaacctaaagcagaaagaggttgaagaaggagaagctggcagaccaagacgaaatgcagtatgaaccctgcgtaagctaatcctctccaagctactgcctccattcgattctccaccattcacactcagaattcgtatacgtatgttacatatattagagtatatatatatatatatattgatttatgctcgaatcgaagaggaagaagatgaagacatgaaattaagaaagacaaaatatataataagtaatgtaatatacgattttgctggtttttgagcgaggattctcagtgtcattccacgttactctcaccaatcaattaattacacgtggaataaactttgacgggcccaagttttggtggaaataaggaattgggccctaagcccaaacatatataaggcaaagtttctgttatgcacttacatatgataacaattacataaatagcggcagtcaaattaattacatatcgaaagagaaaa

SEQ ID NO: 323554 - DNA, 1544 bp, Cannabis indica
aatagttgccgaaaatctcggtcaacaataatatataaatagaatattgtatatatatatataaacgaaaaatttatttatattatatatataaaaatttatatatattatatattaaaatatctatatagtttatattacagtgtataaaaaaaaccataaacaaaatatacgatttaaagaccaccaaaattatttctctaacttttaaatatgaataaaattaaaatatattacaactttaaattagcgcgcacacacacatagaaatataaaaaatcaaatattagattaatttatattaaaaaagagaataatatactaaaaaaaactaactggttagaagagacgcggtgttgaatatcggtgcaaaatggtggtgaatcggtggtgaatggtggtaaatcggtagtgaaaaggaagagaaattgaagaaaaatgaaaaatgaaaaaataggagaagggaaaaaatgagggaaccgatttgttcctcttatttatagaaaatttattacgggcggggccccgccggtattaacaatattagcgacagacccctgcaagtattggtccgctgctaatagctcttaaatgcagaaagcgggagttttcccccgcttattaccccttcaataatagtggccagctatccgctggtattaacctaagcccgtcgctattctagtttatatttattcattttttaaaattattattgttatacccgagattcggctaacacattagaggaaaacacgtatcaagctgggaagaatatgaaccaaggcacgtaattataattacatttgaggtggaataactcgttaaaagcataattgagagaatatatttacaacttgactggctcagtagtcttatgggagataaagatatataaattgttgtcttgtgcatcaacgagcaaccatgtaactttaggtgtataagacaaagcactaacctcgttacgtggattacatataatgaatgtgaagacacttagcgcataatatacaatataaaaactaagtatactagacggattaacaaaagcaagtgatagcaaggcgtccacctcaccataggaagacatgccaacggtatcttcacctttcaatgagattcacagctttgacgagccagttctttcagataatggctgacattcaaatcatattgacatttaaagatcaccttatcacaaaaaattttgattgttagatagggtgttatgtatctaaagtaaaagcgatgagatttacattatcaaccttggaaagaaataggaacaacacaaggtcgctatcaaggttaccgctactctattcccagcgagacatcccaaaatgacacagtttgcaacgtctttaatacacgtttattttgatccaataaaagcagactaatcacagctatgtgatattcaaataataaccgtattttattttacgtgatatgtaagaaaacccaacgatttcagggataatcgttgtaaagatatcagtcaactaagtaattaactgcctactatgtgattataaata

SEQ ID NO: 323555 - DNA, 873 bp, Cannabis indica
acagaactctcagcttagaaccctaagcaacactctctaatcctctctcttattctctctcttcaacctccttgatatcttgcttaaagtgaaaagactagacttatttataggcccaactcaaacaaggatagcaccaactaactaactaacaagttatttaaattctgcatttatttatttttggttctagtttgattttgcaaatctgtgttctgcagtgatagaattgcaatatgttactacagactacagttgtgtttttactgtaatttagtaaatttattggcaattgcaaaaatatagtttttcaattggtattaaagcgggacactaaactcttagttggtcctttaacattttcatatgtttttgtgtaatatgtcattttctgtagaagaaagttccatttctcttccaccactactcaatcattctaattgttatagtgtgaattttttgcctaaaaatgcgagagcagtctcatataaaattgacacttagttaatgactcccataaagtcatcctagcttgatctaaattagtaagatgatgtgaccatgacatggtctagtcacatactatgcctcgcatagttaaagaagtaagcggggctaagaggatttagtactggtcgcatatatatcgattatatgcgatgatcaagtagacatcttttgcgactagtaaagattgcttctttacataaggattggtctgaatgactaatgtgtttgatgactcgtcagagattcgcgtgttccacattgtcaacacacgagatgcccgtctatgcgatcaaaggtgaatgaaaatatccaaatgataggcccataggtcaccctgcaaatacaaaatgcacctaaagcctg

SEQ ID NO: 323556 - DNA, 724 bp, Cannabis indica
ggagccaggattgctacattgtcgctgtatattggtgaagagatgcacttccagcattatgatcaggcacatcagtaacaattgcagctgttgattgtactagtttagtgacagagcaatattgatccaaataagagacagcaaaggaacagataatagctgctgattttggcttagtaccatgtatttctttattgcgttcagaccaaatgcaccacataagacatgtgattaattcaagatcagcatcagtatgtgcagcagctaagtgggagaaatatcaaacccttctaagttatagatatgcggcataaagacttgaaattgatactttctccatacttctttcgcacgggcacagcggaaaatggcatgaccaacagactcccagccgtccttacagagggaacaaacagcagtggttgtgatctttcggtgcgctaggttcacagaggttggaagagcatcattaatcaagcgccaagcaaaaattttgactttcttaggcaacctgagagaccataaccgattccaccattgtctattagaagaagaaggagtatgatcattagtggaatccaaagcaacagctaaatgataccccgtcttcaccgtatagataccggagtccgagtgatgccaaattagcctatcctcttttagaaagtgactaagaggaatcgagagtataccttcaatgtcaatagtgttggaaattatttta

SEQ ID NO: 323557 - DNA, 1218 bp, Cannabis indica
acaaatgagaatatctatgcaattaataatctgtaagtaccttcattttatatcaattagaaaaacacattttatattcataatcattactttcattttatgctaattttttatatatgaaagcattaccaatgctaaactttacaaggttgcaaacaggcaattctacaagttgcttgtgttggtaatgcacttacattagcactttagatttaaaaattttttatgtctcactctccctttttttgcatgacatgaaaaaagtacatataatttcggataatattatatctcatatatatagagtataatttgtgatttttgtttttatataaatatatacattaaatacagaatattatatattaatttggtaatttcaatattatttaccatttagtaaaccttatacaataatggtcatcataaaaagttagttaattaatatacactacaaaaaactattatttttagtgacaactttttaatcacaacataattttttgagactaaaacgtaacttttagtcacaacaaaatgctacctgtgactaaaatatagtctttagttacaagttgtcactattttagttttagtcataacaagtattgtgactaaaaacacatttagtcacaacaaattctaatttttatgactaaatacctttagccacagaatttttaatcctaacttaagaatgataatttataattcgtaacaatttttttacttttagtcacaagttttgttgtgactaaagtaagattttttgtaatgaaactaacatgatatataagacaatatggtcatcatgttattttctattttatcaattttttttctgctcacatttttcttcttattattcttttattttcatcactatatattttatctttcgtataactttatattgcaaaaaaaattaaatatatttaataattcattaagtaagatattaagctaaaaaaaatagaaattaaacattaacttataagttactccaatttatatatagcacttatgaattattaacaattatgcttaggaaatatttgctgctgggattgagacatcagcaacaactgtagaatgggctatgtcagaattgatgaagaatccgaagataatgaaaagggcacaagatgagattagagaagtctttcacagaaaagggttgggaaatgagagagcactcgatgagatgaaatacttaaa

SEQ ID NO: 323558 - DNA, 910 bp, Cannabis indica
ttagggcataaaaccaaacagtagatatatcttttgactttgaatatcttagattagtggtatcataatccgtgaaatcaagaccaacaaagaatttggtgtgagatcaaactaatctatgtctgtagcaatgcatggtggtgttacaagttcatttgttgcatgatttgcatcagatggagagtgagtttcgggctgaaaagactttttgactatgggaggtagtgtttgtgttggttggtcagtcattttctagttggaaaacaagaagaaatgtccaggagtgtggagtttgaacttcaatatagttggctctttttggtgagtatttaagaagccagttttatagggaaattctttctcattgaacattacattctttgctatatattgcctacctttggagcttagaaacttatatcctttgtgagattcattataccctaggttttacacactttgtggagtgaaattggaactcatggttctgatacggcctaagatagggaaacaagctaccccaaagaccttgagaaacttgaaatttggatttttggaattaacaatttcaaaggaaatttttaagacaggtgttggtagtctattaatgagatagactgttgttgggaaagaattaactcaatacttaagtggtagaagtgctatagcagaaaaaggactcaaaacttgattggaacctggagaatcttcactagattgtgaaaattttgttgagacagaaaagcaagttgatggagtggactgtgtagagtggaaagaagaattctcaagctgatacaaaccatctataagcttttccttcataaccactttctttgttgctaaatccttcacaagacaaaaataaaaagaaaaaatcaaaaccctatgtgggtggcgacatggtatg

SEQ ID NO: 323559 - DNA, 1201 bp, Cannabis indica
aaattaaatttaaatttttttataatttagcctgatgggcattgtcattaattgctgaaaataaatttaggacgaatagtaacttttttttttcaaattactattacaaagtataatagtaatttttgtttttattcaaatcactattatgctttaaaatttcaacaattatcactgtgttgaatattattaattttaaaattatgttattaaaaaataactgaaaactaaaataacactaacatacgtgacttgtcacgtaacatttatctaatttatctatacatatatattattaaccaaaaaaactcaattgtactttccatatatttggattttttttttaaagtatattttttaattttaattgtttgatcttttgttattatgtgtattctctcaatttctaactgccttacatcttattcattatttttttctctcttcataattgttactaccattcattttcttttttctatatagcatcaaataatattttctttctattcacaaataattacataatttacatgtatatgttgaatttcacaatcaaatattatatagcaatctctctctgtaatggatctctctcctaccgagtcctagcataatttatcgcatgaaaggccttcgacaaataattgaatgaattgtaacacttatcttggtttcataaaactttgaggtttttaattttcgtcacttttttcttttatctaacaaactgattatatctttaaattttctttgaatgaaatatttaaaaatgagtgctaattacaacctcctataacaatctcttagtcaacctccacacccgaaatcatatgccagaatatctttttcatagcggtatttattttagttacagtatcatgcttataaattttttaaaaattctggataatttacaatgcctaaaacaaagtttctgatattcttatttttggtactgtaaactattcaaaagatttcaaaaatttactggaatgcagaaatagaaggcagtgacatgttattctaaattagctttattctactctatttatatctccttaattctcttattattttttttaattttttactaaatatataaatatcaattgattaattaattaaaaaaaatctaaataagcaaatattgttataaatattaataattatgtggatgtccaaatctttcttttattac

SEQ ID NO: 323560 - DNA, 1142 bp, Cannabis indica
atattttaatagttgccgaaaacctcggtcaacaatatctattttaaattatatatgtaagaattaaacatacatttcatttattaagttttaaaatatatttgtataatttttattacattttaaattattatttttacttttagatattaattataaatatttattttcttaaaatatatttaaatatatgtggattatattagattgataatttttatgtgtcaattaatattcaatctgtaagtgtaaatttaaaattttttaattcccacaataacacatatatatactttacgaattaaatcgaatttgatggagattgaattaaaataaattatatcttttatgattattcctaccgcaacatgagttatatggaaaattagattaaattataatttttttttgcaagaaagactaaattaacttataaattaaaaaaatatttacttttaacaaattaaaatatatattaccaaataactatatttatttttacttatagggatgaggtctacagtttttgaagctagaaatgatggtggcggctgattgtttttaaaggcaactgtttgttttgttttcgtatctctttgacatcttctacttgtaacataattgaatattttaaaggattttgctactttcatttctggttttcttgttgattaattaataatctatgattgttgttaataatcagtccattaaaaaataacaacgtttcggtttttagatcactaatgacacatttactatttagaattggaataaattaatggaaaaatgtaataaaataaataaagaataatcggaataaatatttataatatgttgtttactaaaactgtttgaaaataaaataatagtgatttatcttatttactttatttggaaacgtgatcggaatgtttaaattacctaaattactctttgacgtaaattatagtatatgatagttattttgtaagacatattttaaagaataaattattattataaatttaatattaaaaaataaaataaaaataaataaaaatcattacctgtaatgacattctttaaaaattggtaaggaagttctctatttttttttaattttttatttaatcaagttctctattttctaaatttaataa

SEQ ID NO: 323561 - DNA, 3399 bp, Cannabis indica
aaatctgattatattgaaacgagttttatttagggcacaaaacccaacagatactagcagaatacttggataacaaatccattctaagtataatgtcaaaattcgctaaacccaatttcactaaattagcactcaactctccttcctcaattctgatcggcatagacctaacccaccttttggagataactaattcctcgccaggtagtagggttccaaaccctttatcatagctatcatacggtctacccaatttatcaagaattttggccgccacataggaatgagtgaccccagagtcaaacaatacagagaaataagatttgttgactgagagatgacctgtaacaactgaggggctaccttctgcatcagcctgagtaagagcaaacacccttgttggagcaggctttgctgctatcttctgttcttctttcttgagctgtgggcaatccctcttgtagtgaccaggcaaaccacactgaaaacatcctcaccctttacactctcccaaatgatgcttattacagttggtacattctaggtaagtatattacggttgccttgaccctggttctctcaaaacctcttgttttgatttgagccaccaggtgtagatggtggctttcttttctaatcagcggtcgagtcactactaaccctaccataactagatgtaggaggagcgtggctccaccaacaacctgattccctcgagactcctgagtgcactcaattgcgccctcagtttgtagtgtctttcccaccatatcagcataggtggtgttgtcatcggtggtaatcataagatcgtgcttaattttgggattcagtccatccaggtacttttctttcttattgaaattgattggcacaattctcgaggccaacctacccaatcgatcaaactaagttgtgtactcagtaacagacatgttctctttctgagtcagctaggtgaattcttttttctttacacttatgactgccttattatagtacttggcaatgaataattcctagaactcttcccaggtaatggtagtaacatcccgagtcagggccactatgtcccaccaaactagagtattttcctggagttagaatgtgtcacaaaccattctgtcgctctcgatgacactcataaaatttagaattcatgtaataattgtcattcactgctcgcttttcatcacatcggggcctcccagaaagactggaggtgcttgcttacaaaatctctcatacaatggtaccatctgattcatagtagcaaccgatcctgccttgacagcaggggcaggggccacctgcatttttgctgcaggcattgcaagggcaccttgctacctcagacatttgatttctttgtcttgttcattgattctggcttgcattgctgtaaacctattttcccaatcctgggcaccttcactgggttaatatctccctgaccgcgtgccctgcctctagggcctctacctcagccacatatattctaaggtatttgaaccccctaactgccactggatccgaccaagttaccctggcttctcgtatttcgcctagcatccattctataaaatagcctgtaaaaccaagaactagcctggttagatcacgatcaagaataatttaataattactgcttattttagaaattaaaacttgtgcctatttggctataaggctactaacatgcttcctacatgcttctcttataacatactaaataaacaagctactaaagcaataaaggcttactaaaccgtgagtcaagcttatcactgatgatgattgtaaaggtcgtgacaatctttggaagacaacttggcagctctaataccaaattgtaacaccctactaacttagtcgtgttattgtgattttatattaattgttcagaatgttgctaatcaacgagtttattgaaaattgtgaataattaaaactttgcttaaatacctataaatactagataaatggtatatgtatataaacaggatcccgagtataaaatatttacaacagttacaaagtacgtaatacaaaagttgttgcctagtgactagacaaaatacaatcagttgtcccaaagatcgtatgctccaagtctaatcgccctgactgtacaatcttcatccgctcgtcctcactgttgctcaaccttagccttgtccttacctacacttgcaaacaatatttttgagtccacagactcagtaagaaaagtataatcataacataaatataaactagattataattaggtgcccatacacccaatcataaccctaatcccacgtctcgcgcaatattgagtctaaaacgttcgtacgacagtaccattgaccatatgatcagcatgtacttgatactcttgtcgtactgatgtgatagcatcaatcagtactcaagccaaacatacatttgtcggtaaccaatataattctatagatactgctaccgctatttcaatgtaatctaacaggaaatcataaacatgcatactaagcatgtaatcacatatgtatataattatactaatcttaccttgattccaaattcaggtgtgtcggtcaacctgagtggaactactgctcgacggtttacaggcccctaaatcacaaattttgtaaaactagtaagtgatacgctaaaccacttttcggttgactttaaactcaaaactaaaggtttccctattgatctcaagtaagaaaaatttctaagcattgtgaaaagatgagaaaaacatcgaaacagggaacctgcctaaaaaaatagcaggtcgtttttttgggttctgcaccaagaaaaacgttaagccgtttttcacggcagaaaaataaaactcttcgaatcaaaactacaccaaatcttccaataagctccaaaacacctatttatatcataataaactaaaaccaagcaataaatcacaataaacaacccagaaaccaaaaacaccattaaagagcaaagcttgagttcttaaactcaaaccttgctcaaacaccataataacccacaaacctagctcaaatcaacataaagaacttcaatttaacttcagaatacaaaatcaaacaccccttaacaactcagaacactaattcccaatattatgcacataactaacttgaagcttaagaaataacaactagagaggctaaagatttttatcttggattcaatcactaaagacctgctagaggatcctgaattgagttgaaaaacttcaataatttgcttgtttttcttgagggttcgagagagagggtcaaagggagagagaaagttattttcttgattttttttctattttgattaaagaggaataatacctagtattatctagcataatccctaactcaaaaaaaattagaattaactaat

SEQ ID NO: 323562 - DNA, 1299 bp, Cannabis indica
ttagacaaaagtccttaaatttaataatctcaatagttcggggggaatttttaacggccaaaaaagttcagggggcacgatttagtacatgtcaaagtttggggggaaaaattactaattagcctattttgttttagctcccatcaaaagaaaataaataagtgtttcccttgtaaaggtatgtcttgcatatcaagtgtctcttactccattttgctgaatggtagccgttgaagaagtttttcccttgtaaaggtatccggcagggggattcgatgtccccttacctttttcttctatgcaatgcggtcttatctaggctgatccttcagagcaagggacatatccatggtatccggatggcacgaaatgctcctgaggtctcccaacttatgtttgcggatgatactatcttctttgtaagggctaatatctctgaagttactactttgagcaattgtatcaaaacttttgaagaataatttggtcaaaggtgtatatcaagttgggcattacattctgttggttagttagaaagttagttaggaagttagttattttgttgtttggtttccttgtacgatagctgtgtactagtattggctactggtataagtagctaatatcgttctgttgtaactgattgattaattcaatacaattttggtgttttgatctctctttctttctctctcttttttgttcttgctcttgctctttcgagctaatatggtatcagagccagcttcgtgagctctgcttcttcttctttcttctttcttgttctggttcttgttcatggctcgaggtggtggagctcaagcacgtggtggaggagtacacactcgaggaaatcgtgaaacagagaacacatctcatgattcgaatatgttctctgtttttggtgaaaattcacgattgttctttgtgtttgtgtcgttttgcccctttttcttttgttgcaactgagtaatgaggaaggtgatgatgatgaaatacagttactttgataaatgtatatgaataatggttttatgaatgattttcagcaagaaaagaagagcagaaagaagattagggtttcataagagtaggaagaagaagaagaggatgacgtagagatgttttaatttttgggttttaattaatagtttattttaatttactttaatgaaaatataaatattaaatatttattttattttgattttaaactattttctgttttatttttaatattttaatttgatttacaaaaaaaaaattaaaatgatctggactaatcacatagtgacacgt

SEQ ID NO: 323563 - DNA, 538 bp, Cannabis indica
tactcggtatttccccttacggatcacgggactactgactgtcacacttttacttttcactcttaagctactcatggttgatgggcatgaaggagataataaagatagaaggttatgcttgggattatttcatagccatggaaatccaagctaatcaccattccttccaagctgttgggccactcttccgcccattgcttaccttggagttaaggagtagggcccacaagatatcgaggctctccatggaggctagggacatttccacattggccatagaggaaaacttctgcaagtacggaatctgttaacccataaactttccatggttacatggacatcaatgtttaacacgtggcaagaaagatgacatctcggagttgagtagtctcgagtcatagtagttgatctgggaagggtccctagccctgtaccaaggttgaatttgggaagtccataatggaagtttgaattctgataagttatttccaactcactatttttttagtattcagtaggggtgttcacggtgcgggtg

SEQ ID NO: 323564 - DNA, 1190 bp, Cannabis indica
aactttgctttgtttcttcaaaagatattgtcccttctccatccttcaatttatatgctatatatcattataataataagacttaaacacacgtttctccatctcattttgttcttagcttgaactcttccacgttattatacaaaatatatacccatatattctattgatgtacaaatatatattttattttaataaatagcggctaataaatctcttaaatttcactttctataataattaacttaattttttttttcgactaaacttgcccaactaattttttgtttgtaaatttgcttttccattccacaacttttatatttgccaagctaaatataaatgttgttaattcagaattttattaatgacacttgataattaataatttatataatgaatacttaataaaaatatatactttattatgaattctaatataagagataaaaatatttacataattttgtagttaaaatctacaaatgacttatacttttaatgacacttgcttttccagtttttcaattcaatacttattttaatttttttattataatatttacagtataattatttttgtttaacaagtatatttttgaagaatagatatgaatgtgaagaaaaaaaaaatattaagagaattttttttaaaaaagaattaagagtacttttaaatattaaaaatatatatttcatgtaaaataaaaatatttaaatgagcgtaatatttatgcaaataaaactcttcaatttttcatgctaatattgaagaaacaatttaataatttttagattctggtcatttctttttttcttctttatttctcatgattaacacacctctttcccagttgttttttttttacttaaaaaatctatatattattatagatgtatcacgcaaaaatgccgaatatttcatattagtataaatggtgatgtattacaataactacatctaattgttgagtagtcttctctacaaactaattttgcttgcacataaaacacatgagaaatgccaaaggatatcttaaatgtcaaatactacaaaatttaatatttggtcacacacacctttttatttaataaataatataaaaaaatcactaaccactacgcaacatccctcatcaatattatagcaatggccaaaacacatgcaaagaacaaaaaaaaaataaaaa

SEQ ID NO: 323565 - DNA, 1110 bp, Cannabis indica
taacatattgagtataggctgacattatggtcgatagtattgtcttatgaacgttctagactcagtaccgtgtgagacacggggattagggttatgatcaggtgtatgtgcgccaagttataacccgagttagttgtatgtttatgttatgcttttcttactgagtctgtcgactcacagtgctatctttatgtgtaggtaagggcaaggctaaagttgaagagccgtgagtacgagcaggtgaagattgtacatgtcggggcggttaggcctggagtgtacgatctttgggacatcaaggcttttgctgtatagtcgctaggcgacaaactttagtattatatgtatagcaaactcttgtaaagtattttgtaaacgggatcccgaaatattatatatgtaatacttgaacttttaaattaaataagcaaattttaattaatcacgattttcaataacctcgttgattagcaacgagctgcacagtatgtttaaaatcacattaacactcctatgctagttagggtgttacatccctactcccttgttcaaccatcccagagttgaaacttatgctccaaaaaaaagacaaagggaaaggtaaagtggacaaccctctaaacaaatctactcaaaatgttccatagagcaacagagacgcagctgatcaaccccaacgaaaggataagacaactcaagcccaagggaaagactattcaacctatttgcagggtatagtcaagtgaagcaatagacctcatgctcaggtgcaaaagcctaatgtttagggatgaaaaaattgcttcaaatactttgttaaatagagaaaagatgtggaagatctagacccggaagacagcatgtcaacgacggacctcaaggaccataaaagcgagaaaaagaaagaggtgaaaaggctagatctcgtggaggagatctccagaacaatatcaatgatagaatttgtggacatgagctcccagatgatcatatcaggcggctagaagatcagatagccgcatcaacaaaactcacaatgtaatacttatatatttttgttctttttttatatattttttagtcagttttggtcttttttttttctttttt

SEQ ID NO: 323566 - DNA, 889 bp, Cannabis indica
cataaaatgatttctgatctttattaattagtgaatctgattatatggaaatgggttttatttttggcacaaaacccaacactagttcccgaggaactgggttgatcaacatatcgacaaaccctccctgatctatcaacaagtcctccttgaagtggatctctaatgagatactcgcctcttctatgtgttctccggttgaacaaccatattagatcgttggcctctctgcttccacgatctaactctgcctggtgagatcaaaggatgtgctcttggtcatccatccatctcaggaatttgtgtctctgataagcgagtaaatcgcaattaggagcacgtggttgttcaagggattcacatctctgttgaacaaatttatctcagtcagtagcacatgtttctttaattaggcctgcacggcctacaacttccttatgtcagaggcgccaatggtaggtctactctttgaggcacgggcctgccacttggatccaccgggatgcttgtatcagtctggccactatagagtcttgctaggtaatcctggccgcccatagacctacaggggaggtctggccggccaaggtgtataggacatgactggacaaggtgtgcagggtctggccggacaaggtgtgcaaggtctggtaggtcaatggttgcaggacctggtaggtcaagggttgcaagacctgggaggtcactatagctctgtctagcggaggccagactcgtggcaccagtcatggtgacaggattctccacatttgcagtgttcatcgagattccagttgtgactagaacctgagtatctagacctatagtgtaataccctggatttaagaaatggattagcaaaaccctaattagataattatgaataatt

SEQ ID NO: 323567 - DNA, 627 bp, Cannabis indica
accctcaaataaagggtggtcatgatgcccccaaaattctaataaaaaaaacaaaactaattttttcattgcattttatccttattttcttcaaaatttgtagtatggtccccctaattttactttttctttttggcccccatctaataacaaaaaattactttcatatgaatcgttatttaaaaaatcaacctatatgtatctatgtgcaattattttttgctcccatattataaagacatctatatacatatataaatgtacatgtttaattatcatatatattgcatgctaatatatgttattcgttatggaaatgtggtccatgcactataatacctacacattattgattccaatgggagtgattttgttgtcccaccaaaaagaaagttaccattgaaaaaaattactcctacaaaaaagttgattaattaatttctaattaatttacctaattttctttttctcaaacaaaaatgaagtgaaattaataattaatactgcgtatatatactaagtattagtaacatgtatgttttagagttgcaagtacttaattattaatttaaataataataataataaaattaattaaatctaatataattcaatttatatattttt

SEQ ID NO: 323568 - DNA, 757 bp, Cannabis indica
gtgtaaaaaatgaaaaaaccccatttttgtatctatttgatccttaaattattttttttttacttgacattagttcctcaagatctgctacacgaacgaataaaattgacacataaacatccaaaatgcccattgacgttagttcctcaagatcagctacatgaaccaacagaaatcacacctaaacattcaaaatgcccatattatagcatcgatctctaatagtgttcctctctcatgatctctagtcttacaaactgtctagaagtttataaagtaagaacaaatttataagaaagaacacataaaaatagaaaacaaattttatttttgatagctttaattacacataatatttattcaattatcaaaatcataatataagattaagacttggtggttataatattaaaatggtgtagaaaaagatagttgggctgcattgaattttggtaaacacacacacaacaatagtagatcgacgctttttcaatttgtctagcatatttagaagggataattgcggcaaaagtccccaaaaacttgaggttgatgccgattagtcctcaacctcaaaaattggcggtgaaaatacctaaggtgccaatttttgtttgtccgttggtccctaacttaactgatccgttaaacacaaataaaatgccacgtgtcaattttttattggtccaaataataatttaattaaaaaaaattaaaataaaataaaaattaaaaaatattttaaaattataattta

SEQ ID NO: 323569 - DNA, 1151 bp, Cannabis indica
ggtagccatgaaagtccaaggactgccattaataacacgcttaatatcgatctcatggtaaaactgaaataagaaaaggttcggccccaattccttgacaaacaagcctttgcccggtttccataaccccgccagcgtgtgtttcatagcctcaaaatctatcgatctcgcattcaaaaacctccccaccaaacaccaacgatcatccaccagaaccgcctcctccacgtcgtcctcaatctcaaaaccacattcttcctcatcatccaactctatatgcccatactggaactccatgtcatccatggctgtgctagtcgaagccatcaaaccaaaaaacaactcacgatagaaactgggaaaaacaaacccaacaccacaaacctgatccgtcgagagccctatgagagtcaatgagagaaccggcacgtttaaaccagtcgcaacaatcggagcagataaacccaggcgcaaatatccagtcgatacctcaacgatgacgataactcaaccaatcgataactcaacaatcggaacagaaaaaacccagacgcaaatatccagtgataactcaacgatgacgataactaaaccagtcgataactcaacaatcggaacagagaaaaaacccaggcgcaaactccagtcgacccagtcgcagcaatatccagtcgacccaggcgcaatatccagttgacgccgtgctccgccgatgacgactcaacgatcagaaccttcgtgacaccgtgctccaccgatgacgacgcagcaatcggaacagaaaaccaaccagcgtagaaccagtcgaatacgtagaagaacaaacaatactgttagagagaaacttgacccatgccagctggcaagactacttcgattttttcagtcaatttttgtctcggaaaatatatttaatttttttttttcaaatttttttcgtatacttacaacattatttctgtaaatttttaaataatttacaatgtcaaaaatatatttagggtgcgtttagaagtaactgtgtaatcactaagtaaggtaattactagaatggtaattacactatattttaaaatgcaagatgtgtttggatatgaggtgttaattacatgtgaattcttaatatcttatttggcaaaatagttagtaat

SEQ ID NO: 323570 - DNA, 2174 bp, Cannabis indica
tcccaatgtgccatttttgcaaggtagtggcacaagcatcaagatcattaagcacattatcaatcggattatgagaagattggtctaaccagcaacgagagatgatgtccctactttcagcatttgctaactaaagctttttaaagcggaaacgacttcttcttttgggctgctgcactggttcaccatgagctgcaatcacagcagtaatagctctgtgatcagagtgaaaatagtccaaatgaataactcttggaaccctaaacacattgttccatagatgattaatgaaacactagctgagacgttcttttaaagttgtggcagcagtacggtttttaatccaggtgaaagaatcaccctcataaggtgtgtcattcaaattgcaatggtcaagacaagcacggaagtcattcatcaaacgttcatttcgcagcgggcctccttctttgtgagcattagatagaatctcgttgaaatcaccaattacaagccacgactggtgggagaaatattagtaagcctccgcaagagggtccaagaagcaattctatcttgtgtagcaggtgcaccataaaaaaactgtgaagtggaatgaggggccatcttcaaaacaaaaaaaaaaaaaaaaaaaaaactgtgtccaagatgggagagcttgacattgacattatctttccataaaagcattaaactgccactcaatccaactctagggcctccaaaccattcgaaaaatgaagactattacgaaatcgagtaaccaaattagaactgaattttgtctccataagaaacaaaacatggggcgattgttgttgaacaagccatcgtaaatgtctgaatgcgttcgggttttccaaaccccgagcattccaacttaagattttcatggcgatgggcggggttgcatagcaacctccgctgttgaagtaaaggtggctgtagaatccgcatttgtagaaacatcagtcacaaaatcatcatctcttgaagcagtggatgatgaaccgttcagaaattagcttcgtttgagcattttcctaactgacatagtctcactttgtcgctttggaatgacatttggcgagatattttcttgtccaagataggccacgacatttgggtttgtagtggtgtaggctggtgtggttgagataagggagttgagttgggaagtgactggtgaaggtaagtggaaggagtgtgtaggtggataggtagcaaggacattggcggtagaatgatttggaaagagttgtaatcaatatcaggcatatatatattggaaagatcagcagtagaaagggaggagttggtttgttgttttagtgtagaggaaggaattgattggttgattgagtgagtagtgggggtggagatcgtaggggcagtagagacaatgggtgagggggttgaaacaagagtatgagggtaggatggggattgctgaggtgaagaaaggaatgcatttgcaccaataacattgaagggtttgtttaacacccaggaaaagattggaatgaattagatatgatcggactagcctgtattagatttgattatacagaatataatcctgtgtttaattttagaacggactggagtattttagtaataaataattgtagcataaatttaacataataaaaatttgaatcataaaacaaaattaaataataaatttttgttaaaaaaactatcaatatataaaatataatatacatggcaattaaataccatgcttttacataataaaataataaaatattgttagtttttagaatttatatcagaatcgttgtagaagagaattaaaataagatttaataaaaaattattaaatcttatataaactataaattcagatctcaatacaattataaatttagagatttttatagcttgttacctatcaaggtttcctcactatttttttatattacacaaatgaacatccaaatcaaaagaacttgttgaagagttcacaccagtgtcttccaagtggcttaacactctaaggatagagcgcactattagattctagttggatgaaaacaatttagtaatcacagtgtgttcttaactcgtgagagactgtgattgagataggcaagaacacactcatacacaaccaccataagagagaggggtgtgtgtgtgtgtgtgtgaga

SEQ ID NO: 323571 - DNA, 705 bp, Cannabis indica
aatgaaaaaagaaatctccattaatatctagctaatataacgttataattaatgtaaaaacaaagtgagaatatataaaagaggtcaatttcgtaagactatatatatatcaatattgatttttcaaataagttaattaatattaatatacactcagacataaactaacaaaaccttatcttattataggaccactttgtttttacatttttcacccagataaaaaatcaataataataattataaaataaaaatcttgaaacgaatatctatatgcatatatatacaaaaaaattaaacatcaatttatgaattattgtttctaattaaaattgtaatttttccaaatttaattcctataaataacattatacatcacaaataatatcttatcgttttagacttgcagttaaaaaaaatttctgttttaatgggcgtacgtacatgcatgcatgcatgaataagttatgattaaacacaagatacgtacgtcagtacgtggaatcctatatagtggcggataaagggataaaagtacttaaaaaaaatacatttggtgggatttgaagtattcttctatcaaatctccaaaggaaatttacatagtatattaacttttgacatttttttacaaaaatactgtcaggcggtattttttaaatttttttactgtgtttgtttataagtttcactggtgttctactg

SEQ ID NO: 323572 - DNA, 1057 bp, Cannabis indica
ttatttttttataattttaaattgtacacatatgataattgtctaaacaatcacattttgatacgtgcaagaaaacttaacagagaaagatcactttacagcactgtgaatagttcggggatcattttgaccgctagaaaaatttatgggcacaattattgataagtcataatttgggagacaaaaatcctaaataatcaatgagtaattatgtatcagtgcttccatcactccattccttcctactaaacaacaaaaaggactattactctcgtacccttctcttatatttttcatcatttagtaactcttcattcattctactttctcttttagtgtatatctttgttcaaaagaaaagaaattaaccatacatgacaaaacaaaaagttataaaattgtgcaaatttttgattgaattgttaatttttataaagattaattagtgcacataaaatgataattacaactaaaataatagtaaccattgaacacacatagtacatatttgagaacattataaaggttcttatgtcaagttccaaaacccaaattgttatctttagaactcgaatacatcaaaaaaccaaaaaaagttttaaaaaagttactaaaaaatgaagatcaaaaaagctaaatgctagcttaagtcactatcaatctctttctatctaggaaattttagataaatatcaaataaaatatttttttggagaaaaatataatagtttaaatttctcactcacatatttagacttaaatatcttataatttatttttctaaagttactctctaagttggttaaaaaaagttaaatagttaattattaagaaattaagaatcacaaaatttaattggttgttgctttgtggaagtttgataaggacttcaaaaaattttaaaaataaagtagagcaattgatgggagtgctcttaaatacttgaaaaaaattaataataaatataaagcataattttttgaaaaatttgtaaaaatatagactaaaaatttgaaaaaaaaattacaaatattacttcaacatggaattttttttt

SEQ ID NO: 323573 - DNA, 826 bp, Cannabis indica
aaaagaacaagggttagagatttgagtgggaggagtcattatattctgcaacaatcaatgtaaggttactcaaactttatatgtgtttaaattccattattttataaattcatatttaggatgttaataaacatacttgttagtaaatctagctccgtgtaaaatataatccaacatcttctttgaagttctgtcttatgataaatggttcactttatggctatgtttcaactaagaggggtctaagtcaatagtgtattaaagtatgaaatctttaatttagtattacaaagtacagcttactaagcactatactttagttgcatgagattttgattcatattacatatgtggatagacatttagtaaaagtatcgtgtataatttgattatgcataactcgaccgatataaattaagatattttatctgctggttttttggtaataaaacagatgtacaatggaagcatttaggatgattatcatcgtagcacactaatgtcccccaattagttacactgcggtcgcggtagtaaacgggctatatgtcgtatccacagggaggtaaattaccactaaagattagtataaatagaatatatattgtaaaaagataaatgaattaaaaataataaaatggtgagtgaaatgggatgatcagataaagagcttagtaaggtagggatgtagttatgcaaatcctattttaatattgatgctaattcagaatgcaattgcaattctacaccaataattacaaccggaagatatatatgttatgagcacaaattaaataatcttgcataaattgaatctcacctctaa

SEQ ID NO: 323574 - DNA, 1349 bp, Cannabis indica
ttaccaaaaggagaagacttgatgttcttggttgatgacattggaaatattatacgttattttgttcaagtttatagtcactgtgacactgtctagttgctcagtaggcaattcatgagtgacaatttttttacaattttaagacttgaattttggatgactgtaataaactttgaacaatttttctttatgtatgaattttttttttctttagtttaggtatgaatttgtgatcatattcatatttaaatttttgtagttgtgaaaagtaagggttgtaccccaacccaagccataataattgggttggtttgggttggattatacataaaatttaaaaatgaatgggttaaatttaataaatcgattttattgggtttgcccactaaaatagtctcaacccggccaactcaacccatgctcagccctaatcacatgcagaatgacaagtaagaatagaagtgagattttaaaatttttgtatttttgaggttctattacttggaaatggtttattatggcatgtatatgtgttctggagctttatgaaagttttggggaagttttaggttgatttggggagtttttgtttttctgtagtgaaaaacgacactgttttttctagtgcggaacccaaaaaaatggcatgcttttttttttttttgaaaatggcctaccgttttatgggtagcttttccatttcatagtttttctcgtgtttcctcaatagttagggccttaccttgctagttatcgatataaaaattttagtttcaaggttaagtccctggaaagtagtttagcgtatcacttattaattttgcgtatgttgtgacttaggggcctataaaccattgagtagcagttccactcaggttgactggcacacctgaattcagaatcgagataaaattagtataatgatatttatatgtgattacatgtttagcgtggatgtttatgactggctgttagattatattgaaatagcggttagagttatattagatatcgataaacgtatgtttggcttaagtactgattgacgctatcacatcagtacgattagagtacctagtattggctgatattatggtcaatagtactgtcgtaagaacattctagactcagtacatgtagaaatttttgtgtgttattgaggtgctattgcttgaaaacggtttattatggtatttataagtgttctggagctttatggaagtttaaggtcgatttagagaagtttttttattagtagtgaaaaacggcaccattttttctggtgtggaaccctaaaaaatggcttaccgttttttttgaaaatggcctaccattttatgggtagtttt

SEQ ID NO: 323575 - DNA, 1477 bp, Cannabis indica
gatggcggtggtggactgagtttggtggatttgttgagtgatttgggcaatcatgtcctggagagaggctagcttttcagagatctaaggagaagtagtggcagaagcagtgttggccacgtgttccttgggagaaggacccttagaggactgacctcgatttgagttggaacagtttgggggatcagtttttcgtttatcgccaaaaccaagaggaaaaccataaagaatgtagcatttctcctttaagaggccaagtttctcacaattagtgcaaaaggggcactgtcgtttgtttcggagagggtttaaagatactgcagcaaccaagtttgggaagagcacgaatcttttgttgtctttcatgttgaatgatggtggaaaaaccttcgaaagagacagaaaaggctcgagaataagaacttgggcccaaacagcatggtatgattcgttgagtcctgtcaagaaatgcatgactttttattggttcttaaaatttgatgatatcggcagaagcttgacaagtacacggaagccaaggtcgtacctctttgatttcatcccaaatggcccaaagtttagtgaaataagtcgtgacggagtcatctccttggtgtaggtcagtgactgattcattaagttcaaagagacgggtccattgccttgactgaagcggttagtgagctcattccacatgtcggtggcggtgtcaagaaacatgatgctactcttgatgtcgagcggaacacagtgaatgatccaggatattaccattagattacactagattcaagaatggtacagaggactcgtagatgtcggttgcagaagggtaccgtcaatgaaactagatttatttttggctctgagagtaagattgaagtcccacctccattgttgaaaattatgatccgaaagcggtggagtgacaaggatgagaccgggatgatctccggatctgaagaagtagggattgtcttcattaggagagtggttttgccgatccagtagagtgtgcaatacatggagagttgcaatcgcaccgattaaaggaccgccagctgtaaaggacggactatgaggttcagatccatagtgaagatcatcaacggagaagtcactaacggtgacaaatggtggatcttgatggattggaggacaagatggaggcacttcaaccagatctagatgagcattggacaaaggatgtggatcttgatgtatcgaggggatggatcttgaacaaccacacgctccacgggatcggtggtgccggtggaagtgtggacaacgaagtgaaccacgggaacagtggtgccgtcgatgagagaagatggaggaggaagatcaggaatggaactcgagacattcgtgcaagaagatcgagatgcaatcttgagtcggatgtgacatgagagccaagagtaggtggcgccgatgatcgtgtgtgaggaggatggtgttggaatatatttta

SEQ ID NO: 323576 - DNA, 1373 bp, Cannabis indica
ttaaacacgaaaaaagaacaataatactgccatatatatacacaatagttaaaacatcacgtgtatgtgtattatttgagctcagtactaacaaatttaagttttaggggcgacaaattttgaagcgacataaaattgaataaaactttggtttcttttgtaagggatgatatattttcaagttgaataaaacctttccctttatttaaaaaaaaatattttgtaagttatgtttttatagcaaattatgttggttgttagtttatcttttgggtctttagttgtatctttcttgcctttgatagttgttcatttaagattttgttagatgcgtttgataaatttgtattcatttaacttttgccatgccagtttttagttcgagttattagttggtacagctcattgccagttgtgataagatggtttattattggttattaagtcaggataattgaagtggtggttataaaaagtcaatcaagcattttctaactaacttcttcatctttgatagaatcatcttgagattcttgctttgctagggcaaattctttttctgtataatctttgtgtttgcaggctgtcaatcattggatcttcaaggattgagaaaggaatgttgatctgcaatatctgaagggagttcaaactaatttgctggagggagttcaacttatcgaaagtaaggggatcttgtcttctcagatctaagaggacttagatctttgttcttgattgttaatcgagcatattagtatatcaatatttttttaaatcttatgttttactcactttcaagcatattgggcgaccaattggtaagaggaccatcatgtctttaccaatgcaagaaaagcttaaggtagagtggtacattctgaacaattgaaatgtagtggagaagtatatcttgtaagatactttttgcattcttaatttagttttcttcactcgcgaccttctcttacaaaaatttatttatgtgcagtgagcataggaacgagctacaacttagtggtaatcaaaatcttgacacagttcaagagaacaagttttcgagttggttcaagtctcgagtaagtattgctttttactaattttttcattcaattacaagttcttgtactagctagtattgattacatctttcactcaatgatagatcaatcaacttcaagcggatagccttggggaagtatcagatgagttgcacaccatcacaaattcctctaatctagcatgctattgttattttagatgtattgttcacaatgtttaattcctagttgtggatcgggatgacaattgtacacccaaaacagtggtattttggtgactagagaaaggtggtaaaaaaatttatggcgtac

SEQ ID NO: 323577 - DNA, 1240 bp, Cannabis indica
caactaaaaaaaactatagacatgtattaaaaaaaattataatttttctaagtactaaataggaaaatgattatattatattatttgggtcacttagtacatgctattatatagtattatatagtattatataatacaatattatatctcatatatagtattatgttctgtattaatttatatatgtgtatatatataatattttaatataaattaaaattttatattatattatgcaaaaatatatggtataaaatatagtttaatataatactatagatctaatatgtataccaaaagaaactctcaaagaaaaaacaaaggtggataatgacttattcttgtttggatatttttgcaagtttattatgatggtttattatatagaaagaatactctaaatcttatcgaatcggcagattaatttatgtgttgtattattatgattttaaattttaagttatctattacacattattttttgtttatcattttttaattccaatttgaaaaggaaatgaaatgtgaatacaacaatttaatgaatgaattaaataacatatgattgctatagttatcatcgactataccatacttgtaaatatgagtgtattaggtcgggtccacttatattttggaaatctagtaataatatagattgtgtcatgttgacccataaaaaaatatagatcgtgttgtatcaatattttaaagggtaagtctcgctaaacctatattttcgtactatgtttggactcgtatcatactttacttaagccgacttgtttttcgtacatgtgttagttcattttctaatatgtgctcgaattcaaacttcactttttcactaattttttttataattaataagttaatcacaaaattataaacatgttttatagtttaaattgtttttgtataatttttctataatacctaacacataaccatataattataaactttagtttctccttatgggtttgttttacaggattgtagagggttgttaacctctttatttgatgttgattgtaagtttgttaaacggtctgttaatagtcttgcgcatgctttggcgcgggcttctctttttgaggctgatcgtattcttagtggggattctttacccacttgttatgcttccattgtcttgggagacttgaattaataaagcttttaattttcaaaaaaaaaaaatatataagataatattttaaaaatgaaaaagtcccttttt

SEQ ID NO: 323578 - DNA, 1825 bp, Cannabis indica
cgatacttacatattgagaacatagtagtccatttgagtgggagcgcgaatcatagatacagaatctataacttctataaatgcatagacgtaaaatgatgattttcttcgagcttggattaatagagataaatggtggagtattcatttcagtaattatattagtttactaaaatatcatttatagctaactaagtgttttaagaataaaatacattgaagggtagaatggtaaatttgtctttactcgatgtacatcatctatagaggatcattgattatttggaatataacaatggataattaatagcgtattattatagtgaaaaattttcccctaaaaactcgagaccaatttcttataagattgacatgtggactcacatctctatcgattgctcagatgtcaagaatggacttctcgagaataagcctcacctaaactgaacttgcaagatgatgtgaccatgatagagtctagtcgcattattatgcttcgcgtaatataaaataagcaagaccaagaagggattatataggttgcgcatatcccgagatatatgcaatgactaggtagccttctcttgcaacctagtaaagatcatttctttacataatgaattagttcgaatgacaaagtatattcgatgactcgataaggactagcatgtcctatgttgtcgatgcatatgaggtgtccatatatgcgactagtcagaacgcagacaccttaacacgaggctcgttagccctccttcgaaagatagaatgcactcgaagcctatgagcttgtgtgagaatatgaacaggcaactcgcaccctagaggtcgcttatgttgccatacttattaaaacagatttaaattgttcttcgttttttctcttttacgtttatactcatttaatgttgatattaattgtaaaatggttctataacgtattagctctgtataactttaatgacacttgctttgtatataaaggagtgatcggacatgaataaactaagaaaaaaaatcccttgcaacagtagactaagtagactgtgatttgattgaaccactacacatctttgtgttcattgtattttttatttttcctctattgtctgggtagtctcgtttgaatactcgctattctaagttgtttactcactattttttttttgttaaatatttattatttattttctatttggtgttgtccaaattcctcctacaacatttggggtcgtctgtgggaagtttcattattgattttggaggaaaatcaacatggctgccaactagacaaatggaaacaacaacacgaggtcttttagtgtcaaaaccatgaatgttccactcctagataatggaactaatccaactgatacaatcgttagaggtgtgggacggacctacatcacccctctcaacctattcccaaaaattgatggtcacattagagaaacatcgacaccaacagccaccatgggccacttcctgcctatcacgccagccatagtctctgaaggtattatccagcttatgataacacaatacaaagacatgtagaaatagatgcaggcattgtaggccgaggtcgatggaagagagagagtcaggacccaacgtccaccccgggtcccaaacacgcattcaggcaacccttaggtaaccaccacaactaggtaacacacagagcatccaaacaataatcgtactcgcagggaacatgtgactgaacaaggaggcgttgatctgaatcaacctacgcacaactttgtgcaaaattgggagccagttattgttgggttttgtgctttaaataaaactcatttca

SEQ ID NO: 323579 - DNA, 1221 bp, Cannabis indica
ttgtattatagggtcaaaaattgaaatttccctatctttaccatactctttttcatgaacttttatctataggttgaatgtaaaaaatatatacatttcatcttagggggagtataaaaatattattattattattgtttatgctagctttagttgttcattttattttgtttcatgtggttacaagtggttacttgtaactgtttcctgtaacatcttgttttcagttttactctctcttgtattggatcagttttagacaatcaataaagaattccactttaggctcaattcctatttcctattaattcttcctcgtcttgatcatcagattcatttcttcatagtttggctcagttacaaatttttgagatcggccaaaaactttgtattggggatggcctttgctatggaaaactttatctgaatttatggccttcaaaaccccccaaaataaaactgtaagaacagtataaaatttataaattgttctataaaatttatatgctatattaatgggcataaattaaaaacataaaaaggtaattttaagggtgtgaaaaatgtaagaatttctctatcagagaagtaattttgttgagctgcaaatctttgagaattgatattggcgaaaaactgtgagcaaaggtggcctttgtatgtgaaaccttatctcaatttacggccttccaaagctccaaaagcaaaactatgtagaatactatatataaaatatatatgctatatcaattgtcatataataataataataataataataataataatgataagagatgcggaaaatagtaaaaaaaaattcagttgcaaatttgtaagattggccaaaaactttctagtatggcctttggtatgtgaaagctttatatctatttatggccttccaaacctccaaaagcaaaactatgtaagaacagtttataaaatctatatagtagggagacaaattaaaaaagataaaataaataaagaatgcggaaaatggtaataattttggcattgcttgcaatattaactgaacatttaaatccaatacctcctccaaaagggaaatttgaatttatatgcttaaaataccatattatttttcccctaaatccaaacttaataaaattggtaatatatgaccaatttaccaaatttccaaatctaaccctctcatttgaaattcaacctctctctcttcctcactcttctctc

SEQ ID NO: 323580 - DNA, 661 bp, Cannabis indica
agtagaaagcaatttggagagttttaagatcaaaccttctggttgttgttaagagattcaagagggagaaactgcccatcagaaacaaggcccctgagctcataaatatgattgaaaacaactccagtgcattgagttttgtcagtgtagtaaacatagagtttcccacctaggacacatgtcttggcatgctccacagtattttcccacattctgttggacattccacttccaaggatctggattgtgaatgataatggtaaagaaaatgcacccaagaaagatatcagaactatttaaggtagtttaatatgtcccaaaaaaaaggcgattaggaaactaagatccttacacttcttaatctctgagtatccttgactaaaagacgaaggaagtcttcgacagttacaatatcagcaccgatcagtttcctatgcagagcgccatccttcgctattctatctaatctccaaacttcatcatggagaactggtggataatgtttcttgtacactgcaaattattgtattaacagacttattaaacacaagcccttagagggtgttactcaagaaagagtaaggagaacttggattgtattaaaaaatacaagaggaaaaaaaacataaaagaatgaatgagttgcatcatttgccaattt

SEQ ID NO: 323581 - DNA, 647 bp, Cannabis indica
caaaattaattatttattttattcctaattactagggcaaactctgtatgcattttatttttctataacattttttaaagatggtatctattttcagcttactaattttaactagctagatcacaatttttttttaaaaaatcaaaagttgaattttttttggctctactttttgagttttaggagcttttttttggctctacttttttgttagaaggtttttgttttaatcaaataatacttgttaggaaggccaaccctaaataataagataatataacaaataatatttagtatagatgtaaaaagggttatagtttaaagaatcaattcacaacttattttcaaaaagttttagctttagtctttagactctgcttggtagagtttcatttcttctttttcgatccacccttctttctttatttcaaccaaacatagttattagttattaatattactatgccttactaaatttcaggtgcaaaatcatattcttgtgtaagaatttatttatttatttttgagatgtgttgtgtaagaatttttgttaccataaaaacgaaagaaaactgacatattaatagtgacactgacaaagatatataacgtgaataaaaagatgaaataaattttggaatacatca

SEQ ID NO: 323582 - DNA, 1453 bp, Cannabis indica
atagtaaaattgaataaaattagacaaaagtctttaaatctaacaatctcaaaagttcaggggaaatttttaactgtcaaaaaagttcaggggacatgatttaccgatttagtatatgttaaagtttagggggcaaaaatcctaattagccttacaataatatattgcgccaaccattataataagtagaaattatataatatatgaaaaaattataagaatttaattttttatgacataaataaataataaaatggggttatagattttttattattattattttcttacatttatatagatttttttatgtcatatttttataaaaaaaaataaaaatcccatatttataaaataataataaattttgtcaaaaaattaccggtaccgaaaaagtcaccagaaaagttgtaggtgccagaaaaatcacagaaaaagttattgttgtcgaaaaaattgctgaaaaatttatcgtccccgaaaaagtcactgtcgctggaaaagtcactggaaaagttaccaaaagtagatatctcagatataaataaaaatggaaccggtcctcaaagccatcgtgcgatcaaacgaggacggcaacaccaaatcaaccccaccagtcgatgatccaccattaattctggcaacgtgacctaaaaagaagaagaaattaatcattaccgattggtaaaagaactgctcataaactagtgtgaaacacaaattcaccatcaattacgattcaaattccacaaactaatcccctatattcaaattacagattcaaaaaaaatgtagatttgaacgaacactcactagagtacctgaccaatccaaaacaagtataatctaaaaacttgtatcaatacatttaataatatcataattgttgcattaaaattatttttctagattttcaatcctgtaattattcaattccgatcatgacaataacagaaaattcgcattcatctagcaccacggatctgaaaatattgatttaaaattttgttttttttaaattgcattatagtcggctttccattttattcatgcagtgataattgaatgtaatactctcctaaaatacaatatatataacatggtcagttttatatatattttttattggtttatttaatgttggtttacagtattctaacagttgtttattcaccaaaaaaaatattgacatgcaaaaataataataataaaaaaaaagttcaaaatattcgtaaaacagttgtctaatagttgtgctactaaaatattattataaaaataaacatggcttagaattgaaaatacacgacttaaacaggaaaaactcaatagtggtacgtttgcttaacaacgtatataattattgcattacagttgtatttaaattttttcataattgacataccataaatgaattttcaaatttttagaaacatgacacaattccatttct

SEQ ID NO: 323583 - DNA, 664 bp, Cannabis indica
tattaaaactctttttctttttttgaatttataagacaaaaacaaaaacaaaaacaaaaagataaagcaaacatctaataatataaaaagttaagtgatgttatatattgtgtgtgggggcactcttttgtttttgttttttttttcttaaaaaaaaaaggagcaatcttttttatggctaagaatcaatttcatcaattaattttaatattttcccttttttttcaaaaaataaataaatgacataaatttatatattttaagtctaataatgccttgtcatctttgctgggccatcatgatcaatattactccaaataatattgtagaatatatgatattcaactacttaaaatatacaattttaaactatatctaaataaaaacttactgtattatgtatcaaaaaaaaaaaaaaaaacttctacgcgtacgtttattccttaccaagcaattacaacctaattaaataaataaatttatatgtataaaatgaagaaaagtcatatctttatatattaaaagtgtctatctaacggcaattcttggtttaacgtttcttggtttaacagaatatacttcaaaataaaagaatattctgttaaatttaacgattaggtttgatcttccgttaataaataaatccaataattaaacccaaaaa

SEQ ID NO: 323584 - DNA, 1988 bp, Cannabis indica
acccggtgtttccccttacggatcacgggactactgactgtcacataaaccctaacagacttaaccttagaccttctccaatttagacttgtccatagtaaattggatggccatggccttagtgcgagaatacagatacccgagctgaagattcatttaaaacacaacaaggcaaagttagaagaccaacatagcataacccgaactgaatatgaagcaagaacaaaaaattaccttagtattatccttcaagaagccggcagctaaaaactcaataggcattgagtctggccctttcaacttctcgtttagctcgggctgaacacggtcctggtaacaagtgattgtctcattttgttagtttttatggtccatatcagagttataaaagcagaagggggaatttcgataagataattttttatctaatatgaaccataagtctaaggatctcaacataatgaatatagattaaatctaatatactgaaagaaattcaattacctcttgatgcctatcaggatatccttgattatttttgtataaacaatcgaatatccaatccagaacttaattgaagaatccacattttgatcttaagtcagcctcaacactcacgactagagtggactattagatcttataggatgaatacatttaggtatcacagtgtgtactcaactcatgagatactgtgataagattagggattaatctcacacacacttgaaagtggcctgtgagactagagaaagagtgagatggcgtgaggatagagagagagaggactcagaaaatatcaatcttattttctctcatttcagtttgttatctgtcttttattttctggcctgtaaacttgtttatttatgatactatatattctacatatagtgttataaataaaacctttaattttttattttaaataaaagataaatatctaatttgatatgaatttaaaatttaaattcaaatataaatatctaataaatgaatatcaaaataccaatagattttttatttaaataattatcactataattaaataatatccaataatatatttaattaataataaaaagataattaacttaatttaatttaaattattttaacttaatataataattaagccaaattaattatgagtctttatatgtcgaaccccacgtttagaatgaccctacacatgtggaccatattttaaggtccaaaattaatttctcaattttttcataaataaaatttattagttattctgtcaataaataataattaattaattttcattaatatcttatttcacaaggattaaaataaatattattttctctaaaataatatattctctctttaatttctctctttaatattattaaataaaattatatttaactaatcaatataattaaatagttaaataatattaagtataaaatttataatttccataattaatcaaaacaataattttcacaagttactattttgccctaatgaatttatttcccatagaaattaattctcgctcagaatctattcataaaataaaagtttctcctgtacagtattatatagaagtgactcgaggaccgtgaacctatattttaaagctccaataaatccaagattaccatcaatcttatcaccagattaatttagtttattaattctattattactccactataaatatagaattgcactctttgacaatatagaattatatttatagaattcttactcctagtccattaatataatcaatataagtagctcgtcctttaattattagttcatatagttggtcaaaatactattttatccttttaatttatctctttgattctttatgtaccatttaattcaatgtgaacagttaatctataacttattatagatttggatcaactgttaacactatcagaattaacactataggagaactaatattcgacccgttaggaaagcttagattccactat

SEQ ID NO: 323585 - DNA, 561 bp, Cannabis indica
ttatttgatattatggatgactgttgacggagggatagttttgttttgtaggttggtccgatctattgctctttccttccttgcgcctatttctcttttaaagggttggttcccaggtacaacctttgtaacttcatggtatacccatggattagcaacttcctatttgaagttgataagtaaatttagaattacaaccataccagaaacagtacaatatacaataataagcaagataaaaaaatggaaacaagggaaaataaaggttagttcttcatttttgttactataattcatcaatcacaatagcatagtggggtttatttaaataatacaacacaattatttatgttcattattttctatttatgtttgttgtgattaactgattaagatgggttagattcatcctaagcaaaagtcaaaagccaacattaatggcatcaacaacaaagacagtatcactaaggtggtatttggttgggaggaatgaaaatatagaaataggaatagaaatagaatggaataaaatttaaaatgacataaaaaaattgataaaat

SEQ ID NO: 323586 - DNA, 840 bp, Cannabis indica
agatgaaccaaaacatacacaaatgaatgaaaaatacttctgtttctttattgatgttgaataaaataaattacattgaaatggagttttatttagggcataaaacccaacaataaacacctgcaatccaaggtctgttcaagatccgatccttcaaagatactcttgaaaaaatcagtaaattcaacgccaatagcgtttctatcaatgatccagacattattcttgttcaatatactttcaatggcgtttctccttcctctaattgctgcctagagaaaaaagaatttagaacatctatcatcttctttgacccaagtgattcttgcacgttgcttccaataaagcgctttcctggtcttctccaatcccgggctccggtaggaagcctttgtaaattttccagtttttattccagatctttaatcttccaatcaatcttttcatattgcattctattccaatgaataagtgctactctccactaacatatatataccatactaattaaattatataccacaattaaaatatatataccataataacaaaattatatactacaattatatgtaataaaataaaaattaattaaatattatttaaaataaataatcatacaatcaaaatatataaaaataataattaaatatatgtagcatgccaataaaattatatacatacattaaaatatttttattatgctaataaaattatatactactattatacatatcaaaataaaaaataaatatcatctaagaataataatatatcatacaacaaaataaaaatatactgtacaacaaaatctatataccaacaacccacaacaactta

SEQ ID NO: 323587 - DNA, 725 bp, Cannabis indica
tttttttaaaaaaaaaagtgaaattcaaaataaaatttctaagaatataaggttactataataaaatataggaccaaatagtattattataactaagtgtatgtcaagtatgtttaaaattatattgagattatggtttttttatgtaatcttacacaatatataaaatccaattttttttgttaaaaaaaatatagaatgaaactgtcatggcaataaaaatattatatgcatacgttgatcaatctagtttgatctagaaaaaaaaaaagtattttattttatttttgaatattttcaagaatgtaaggtggaagagattatatttagagatacatatattttaatatcttatctttggatattttaaatatgaaaagtagatgaattagttctagaaataaaagtctatgattctatgaacagagattctatgaacaccgaatgcgagtcaattgtttagtttacatatttgaacatgaaattctccataaatttcccctttgacaagaaaaaaagtaattattttaatgatttaaagttgtaattgtgagtttaaatttacacacttatggctcgtttgttataccgtaatatattgtattgtataatattatattatatagtatcatattgtgttggattatattgtattgtattagtattatttaatacaatactatgtttgatattgatttgtaataataggttgtgtaaaattataa

SEQ ID NO: 323588 - DNA, 1232 bp, Cannabis indica
agtcaagtacctttaatccttgagttagagtcctgtcaccggggccatgggtcttaatccactcggctgcaattacatcatttccaagagcatccttagccacagtaccaccaccaccacctcctgatctgaattaggttaaaccaaaaatcgagttactgaacatacaaaacatacatggaatataacttgatgaaaaccaacatcatgttagttgttactcattctaatgaagcttcaaaagttatttggtaaaatttgggaaaaataagataatagtactaataaatttgagaaatgatgaagtggacactcacccgggtggggcaaagaaagccgtgtaaggaaccaacattccagcagtggggagaccaatggcacccaaaagaagcaaattcatgagcttcctcttgcccatatcaggcacacgatcagccggaatgcttgaagcctggcaagtgactttcatgccgttttcctttgtcatcaacttggtccttgtgggctttgccattaaagcttgggatggagaaaagaccccatttttgctcgaacagagctgaaagaaacacaattaatagaaattaaataagactaaagcttgaaattttaaattttaagtgggaaatggagatattttaatggttacctgagatggagttgcaggggagagagtagaggtagccatgtttagggagatgagttttcgatcgaagggggaaaaaatggagtttgggtgatttttaggaagaagaaaagggatatgaaaagataaggcaataggatagtgtttgatggaaaattgagaatgttggatgtccacaagttgaagatcataaaaatcattacatgtaaatatataatttgcgaatccttcttttttttgtttttttctacatttcttcaacaaaataaatacatagaaggaaaagaaaatctgctctcacacttaataattacagattttttaataatatacttaaattattaattttttataaaaataactaaataaatttcaattacaataatatttcaattacaataaaaataactaaataaatttcaattacaataatattttgaaacgaaattaatcctaaattttatttttttttcgattattttcttgagtcttcaaaaataatcttttggttacttattatattgataagaaactaattagttacttttacgtaaaaaaaaaaatatttttaaataatataatttga

SEQ ID NO: 323589 - DNA, 1119 bp, Cannabis indica
accactaaaaatttgccacatgtacaagtgtgtacacatggacagtccaccgtggcacttaattgtgatttttagacgtgcagagcaaagcggaaccaaggtttaggtagtttagccaccaaaaattcggtttttgtgattaagtgttacaaaccgtaaagttcagctggtttagccgtcaatatccctttaaacaataactatttgcgtttaggggtaatattttaatattttgtctatatagttattcttatataatactttatgcaactttttcttaaagatacatcataaaaataaattttttatttagttatttaatttatctattatatttgacataaaatttgattagagaaattacttcatatactgtttttgaattttttttaaaaaaaaaaatttatggtttgggtttctaaggtagtttctttagtggtttctatgtgggctgctatacgattttgattgtgatttaggttgctctgttagttgcaataagggttttttatgtaaaattatgtaaaaatgcaaaaatgcaaaaaaaatatatatatattttgaagtgtaaaaataaaaaagctcgaattgattatacttatatacttattttgatttattggaaactaaaaaacaaaaataaaaatatgtaaatactatttttttaataattatcttttattataaaatttatgtttaattagaaaatattatgaatattcactcttttttgcatttcattttttctgtgatcttttttttttacaaggaaaaaaagacataattaaaaaaaatcatttatttaaataaataatagtataattattttcataaactttcattttttaagtaagaaacttatgttttagtggcaataaattaattatgaaatgaaaagctggagaaaaaaatcatatttcaacggaagaatattatttatgtatgttaaaaaaatatgagatttttttcattttttacactttaaaacactttattttgtagttttatggaattctacatagaaactccatagcaattaattgagcaatctaaatcgcaactaaaatccacataacaacccatataaaaacataaaatttgaaaaaaaaaaagttaaaa

SEQ ID NO: 323590 - DNA, 980 bp, Cannabis indica
caaacaatttgatttttcaactttcattgcaatgcattattaattttcgaaagatgagatgaagtggaaaattgaaagctgtgtacctataatcattccgatggtgacgaatgttagtaatccgaagacaattctcatggcggcggacatgggcgaccagtaaagatccagaaagtgatatagctatgaatctgtaagcgtttttttctgtgagaaagaaaaagaaagaaattatgtgaagagatacgtgattgtgaagaataaaaaaccactctttggacccccgcccatggctttattttcctttccctttaatttctatagtatctctatatttttacaattaaaaatatattttcttgccttgtattctatttttccaggattttgttttattttttcttccttttaagcttaatttgacctcaaatgggttgactttgtacgaccgtattggacacgtatacattagtttggtttccgtagattcgattacagatttgttttagcagtttatttttaggaaaaaaaacaagaatatacaagaaaggcaaaaaaaaaattattaaaatatggccaatttcaacaattatacacttcaccaataaaaaacttataaaaataccacttcctcttaactttcagccgcatgaaacagaacaatcacctaaaaaaaaaagagcttcagtcgttcaacccgacaacacaaccgaaataaaaccaaatcaagaggaagaccactattaattccggcaaaatcactggaaaaaagacagaaaatagatcgaacatgaaattgatgaaagaaagagcaaaaaaaaaaaacaaatcctcctaatatcaaatttcagattcatataatgtagatttctaacaaatagatttggagttccccatcaatccaaatcaggtttaatccaaataaaagaaaaaaaaatatcaataataaatctaagatatatccagttgcattgtcgttg

SEQ ID NO: 323591 - DNA, 2127 bp, Cannabis indica
gatgttaatgaaacatacttgttagtaaatctagatctggtaaaatatatccaacaaggaccttcttccccttttttgctcagtttctcctgctcggttcctccttcctggttaagctttgccttcttcgccttcttcacggcccttgggaacaaaatctgctgggaagagtttgtacttgacataaattgctttagtggcaaggaaagtaatgtttcgagtagcattcggcagttgaagaattctttgtgccctctccctgagcccatgtgtgaagggagggcgtcagtattagggtatctggttgaaccaagtgtggaatgtgtccattccttggacgaagtagtattcatcgacaaagttccctatcttactcacctcagagtctactgtgcccgtcaaccacttctcctcgatctgaggaaagtaaaaatatcccaacctgctccgcttgggagttgattttagatcacaaagccagttggtatcatgcagggatggctcacccttccgtgtgaggcgtagaggatgaacagggtggacaaatagtagatgcccttcggagtaaactaggtcagacagaggtgatagcaatcctcaattctcctaaagtaaggaagcaagggtaacatagcaccctgcttagtgtgagtgtgcgaccaagcatggtaaccatcccttggactggcgccagctggttttgagagcaaaggaagcattcgacatcccgtaagtaaccatgcttctacaagttcttcatctttgccctggttactacgaatggaggagaaacccattgagctgctagtgtgccttgtctcctataaggaacgacctcggtgtattcctcggtgatgtagtctccaccagcctccaggatttaactgacctcggacacaggttgtccattttcactaaaaccaccaaagggaaaccttcgagttgcaccttcctcctcagcttcagagggagtttcaggacagagctcgccctgatcctccacctcttggacattagcatccccaacaatgtcttcctgctcagcaacaggtcgggcctattctgcacttggcattgtggcgagccgagctacgtgtgggttagatagagaagatttttgcattgtttgtttggtttgtgtcgtcatcctattcctggacggagcctgattggtatggctggcgatggttacggaaaatgtagcaatgggcgtacctgcagcagcaagatttggatggcgtacaggcaaggtatcaacaatatctggttggacaatgtatgtccagttggacggtaggtaacgccaccaccccttcctaaactcccagatgaaacgcctgtactcttaaccttcaatctggtcagggtaaaaatggtgttgcacttcaggttccaggaaaggtgtatgttcactacttatcttccaatctttgaagcttgaattggagaggctgtcactagatgaagacggactagcacggaggcgaagatgatccttgtacagaagttgaagcagatccttttcgatatgatgctcccttccccaaaactcaccaaggttcatctacaaaaatgtagaacacaagatgagcatttggctgggataatgaacagaaataggttggttataccgaccaggtctaataaagggatccaaaatagaaattttgcatgataatgaggtttgcaatccagaatttaaaaatttcgaatgaagggttgattttcactaagcctcgaatgggcaagtgaaagtgagtattatggaatcgaaattaaaacgcagttatattcaagcaacgtggttaaacattgtcaagatttcacattcctaaacctaaattttctatggttttcctagaacgaattcaagaaccatcaggctatgcaacaggaacccaaaaaatcaaatattcaagcatataagaggaaagaaatgaaaagcttactcactgttcgaagcttgagattttctcagatgacgttggtcgaagtttcctaaggattctccgaaggatttgaaagaaaatggatttcttgctctgattcttcaaaagcgaaaatggctaaaagtggttgattaaggttttcagccctatttataagcagattagtgaggcaaagtaa

SEQ ID NO: 323592 - DNA, 1153 bp, Cannabis indica
atttcttattcggtattactaaccttattttataattaaaattatttttgttatttttataaataattatctaatcatgtataaatataaaaaatcccctaaattttaagtgtgtaaatggtataaatttaataatttttttaacgatatatatatatctttaattatattttttataaaacatatttttttagctaaaataagaaatgaaatttaaaagataagctctactatacaaaagatgactcgctacaatagaggagctctttaaggcgacctctaatacaggcccgactttgggcataagcgggctagacctgtgcttaagatccacctagtccaatgatccaaaagaagtttgtctccttttaaaatatataacacattttatactgatttcgaaaaatactacatttttctctaaataagggtctaaaaatatttttttcctataacccactaaattctaagatcggtcatgctccaataaaatattaaaatatcaaatttgttgagatttcatattgaattcattccaaccacactctaaaacctatcatgtatataaaattatctatagtgtcccattaatatatattagtgtgacactatagaccacacaaaatctttttttattagtttttaatttgtacatatattatttgtgtttatttggtgcaacttatttttcagtagctcatcacgaaagaacttcacggttaagcgtgtttgacttgaggtaattttaggatgggtgacttcctagaaagttttctcaggaagcatgcgagtgaggacaaagcacgctggaaacacttgtgttggtttgtagggccagtcatcactccataaagccgccagagtggcgtactcgtgtataagagtcattattctgtaggtataagggggcccaataaaaacttaaaaccaagacgttacatacagtattgtcctacatatttttccttttaacttttttggtatatttaatttataagtttatactataagttaccacataattatgatgcaaatgacttcacaaactcaatcactatagttgacttaatttttttttttaaatatatatataaatatataatttatttggtatatatctttatatattaaaagtgtctatctaacggcattt

SEQ ID NO: 323593 - DNA, 1579 bp, Cannabis indica
gttatgacctcatgcagtcagatagttttttatttctcttcttctctctctttttcttttttttttatttcccttttctcctacacatcttcctctaactttacttctcacaggcatctctcctatcttttgtggctcaacaaagaggtctccaaaacatcgagatgcttaatgcaaaactctacaattccagggaacattgtgaagttttggctaagtaatggtctaattcgtagttggagatctctaaaattaagaaagaggccaaggagcaacaaaagactctcaagacagacctcgacccagaaaaagatcaaggaacttgaagaggcaaatcagaaagcccaagttgaagctgataaaaagcttgaagatgccaaggctgatgccaaaggtagggttaatacgatgactaggcgatatatcatcgagcctggtttgccaaccctgggatggatttgagttttttgggagacaaggctggatgatgctagcattttgtgagcaaaccaagaaggatgaggcaagaaatgcagaggaagaggtcgaagaagaagaaccaactaagtctccaaccatgtagacttagttatttttattttatttttttaacaatggcctttaggcgagacaatggtttgccccttgtggcatttttcataaaaattttgctttgttagatgaccaacattgctaatttacatatttacttttatgccttttatcctgcctttttcgagttatttatgtttttattttgtgttttaattcacaattaaacatttttctttcttgatttggcttaggatattttttagggttatgcgcatctccatgtcattatcctattgtagacaagcaattaataatcagttatactttttacgaacagtttgtattcaactattatttaaagcaaacttcaaatattttgaatgttcttttaagacacatttgtatcttgttcataatacatgctataattatgcgagtcgttatttactcaggtcacatatagcttcttgttactttatgagaaaggatctcacttacaactgctaatttaattttatcttaaagaagaggttttttaattcttaactttatattgtccaaagacaattttaatcaatcatcgttttctttgtgaattttttttaatttttaagttttcagcatttttatttatatttctaggtagaatatagttattatacacatatatgcccccgaagtaattttaaagagaataaacctttataattactttaaaaaattaaacttttattcagaataatgacatatcagtacaaagattaatacaacatttacataataaactacatgtaataaggtcgtaaatgatcgtagcgagccattaagccaagctaatttataaaccctggttccaactacagctttaatgatgtacggggcttcccaattcaggttgaacactccaactgctacatctcgcgtgtttgctgttatatgcatttttgcaagcatgacatgtggaaattaatcaagaaaaagtcaagaaatttttaaggctgcctaagtgttgggttttatgccc

SEQ ID NO: 323594 - DNA, 636 bp, Cannabis indica
aaaaaaaaacagtataaatgttgtttccagcgtggcacattataaatgtaataaaataggaaaaatcagtagtgggtgtaaatttcccaaaaaaatatcatcagcctaatataggggccttagcccaaataagctttatactacagcccataatcataactattggacttttaataaaccctcaataattcataccatctttttaaaatttacaaaataatggtaaattaaagaatgtttttataaatgtagacaaaaaaatataagtagttgaacaaaagtaaagtttgaaatatgaaatattctcttagaaaaaatatgaactatccataaatcattaagaaaattaaataaaataaaataaaaaaccacacacaaacttacttgattctcatcttcatcttgttttttatttcttaattagttgtttctctatctcacatccttcaaaccaaacaacaaacaagatgatcaccaagaaaaatggtttttggagttctttgtcataattgtaattaagtaactagttactatcatgatttgaaacttaattattatcagggtgggattatttgatatgggtaaccaattttcaaaaaaaaaaaaaatataaaaaataataataaataaaagaaa

SEQ ID NO: 323595 - DNA, 1024 bp, Cannabis indica
aaattacatatataacatgtactgtattgagtttttgtttaaattcaaaattagaatttgcattgaaatattaccttcctctttttggattcatgagcttgttccaatatatcatttggcacaaaaattttagatacagtaaagttctcatatccgtcttttaaattaaaatgattcaatcttaatttgtaaacaaaatcctttctacaaagcgcttgaatcactcctataacatcattgttatttgtatgtaaaatcttctttactgatgtatcaagtagtttctcagccacaaaatgaataagacaaaagtcgtctttgcactttcatctctgacttttatatgaattttgtacctatattagacaacaaaatcagaataaatatgttacaataacataatatttttaattttaaagaaaaaaccacaaaactatttgccttacattaaaagaggatagatacatattttgtcacaacgatcacaggtataaacaccatctttgagtacaagctttctcaaacatgtttagcaagacatataataccaaccaaaagtggtatcaattccaaaaaaattttgcccttatagtaactttgtattcctacaatcaatttttttcaatatttttaatttaatttgtataatgcagcactaatgaaaaataatacaacaataatagtaaagaaaaaaagaaagggaagaaaagtcacctggattccatcatcccaatcagcctctaacaattctttaatgttcattcagttgacgaacatctcttcttcaagagaaaccttattctcattagagctttcaataaattgcatcccattgacgacggttgaaaattgttcaattaaagatgctacgtgttgcccttaattttgtccaaaatacgtggaccgatccgactgtgacacgtggattgaagaagtaagactttgagataattcgactaagtcttcttaatcaaaaggatcagcctttaacatgcctcccagagaaggtacgaagggttcacat

SEQ ID NO: 323596 - DNA, 1878 bp, Cannabis indica
ttgtggtggttatgtctgtgattgtcaaagatggaggcctcatacttttgttttgttgttgacagtataaaagaaaaaaaaaaagggaggacagtataaatgttaattctgccgtgtggcagtaaaattgaaaacaattaccccaaatgcagtatttttgtaaaatgcccaaaaaaaaacaatcatatgttttattccatgatacaaatatgtagggtgtttttacgatgcatctcactaatatgggtatactgatacaatttctaactattttagtatttataagaattttttagtctaattttttttataatcgtgtacgttataattatttaagacattttgtaaagttttaaaaaattcagaacaatttacaatgtaaaaatcaatatttaaacagtctatttcacaagcgtatataataaaataaaaattacacgtgcagcagactctttatatcctattttcagtatgttaattttttttttttttgaatttctaaaatttttatcaaatatcttaaataactacaacatatgcgactgttgactcagaaatctagactagacttctaagcacatccgcttgctagattgctgaaaatgaataagtagttaaatatttataagagagacacaacaaatttataataatattttagcttctatatcacaatagtagttaaatatatacgagagagacaacaaatagcgtaatggcatatgtgtttacttaaattattagtttggatccagaggtgaaacattggacgaatcgagatcctctgttaaaatttggtgttccatattgtattaaacctattaaaatttaacacatcaactaatttaatttatattagatatgttaactaattttgttgactttattaaaagttttaattttttataaataaaaaattaattaacgtgtcaaattttaattggtttaacatatgagcaccacttgaaccattacatcattttaataagttccaatcatataaaatgcatataactttttttatatcacgattttttcagttcttcgactctcccttgttctttaaaaaataattattaagtgtcctataattttagtcttagaccatattttctctagcacaaccatgcatgcctgctttatggttggtgtatctcaatactactgaagtttactctttaaataaagtatgaataagaaataagtaataaataaatatttattaatactattataaaacagaataatatatcaatgtagtggaatatgtgtttacttaaattactggttcgtatccaacaggaccttaggtgaaacattggaccattacaccaaattaagttccaatcatataaaatgcataacctataaatggagctttttggaaaaaacttcggagaggtaaattttattcatctgattatgaaatgtgtaagctcagtttctcgattcttttgaatggtgggtcgttaaagaagttaactcccaagtatggtctccatcaagtatggccaaactcttttggaagttggcgtgaagatgaatcgatttattgtaaagtgtttaaggctaagtattgggaccaaactttctggtctttcaacattccgaataatgtcttttggacaaaattatgtcaactagggaattgataagagaagagtcctgctttcttattgcaaacagaagtagagctgaggtctgaaattctccctggataccttggctgaactggaatccagtgatagtttcgaattctacttgtgtggcttctctgttgcgggatgaagattgagagaacagagagaaacagagagagagagaattaacacaaaggattgctttgtaattcttacctcaataatgaggatttacact

SEQ ID NO: 323597 - DNA, 864 bp, Cannabis indica
gaaaatataactcgcccaatctttatattggactggttgaaaaaatatcaaccttcccaatcaacccgaactaagctgaccaatccgattaagagggtttatatatatatttatatataatataatttatatacatattaaaaaaaaatattaagttcaaactactatatttctttcatggtggttgatttaaaatttaaattcaatctatatatattagtgctcggtttgggtagattaacccaaccaaatcgatcaattcattgggcaggttactaatttttttttaattgggcgagttgcacttagatttttgtaactcaattcatccgagtcaatcaagaagtttatcgacttgggccatgtggttgttgcttggtcatgtgccttattggcaactgtggagatttatcccgtataacaatagagtaatctctcaagcgttttctacatgaattgttgcttgtagtactatatagactatttccttcgaaataatcttcctcagagtgacatgtgtagaggaaattgaactgatttctcaagtttaacaccttcatgctcccacaggaagtattcgtactgtgggccatcaagacctcgggtaatgtacctacaccaagcaccctgtacatcacggaaatatttctgagtgtggagtagttcgttcgtcctcaccctccaaatctcatactccccattttcgtggtagagcttctgggtccatcccccaaggttgaagctattcagaagatcaaggctaaaatgatcacaactcagagtagacagaaatcttatgcagacctaaagcggagagacattttgttcgaagtgggtgaccatgtgtttcttcgagtgacacca

SEQ ID NO: 323598 - DNA, 1245 bp, Cannabis indica
gtagactatttacaaaatttttttaaaaatttacaagtatactaaatagctacacgtacgcgattatagaaaaaattaaaataaacaagtttataaaacgccgaaacagaaagggtgtctaataaaacgaaccctagggtacccctactaaagaaatttcctattactttttttatggagatagataaattgttttttgactatttcttctaaaattaataagcaatacaatgtggttatgccattttccttttgagtatttcattttgttgactattatataaatatatatttaataaaatagaagaaatttgtttaagcaaagaaaatatagaaaaaatggtatatcatcattaaattaagaattacccatagaaaaacaatttcccatttgtagaatgtaacttttctttctccatttttttttatatacataagcatattattatccttatgaaaatgactctttgcaacataataataataataattataataataataatataattgtcattacctttgtttctttttcttctttaataaaaaagtttaccttttccttttttgtgtgtgccttacaacacaatttatttatgtttacataatttcaaagcatgctgagtaaggtaataaataaattaataaataaaattttaaaaaaataaaaaaactatgtaaattaaaaacccaaaaaaaaggctaaaattggaaggtaaagataaagttgttaagagggtttgttttgatgaggtcttccatttctttataccaattcatatacatattatacacatatacacatatatatacataacaaatatatgtatcatcatcatcaaacaacaacatcatcatttttggtacgttgtgttgtgttgtgagatgaaagaaggtccaaaaaggcagtactagtacagcccaaacaccctccttctctctctccttcttcattgaattcatccttaaatattatataaaaaattgtctctttctcttagtgttaatcaataattaccccattttccatttcatatcgattttaaagacttcgttttttatcattggttttccttttgaaattgattgtagtactaaagaaccgatctttacttgttgttcctcaatgggtttgctctgaaatttagaaaaaaaaaagagtcaggtacgcattcttcaaccattaaattttttcttttatgtttttgaataaattaaaaaaaaattggtttttatttgctttga

SEQ ID NO: 323599 - DNA, 752 bp, Cannabis indica
tacaataaaaatgtaaccattaaatagtcacccatcccataataattatataatagctcttttcactttttctcaaaatataaattaaaataaaagtgcttgttatttacattcttaattaacaattttatggacctttccatttaattattctttcacaatacatattgttatatattctgttgaatcagagaatccatggggattaatgtttcttttttaggtactttcaagagagttttattcaatgaattaataacctatattaaatgattgattgttgatccaaataatgtggtatatatacgtacggtacaataataataaaatattgtcaaaattgaatcattctaattatggaaagaaatcactaagtaggtatgtttatggacccaaaattgatttatatttttcttatttatgtataattattactttccctcatgacaaatattattgtggaatgtcttataagagagcaaaaagatcataaagcaatgaaaaaatatggttgagaaagctagctagatataggaagaaaaaaaattaatgtgtggacaatataatatgatgttgatcattagggttgggattgggactgcatattattaatttatatatatatactagtaaaaagctacgtgagaggcacggatactaaattttatgctagtttttttctatgttatttgaaagtgatacaattaaaaattaaaaaaaaatattattagttattgagtgagattattatt

SEQ ID NO: 323600 - DNA, 1516 bp, Cannabis indica
ccgttaaggtgctacaataccatacaatatctcatactacttttttttttttttaaatgaagcgttataaatagcaaattagacatcatagtcattacatagtataatgttcgggatagacaactcactcaacctgccaatccacatacacaataattggttaatattttttaaataatattaaattaaaatttgtgggaactgatattaaaatgcactaataataatatattaccttttgtagtgattggtactttcatgtgtcgcgtaacatttgcgtaacattttcgttattaatatgtatatatttttattaatttcgattagaattttaattttttgttattattatatataagtttgcaagaatatttttaatgagatatgtaaaaattgtattatatttagcaaaaaaaaaaaataacttgtgatatatttgcatcaattttcagcattatgttccaatacataattgtaaaacttgatgtagatttctttttcttttgttcttttgttttttttgttatgaatgattgccaataaatgaacatatactacactatgtcattatttaaatataattttttctcaacaattatttaaatataattaataaaagtaaaatatataattataacctatatattttgacgaatgatacatgtcagtgccaggagcacatcctccacacacttagggcatctctaatggaaaaactcaaatttagtgttaaattaacaccaaaaaattactatttcaacactaatttttttcaattccaaccacaacactaaaaattacactaaattttatattctttttattaatataataagaatattttaatactaaatatatataaatattaagtttttcttcttaaaagtattatttaattattaatttttttttaaaaaaaaaaatagtgcagtttacagtgtcccacaaaatttggtgggacactgtagacaaatccatttatgagtatagttttagtgtcccattggagtaaacatagtgtgaaactacactatatttggtgttttagagttcggttggagatggccttagtatttatatataaatatgtgcataggtgaattagagtctaaagtttttttttttttgaaccaaaaatttacttttattaaatcaaatcagcttccaaaccaacagggaaataaccctcacgggaaatacagtcaggaatagaaccagaagaacgagctaaaaagttagccgcctggttctcggaccgttaacaaaattaattgaaataaaaaacaaatgagatgattgcataagagcaacacagtccatgattaaaagccccaccgaagacaacaaccgcttcttctgttgcaccgcttgcaccagcaacgagtctgaattagagtctaaagttaattggttagaaatgtaaaagactaataaattaacacatcacattttagaaaaaaaaaatttgttgaaaattaataatgcgtggctggtacaataatcatcaactaaaaaa

SEQ ID NO: 323601 - DNA, 412 bp, Cannabis indica
caattttggtttttacagaactcgattccgataaaaattgaaaaagttatgcatgtttgaaaattgggtgcccatggtgctcatcgcacgcactaggcttcagacaagaaacctacacgcgctcgtatctcggacacaagatgctgtctgaaggcatgtcacgctggagccttcagacatgatccgcccacacacatgctgcaggtgccgagaattctcggctggacaccctgcaagctcctcctcctgcgcgcggaatgtcctgcttgcagcctgtttcgtggggcagccgaggtgtgtggaccacaaaatccaattttggtgggagtttttcccgatttctgatgttccatactcttctactcttgtagaggataatcccactcccacagttgaaacaactgagagaact

SEQ ID NO: 323602 - DNA, 1527 bp, Cannabis indica
gggagggattggttttagaaacttgcatgactataatctttctctcttgggcaaacaagcagttggtgattactaactaatgagacgtctcttgttggtcgaatttacaagagtaggtactttccacatggaacttttcttactgctgtaattggtaacaatcctagcttcatctggaggagtatatatgaaactcaatcgattattgcagcaggggcatgtattcgtattggcactagtttgactgtcccagtgagttccccttgactccctaatatgaccattccgtgtgtgataagctctcatctaggtcttgttggggcatctgttaatcagctaatgattgctgataattcttaatgggatgttgaaatattaaacaatcattttgatcaaagagacagggatctcatcatcaatattcccattaactcatctaatttggaggatgtgtggttttggcatcatgagaattcgggtatttattctgttaagagttgctatcaatggctccaagtttctaaaggcgcatggtctgctgatatggagttgaatctttggcattgcttgtggaaaactaaagtcccacctaaggttattcatttttcttggaaagccatcattgggtgcctgcccactcagctccactcaaaacatgtgtctatgtaacttagttgtgtatgttgctctagggaggaagaaatgatttatcatgtgctggtgtcctgcaatttgcccactcttgctggaacagatttggtactgtgtcccttagcatcaattctatcactaactttggcgactggttatagcaggtactcgaccgtggacattttgctatgttcgaagaggcattaatggtatcatgggctatttggaaggctaagaatgatttgctttggaacaagaaagtctcctctgctgttgaagttattatttctgcacatgtggtcctaaatcaatggaaaagtgcttgcttaaatcgatttaaacctctgcctgcactggtgaacaatcttagcagctctaactcttggattgggcctatgaatggtgtggttaaagtgaatgtggatggtgttatttttgcagcaactcaatcccttggtgttggatgtcttgcccatggggctgatggtcagcttattgaggctttttgcttgcataaagccgattgtgttcagcctagcttagctgaggccattggtgccaaagaggcattaagttggatcaagaggaaagggtgggagcatgctattgtggaaaccaattctcttgtggtggttcaagctattaagagtaatgttgtgatgctatttatatttggttcaactatcacttacagtattaatttattaaagtctttgaagcatgctgatgtttgttatgttaaacgatctgctaacaatattgtacattgccttgctcgcggtgcttgttattggtcagattgtctttttgttggtaccaatcactacaagaaatgtcacttttaccagtacagtttgctactgcgctggtaaaagt

SEQ ID NO: 323603 - DNA, 746 bp, Cannabis indica
catacataaatgacacctcaattgtcttggtgccaaaaaaggaaaacccgactctaacaaaggattatcgccccatcgctctttgcaatgtagcatacaaagtaatttccaagataatagctacaaggctccggagtgtcattcaaaaaattatttctcaaaatcaggcagcctttgtcaaagggagatgtatagccaaaaacacaatgatagctcgtgagatactgcattctttctcaagaaagaaaggcaagagagggtatgatgataaagctggatatggaaaaggcatacgacagaatggaatggagttttctgttaaatgtgttgaaccacattggtttcacttcccccttcacagagtgggtgcaagattgcatttcggtaaagcagattaggctgctcctcaacggggaagtagttgggaaattcaagccggagaggggcattagacaaggggatctgctatccccgaccctgttcatcattgccgcggaaaccctgtcaagactactccagctaaatgaagaaaaggggcggattaagggattccaaatgggcagacaagaagtgaaggtaaatcaccttatgttcgctgatgacgtcattatttttggccaagcgactataaaagaggcaaaggctttccgagagtgtctagacttgtattgccaatggtcgggacaaaagatcaacatacaaaagtcttctatttacttctccataggtgtgcaacgagacaaagt

SEQ ID NO: 323604 - DNA, 1022 bp, Cannabis indica
aaaagacctagatgatcatgatactatacaatatggtgatgatcataatcaaacacaaagttctaaacttgatttggaagttaccacttttacttagaaatttaagttaattttttccttgtaatcatgatatatatttatatatattctatgcataataaattaatcaattctaaacatgtagagaattaatctacgtagaaaacacttttatcatgtgaattttttagtttagaaagagagaaaatgaactgaactttcattgataccagaagagagtacaacagagagctttagctcgatggagaagaaggactaactaattaactgtaacggtctaaccaacttggtaacaaactttctaactaactatgtacaccttacaactctaatactcctccttaaggtggagtatatatgttaaaaaagacccattttgtctttcaaggattgaaattgattaggcaagagggctttggtagatatatcagcaatttgatctttgttggaggtgtgcacagttttgatgactccttcttggactttctcccttacaagatggcaacgatctctatgtacttagtcctttcatgaaagattggattggcaactatttgttgagcagccttgttgtcacagtaaagcaatgcagaccttggatgctcaatttttcaattctttcaaaagagacagcaactaaaccagttcacaagttgtgttcgacatggctatgtagttagcttcagctgaggatcttgagagtactctgtttcttacttttccatgatattaacgagttttcaaggaacacacaaaagccagtagtggacctccttgtatcaacacacgctgcctaatcagcatttgtgtaggcttggagttgaatgtctgtttttgctgcataaaacagaccttgtccaagtgtccctttgacatattgaagtgctcttactgcagcattcatgtgtgtaactctaggagcaaccagaaattgacttagcttattcacagtgtaagctaaa

SEQ ID NO: 323605 - DNA, 568 bp, Cannabis indica
tttatgagtcactgtggttggaattcatgtatggagagcattggaatgggagtgcccttattgacttggccaatgcaatcagaccaacctttcaatgcattgttgattacaaaggttctgaaagtgggtgtggctgtaatggaatggagtcaaagaaatgagttggttacttcttccatgattagcagaggtgtgaggagaataatgggttcagattcagaagaaggagatgagataaggaagagggttgtggaaatgagtgaaggtgtgaaacaatctgttgaggaaggtggtgattgtcgtttggagtgggattctttcattggacatattaccagatagttgaagacactcgtagcagagttagaagtggttggttgagtaagttatgtttgttattctatgaagttggtattgttctgtgttttcttctctaaagtggtttatatttaataacaatttttactaataatatttatatatttatatataatatgtatgaaattgaaagtgagatgatgtaagagagctctagcaaacttctgtatggttttttttttaaaaaaaa

SEQ ID NO: 323606 - DNA, 1595 bp, Cannabis indica
aatatgtgtgaattggattagattggttactttaacttgtcaatcaatatccaatcagcacaagtgcggattttaagttttccaatgcaatccaatgtccacaagtgcgaatatccacgctttgcaaattggattggattggattggctactttgtgaacacccctactaaaaagtcttggattgatttccgcaggaagccaagaatctttaaaaatataagtacttgcaccatcatcaatacccttcctagccccttttcgaagtaactcttgggtctccaaaagactctgccaaataaatctaggactgctcccaagttaggcaatgagaaaatctttattcttaaagtagggagccttgtagatctgagaaaccaacgaatcaaattaaacctccatgctatagaagttatagattccatatccatgattagtgctcacactcaattgtactaccatgttcccaagatataagcattaggccgatccaattgatcaactttaaccaacaagtcaaagaacacaaataatacaattgaggcagaacctaaacatctcaagattaaaatctattgacctaagatcaactaagtgatattgatttagaaatatataacatgaagtttatgatatcttatccaatgtcaatatcggtccagtccaatgtatactccatacatctgatactagcattctttgccaatgtcctagaaaggacatgtcacttaaccaaggtgtaagtaaactttatcgttgattatcatgtcagtgtaaatccagtgtactgaaaatcatgagactaaactttaaaacatataatgatgattattttccactgtattgacacactataatcatgaataactataaattatagatttaatagaatttatatattgaacatatagtcatgaaagaaatcatgtgaaccatgcaacataaaatgattttgatcttttattaattagtaaatctgattatattgaaatagattttattttgggcataaaatcctaacacccatggactgtcccaggcagcagctcgccagaccatcattatgtcggccaaagaagggtagatcaatgtagcttccaagattgtttcataagtaacctcatcgaaaaagacaagtctcaaggagggcctagccgagtggtcaatatgccgatcagaagaaataatgccagaaatatcaaacaacgctacacgagccttgatttcttcttcaacaaacttccataaatattttaaatcgaatcctacaaatacaaatccgacttatctacccaagatagtaggagctttaacagatcataattgcaccttagaatatcagaatatttaccttttgatcactccttttacggagctaattgtaataattatctccctataaatagtgaatgtattcacaaggggagggaacctaagatcatattctcgcatctaagagcattttgctaaaagatattctctataaactgttagaaatattttaccaggatctagatttactaacaagtatgtttcattaacattctaatatgaattctctaaaataataaaataaacatatataaagtttaagaaa

SEQ ID NO: 323607 - DNA, 702 bp, Cannabis indica
agcttaatttttccaaaattaatttgaaaaatggaaaaggaatagagagagagggggggaggtcaattaggactagaaataatcagaaatggatttcaattttctcaaaaatcggatttttgttgaaaatgtaatagttggtaagatgaccaaaatggctctagggccaaatataaacatccttaaaatcaatgataaatttgtcatttcaccacacgcatatagaacacataattttagatttctcatttatcatattaataccagaattaaatcttgaaaatgtatttcgcgccccgaactcggttcggcctaaaatatccagttgtgactataccgcactgacttgttagaaaatacctacagatagacagaatacatatactatgaagtaatatagcccataagcacgatatatcatttaattgtaattttacccttctcgggtcaaaattacaaaaatgcccctagtacaccaacaaggtcttaaaatgcaatttattagtatagtttcacatattaaagtatataataatataattccacattaacacatagtcaaactagttagggttgctaatttgatttcttaaccttagggtattacaattatctcctccttatagaaatctcatcctgaaatttacttgaacaactccagatatttctactacatatccatctcgagttcccaagtttcct

SEQ ID NO: 323608 - DNA, 592 bp, Cannabis indica
aaatacaattcgcttgaccttcctatttggcccctcctcgggtctttgtctggttccgccactgataatattggtcaaactttaattattttctaaattagaagataagcttatgaatttgatatgggtacatgttataatcaactatatatatagtagtagtttctttcttctttgaaatagttaaattacttaatttttactattttttctcaatatttaatttcctttaatctcattaatatttttttttatatatccatatatatataaatataattgttagaataagaaatagatcacaacacagttaattgaccaagcatacaataattatgtgactgtaaatagtatatatataagtacgagtagggtccataaatatatataagaaagaacatatattaatatatggaagaggtttcaatggttacatttttatgtaaccatcatggttacatttttttaagccattggattactattaaatggttgtgattaatttgaaaattaaataaaaataaataataaataacttgtaacctaaaagtgacctaatcatttatttccttataaaactttaattaagatt

SEQ ID NO: 323609 - DNA, 683 bp, Cannabis indica
taaaacataattacttattaaaagaaaaagagcacacactagtgaagacatacttgatgatcaggacgagtctcgtcaaatggaacttgtaatcgctcttgaagcctttgaagtctttgttcctagtaagaagaatataggtcaggctatgcactttcttgtagtatgacgacactcaatagtaaacaaaagtttaagcagtgccctttgaaaaaaaaaatttaaaaaaaaaggaccatccaacaacagaagcaaaagtaatagccaacttgaaggtgtttgtttttttactacctgaagagggctcaacctgtagtcgaggtacttctcacgcttattgcctgaccggctaaatagtcctccaatccatgacctcggtccgcccataacatttgctgcaaaaaagtaaacaaagatcagtgaaataaaagaatttacaaatatatttcaaagccaggtagtatagaaggaacatggtcagtgcagcattacttgcatgagatacaaacagaaaacttctcattatgatcctaatttgcttcaacctgtatagaccaagacataggacagctgtaggagcagaaggtccattttcctttcgaaatcaaatttcatgaagagaaaaagaaagaaagaaaaaaagtgagatcaaacacacaaacatcatcagggaaaatggaaaa

SEQ ID NO: 323610 - DNA, 985 bp, Cannabis indica
tttccaaaaaaaaaaaaaatattacagaaatagtaatattgttgagtttgaaatcgtcaaaattaatgaaaagtagaaaaagaagaacaagttaaatcaattaatgaaatagaatattagtggattgcattaattttaaatttatttatttaattaaattatttatacatatttttttttctaaataagtatttatataatttacaattatatttaactgatttttttgttttgaatatatattttaattagttcttttattttaaagttaattaataattttttacaaatatatttatattttgattgacgaagatattttgaattcattaaataattattaatcaatcaatttttttcattaaatcagtataataagatatataataatcagcttaatatgcaaatgaaggtagttttggaatattagaatcttaaatgcactaagggtattaaagtgagtagtttttgtaaatagatggtaccaaatgatcattattcaaaacataaggtaccaaatatgtattctaataaaacacaaggtatcaaataggtatttacccttataaatatagtatacaaaaatttaattttttttttttgtaaaatgtgtagctataatagtaggtgtatttgattttatgagtattaccattccttcagtgcttctgcctcggggagttgaggattgattttgaaggtactcgtgtcgcgtgacgatagagacagccctaaatcaaaatgtatgtgttaattgaatttttgaattttcgcttttaaatatcagtagtttaattaatgcaataacctctcttggtttgaacaattagttttgatcccaatattatgggtctgtcttcgattacttctgctatttgtaagcattcatcgtgaactttatgcccccacatcgtcaaacatactggtttgaagctacaactttgtaaagaaataaaaaaaatggattagcaaaaattttgttaaa

SEQ ID NO: 323611 - DNA, 979 bp, Cannabis indica
catggggtctcaacttttgtagatttctaactatccggacaaaataacaaagttcattcaaaaataaataatgaaaaaaatcctaagtactttgaaagaactagatcaaattagagagtcaaaataaaacaactaactttcaaaaactaaaataaatcctaattaaataaagaatgaaattgaaaggttaaatccaatctatttgtaagtaggtagtaactagtagcaaacaaaaaccaaatttgatgacaataaataaagtcctagagagagcttttccttacctagtacatataatatgagaattattaaaaaaatattattggtatttaacacttttttttaatatcacaccagtattagtgtaattaaatagtaaatctcatctaacttaaaaaaataaattttaaaaaatattactaatcaattgtataatatcacttataaaagatgttagataacactaatattcaataacaatatttatttgttaaaaaaaattaacaatatttatataatataataaaaagagaacccacttcattttcttaaacacacaagactttaatatttaattaattaattaattatttttagaaagtaccaaatgggagttaatactctactctagagtaattagtagccacagcaatagacataggtattactgtaaataatatttatgttttgtagtttactgtaaagaaatacaagttttggattattaattaatttagtagttagtacagttctgattggatatgagccacaggatctgattactaaaggaggaccactttgaaatgatcaaattttaggagatgtcctaaactaccacagagattacttctataacaagcaaaatctagtttcacttccacgcgtgtgagactgaaaattaatatcttaaaattaatttattaatacaaaattatttgccaaatttacctccatttataattatgaatttttttacaat

SEQ ID NO: 323612 - DNA, 1263 bp, Cannabis indica
accattgatattgacttagaaagatacaacggtaagtttatgatatcttatctaaaatcaatatcgatcccttccaatgtatactccagacatccgatactggtaaactttgccaatgccttggaaaggacataacacttatccaaggtgtatataccttatcaccgatcatcatgtcagtctaaatccagtgaactgacaaattatgggaattaaacttttgaacatataatcatgattatattccactgtcctgacgacactataatcatgaacaaatatatatgttctggacttaatagaatttatacattaaatataattatgaaataaataatgtgaaccatgcaacataaaagcgatttctgatcttacattaattagtaaatctgattatattgaaatgaattttatttagggcacaacacccgacaataacaccatacctagcttataaacatcctcctttttagtgcaactctcaaagacgctgcacagtcaactaatgttgatggatggatccccactaaagtattctactatcaatgggtccgacgttgccttctcttcaatctcgaactcagtaggtccacataacatgttaagcctagtcaccagagcaaacccagctcgacctaatcgtcatctcatccttgtaatgtaaaggtgcacttcgtcatccttatctgatttgatgttatgaatgaacaactgatagataagtgcacccgaaaaagctaaggactctccctcaaaaaattacttgaaagaggattcgtccttcacccttttcaacaactgcattttcataaattttacttttactttcggtaataccaactactgtcccaccaagtgacacaactagtgtaatggtctgacattggaagtaaaaggcgtggaactttgtaagattgcaaaaaaacacaaaaaatggtagtgggaaattttgtacataagcatcaaaccactattggtccaaatatcgggcctatcgagccctaacaaaaaatagatttcagcaaggcaatcgggccctatattgtgcccatattgggccataacaaaaaaaataaaatttaacattactatcaggccctacgtcgggcctatttattgtgaattattttaccaggatctagatttactactatgtatgttgtttaacatcccaaatatgaatttttaaaataataaaatttaaacacatataaagttcaagaaaccttacattagttgcatcagaattaaatgactccttcc

SEQ ID NO: 323613 - DNA, 909 bp, Cannabis indica
aaaaaaaaggaaaaagaaaaagatggtgattattactatgatctttcttttaaaaagctacttgaaattgctaaaataaccttcaaaatatgagcaaatgatatcattctttatttatctgaaaatgatattattatcttattagttataatccctttttttgattggtaggtgtctaggtgagcaactcttgtttttgttattgatgcaaatgagatttagttaatgtcttattgaaatagcttggtatgatggacccataagggacaacacaacaaattaaaaagctatcatactttgttataacaacatttttatcgtaaaacttatacatttttttttcctaatttacatactttaacatcatattattttattagattgcataacttagtttttgcctcgtatatattatgtcgctatgttgagcccgaatccaataaatatattttaacttaaaaattttattagagtaatttttaatattatcgcgatgttgagcctgaatcatcattcacttggatcttgagtcgatataatgtatatatatatatatatatattaagttaacattacgtacaatacaatgaacgtatacctagttatattctttaatttttattttagttatatatatttttagttgtataatttaatttttctttttatttttttattattacatttcaaaacagttattttttttttttttgttttttttttttttttttttgcatttttcactgaattctatatagaaactcttattgcaactagcgccgcaacctaaattgcaaacaaaaaaatcgtatagttgcaactagcactgcaaccactttagaaaccccaaccgtaaatttgacaaaaaaaaaagttaaaattaaaaaaaaacagtatatgagataattt

SEQ ID NO: 323614 - DNA, 502 bp, Cannabis indica
ctcaataaaactcgtcacttattcattttttatttctaaaacttctaatgatattgtgtggcattaccaattggggcatccctcctttaaaaagattatcatcctctcaataaagatttacatttttcttcctcttcttgtcctaatttctattgttctattcgtgattacgccaaataaaagaaatttccttttatctctaatcataatatttcaccaaataattttgatcttatacatgtagatatttgggaccctttctagcattaatggttaccgatattttataacaattatggatgatttttcttgggacacttaggtttattttcttaagtaaaagtctgaaacatagcaagttatccttgcctttttaactcttattaaaactaaatttaatgtccaagtcaaagctattcgattacaatgcaaaggaacctcagttccctacattattcacttttctttgcattattcattatacttcatgtgtctaaaggct

SEQ ID NO: 323615 - DNA, 1275 bp, Cannabis indica
atactttcatgcccactcaatcgtcgtgctgaccaactatccttgcgccaaattttgcacaagccaaagacctcaggacgcctcctaaaatgaacgatttaactgagtcaatttgacatttcctatgtactgcggacaaccatcaatgggcaagtgcttgccgactttctagctgaatttacctactagcccgacgagttatagcacaaggaagcagtagagaaggacgcccgtgatgaaacagggaggtggaagtttcatgtggatggagcatcaaacgatggcggtgcatgcgcgggagtagttatgaccacgcctggagggtagaagatgtattgcgcattaagattttggttcatagcttgcaatagtgatgttgaattcgaggctttactggctggcctgcatttggccaaggaattaaaaatcactaggctagatatctataatgactcacagctatcgtgtgccaagtcaaaggagaatatgaagcgaaggggaataggatggtggcgtacctagccaaggtgaaaaattacataggacagccataacactacacaatggagcagataccccgtgacgataatttccatgctgatgcattggctaagttggcatcaacacgggatattgacaccttagagtcaatacctgtggagtacctagagaagcctaccattgaagaggagcaggcatacgtggtgaccggtaaggaatcctggatggccccttaccagaattacatccaaaaaggagagttgcccaccaacaagaaagaagctaggagggtagtgtataaggcggcccattatgtggcgatggatggggtgttgtacaaaagtggattttccaccccctcctacggtgtgtgggcaaggaagaagcactacgaagtttgtctgccatacatgagggggaatgcgggaaccatgccgagggatactcaatgcaacggaagattttgaagcaagggtactattggccctccttggagaaggtgttggaatatattttaccaggacctagatttactaacaagtatgttttaatatcctaaatatgaacttctaaaatgatataaaataaacacataaaaggtatgagaaaccttacattggttgcagcagaattaaatgacccatttcactcagatctctaacccttgtatcctttctgtagtagagtataatcaagaactaagactgatactccttcagttgtttggattcttcacagtcttacacgctatgattgatgactaacttgctatgg

SEQ ID NO: 323616 - DNA, 953 bp, Cannabis indica
gattattttccttcattgacaaatttttcagtatgtgacagtgatgaggaagtaataccattaatactcccaagagctcaactcatgcaggcccctttgatcactttaaaggagattgcattcaagttttgttacaatttgacgcacttagaagaagcggcctttcagcacctcacctcccttgagaagttggtaattgtatgttgttctaacctccaatgcttgccaaaagaactacccacttctctttctgatcttcatatcacttattgtaaattgctaaaaccaagagttcagagggagacaggggaggactggccaattattgctcacatcccaaatatcattgttgaccaagagaaaatataggtattacttttttctcttctcttgtaacttgtaaggcctacttgtttaaaattttactcttctttttaatttatatatatacattatttgtgatgtgtaattttatgtgtttatagcagatttttattttgtgatgttttgctctacatttacttacttacttatgttttgctagaatttttttaagtttgtgagatgattaattaacatgtttaacacattcaattcatgatgtgtaattttatgtgtttatagcagatttttattttgtgatattatagctgttgcgtttgatgtataaatatttaagaagcttttcttttcttatgttaactacttttctttcatttttaagtttctgattctcatcattgacagttgtgatcataataacaaatttcctctagcatcaaaaattttctgagctgaaaacagaagatgagtggattagggtcctagagaaggcactgccctcttcatgcttatttgattgaaagtgaatgaacatattaatagctagtttgcatttcaaatcggcttctgtcttaacctttagaagtcttctcagatgcagattgggctac

SEQ ID NO: 323617 - DNA, 906 bp, Cannabis indica
ctttaaaatatgtcttgcaaaataactacatataatatagtttaactcaaaagggcaatttagtctatttaagcattccgattacgtttcctaataaagtaaacaagataaatcacaactattccatttctaaaaaaatttagtaaacaacatattacaaatattgattccgattattttttatttattccgttacatttctccattaatttattccgattctgattactgtatagtaaacgtggcataagagataagcttaatttagttgtatattatggaaaattatgtaagttattggtaaaaaattatgtttggacaagttattaatatgggaaagctagaattattaaaatttgttatttatttaaaaaatatttataaaagtttcccttattaattatatcccataaattttaacaccctatttttcgttctcaagataaccaccctaacttttcaagtgtttattgccttactagtaggctacctagcctatttgaatttaattatttgtaaaattgtaaaaaataaaaaatatattattaatattattattttgcatgaaacaaatttattaaaggctaattagcaatttttcctctcgaattttgacatgtactaaatcgtgccccctgaacatttttggccgttagaaattcccctcgaactattgagattgttaagtttaaggacttttgtctaatttcattcaattttattgttcagtgattgtttatgtactaaatcatgttccccagactttgatatctatcaaatcacgccccatgaactttcatccatattacaatttttttactaaaattagataaaagtccttaaatttaacaatctcaatagttcgagggaaatttttaacggccaaaaaagttcaggggccacgat

SEQ ID NO: 323618 - DNA, 1427 bp, Cannabis indica
ttccacatatagctcatattacattcacacatgctatataaatctccataattaacaaattacgtttatttactcacttatagtaaaatttaaaatttatactgaaatagattagtaagatcataatcctactaattacccgattaacccatagtataaatataaactataattatttaccattaggcttatcgagatattacaagttatatttcaattataatcagtttgagttattttgtattatttgtttttattcattatggtatagaaccggttctatttttaattataactggtttgaattattgcatgttacttgtttttattcattatgttatagaacctgttctattttaatttataaccggtttgattattctatattacttgtttttattaattatgttatagaacttgttgtattttaatttatatcgtgacatatactttgggtgacttttctattgactttccagcgatggtgactttttcaataacttttccagtgacgatgacttttacagcaacttttctggtgaattttatgatttagttgattaatttgatgatgtagttgattaatcagatacgagaagattaatacaacaaataaaaccaaagtatactcacccacccaccctctctctctgctctaagaaatcccaagaaaacccaaactaaagttcagagtttcttcataatttttacaaggattcagctaagttttgagaaggtttttgttagccaattcaaggtatgccctagtctcctctttcctttgcaattttaagagaaaagtttggtttaaaagcatgaaattgtttttttttttgttctgttagggtttggaatgtttagaatttgttttggggaataatttttgaatgtttgatgttgtttttgttggagctaagtttgactttttgaactcaaacttagctcaacaatggtgattttgatttcggggctttgatgatgcagtttttgattgaattatgtttgttatactataattaggtgctttggaaagtggttagatttggggtataattttggaagaaaaattgagttttggaacttttgctacgaaacggtccaccatttctatagaaacggtgaattgtttccccaagaataaccccaggaaacggtggaatcatttagggatctgggtgaccagctggggtgatttttgggtactctaatttttatgttttctcgatatttagggtaatgccatactatttatcgatagaaaaacttctggttttgagtttaagtccccgaaaattgttttagagagacacttacctattttacatgaatgtggcttagggcctcaacttgttgagcagtttttccactcaagttgaccgacacacctaattataaaattgggataagattagtataacacatgcaca

SEQ ID NO: 323619 - DNA, 804 bp, Cannabis indica
aaaagaaataaaaaatgtcaaacagccttttgtgtattccaaattccatttgcccattataaaaaaaatactgttgtttgttttattaaatttgacttttgtgtttgtggacagcaaatagtcaactttgaacaagtttatttgattgtagagatgccttggagtgcactgcaggtcacataaatatcccctattgagaaattagaaacatttatttatttattttgaaaagttctagaatcaccataaaaaaaaaaccaaacaaataaaaaataaatgttgaattaaaaaataaataatacatttgttgttgcataactacttatcatatattaattgggagtgtttgtttggaatcttaattagaattgtttttattttattttaatggatatgaatattcattagtctttaagtataatataataatctaagaagaataattaggaattttgtcttctgaatttttgataatactgattttgacccttaaaatatccagcttattaaaaattccttttgaacttttacatttacaaaaatttaatccttttgttaggttatgtcccattatttcatttaaatgctaatgtgtctttgaagattagaaaccttgtcccatgaactttcaacaatactgattctttcccctaaaatatataatttgtgaaaaatctctcctaaactttacatttacaaaaggctaattaattacgatttgtattccctaaactttgacatgtaccaaatcatgtcccttaaacttttctgattgttaaaaatttcttctgaactattgagatt

SEQ ID NO: 323620 - DNA, 1849 bp, Cannabis indica
taacaacgaggctaaatatgaaggtctaattactggcctcaagctagaacacaaagtgtgggttgaataccaagacatacaccacaactctcaactaattgtaggtcatgtcctaggtgaatatgcagctcaatgcgaaaaatgatggcatatttgagctaatttcaatactagttaagtcagcttaaaggctatactaaaaggcaattccctaaagacaatacaacagttgatgcactcattcgacttgccagtaataccttggcagccaaggaaaacttggtacccgctcagtcctttaaagagctaagcatcctgatttcaaaagaaatagacatgctggacaactatccaatatgaatgacacccatagcagcatgcttccaaacaaaaaccttgccagaaagtaggtatgaggaggatagttgctaggtgtctaatcctagacagcgtagcacacagacgtggtatcccaatactacctctaagatgtgttatcaagtaaaaagttgaagagctattgataggagtgcataaaggctctacggaaatcatgttggggggcaaagccgactgagtgtagatgggatcaaactgtaacatcaacctggcatccaaagggctagccaataatggcctcagtaggctagccgaccatggaatcaaaaactctgccggccactacctccaaaggctggtcagccatagcctcaacccggctggccacttggcagtaccctggctggtgatccgtcaatagtctactctcatgcttttggtctactatgaccaagaagtaaaccacatcttgctagcagaacccttaacaaaagggaaaaacaaagagaccaagccacgttaaagtggcatgtttgccaacaaaaattttctaggtacttcgacaaacaaatcaaggaaagaaattcttcgtaagagactcattgctctaaagaattccttaatattaaagatcctacagcaagcacgtttggaccccattgaaaaggttcgcaccgagttacaagataacaagaaaaggtgcatacaaacctgacaagtacaatgtgtacttggagttagctcttctaccaaaatactggaataaagaatatctcggtaagtgctctcactagccaacttgtatagttgttcctctaacgtttcaccatgcaggaattcacaaaagagctagtatccatagctcttcagtgatggcctcccatcactcttcaagatggcctttgcacgataagccctgcagaggtagtcaaatataaaagagctagtacccattgctttgtagcttggccccccatcgctcttcagcgatggcctctgcctgacatctcaggcaggggtagccaaaatatgacttcaaaagtggacattaagtgttatgcttttgttacatgtaagaccaactgtgtctaaaccacttgctatcgtgattaattcttaaagttattcttttttagttccacatgcgtacacccagtagcaccaccaagaaaattcccaagcaaggtctatgaaacttggtgaattgtaagtgactaagagactgtaagtctatgtgctcacttaggagcacccacaccgtataatgcatcgaactaggacggagaacttatacagagaaattttaacgcttagaataatctactaaacctgcctctaagtcaagtgtaggcatacttcagcttgccataaaggaaagtgttatcccaaatttgacactctgacgtggcatcacgagaatggtgacacatggactccatttggagcatctgctcggaacgatatgtcgagaaggatgcctcgctggcacatccaaaatggaatattcaac

SEQ ID NO: 323621 - DNA, 519 bp, Cannabis indica
agtccggttcctgggaccaaccggtcgaccggttgctacaggctcccaggaactggaatttcggttctggactgggaaccaaaaatctgacccccacacctcaaatcaatcccaaacttcataattttctctagagtacctgcatacatgatactaaactcaaatcaagcaattaaactcagttccaaacccaaaaatacaatctaccattaaaggacaagatttgagttcttaaactcaaatcttctcaaaacacctcattaagaatcaaacctagcttagatcaccacccttaactctaatataacttcagaaaatccaatcaaactccaatcaacatcacagtacccaaataacaagaattcaataaaaaactcaacttaagcttgaagaaaataaagaggtaaagaccataagaactttaccttgatttaaaccacccaagccaagatttcacaattgagattgagaagacccagccctggttgaaccctagagaaatcgagagagagagagaga

SEQ ID NO: 323622 - DNA, 1062 bp, Cannabis indica
tatgcactaaattaataaaaaaaattacatttaactatctaattctttataaaatcaacaaataaattgttattgactgttaatataaataatatataatgtcagattttaaagtaagatatttttatttgatgtgatattagtgcaatttatttgctgtacattaatttggtgtgcttttaaagtaaaatgatgcaaaaattataaataatgatgaaagctcatatacaaggcttatgcatgctatggtaaaacacatgttgataatcatggaattgaagaatctccacgacctgtctcataattttatttcatggtcttttatttttattttggaaagataactagctgaatagaaatttatttaacaataatgtgaagacatgacattctttttattttagaaaacaaaaataataaaacaagagtgttttaaggagacgattatatcaaagtacaaatataattgaaataattttgtaatagtcactctttcttattttcgagttgtgttttttctcatattagtaagttttgtagttttattgcccataatgtagctaagtagcatgataaagctggatttgcaaaaggcgtatgacacaattaaatggaggtttcttgaaaaaatgttagttggcttgaattttcctccaaaattcatccatctaattatgaactgtatcacaactcctagattctctttgatgttcaatggaactcttcatggtttttttgaagctcaaaggggaattagacaaggtgatccgatttctcccttgctttttgttcttggaatggaatacttatcgagattgatgaagaaagtggggaaaaagagggttttcaatttcatgacagatgtgctagtctgagactgaatcatcttgcatttgcggatgatgtgttattattttgtcatggggattttatgagtatcttatacatgttacaagcactcaaaactttctcactcacatctggattatatcctaatgccagcaaaactgccttatacgggtagtaacatgcaccctcatgaagtcaatcacattatgcaga

SEQ ID NO: 323623 - DNA, 1340 bp, Cannabis indica
cactaacaacagaagcatcaacattgattataaatcttaatcatatgttcaacaagtaaaattcaatgctcgctactaacagcagaggaagaagtaaattctcctacattagtgtcatattttttgagcatccttctattaattaaaataagcaataacagatgaaacaactccattaataacggaactcttcccttgccaaattaacccactacgagcacgctacaaatttcaacaaatcattgtcaccagactagccttattctttgagaaacagtcagaacattagaagattagctaaaatagtcaaaatacgatgtcctaagaactgaaacatcaaactgttgccagcaaagtgaagcaaacagacattcaaccatgatatgaataatagactcagctcctccacgacacatttcacacatcaacggaacatccacacatttttctcaaagcaagggacaatatatttggatgtcaactcgttttgttcatgaagttttacaaaatagtcaacctggaatagttaatgttattatggtggaggttgtaggactcaagaagccttgagttggataaagggtggagagatatgatgttagagatggatttccataggaaaattttatttgcactcgtaaagttataagtacatcccatttcaattaatttttattttatataaaatatatatctttaattgatacttattttttttttaattttttcttccttgtcatattactaaaaaatattcttataaaataaaaataaaatatattttaaattttacgataaaaattaaaataaaaaattatatgaaattttattataaaaaatcatacatgactttagaaaaataaaaattgtgaaaataaaataaaactaactattgatattgaatgaaaataatgtgaaaaaataaaataaaaataatttttaaaaattaatttaagttaataattttttattattagaatgctatgagatacaaataaaaattttcattaccttaatttagggctcgtttggttgatggtaatgggccagaaagaaatggaatggaatactaatgggcctgattagcattccattgttttcagggctatttacaaaaatatgggaaaatgaagataagttttgatatatatggcataaatacttaattatactaaatatggcattttttaaaaaaaacttacaaatatgggaaaaagtcattaggaatgccataaaacactttaaatttgtgtttctttcttttttttttccttttttaaaaaattaaaacactaaaataaataaaaattaatctcaactatagatgctgtttttttttt

SEQ ID NO: 323624 - DNA, 687 bp, Cannabis indica
cttcttcttcttctatcacactctctatttcccttttccttttcgcacagtcagtattgcgtagtcctagcaaggccactttcgaccacctttaatgcaaacaaacctcaaaactcgattctcgatccttcaaaccccaaacccagaaatttctcttcctctcttggtatctctctcgtgctcactctcctctcacgatagctatctctttggcaaaaaaggaaagcgagccacaaggcctatctccggtcgtcgattgttgaagtttgtgggcacctcgatgactttctttccatttcttagatcttggtcttaggaaaactcttgtaagattttccttccatgtgttttggtaatggtggaaccctaatgagtttgaattggattctcaactttcaaaatgggggttttgaagagcaaattttacttcttttttaatttttaaagagtttttggttgctaaaccctcactttacttgcatttaactctctaattagaaaacagtaaaaccctccaaactactaaacctgtagtaaatttaaggtgtcattaggtagactgtcaccatagactgcttatgtagtgtatactcttgtacacatgacatgtttatattggtacacctaatattattatttaaaaattatctgaaaaatttattttaaaattaaagaaaaatataaaaa

SEQ ID NO: 323625 - DNA, 1111 bp, Cannabis indica
cttgtttcttgttcaagaattcagtgaaaaacaaagaagatgggcactgcaaagtatgatctcgagaagtatactagaaagaacgaggacttcggtctatggcatgtgaagatgagggccatgttggtttaataagggcttcaagcagccctactggaagagaaagacttgccaacttcgatgacaacaaaggagaagaccgagatgctcaaagaggctcatagtgccatgattctcagtcttagtgataaggtgttgcgtgaagtttcgaaggagaaaacagcttccggagtctgaaattggaaagcttatacatgaccaagtcactcgcaaacagactattcttgaagtagaaactgtatgcattcaagatgacagcagggaaaagtgtggaggatcacttagacgaattcaacatgatcattcttgatcttgagaatattggaattaagatcgaagacgaagatcaagctatcattgttctgaattcattgcccactgaatcatatgaatattttgtggatacaatgatgtttggaaaggaatcattgactcttgaagaagttcagaaggctttgatgtcaaaagagttaaagaagaaatctgagctaaaaaattaagttgatggagatggcttatttgttcgaggcaagaattccaagaaagggagcaaggagcacactggacagaacaaagatcaagggaaatcaaattcaaagtttaaaagaaagtgcttcatcagcagcaagactactcatcttagaaaaaattgtccaattttgaaaatctacaaccagaatcgattaggtgatgcagaagtgatttctgatggtgatgacagtgatggatatggtagtgttgtagttcttgtagtctcatattcaaattcaagaactggatgggtgatgtactctggatgttcatttcatgtatgtccagataaatcataattcagtgaatatcaagcaatggaaggagggattgtaagattatgagataatggatcatgtcctatcactggtttgggcaaaatcaagttacaacttcatggtggaggtgttgcagaatcgaagcaagtgagacatgttcctgttgggttttgtgccttaaa

SEQ ID NO: 323626 - DNA, 2918 bp, Cannabis indica
tttttaagctaatattaaaatttagttacgtatttttctttatattttcaatctaatattaaaatttaggtgtgtaattggatatccaattaaaaaaccgatctaatccaattagtaatttgattggattggattttaaggtctaattggattgaatcggatgatgattttccaaatctaattacttattggattggatcggatgaggaaagaaaggttggattggagcggatgtccacccctaattaaatctaataaaatattttgttaaataaatctattttataaataaaatatgtatactaataataattgaccaaattttttaattattcaaatttcagtttgttacgtttcgattaattttgatttgtcatttcccgcgtggaccaataaatattggttagtacgtatatatgttgctttctaaaatgctgtcctcatatttagctctttaaaacctccctttcacatctcgatctttgtcaagctcatttagactatatctaaactatacgtgaatgattctttaccaacttttgtataaaatttgaaaaaaattaagctatacgtactacctaatctcattcaattagttgagcatattattattgacaaaaatgtcatatgttaaaaccaattaatgaatatccaattatacatattattataccttataataagatgcgagtcatcgcataagcataaataaaataatgagcaaagatatgtacacaaataaattacacacaattgtgacacacatatgtagcaagttacttttaataaatgagattcatcttataaaatacttaattgaagtgacttgacatataaatatgtatcacttttataaatgatttatgtgtacacatatcattactccaaaataatagactaattatgatttttaccttccgaacttttacatgtacaaaatcatgctcctgaactttgaagaccgttaaaagtttcccttgaactattgagattgatgcatttaaggacttttctctaattttagtaaggaaagtctaacatggataaaagttcagagaacatgattttgcacatatcaaagttcgaggggcacaatttggtaaatatcaaagtttagggtgcatgatttagttcatggacaatcaccaaactagtaaaattgaacagaattagaaaaaaaaagtcctcaaatccaacaatctcgacagtttaggggaaatttttaactgctagaaaagtttagggggcatgatttggtacatgtcagagttgaggggacaaaattcttaattagccaaaataatatatctaatttaatattgggtaaatactattttggaccttgtattttgcaaaagttaccaattggaccctctattttgttaaatgacaaaatgaaccctatatttttcaaaattgttaatggtccacatcttgctggatgggcatttacaggtcattattaggggtccagatcttgctcgagactcaggcaaagctcgagaaaagtatgcccgagccttacagtacgaacaaattgaaacagtctgggtcgtggaagagagaaaaccaaaaataccacgggtaaaggagccaacaataacattcactgaagcagatgaaagccacgtccatttcctgtaaaacgaacccctggtcgtggaagtgaaaattgcaaatagaaagtggcagaaactatgatagacaatggagcttcctcaaacattttatttaaaataacctatgagaagatgagactctagcttagagatttgatccccctacatctagctcgtatatgatttctctggccagagcgtttcacctctgggataaattcgctacccctcactgttggacaagctccgaggagcataattgtgattgcacaattttgataattgatgtttcatcggcttttaatgttatgttaggtcgaccgatcctatttgatttaaaagttgttacattagtcttccatatgtgcgtcaagttcctaataaaaaatggagtacggtgtctcaaaggaaacaaacgaattgtatgggaatgctacaacattgctctaaccaaggtcaagaaggaaaataccttcggccagagatcagacgaagaaaatagcattgcccaatatgaagtcgcccaaggctcggatgaagacatgcatccctaacttggggacacaaacaaaataggtgtgccaattgaagaaattgaagaggtggaaattgacaaaaaaatcatgtctaggaaactcaaaatcagtaagggtatgttgctagaaataaaattagctttaataaaatttttgagagcaaacttggatgtttttgcctagtcacatgaggatatggtcggtattgatcttactctgatgtctcacaccctaaacattgatccaaactttcgtctcgtccagcaaaagagaaaactcctggacaaagaacagacgcatgcactgaaagaggagtttagagagactgcgcgagaataagttcatcattgatgccttctacccagcttgggttactaatcccgtactagtacccaagccgaacaaaaaaaggccagtatgtattgattttaccgacctcaataaggggtgtcctaaggactgttttccacttctaaggtttaatcaactcgtggatgcaatagtcgaacatgaaatcctaatcttcatggatgcctagggtataatcaaatcaaaatgcatccaccagaccaagaacatacaagtttttgaacagatatgggtctgtactattgcaaagtaatgtcgtttaatctgaagaatgttagggctacctactagagactagtaaacaaaatgtttaaagatgaaatcggacaaaatatggaggtatatctggatgaatgcttcaaaatccttagaaaatacaacatgaaactcaatc

SEQ ID NO: 323627 - DNA, 1123 bp, Cannabis indica
tttaaggttagaatttatggcttcgatatttaaaataaagacaattttggctaaagatatcataagcacaaaagaacccacaagcttctcataattttaaaatttcccgaagtgttcccataaatacagtgcattgatgaatcatgggacataagttttgaaacatataatcacaattaccttccactatgttgacatcactgtaattgtgaataaatatatgttctggatttaatagaaattgtgtattaaaccacaatcctgaaaataacatgctaacttaaatgacttctaaccttctattggtaacaaataagattatattgaaatgagttttatttagggcataaaatcccaacaataatatgataaaaaatatatatataaattagagaaacaagctaaatttgcataaaaatggggttaaatagagttgtttttcatcttggtagtttagagatgtttgggagcaagaatggagcaaaaatgcaaaaattgggaaaatagtcagccggggccatggctccagaagagacaaatgtgcaggaatgacctaggggctgcggctccaccataggggtctgtagctccagaagcaaaaatttaaaaaacaaatataaaaagatcacgaaaaaagatttctttctcaagtggagctgtagctcgggtaccccgagctacggggctcctgagcacattttttttttctatcctttcaagtttaaatttttatctttttggtatcttttagggaacttttttagcctatataaacacattatctttagtgtttttagtacatttttcagagctcaaaacccagaaacttatatgtaacgcccgtattttatatttactaaactcgaaagataactttaatatattatatctttatcaccatatggctcgtgatcccgagtatcaaaatacaatttaaaagtattttactaatatgtacatataatattttttttaaaacgcgctaatatgcaacctcaaaatacagactccaaaatagtaaaagaccgaaaccctccaggctgcactgccacaatatgtacaatcactgccgagctctatctcactgttcctccagctttgcttttcctttacctacacaagg

SEQ ID NO: 323628 - DNA, 660 bp, Cannabis indica
tggacacagtgtacacgtagcacaattttattggtccacgtaaaaaattatttaaaaaaattagaataaaattattttgaaattaaaaaaaaattataaataaaaaaataatttttctttctttttgtctttcttttttttcctttctttctttttctttttctttctttttttttcttttctttcttggagttatttacacccccaattctcatcgtcgggaactgattcacatacaaagacctttcgttactagaagccatgttttgagttggtaaaggtggctttgactggctctggtaaaagcttagggaagcaaaagaatagctattcaaatttgtcggttgttccagcggcggttgtggtggaagacccctccagctggttcgttgctcatcgtcgttggagttacgaaatgggtattctcagacgacaacttttgagctgtcgtatcggctaaaccaacatcctcctcaccaactccttcaccgccgccatcgctattcataaaccgagtaaaaattcgctttatttcagggctagatggtcgattaaagaactgttggtttaaatgtggttgcatttttggcctagggtttaaatgtgatttttctgggtttagttttgggaagaacttgattttttctgggcttattattt

SEQ ID NO: 323629 - DNA, 3288 bp, Cannabis indica
aaacttattttatgattatgattttgtgtgatttggttatgaacatattgtttataatgtgtttgtgaaaaatacttggtcaggcatttagaagattggcaacttcaatttaccaactttctaatgtagtctctgaggaggtaccaggaaccttgatttctctcaaactttctggtttacaaatccatcaattgacccaacagcttagaaatctcaggtaaaaattgcttttcctttattgggtcattcattttattggtcttttttggtgcttaataagacctattatatattatatattcatattatttttctgggttttgcaaaggcaaaagatttctccctctgagaaaaaaaccagcaagagcagcaagagtagagccacttcttttggaaagaaacagtaaaaagcatcaaaaaaataatcatcacagagttttattactcactcagttaatataggattgagtgtatctcagtatgtacttacagaaatatgatcttatatgtcttaagaatgaaatgtgctccttcatttatttgaattagaagcatataaattaaaaattacacatatcagatttctgactaaatgtatagaagaaaattagcacaaaaaatgtctgatgctaagcctgattcacagctttgaaattttgtttgtttgtatcagtatataattattttgactgttgtactattattcataactttgcatacttcatgagagcatctcctgcttctttagcattctctggtactggcaggttagataaaagggttaccctagatgatgctaccaagatttcttctccatgtttgaaggatcagttttccatagtttcacttcccacacctgctcaaaaccccaaattaaaggtaattatgatatgaatggtgcttttgaccaattgggggttggggtcacacaacagatagaaaagggataagaacaaacctgaactgttttaccaacagagatgggagtggcttcagccagaacaagttctcccaagtgagcactcttcaagtggttgatactgagttgaattccagctacccttttgtaaccagaagccatgtgagctcccatgctagccagtgattcagctatcaaagctgacacccctccatgtaacaccttgaatggctgctttgaaacatatgttaacaattatatgtaagaaactcaagaatccatacaaagaaagaggaagacctggcaacacttgagggtgataggaaggaaaccagagactttagttgaagagacttgttggaactcaaaaccaatggcctgaagaggaacatccaaatcctctgtctttatctttgatgaagaagatccacttccatctggtgggggtggctgctgctcatccatatgattggaattttgtagataaggttatccctttgttatgatcttttatggtattggtagctatagccttaccttatcatggaaatacagaacaaagaaaccttattttcttatttaatattttcaatgagaagggttggaatggaagaagtaggttgtggtaggtgggagaggaaggaagtgaagatgaaagtctcatcatctaagtggcactgtgtcaacctcaccagtcaactctcattggcctcttttttgtttttgttttggagtttttcaatctttacactttttggtaatttaattttatctcacctcatataattttgggttaagaaggtaggaagtatccaccacaattcatatcacattaaattaaagcatgttgcattactcctttatttatatgatatcttctagcaataaatgcacatccacaatttattaaaaaaggtcaggtagatatctcatatttatagtgatatatatatattttttttgaatatttcttatcttttattattattattagatatttgaatttgagaccctatcaaagaattcccttcgtgtttcatattctctataatgaattaaatttttcttattttaataagacttcattgttaaaatacggatttttttaaatagggtatttcatcttttaaaggttaatgaggatttttcttcttgaattttggcatgtactaaatcatgtctcttgaactttaaaggtcgttaaaaatgctctttaaactattgagatggttggatttaagtaatttttttttaattttagttaaaaaaaatctaatatagatgaaagtccagggagaatggtttagtatataaacaatcactaaaatagtaaaattgaatgaaattagagaaaagtctttaaatccaataatctcaatagttcatgaggcatttttaacgaccttaaaatttcaaggggtgtgatttggtacatgtgaaagtttagggggcaaaaattctaattagcctctaatagaattaaccatgacaaaagaaaaacattacatttacacctaaaattgacataagctatcctaaaaataaaattgaaaaagcttaaagtacttttattttattttttttacgttctttagttataattttaatttaaaaattatatattttattattatttttattcaaataattcttcatatattttttatttaatttttttgtgtcataaattctatttaacatgtggctatgtaataaaattcttggtttaaacggtatttttggtttaactttgaattaaaataaaaagaaaaattatgtaaatataatatattacctaattaaaaaatttaacatacatgtattgcacttaacatcactaaattaaaaagaaaattaatttaaaataattgaattagtgtctactaaggccatcgagaggcaccaccaccaatagctagtaagtttaccttatgggatgaaggttgtagactttcttttgctcgagccaaatttaaaaaattgtagtttactcataaagaccaatctaccatggataattttggaaaatattcaacatagaatttagtgcgcatcccccaaaagaagatgagcaggatagcgttgcccaagctgcatatatcagaaacacaataactcaagaagtcgctaagacacctaaaggggctctccgaggtaatgaccattatttttatagatggtcacctaccgtccttagggcaaaaccaacttgttttgtcaggtttaaagaaaatcaatataatttttatatctgaaattgtgtcgatctcatcgctcatagatttgacagttgatatcttaaagagaaacttacaaaaatactgtattttgacctaattcttacaaaaatactgccacacggtaaaaat

SEQ ID NO: 323630 - DNA, 926 bp, Cannabis indica
gtttttcttttaaatgctagaaggcttttttctttttctttaacaatgttggtcttccaacattaaccacaatttatatgatatatatttttatatttttgtggtaaataaaataccaaattttttcttataaaaaatgttctagaaatatatgatattatttttggaaagaaggctttctaattttacaataaatccaacaaatgagaaaaagtagatatctcatcaaaaccgtccatccaatgatgaattgacaagtgtccatgatgctaaatgggtaggcccaatttagtctctataatagggaaccacaatatagccacccaatttttcatgtcataatacacacaaatgaggtgtgtttagataaatgtccaatttttagtatttgccctatcaccaaaccattagtgaaaatatatgtatatataaggaaaattaatttttttttgttggaattttggatttttatttcttggaaaaaatgttttttttcaataaaatataatctattttttttttttttttggcctagaagtaggaatagaaattgtttggaaagaaagaaagataaaatccaaagtagagtttttagttgtttggggagtacaatataaaaaagaaataaattaaaatttaaaggtgaattttattagagatttttacaaaaaaaatgtcatttttgtcacaattttaacctttatagaaatactttataaatttattttttttcacatacatattcttgctaaacattgaggtaactatttaaacaaaagatattattattttctaaactttctaggtatgtaatactattgtattgtaaaaagaataaaatatattatttaaataatgtaggcaaaaaaaattaatgtatagtgcaaagtaaatttttttatgaaaaattataattttagtgattt

SEQ ID NO: 323631 - DNA, 704 bp, Cannabis indica
gggtggctatataaccacaaattacaaatgaaaaaaaactacgttcaacagttacaaactatatgtcttcatcaccacaaaaaaaaaaaacaataatatatatttatatgtttcacgtgttactcttcataaattaatctttatttttaaaaaacaaaccctcataattctgtaatcagttcaatttcaaatgatcgagagcgtaatatatgaaatttctctaaaaatttgataataaaaaaatatcatgttcgcaagtcatgagataagttgtaagtacttgctaggattgtgtatatatataatattaaattgtacatatatataagtatacacacaccaacagaacaagagagtgataatcacgtactaataaaaaattaattataaacaaaatttagtatagcatttttttttaaagtttatattattttgagtttttttaaactaaaatctctcaattatcactctatttgcatttaatttaagtttaaattttggtggtaaaactctgaaagtaataaactgtttacaaatttaaagtaccatctatttttcacagttaactaccaacatggactgtttatgtgtacaatcttatacgtgtgacacattcatattggtacacctaatattatcatttaaaaaacataaaattaattcaaattttatactattttttattttataaatattttattttt

SEQ ID NO: 323632 - DNA, 1175 bp, Cannabis indica
tcatgacctatgcccgaacaattgtaacataccagaggaatccactcatatttgacatccaactctatctcatgatcatattcatcaataaacgaaatctgtttagggaattcttgagagagactcacctgaattagtactctggggtattgaagcctatccctgttctttgtgacttgatccacttggagtggctctcccagttgccccactatcttgaacaatgaagactctccccaatatttgatatccaatccttgcagttgaacccatgttggtacagaggtgacttcttcattggtgaaatcatccaccgagttccatggtttcattaccattggcttcctgtcaaaaaaatacatacccttgctccagaactctgtcccgtgtttccaaattctgaaattggataataaaaatgcctttagcaagcaaaccgactttcacgactgcaaccttccatatcctgcgaacaaacccatcgagtatgttgattggagggttagctccaataacatagcacacaatcgacggctgccagtaattgacctcctcggcaatgtcttcaaagtcaatcttcaccttcacattccttttcgcaccagcatcagcaaccctcggttgtgacttagccatcttcacagttgtcttttcaaaacatgattctaggtttcgtgcaatattagatctgagaattggaggagaaggattcttccccattctcacatcctgagaagcacgatttgcccccgtgagccaatcaaaaaaatccagatggatttcacttgcaggcgaaggcgcaccatccgagcactgttccattgcctcactactctgtttcatttcttcagcattctcaacatcctcatcaatctccaattcttgaattccaatcaaagcatccatggatctagttttaataaccctgtccgaagaagatggaccagatttctttcccttagctttagctttcccggacattttccccctttttgccatagcaccagcgagtcaccgaaagagagagaaaaacagagacaaacagagaaaagttcccaagtcaactttaacaatgggtccaattcattcttaatagtcttcctccggagtataatgaatttgttgtttcttacatgatcaacaatttcaactcctccgacatggacaagctcgaa

SEQ ID NO: 323633 - DNA, 1460 bp, Cannabis indica
cgtatttccctttcattagtcactcttctaagcccaatggaatgttttttctccttatttgttttgtatgtgtaagttgacctttataatttgattttcagttgattcatggccttgtggatagaattatggaagtgattggagctccttttgttccgcttggtgacaatacagggtactctataaaaccatcagaagtgagtattttctcgatttgagttttctttggctaccttggacatttaaggttaccatacttactttgtttgtaccttgtgaaggaacctgagtatcttcgtggaagacaagctagcatcatttacaaagggaattgcattggcacatttggcattgtgcaccctgaggtagatttcattacattatgtcgagtattattaatttagtctcacaagttggctacaacctacaaccatcaacttctatacacacaacttcatccaaatcaccttttttttttaatcgaaaagaagaaataagtgtttacttgtttggcttctcaggtattaaacaacttcgacatccccgatccatgctcttttgtagaacttactattgaaaggttcttttagttgctataccatggcagctgacagcatatgtacgtcatcgctcatttatctttataccaattttctttgcacctgaaggaacttttttttttttgataaggtttgaagttaattggctcttcaacttgctcttcaactttcaagattacattgtactttttctaacaacactaatgtttgttattttagatttgcaggtattgtaagatcatggagttgatttaaaacctgtaatggtcgtagtacaatttcaaatcctatatctgattgcagagtcaatttgatatcctactgtttggagacccccgatttttatttaaggtttgaagttaattggctgatgtagttttgatgtatttatagtgttttgtcacaaacaaaaagagaaaaagcccgtgtcttccaataaaacaatcaacattaatatgttaaaaacagcttcaatttaaacattttacattattttcacgatcatcatcattggctactactagtcctgtaaataggagttgagttttgacacgagttcgaaaggcatgagcataacatggcatgaaaaaatacgggtttgaatacgacacgacatgatgctgtaaattggcatgacatactacaaaaatatctttaagcacaatatggcacgagaagcacaaatagactagtttaaaaagtatgacacgcggcaaactcgaaaagtacgacacggcataataagacataataaaatatgaatttatcaattataaatacaaaaattatatttacattctataaagagaaatttgcggccaaacccctctatgtttcaattgttaaacacttaaccccctcttctttgtttttggtggtaatacccccttatctttaatt

SEQ ID NO: 323634 - DNA, 853 bp, Cannabis indica
ttaaaaaatattactaactaatcataaaacactacctataaactagtgtctaataataatactttaaattatatattgtactaataaaaatattatacttagaactatatacaccattgatacattctaacatttctgttatttgaattgtaaaaagaagaaacgacatgaatgttgggcaatacttatttgatggttttccaaaccaaataccactattttaatgaaatttattaaacaaaatgaataggtgggttttttaaatacaatcttaaaaaaatagagaaacgacaactagaaaatgaatgtgattgcctactacctttgtcgtttgttttattctttttttattatgaaaaagaaaagaaaaatgttgtgattgtgaacacgttttaggacaaaccaagcttcctattataaagtaagatttgtcattattatttatagaatcttcacatttataaaaatagaaataaatatatttataataaagctatgtgtggctactttattttttttttaaaaaaataatatctattattattatcaacatttttttaataattaatgttggtctaacttgaatatttttgtccaaagaaaatatattattcttctttctataaaagtgacaaattatattaagacataaagaccgaccaatattttaaaatttaaacttttaaaaaaataaaaataaaattttaaaaaattaattaaaatataagaaagtgacattaaccgtccataaccaagtctctacatctttttttttttttggatatggataatacattctactaattaatttaattaattaccaaagggaaatttgattttctatacttagaaa

SEQ ID NO: 323635 - DNA, 626 bp, Cannabis indica
aaaaaaaattaccaacactattattcaaacaaaataaaaaagaataaacacaatcgaccatgtcaaagatgactaatgaaagatggaatcctagggccaaaataaactaggaatccccgttgatcttactactgagataggaaaaatcattctagccgatacaaatgcaacatgaaccaaatgaagtagcattgccgatccaccgaatggctaaaatcccgtacaacaaataaaaaatactctactacataataacgatatcaataagaagtattgtaatacaattattgaaaataaaaataacacaataaaatatgtaaagtccatgcagtagataaagaaccactccaagaaaaccacattgacgtcccaaaaaagcatccatcaatgttagtcgcacctctatcagcagtgaacagccaaaccccacatctatcaagtaatctcgcattatagtaccactgaacagaacgaaagggtaggaaaatcaccaggactaaaggcttagtagtactttcgttgaagatgttgttagggtttatttcttattattgtaaacggattaattagtcttgttaggatttataaaacactcaagaaatatatatcatagatctaaacatatt

SEQ ID NO: 323636 - DNA, 569 bp, Cannabis indica
aaaaaaagaagtggctcactatgccgaccgatcttttttgtttgctgtacaaataaaatgtaaaaattaccatatgaccggtaccaaaacaccctaacactcggtataacctttcccataaaaacctatatgatttcccccataacactccaataaaagcccatgcaaccttgaaagttgtgcaactacattacttgaaaatatatttcttcaagtggaacacatttccaaagaaaaaaaagtggctcactatgcccaccgagcttatactttcctttacaaagtgtaacttcatcacgcaaaaagcacatctaatcacgctacattgacctttgtaaagtgaaaatgggataacttgtaaggtccctgcttcaagcctccattgggtccttccacccacggactcatggctcttatacacgagtacgtcactctggctgcttcatggactgacgactagccctacagaccaacacgagtgttttcagcgtgctttgtcctcactcacacgcatcctgggaaaacttcccaggaggtcacccatccttaaaattgctccaggccaagca

SEQ ID NO: 323637 - DNA, 1236 bp, Cannabis indica
aatgtcaattaaatgtgtgttaaaaataaaaattagttattatattaaaaaaaaaatatatgattctttcaaaaataaaaattaaaataaataatattgtttttttagaaaataaataacagtgttaatgtcaattaaatgtgtgttaaactttttttattcgtaaaaaatgtaaaacaaaatttaaaatggtgggtttgagcttatggttatggatgaaaaaaccggttcataattcttgtcttttacttaatatttttttttgtcaaaataaaaatatttttgaataacatgattattaaaatataactataaaaataattttaaaagatgaaaaacatcctaaaataacttataaaagaataaatccagaaccatcatttcattaacattgtgagagcttaaaatatcttatattaaatgtggttatttaataaaaattattggtttaatagtttttttcgttaaaattaacggttaaaactaacattgttaaattaattaattatcttttttaaaaatatatattttaaatatctaaatttaatttatttattaaaatataacttagataattatttgaaagtacagaaaaaagaaaaattagataattattttttatataaattttaatataaaattaaattaaatattaattattaattaatcatactttataataaatttattagttatatcttttataaataaactaatttacttattttattatttaataaaattagttagatatatttttttgaaatttttacactaaaaatctaaaatgataaatttattacattaatacctatacacggctaaaccaacttttttacacatcttttatattttattactattttaccacatgcacacacaattcaaccttttttgacacgtgattgattgattgatgcattacatcaatcactctatacatcatttctctcttttttctcttctttttccttttattttctatttctttttcagttttttttttaaaaaaataataaccttcatagctaacacttccctcttcacaatcacaactccattttcactcttctttttgttcttcaaattttttttcaactcccatcaaccgttttctctctttttatttttctcttaatatataaatatggttgtaacttattcttcatcaactccttcccttgttcaaaaaaaaatttctaaaatggagttgaaatctttagctaatagaaacaa

SEQ ID NO: 323638 - DNA, 1028 bp, Cannabis indica
ggagatattgtgtttctttttttgtacaaatatactaaacattgttactattttgggtttagttttttgtttgttgttttgtctattgaacttaactttgtcagattgtaagctgacttgattttacctttggatagttagtgtttttttgtgcttagctttttgttttctttcttgaatattttgcttggttgttgatcataatttgctaagggggagactgtaagtgccatgtttttgtatggaaaattatgttgctttatattggtttagttgtgttttgttctagtttttcttctgacttttgagttgtttatctaagttggtcttagttgcatctgtttggtctgaattaatttttcttttgccaagtcaattttttagtttgtttcattagttagttcagcttgttgctagatggcttgaactgttgagttagtagttagttagttgagtcaattttactgaagtgtaagatatattaagctcatctagctttttctaactagctttccatctttgatagaatctttttgcgattcttgctctgctaggagaaaatactttttctaactagctctccatctttgatagaatctttttgtgattctagctctttgttgattgtgtattgcagatcgtaattcattggatcttcaagggttgaagaacgagtgtgaatctacaatgtttgaagggagtttagactgatctgctggagagaattcagcttggtggaagcaagtggatcttgtcttttcagatctaagtggacttagatctttgttcttaattagttaattgtattcaagtgtatcgtctggtaactctcgtgtaagaccttttcaaattatgttattgatttgtaaatcagaactagtgaatgtattctaaatgattttatagtggatgttactttaccctgttattggggacccaaacactactcgatgggaatgtatttctaatatagagaaaatttataaattctgtattcattgatttttctttcttgttttaattcatca

SEQ ID NO: 323639 - DNA, 1152 bp, Cannabis indica
gaaaaggaagggaaactttattaatcaacttagccataacaataggtaaaacatcagtaggagtattgttctcatttaaaatacgatttgaatagaaacaagagttgcgagcaacacagtaaatcgctttatttacaaacctttaacaaaaactatcttaacagatttcatagaatctaacaaacccctacatttttgaaccacctgactaaacaaagattgcatgtgaatgacactaagtacgatttgaacaaccaccaaataatctgtctcaagttaaacatcaaaccacccttttttcttatccaacctcgggcctctttgattccaacgacctccacaaaaaaagcctcaacctacccatgaaaattcattgaaaagccttccaaaagagtgttagaaccatcacaagctacaagtcccacaccaaattgaaaaatttcatggttgataaagggtaaaaagaactagtttttagggaaatttacactaagtgactctttttaccaatattaaacatttatacttgtcttattttttttttttaacttttttactttttaaatttttctttaatactatttataaagtttgatatttacaattatacagtttatagtatttcttcttcatcctcctattcacacaaatccacttcaaaagacaaccatctccaccctttccatctcgcatccaacctctcttgtatccagctctctcgtcccagccctcgatatcatgtaaaacctctactcaatcttctatgtcgtagtctagggagaaagagagacacttcacatttatttccctcttgatcaagccatctccctctttttcaaatttatttttgctgctattaatattttttgaagcttcgatttgtaagttgttcttcttcttttctttttccttttcaaattacattaataaaagtttagatttgaaagtttaataagaatattgttgtagtgtgattgtttattattgattctactcatttgccctcaaattttgtaaattttttcttcttctttaagttgaattttttgttaatctgtatataagggcataccttccaagtgtttgacgaaatgcctaacatagttatttttaatcacttgcctaaaaaaagagggtgtcttcaattgtgct

SEQ ID NO: 323640 - DNA, 420 bp, Cannabis indica
gatctgatctgatggctgctgaattggttggaggagcgcttctctctgctttccttgctccgttggtggaaaagttagctcatgaggtcaaggacttcttcaaagggaaagatgccattctcaagctggtgaaggagtgcttattaatttgatcaaaaggttaatctctactctacttgttaaggcctttcaaatgaatagcttccatttaaagtgaatttgaatgtgaatgaacatattgtaaacacaacacaagctcttactctaaatcatgttccgaatcgtcaggcttctgtcttaaccttggatttgctgggctacatacaaacttggatgatgcttctctaacttcactcgctcttgtttctaaccaccattgctatctttgtgtgtgtatctatctatattgtatcaaagatt

SEQ ID NO: 323641 - DNA, 586 bp, Cannabis indica
atttgagttactcaaaacaggtagagatgttcttattcccataaactgttcttgtttgggtcaattttttcagtcaaattttagtacacaaggattactctttacttagaaaatccatttgtaacaagaaataatgtcgaagctggttcaagaacaaataaataaaacaaaattaattataataacattattttacaaataacacaaaaagaataacaaattaacaataacattaatcttcaagaaattacagtatttttattattaattatacgtacctcttcttattatcaggaggtggtgggggtggaggatcatgtgggtgatcaccttccattacagtactagtatccatttgaagttgtggtctcgtggaagaagaagaagaacaagaacaagaacaagaagaagaacgagaacaagaagaagaagaagaagaagaagaacgagaacaagaagaagaagatcacttatatacccttttatatttatattgtactcttttatttttatcattttttttaaattctatcatttttacttttttttaaacataccaattttgtccctgtcacttcaagatact

SEQ ID NO: 323642 - DNA, 1348 bp, Cannabis indica
ccaaacccgaaggagagaaagagatccaggctcagatcttaataacactctacgacagaaaagaacaacggttagagatctgagcggaatgagtcattattctgctgcaaccaatgtagaaggtctaaaaactcatatgtgtaaaattcaataatttagagatattcatatttaggatgttaatgaaacctactagttagtaaatctagatcctggtaaaatattcccaacagatttatccagctatacccctcaatcaaatccttaaaattacaaccttatttaatgttgaaaaaactgataattgctccatttttgataattaagccaattattaagttccctaaactaaattttaaacaaaatcaaattttatgaatatgtcagccatattaacaaaatagtaacctctgaaaatcatattcaatccataaccacccaaataaatattaaaacatttatacttctggaagttatattcaatccataaatacccaaataaatcttaaaacattttccagctaaaggcaacctcttattcatgtataaagaaaacccatcatttcaaaacacagcaaaactgatcatccaatcttttgttttcttctcctaataaaattattatatctaacataattagaatttgaaagagattatcaaattttagtttttactagcaaaagaaattaaaacaaaaataaaacaaaattaaactaagattaaagcaggttccaaaattgaaaagtccactcgcatctgtgtgtatattttcaaaacattgatgagagtcccatatgctaaatcgccatatttgtcatactaccatactatgtcgatcaagacaaaaggctccaagttatcattaaaacttgcaatcttgctattcacaaaaaagaaaattaattttgtattaaagcaaaactttatttcacaaactaaatttatcataccaacaaaaaatagccttactggtcttaccaaccattttacaaccatattggtttacccaaaaacaacaaaaccatactgtattacaaacagaacaagaacagagagaaaagaaaattgaagagaggaaaagtagtttctgtatattgaatagaaaagaaaggaattacaacaccttatatcagcacagctgatgagaactaacaaactgaaatacaaacagaattcagttatcaactaaactaaaaataacagactttactaactgatgacagctcagccaaactaacaacttcttctcttcacatcttgattacctccccctcaagatggagctatgtatatcaacaagccccatctgtctttaagcagcttgaactcagcaggaacaatggcttgg

SEQ ID NO: 323643 - DNA, 527 bp, Cannabis indica
aaacaatgttcaaacagtctattttacacgcgtataaaataaaatagtcacgcgtacaacacactgtttgaacgtagttttcagcgtgttaaacttttccaaatttcttaaaattttacaggttgttttaaataactataacgtatatgaccatgaagaaaaaattgactaaaaaattatttcggatgctaaaatagataggggtgcatcaatatatctattttaagggggtgtattatagaattttccttattcataaataataaattacaaaaatatttacaatttataagattttatttcttttatttattaatattattttgataaaattgatgcataagtctctaaaaatttatatttgatagaaataagtttttaatttaaaaaattaatattaatagttctcaagatcattatttttgtaagtatgtctttatataatttaacagatttgttaagtgttgacaagaatgtcatgtattgaaagattattagtgcaaatcataatttaattaaaaaaaaaa

SEQ ID NO: 323644 - DNA, 1329 bp, Cannabis indica
agattattgaatttaaagacttttatcaaattttagtaaaaaaagtcgaacatggatgaaagtttagggggcacaatttagtacatgttaaagttcgaggggtatgatttggtagatatcaaagtatggggaggatggtttagtagataaataatcactgaaatagtaaaattgaatgaaattagataaaagtccttaaatctaacaatctaaaaagttcagggtgaatttttaacgaccagaatagttcaagggacatgatgtggtacatgtcaaagttcaggggtaaaaattttaattaatcttttaataaactcgaccccaacactgactacgggttgggtttgagtccagggtctaggtcccgatttaggtctgggtcttgagtctcaggtgtcgagtctcaagtttgggtttgggttcgggttcgggtctcaactctcaagtctcgagtctcgagtccaggtcccaagcctaggtttgggtcccgggtcctgtgtttgaggacaagtctaggcctgggtcctaggtccaggtcctgggtctagatttaggtttgggtctctgagtctagtttcgggtccaggttttgggtccaggttttgggtccgagtccagtcatgagtttgggtctcggttctagtctgggtccaagtctcgagtctgagtttaggttcgggtttgagtttaggttcgggttcaagtccgggactgggaatgggtctcgggtctaggtctgatcctaagttcatgtctcgggtctgggttcgggtctcaggttccatgttcgggtcttgatctgagtccaggtctgggtttgggtccaggttttgggtctaggtctgggtttgggtttgagtctagttcttgggtcccgattcgggtgaatcccgagtcgaggtttgggtctgggtccgggtctaagtctgggtctgggtccaagtccatgttcggtcctgggttcagtaggttttacagtcaaaatttcagtttgtgtggttaagtgttaacaaatataaagttcaagtgattttgccgccaatatcccatttttatataagagaattttatttgcaccccacaaaatgattataagtatattctaatatttcaaaaagttgagcataaaattatattttgaaaattactcttaatattttaatttttttctcacattattttgtgttgatttcaatacttatttatgtttattttcataatatttctttgcatcatgtataatttttttatttttttccaatgaaatttcacatcatttttattttatttttttgttataatatttaaaatataatttatttttgtttg

SEQ ID NO: 323645 - DNA, 2150 bp, Cannabis indica
cgtagatttattattatttaaaaaatttcatatcataccttgttttggattcgagggggagctccagatctgtttaatacagatctacattgcatgaatctggattattcgattctggagggagttattttgaacgattaaaatcgaaatcaaatgtttaatttcagtttcttcccaattttttctggttttttcttcataattttctgtttagatcattgcagttcttcttttccaatcaattttcgcgagaatttatggttgtattaccctcattttggtttcattctggttgtgttgcagatatgaacgatggaggtatgttcatcttctccgttcattccgtgcagcttaaggtataaaccaggtggtatttttgtaattttttaatcctgggctgtataaatgttgaatgggtcggcccattgtaattttgtaattttttgaaatttttctatttttttcccttctaaataagtataacaaaaatatgacaaattctataccataaaaaagttcaaaagacataaaataccataaaaaatgaaaccaacaaaaacatggtatatttttcaaatattgtttcaaaagcccatattaagtcataaaccacaacttgacttcaaataattcaactaaggcatcctttctaataacgttatttccaagaaattattacatagagatataaacaatgctattttcctttttaattaccccacttgtcctaccgtgaaggagacttctaaactttgaccaatatttattattagtatccacaccatatacataaatataaaggtttacatagaaagaacacaaagattaaagccggtcttctcatatcgtttatcctctctcatccttctcagttgtctgtttcatttgattcatagatggatttagagcaagaagagatgcaattccttggagtgtttgatatacttaaagaagcctacaaaatcatcctcacatgtagaaaaatcttcagccaaataacgcttaccttaatcttccctctatccctcttgattttaatccacatagaagtctctgacatccttttccgcaacataatccacaaccaggtcgacctggtggatacccaagttggaacacccaagtacaacaccctctctcgccacatctcctccgaatggacctatctttggctcttcaaaggtctttacttcactttcctcctcatcttctccctcctctccacctctgcagtcgtctacaccgttgcctcggtctacaccgcccgagaattatccttcaaaaaggtcatcagtgtcgttcccaaggtttggaagcgcctcatgataaccttcttgtggaccttcctggccttcttcctctacaacttcctcgccttaattatattgtttatctttgctgttataatggttgaatattcattccagtcggggttggttatgcttgtcgtttgggggttgttgtatgttgcaggaaacatatacatgagtctgatttggcagctggcatctgtcgtttctgttcttgaagaagttcgtgggattcaagccatgaagaagagcaaagcgttgatcaaaggaaagatgtggacatccattttcttatttgggattctcacagttttcagcttcctcttccaattcacctttcagaagcttgtcgttcacggatggtcgtttgggttgtttggtagagcagcatacggtgtcgtttgcttgttggtcttcgtcgtgttgatgcttttggggcttgttacacagaccattctttacttcgtttgcaaatcttatcaccatgagaacatagacaagtcagctctttccaatcaccttgaggtttatctactcggagaatatgtccctctcaagaccaaggatgttcaacttcaacactttgaagtttaattttttgatcatcatttacttatctgtgtgtgatcaagtcttaatctggtgttttcctttggttttcttttagagtatataatttagttacatactagttataaataagatatgatgaatctggattccactgcattaatgaaaagaagaaacacattttttttccccaaatcaattgtttggccttactttatagtttttccatgaacacatctttttccttgcaaaccgttgctatttaataaa

SEQ ID NO: 323646 - DNA, 1857 bp, Cannabis indica
caaagggtgagggaggaaggggcatatcgcaaaatgagaacccaagaggtcgccgagcaacatgaatttatctgctgaggtaagaccgtaatgggagaaacatcatatagtcttaagaaggggcttcagccaaagaatctcatgcaaggggacactgcattggcaccctctctcaagagcaaagcgaccagaagttatctcccctcaaccatgatggagagcagcacgatgatgggatgagaggaatactacccgcgggctccatgcaaactgctgggaaaatccaagttccgttcaccaactctcgagaaagagtgaaaaagagaatgagagagctagaagcagagatgcaggatctacgtcgaaggatggctaggacatcaaaggaagattcgaaggatgatgaactcgatgaggagtccacgaattcaaatggaaccacttccacccaatttcaaggagcctcgcatgatgcatatgatggtacactgacctaaaataccatctaggagcttttagtgcgctaatgaagatgaagagggtgtcttgcaaggcaaagtgctaatgccttgtggttacacttgaagggatcgcatacaagtggttcaagaggtatgaacctggaacaattacatcgtgggaacaatttttaaaggaattccttcaacaacataaagtggtgagtaattacattatgcctataatgagtatcaccgatgtaaagtaaggggagaaagaaggcttaagggggtacatccaatgctttaatgctgaagtcgccaaagtaggaagaatgtccaacaaagaatataagttctccatagatgctggaatatgccgtgggagtagattatgggggatatgttgaaaagagaattggatgacgttgaagacttctacgagagagcaaaaagatatacctgcatcgaggaaggcgacagagtcttggaaataaacacaagcaaatgtacttcgggaagctttctggactcctatagggtctactaggtaataaccccgatgctcatacatccaaggaaagcctacgctatacaacccataaaaataaatatccaagatatccccttaagcaaagttcccctacacaagaagaagttcataagtgtgctgcaataaatcaaagaagccactcaggtgggcctccgagtcaagatggatgatgttggacacttggaggcaccaaaaaaaagagaaagggggataattttcaaattgataaggactagctacccttggtcaatgagagaaatgatcctacttctcccaacaaaagttacttagccgcaagaggtcttgaaagacactcatggcataatgctgaaatgagagggacgcctctcatgagtaagcaaaaaattttctcaagagggtagtatggtcaagtgttataaagctccctaccatccaagcaaaaggatggatttacaataagagggagacttctcaaagagccaaaactcccaccaaagtatatgcttgtctaccacaatgaaaaatggcttggccaaagagtgacccctagagttgctcgaccaacgctggttacaaagatggattggccaaagagtggcccctagagttgctcagccaatgccggttacgaaggtggcttggtcagagagtgagcctagagtcgcttgaccaatgccagttgacttggccagagagtgaacacaaggtcacttggccaacgccagttacgaatatcgcttggccagagagtgaacctagggtcactcgaccaacaccggttacaaagatggcttggccagagagtgtcccaaaagtcgctcggccaacgccagttacaaagatggcttggccagagagggaccc

SEQ ID NO: 323647 - DNA, 815 bp, Cannabis indica
aaaaaaaaaatattaatgtgcacttatcattcattatatagggtgtaaatagaatttgctgatgcatattttcctttcactctcaatatctcccctgatctttataatcttttttctcatctttttctctagtcccttttcatttataaaagttatttttcaacaatattcgttgattttacaatgagcaacattatgctagctagcattagagaccataaaattatttaaaatgacccttagctaggtatgatcgtttaaaatatttatttttataaacgatcataattagggtattcaacataaaataaggtttttcataagtgattaaaagtctatctgttgggaaaattaaaaagaaaagaatcgaataggtctaggacctggacaaagcatctagtacagtactgcacaaaatacagacaaaaaaaaaaaaaattaaaaataaaataaataaataaactaataatcaagcacagagtaatcaaaatagtaaaaaaaaaaaaaaaaatcaagaatacttagttgggatataaccagcgtagttaatcgtacttcaaggctagccaacaatgcctatgtcaaatatatccactatctcagaaaagattacaattctctaggttctcaaagattgcaacgcaacaaatgtacatccatcttctctcaatactcttactcttgagttacaatagttcttgctcaactaaaactctcagaaattgaattgcactaggttgatcaggcctaacatatatatatatatatatatatataataaaataggtcgaagatacatgagagacagtacaaac

SEQ ID NO: 323648 - DNA, 2130 bp, Cannabis indica
gttgacatattgtcaacctagggcacttccaaccacaatactaaaaaaatctcaagcattttcttcgtcttcatccaaaactaggaaccaagtgctttcaggagagaaatagataaatctagaggtcaaatagggacccaacgcccaggttggccttagcactggacccaacgctcaggttggccttagcgctggacccaacacccaggttgatactttgtcaacttgggccacttcctttagcagtttagatgaagtcttccaagaatattctctattttcatcaacaattaagagtttagtgctttcgggaaacaaatagagatgtttgggggtcagaagtcttctacgcatattctttggttttatcaaagattaagatacaagtattttggggaatcaaacagattcatttggtggccggaaattaaacccagtgcccaggttgacacctggcactgggccaacgccctggttcatattttgtcaacctaggttgtttccaatcattttcaagaaaaagtgtgctagagattttttccatcatcagaaataatgatgatacaagtgatatcggggagcaaagagatttccagggagcctaaacagggccttagcgccctggttcacaggctgacatgcaacctggttcacatgttttcgcttctcaaacacaatttctactccttgaattcttcttaaaatggtcaaaagtaggggaggagacatcgttcacaatcttgaatgccatagaagtatcaaaatgggccccgggaagcactcatcgcctaggttggcacatgacctggtacgctgtggtctacttatcacaattcaattcagtttcaagtattcgactattttttttgtagtaaatgagagctacagattgtgacaggtcaaattcatactttggtattttacccttttcaacaagctgggatattagcaaaatcagggagtttcaagtcttcccaatttcacaaaatagcgacatctctaagaactggtgaacaacttcaccaggacattgaaacttactaagtggtgtcaacacatcacttatgcatcaaaaaataaaagtcttggacgtttttacactcactcaacattcaggttgacgtcagaatgtcaacttgggcgatgggttgtcaacctgggcgctaggttgtcaacctggtcgtagggtgctgaacaatcttcagtaaaacgaccataactcactcaatattgatctgattgacgtgatttaacttgtattttgaacctatttcgaagatctatcaagtcaagtctcatacatacattgtaattctaaagatttaaggtcaataattcgtcctcaatagagttgtgatttttccagcagataacgtgaaaacaatccgactgatgagattcaaagttcaaaaattgacgatttttactaagagtcaatttttcaccattggatcatcatgagtcatcatcaatggtcaagatcatcccaaactattttttttcttcatatttttttttttgtatttcttaattattatttaataggatctccttccatataaaaggagagctcttctaactcatttttaatattctgaaaagttctcataaggtcaaagcatctctctctactttttttctctagaatttcgagcctcacacttagccaattctttgtaattcttgtgagaaataaaaactcgaagtagacgttgctcgattatcattgcatcacggggagtaaaatactataaatttgttatgtctctcttacttatacttaactcttattacattcttgccaatctagttagcaggcatggccaaatatctgtgcccaaatttctacgtcaacaataacttaacaagctataaaaaagacactaatatactaaaaaaaacacattagaaaaatattaaatattaataaaaagatagtaaataaattaaatcgggtggggagtgtcaactacatctccatctcgtttaatattcggaaacaaaaaacaatctcatcccactctgttctccatttaagcgggaaattcctgctatattattttataatataataataaagtagattaaaatgtgataaatatatgtgaataatatattaagtgtatggta

SEQ ID NO: 323649 - DNA, 552 bp, Cannabis indica
aaatttcttcaatgactatcattcagcataaaaaggaagataaaagccagccctaattcaatatattattcatacaatcatttcctatagaactcacatagcgaaaaacagaaaaatgaggagattaaaaaggaccttgatttggtagtgtttgagttttttgtttcggcggtcattgccatcatcggccgaagtaagacgtcgcttggcggccacgtcagaagagccattaataatggaagagacgtaagtagaggttgcggtggccactgaatcgattgctgctctccacgcggcatctccatcttcctcaccactactactatcactcgggtctcccattaccaattgatgactcagttcagatagccggcggcgactgagttccgattggcgaagttaccgcctacctaaaacctcagctccagcaaattactggttttgggatggatattaccagcatattgggcttggaaggccttaattaaggatgggcctagatgcaaaataaaaagggaaacttacaaaaatactggaatttgggttaacttt

SEQ ID NO: 323650 - DNA, 601 bp, Cannabis indica
tgaggaagaagagtgaaagtgtcaggaatgaagccatattttttcttacttttattgctaatggacgaagttgatcccaaaaagctataagctttagagttagaagaattagagctcttacgccctaaaccaatactatttccattattagtactcttttcaatacttctatggcttcttctggaatttgatgatgaactcttcttctctctacttagtatggagaacaggtttcccatatcatcttcttcttcttcttcttttctttttaaaacaaatcaaatattaatttggattttggaattaaggaaaaatgagtttatatatattatatgtagtttaaagtacaagagagaaccaaaggagtttcaagaaagatgaggaaaagaataatagtaaggattcgaagatgatgatggagtgagcaataaatataatatggtagagtaaagagtgtggtaaagcctaataataaagaagaataaataaagattgtcccatataatatgtttggttggtgtttaactttattcttgttttaacttttagagtgacactcataaaaaactttcatatcatttcaaaatataatattttattt

SEQ ID NO: 323651 - DNA, 707 bp, Cannabis indica
gctgacttagttttatatgaaaaataattttgtggtacatttaaaaaaataataaaaaagagcaagtggttaaaaaaatggtaaaatggtaaaatattaaacaaaaataatatcatgagttaataaaatataatattttaatgatcaaacaaaaattcaattaatcttaatatataaaaaaaaagtgccttaataattaataattatccatgtcagcacaattttaaacattatctctctctattaaatagcaagtttagtttatatataaatatatattattttatactttttgacattttaaaaattttgacaaacaaaagaaaaaaaaataaatttgacactaacttaaaaaaaatacagattttaaatgtaccatttggcatgttcttctcctaccagtaaaagtggggcagcacgcgttagattttattcctcttaaaccatataaaagtaaaataataaaaggaagaaaccaataaaattaaaaaaaaaaataaaaaaaaatatgtgtgtgtcaatacaaaaaagtaaaaacaaaacaccatttaagtcaagtttagtaaaaaaatctatttattatttaattgtccaaaataacttggccaagtattaataacatttttattgtttggatatatatgtttcaatacattatatgttacacttttatttgggcttcctttaacttttattaattagtttta

SEQ ID NO: 323652 - DNA, 917 bp, Cannabis indica
ttttgccacaaataacccttaattgtttggcacctcctatttacatttatttatagtatcatgcctgtctccttaccaaacatagatagatcgttaatgtcttgcctcgtaaccaaacacatacgaaaagctacagcaacaaaagatgatgtatacaatctctttaatatatacatggtgccattaatcataaatttagcgcatatatataatacagagtattgttattatgtaccagtagtgcataataataatatatctagacgccttgtgattgactagtgatattctctaacatacattaaattatatgagactcgatacttaattataccaataacaatagtaacacataaaaaagtactaaatattactgatgccttttaacatttctttataatataatagaggttacatattaaatgttgcgagtagattggccataattaagtatactttaataatttatatctatactataaataaaaattataaaagagtgagtttggatccaaaatttagttattatatttgtttgtggttttatttgttagtgcacttaatgttttgatttttttttttcatttactttaagcttttttaataaatctatactatgtaaagtccaaaattcggttaagttattatttttatattttatttgtttgtggttttgtatgtcatttcattgatttcaatttttttaattacttttaattgttaataaattatttagtattaatcaatactacaatattttttttttttttgaaatagactataatttcttttctattgttttccaaattttggaccaaaagccactcttttatatttagtatataaattaatcaatatttattatttgtttccattactctaatttttttttaaaaaaaaaaaaacgtaaatgataa

SEQ ID NO: 323653 - DNA, 564 bp, Cannabis indica
tttctttcttcttcttcaagcctatcaccaccaccaccacccacagaaacaaccacccaccacaaccgaaaccaccaccacatcacaactcgtcacgatctcagatttaatctaagatcttacaaaaaaataacgactcaaatctaatctagagaagaaaaatctcacatctaaaagaaagagagaaaatcacatatttagaacttagaaaacctcaaatatgaaggccatgaactcaaaaaccttatggtgaggtcatgtctaccaacggtggcctaaacagagctaggccgagtagttgagtgaccttcacagtcgcacgcgacagagaaaggtcgaagatgtattgttcatggtcggagatggtccttcgtagttgaagatgttcgtggccaaagatgcaccgtttgtggcaagatatgcgtcttttgtggccgatgtttggctcgcaaatgtcgacgtacaactgggctgagttgggcagaggcaattttatctactcgttcagtctctctccccatatacgttactactacaaaaatggattttctcgacgtttttaaa

SEQ ID NO: 323654 - DNA, 724 bp, Cannabis indica
tcaacatcgataagaacacgaaaggggatgttatttgcttcattagcatataagtattgcagtcagtcttcgtcagataacgaactgctctggcctagcccaataatgatgcattattctacaaacctactattcatggctttgtctattacgcatattgaaagtatgaggatactttggagatcgagctcccacatcagaatcaaactcatccccactagaggaaaataggagcgaagaactaaaaccattagacatatataacttagaagagaagaatactctagaaacttaggaaataaattttgcttttataggcctgaaaagttgttgggaaggtggagtaataaatatctaacattaattagcattaaatttccaactaaaaatatgttaatgcatgcaaaatgtatttatcaatagtatgtcgatagtgtatcgatgatttttataacttattcttagtctgttgtttgacattaggttgacatgttttcgatagtttggagatagttcatcgataattaaaaataatttgtttcttccatgtgtttaatgcttatatcgatggtatgttgatggttcgtcgacatgttatcattgatgttctaaaatcttcccattaatttttgcttgaatttattgattgtttgtcgacattttatcaatgattttatggaacttgtcaattaatttctttttataatttatcgattgtttgtca

SEQ ID NO: 323655 - DNA, 1030 bp, Cannabis indica
ctgacacatcccggagtgcctttaagctatgctcgcttccgggagtaccttgtactccgggtgcatcttccgggacccatgcgaataacgcttcctggtgtcgtacaaagacttagcagttcttctcaagtaatttgatccacgtgtcccttcctgactggtccacgtatattgggcgattttaggagcaacactatcctttacaattataaatttgtaaagaaaatggagtttctatgcttaaaagtgcatgggttcctaatttaaaatgcctcacttttatacactataatatccaaaatatgttaatctctccatttgcacataaaatacatctattctctctctttctcatttgtttatctcgatctctctcttgtttcaatatctctaattatttcttctcttcgttgaatccacttcccatggtctaaacccaaagatccattgtcgtgaaacccaagagtcactactaaaaaatttgaaattttcgcccattttatactatcgagtaaaaaattctcaacgatctataaaattgttgcaaatattgagtagaatagacaatggtagaaaaatgtcaaggaaaaaaattcccgacaatttaaaatcgtcaactatattcgatactatataggtcacggtttaaaacggtcaactatactacagttgacggttataaattgccgtctacaaacgattttaaatcgttgctatagtggattccttaaaaaaattatcatcttcatccttctcggaatcacttttcacatattttgtagccgctccaaaatctttacaagcttcatccctccaccgtcgttgtactcgtcttcatcctcctcaaaactttcttttacaagttttagattgtttttcacttgatgatcctcgaaattttattcgaatttcttttgcacacacacacacaaatcaagatcaacaaattaaatcatgaataataaaaatttaaacaataaataagagaatgttgtacttacctttgtgctgccacgagagagagagagag

SEQ ID NO: 323656 - DNA, 907 bp, Cannabis indica
tataatatatatatatatatatatttagtagtgtatgcagtcgttagaagaatcaaaatcaaagtcgcaaagctttctctattgcttgcatcagcatatatatatatatatatatatatatatatatatagggaatgggttttcatctgtctttctcggcttaaactagatgaatatacgtataagagagatatataaaaaatatatattataaagcagagcattaatttagaactcttatcatattttgctatttattattatttgcttatgaaaaattatagtagtaatatatgtcgtttgaaaactaaaatatcaattatagctagactaaaactgacaacgaaaaaccaatctgtgtgaaaatcaaaatacattatacaagtagtcttttacttttcttaaaattgattatgaagtaagtcataggtttggtcagacatatagtatatacatatatatgttataagtcaaaaaaaaactttcaaagctatagctaaaactaattataaatatttacttaaattaataattttattttttttttatattttcttcaagttattaaaatttttattttatatatatttgttataaaagtaaacttcattttcattcttgtttaagttgtaaattcctataccaattagagatttttctttttctttttccttttaattttgggatattggggaatattatgtatagaccaatctaaatttagacaattttggcagcacttttctacgcatctggtaatattgagcagaaatattgggcagaaataatgtatgttaaagctaattaacttagaaaataagcatcgctgaaatcagtggcggaactatgttatggtatggggtggccatggcccccccctaatattttggggaattatttttaatat

SEQ ID NO: 323657 - DNA, 1505 bp, Cannabis indica
tattatttgtattttttgacttgttcgttaaagttgaccaattggatcttcccgatacttacatcttgagaagatggtagtacaattgagtaagagcgctagtcacaaatacggaatctatagcttctataaatgcatataagtaaaatgatgatttccttggagcttggctaaacgagattaaatggtggagtacttatttcagtaattatattagtttactgaaatatcatttacaaggagctaagtattgtaaggataaaatacattgaagggtaaaacggtaaatttgtccatactcgatgtaaattatctatagagaatcgttgattatttggattgaaataatagacaattaatagcgtctacatttagaacatatagagcgttcaatataattaatagtacaattttcgaatctatagttgagtcatgagaaattaataagatagagaatttacttagtaaattttagaactacttattgaaaatttgattatataggtttacagtcctcgcactagttgagaaaatattacctcatagactcaattaattgattttaattaatcaatttataaaattctaaacatattatacatttatactaaacatttcttgtagtgttttgtttattaactattatttttatcttaatacatattatatatttacactaaatatattattatataacataaaaatgcgtcaataaaagtgacatttcttatagtgtttaatttattaactattatttttatcttaatacatattatatatttagttaagaatataattatagtaaaaaattattatacctattaaaattattattagtttgaattttaattttagctgtgataaaaattgtaagacataggatgcatgataggaagcaaagttataccatctcactaacaaaaatgagagaattcactaactattctcataaatatgtttctttacatggaaattatatattgtaagcacctccaattctttaattattcattatatttttacaatatttttttgacaacactcaaacctacaatatcatataattgaatatcccaacatgcatgagtgcatgcaactaataatcaacaattcataatttcagaattaggcactaatctagatccaaggcatccctctacagcttcacctaccgtcatgaaaatcctctcttttccaattttgtccataaacttggccaatttgagcttgtgaatcacttgccattttggatttgcaactgctaactgcaaatattaaacaaaaaattacaacattaattaattagttttccgtattccacactttagtaagtattaataagttggaacgccgtattaggtcgtattatattgtattgtattatcttttatgtaaagctatatatggtattcacttttatggacacttaaatatataatattttagtataaattaaagttttatatagtattatataaaaatatgatatataatccaattcaata

SEQ ID NO: 323658 - DNA, 757 bp, Cannabis indica
aaatacagtaaaaaagtaaaaaataccgccgggcagtaatttttgtaaaaaaattgcaaaaattagtataccatgtaaatttccctattagtatgtattaataggctaaataaatggatcatctataactctattaaaagagagaaggttgtttttggactttcttaaagtaaatgacagaaatgtcattgattttcttgattaattactattaaatatacaataaagtgagtatgtagttatgggccaaattatagggcttcgatgaagtaaataataataaagtaaaaacttattaataaataataatacattacaaagttgaaagtcaacattgagagagaaaatatgggttatagtattacctgtagtaatgaaaattattcatataaaataagattaaagctttaaacttaaatgaaagtgggacaactgaatttttgttccatgcaattttgaatataacaattaatatgtataaattaagttggataattatttattttaatttttattatttcataatatgcctgcacttttaaatgtaaatacttatttactttctattttttaatacacaaattatattttatttcacttctttaattagccaacttaattatattttatttcaattatttcttctcatatattattttatttcacttctcataaatctcacgtgcgaagcacgaagattatactagtcacaacataagaatgataatttataattagtcacaattttattactttt

SEQ ID NO: 323659 - DNA, 2001 bp, Cannabis indica
ggcataaaacccaacaacatcaacctgagaatccgcctcaaaggggtaggaatgaccaagtaccactttcggttgatggaagggctgacagtcagaatgcaggaggaaggctaagaaccaggtcagtttttgaatgggtaggccctcgagggggtaaagacctgtgggacaccctcagcagaaatagggacaaccgctgttccaacatagtaaatccacttgagttggttcaaagagactaagtgaatgatggcgtcaatattgctcaacctcaaacagccacagatccagtgatccaggctcggttggacgagttaacccgattggtcaaggaccttactgcaccaaaacccactaacttggatctagaaaggaggagagggtctgctttctcctaaacgatcaacgacctccctattccagcgaagttcaagatgcccacttgcaagtacacgggtactgaagacccactaactcatgtggagaacttcaaaatccaaatgtaccttcaagaaatcagggatgagcttaggcgtcgaatcttccctcaaccctcacggacacggcgcaacaatggtttactaaactacccccaaggagaatcacttcttgggattagtttgaagggttattctatacccaattctcttcagcccgacagataccagtagagttgggtgacttggtcgccattaagtagaagcccaatgagccactaaaagactacattcaacgctttatgcaggagacaaccaaagtaaaaaatttgagtgatgatggcaagtgggctgccatcatggggggcattctggtgggaagtcggttgtggaaggatacaaggcggaaaccaacccatactatgagagacttccttgacagagctgatgagtttattaaattggaagaagccgagcaaaacgctcaaggcttcaaccacactaagaacaaaaagaacagaacaggctcgaatagtcaaagctcttaagggggtaatggtaagagtggctccaacaatggagagatagggaataacggtaatgatggtaacaacaatgacaaaaagagactaaagaatacccctaagccagccaggagagatccaaccccaaggttcactacctacaacatactcctggacacaagagaaaacatctacaatgcaactcactcggtggtgccataccgtaagccttatcccatgagaaaggacattagcaagtgtgacatgaacaagttttgtcgattccacaatgactacgaccatgacaatgatgagtgcaacaatctaaatgaggagatagagttcctcatcagacaaaacaacccccacttgaaaagatatgtacgtcgacacaacgaccggcccccacgacaacaacaagcagctggagatgaccaacaattgttacctccccccattgctggctgtttggacgttatatttggaggacctcaccttgccgggaactccagaaaatcccaggagaaatacgatcggtctctgtgacatgagccaggtgacgatgtgttggctgtccaggagcgacctcccaaacaacctcggtatgaacatgagtcaatcacgttctttgaggacgacaccaaacacgttcgatacccacacaacaaccccttggtagtagaagtacaaatcgccaatatgattgtagcaaggacaatgatcgataatgggtcgtcagctaatatcctcttcaagtcttcattggaaagaattggtttgggagcaaaggatttggaaccctgtgaacatctcatctatggattcataggaaatggtataacctcaactgggcttattaagctaccgttgacggtgggaacatcccccaagagtgtcactatcatggcgttattcgtggtattggatatagaatcaccctacaacgccttaattggtcgttcgaccctgtatgacctgaaagcagtcacctacatctttcacctcctcgtcaaattccctaccaagggtggaattggcta

SEQ ID NO: 323660 - DNA, 750 bp, Cannabis indica
aatgaaatcaattaataaagtatcaaagattacaaaaataattgactaaatatataaatttagactttctctaataatttatcacaaccctttgtaatccacattgcaaatctgatctctgaaccacacaaagtagtgaattttcttcaactattgatgtgtgtttacttcctctcaaagtaagacttaaacaaatttttttccaaaaatatatgctcacttctttacgaaatgagacttcaaaaagtcttctcccaaagatccacacttgttcaaagcttccattcaacatattctatgaatagtacgagatcataataagaaaattaaaaattttataaatgtaacactcttctcacaaaaatagatataaaaatatgatactataagagataaaaaatatttgagtaatctctatacccgatttatataatatagaaacataaaaacaatcacagacacgttttcaaagttctacaagacttttttaaagaaaatcgttgatttactatatcaaattttgattctagtgccgcaaagaagaaaataaaagttatttaatttgctatatacataccaaaaactaaattaacatttaaagaaaaacaaatcatatttttaaaaaataagcaactttccataaaaaaaattcttaacaagtttcctaaaagctgtaaatacatctcttcttaaagaaaaagagcaatcaaactcataaaattaacacaagaaaatttattttaattacat

SEQ ID NO: 323661 - DNA, 675 bp, Cannabis indica
ttaactgagttatttttatattaatagtaataatatataggttaattaggatttttgtcccttgaactttgacatgtaccaaatcataccatctgaactaactatggacattaaatatggacattataacatatagcaataatacatattaaaaaaaatgactctacataaaattatttttaataccttgaagcattatcttatattatatacccataaaattattatattaaaaaatacaaaagattacacaaatataaaagtaaaataagtttagtatagtaaaaactaactattattccttaaaagcaatacaattactacagttagttctcttaaaatatatgatttaatttgattttattacggaatttagagaataatttatttaaccaaatataattaatttctctagtttcatgtctaagacaaatttagatgtaaatcaatattggtttatcatgatcttgtccctcttattttaaattatattttctattaatttgaaagaaatatatctatatgattaacaaatagtactttttctatgtttcaaatattatgaaattagatatattaatgagatgggatgattaacctaacaagcactataaaaattttacttttagtcacaacaaaatttgtgactaaagataaaaaattgtggctaattat

SEQ ID NO: 323662 - DNA, 981 bp, Cannabis indica
agttgacctagttgaccgggtcaacccggccaatcgaaatccgccaacctgccaacccgtgccctatatgggtccgaacttggttttatatgtttttttaacttgaaacctgcgaacccgaaacccagtaaattcgcccataaagattacattagtttttatatgttacaaaatctaattaagaaaaaaagataaataatgtgacagatctatttattatcattacaaactaaaccaaaaccttatacttcagtatttattattattatttagttttttgcttttaagtctatttttttagtattattattattattatttggttagttacataatgtttttatattatactttttaaaattatttgtaattttttctatatatttataatatttttacttaattaattaactttttttaatttaaaatctcatattaaaatatattgattatatttattttgttcattttgttttgatggtttttatactttttatggaatctttaattttgtacctttttcggcttttgtgccattttttatggcttgtccttaattatttggggtagtttaatggtacagtcaatggataagaaaaataattcattctgtgctcttgacttctacatcaacgatctttcagttttaacagataagtattttaagtctttatatttatagattgttttatattataatatggattattttacctttttctttcattttagttattaatttttcattaaagtagtaatagagttttatttattgttgttttgtaggttacttttgtagagggtttacgactacagaaactttaccgataaggttaattcaaagattgtctcttctaatacctgttgttgcttggtgttatttgtttttttagctatcaataaaggaggggtgttttatgagctgagagtgttgtttgagaatgttatagctttattgtctaaatttccgggggcagtttt

SEQ ID NO: 323663 - DNA, 795 bp, Cannabis indica
taacgtaaagtattactaaaatttatattttattaagtaccttttgtttttctgagtaagtaatgtaatcactccacatctcttgagttactccttctggagataacatgtccgccctctcttgtccaagtttcgtaatgttttggatccatattttcttacaatcagcccgccaatcacgcaaaccctttgacatctcctactcaccatagtccacaaacgcacgattgtcttgtggaagcacaaacttcgtttgcaaattaattacacattcacattagtacattaattagaaatttaagaatgatatatgaagttataaatttaaatataaattactgaatacctcaagtctgtcacacaatgcgttgatgtcagctatagaaatatcttctcatttgaatttattactgggaatggacatgcggatcatctattcgcacatgttgttgaatttttttccatttggaccgactggggtgcccgtttcttcatgcaattgaatgtgtagtttaccatcagtgttttgaaaagttatgtctcaatatttttgcctttttatttacctcttacccctttctttttcgaagagctgtcacctggtgtcgacatactatatagaaaacatatttttatatttaaactagacaaccatattcaaaacatattaaataagaataaatgtgattgttattgctatttaaatatcattacaattaattggaggtatatagagaatataatattaattttggtatataaattataaaagtgagattttgtaataaattggag

SEQ ID NO: 323664 - DNA, 849 bp, Cannabis indica
tattttaagtatataattgaaaaaatcccattttttttttgaagtgttaataatagacaatacaataccctatgatgtgttatttcacatgtcaaaaagttttaatctatgtattcacataaactcatccctaatttctctattatccatattgactattaaaaaagttataaatttcttgtgccaaaccccgttaaaatattactatagtggacacatttaatctatatgatttttattttgtattcattctcttaaaatattttaaactaccatttgatttatatattggaaacaatttttaaaattccagtttcaagctttcttcttggaggtaggaaccacatatctaaacgctttaaaaatatatgatgactattaaatctttcctcccaatgaaatatatataaactcaaattcaattgtggtaatcacaataatagcaaataaaaataaaaataaacaaagagaataaagcttacacaagattttttgacgaagataaattctaaaaaacttttttcgcaactcttcaaagatttagtgaatttaaattttcaaaactatataattaatttggtgtgcataatttgacttcttaatattcaattgattttcttgaaatttcttagcttcaacatcattcgcatctgcttttagttttttcatttctcttcgttttaataataattttaataattgctcattatgagtactttgtgtttggagactttctagtttttttgtaaatgagtttaatctctcaactatataattaaatttggtctccattaaaataaaaaatattatcaaataaacttacacacatctaagactcatatatgcatc

SEQ ID NO: 323665 - DNA, 849 bp, Cannabis indica
aaaaatctcaatgtcacatatgctatgtaaatgctttcgttttacattaaaacttagttcatctaattttagcattctcagtacgacaaattcataatcaagaaagaaaaaataacaactatcattaactcaaggcataatttcaatcaaatttattatctccccaaataaggagtttagttcataatctccataatcaaacttaaaataacgaataacatagaaaaattaagagagaagaaagaattggttagagaaatcaattcggatcaccacaaaccgctcttaaagttctctcttttgtttccaagtctaaaattctgaatatcccttcaaaaattgcaagtcccctttacaacaaaccagatttcccatttaaaaattgtgagagtacgaaactgcccacaagttcgcaatgaagatgtcgccgcgaccataaaaacctagttgcggcgactgattgaggcttaagaataccatgttctaccaaacttcgccccagccataattcatgctcaccgcggtgaactttgccaaaaataacttgaaaattttcttatttctttcatggctttttctaatctaattctcatgaatattttcgttaaacatcctgggaagctgaaacaaagagaaataagcgtaaagctgtcctaaaagtagaaacaaagagcagaaacaacactaaaaagtgacccaaaatatatgctaaaaatagcctaacgatccaactgttagcactcctagaattaatactataagagaactaatatttgatctgttagaaaagcttgaattccactattgtataatatgttcccatcaactcatgttattaagctctcaaaa

SEQ ID NO: 323666 - DNA, 952 bp, Cannabis indica
caaaaatgggaaactagagtaatgtgattcttgagttttcccctggtccagttaacaccccttttaagattggtaatggtgcgtcctgtcgactcaaaatagagagggtaagaagaaaaggaagggctctcgtacaaagatttttgcatctagaaaagaagataaagccccaatggaagacatagatggagatgtttcaaaggatttagaagttgaactgaagaatctggtcaaagtgagagtggaagcggttccaaattttcgaataggcgaggaggcggcccttaacttgcccccctcttcgaaatgagaatcctattgtgaaattttcggggctttgcataggacccgacaagccaggctttgttggtctggataagaaagtataatccagaatgtgtctttcttatggaaataaaagtaaacaaaggaagaatgttggaggttgctcgtaggttgggtttttcggctgtattctggcccaaggtactgctggtggcttgtgtttaatgtggaatgatggtgtgagaattcaaattgttcaaggtgtggactctgtttttaaagcaattgtttaggatcactctatgaatgtctcttggagactctttgcggtttatggtcctccgtatgaacaatacaaggacttgttttggagcagattagcatcttctattctggctaatgacctaagttggatggtcattggagatctgagctgtctagggggggaggaggatatgatgggagggaagagagtctcttttagggacactaaatggcttaatgtgttccttctcaacactggtggcattgatcttcgttcaagggactgtaagtttacgtggcataataaaagatttcttaatgggctgatcagagaaagacttggcagtaggggtgggcatccgatccaatccaacatttttttcctcatccaatccaatccaat

SEQ ID NO: 323667 - DNA, 949 bp, Cannabis indica
catatccacctacatcctcaccaaacctagtcccctcagcttctccacccaactgtccaaaatcacaacctataggaccacctcatcctccatccaaagttttggtaaatcaaaagggaagaaaagtttctctcctttcgaaaaggccactgtccctaaaagaaaaattcttgttaatcccacttatcaaccctctcctaaaaaggccaaaaacacttatgtgcctgaaaaaccaatttctactattgatccatctactattcaatattttgttgatgcctcaaaggcttctgtttatcaacgttggtttggagttcatgagttgttgtttgaatacatagttattttagaggactttcctgagtttcatgcattcttaaacactaggaaatgggttcatactgtgtccaacctgttggctcctcatcccattttgattcgatagttccatgccaacctagataggtctgctttatgaacacatagttattttagaggactttcctgagtttcatgcattcttaagactaggaaattggttcatactgtgtccaacctattggcttgattcgataggtttgttgtgatattttgcacacgcaagtgtatgtatcgtttacaagtaatagactcaccaagagtgagatcgatcccacgaggattgtaattaagtacagtaaaattaaactttaatttacttttatttggttaaataaaaattaagaataagttaaaactagaaaataataaaaatagtgaaaggagaaacaatttaaggaaattaatagttaataaaaactagggcttcgatttcaattgtatctattgaatatggcttaatatgattatcttcctattatcaatttttatgcaatagcaggtttactaaggtaatttatagtcagatatgtaaatcccaatcacatgtaaactttctactctcgtgata

SEQ ID NO: 323668 - DNA, 2027 bp, Cannabis indica
tgcgttgggttttgcttatctgagtctgatgtcgttatgaccgtccatttagttttttacgatgataatgatctatgaattgataggaatcaaattcacaactttgcacttctcattttcaacacatctagaaatgaagagtttcaagcctcttatttttgcaaaataacaacatccccaagaattgatgaccaggtatgccagaacatataaatttactaagtagtatcaaagtatcacttatacatcttaaacgacatcccttgaacgtttttacacttacccaacatccaggttgacatcatatgtcaacttgggcgttgggatgtcaacctgggtagtggggacctaaactgtctttattaaaatgcccataactcactcaatttttattcaattgacacgattcgacttgatttttgaagatatttaaacgctctatcaagtcatctctcacacatcagttgtaattcagaagctatcgtcatcaaaattcattcccgagggagttataaaaataagctccgagtaacccgcagcgggaccccttgggcactaaaaattggccatcaccaccagaagctaagtttcagctttagatcactatcagtggtggaaaataacttatttatatttttctcctattttttgggcctccttcacctgtaaaaggatagctcccttagctcatttttcacattcagaaaactacccgcaaggtcagagcttctctctatagactttctctctctagattttggagtttctgatacttagtctaatactgtaattaccatattgtgagaaataaaaactcaaagtagacatccattactatcgcaataatgggggtgaactactataaatttgttgtgcctcttttaattacttaactacttttttcaatctcaccaatctagtgaacgagtgtgacttaaaggtctaatccaaatttcatagtcaacaatatgtccatatagtttggttgtaaattcattgtttgctaagaatacataaaaagatctattgttctaaaaaataaacaaattgataacaagattaatatcagaaactaacaaattgtttcagttgttaacaaattattattaagtcaaaataaaaacagcttatttaaaatctgaagttgcaaataaaaagtttctagaaataaaaaacattatgcaagacttggaacaactcgtaaggggtgagccatttgtaaagtgatgccaaacttgtcattcatatcaatttcctctggtttaagcccattttcgagcttccattcaaaagaatggataagggtccctaacattaagggcaacatcctcatagccaaaggcaatccagggcatattcttcggcctcctccgaacggtatcaactcaaagctccttcctttaacatccacttctgacccaatgaatctctctggcttaaacaattcttggtcatcccatatgtcattgtctcttcctatagcccatgtgttgaccaagatttgtgcaccctttgggattgtgaagccattgattttgacatctctttcggctttacgagggagtaataatggtactgctgggtgtaatcgaaacgtttcttttagtacggcttgtaagtaaggtaaccgagaaacgtctgattccttaactggttttccttttccgatgatttggtcgagttctgccctagctttagatagggattctgggttacgaagtagttccgccattgcccattggaaagtggtagcagtcgtatccgtgcctgcgacgaacagtacctgttaaataaaattccgaattgagaaaataagacaaattagtaaaagaaacatgtatatatatttatggaataggtttcaatggttacatatttgacttttatttttagtcattggattactattgaatgcttatgattaatttagaaattaaaataagtaaataaataaataactcgtaacctgatagtaagctaaaaatttatttccttataaaatctttatttagtaataaattgtaaaa

SEQ ID NO: 323669 - DNA, 825 bp, Cannabis indica
tgtatatattgagtccctccctaagctacatggaatagtgttttaggtgttctatttatggcacaaaactccaaacctgtgtttggtctgacaaacaagacatgattggaatttggaaacaagaccatatgggatactgtccaaaactactattacatgtataacaatgtataaataaataaataaatttatacagcattaattttaaaaagtttttcagtaattgaagaaaaatgtatgtacatgctagtaatagaaaattagtgtaacacataattttggttatgtatgaaaactaatttatttttcaattaaagttatgtattaaaacgatattttgtaaaaataaaattggattagaaaatataacaggaaaaacctacaaaaataaatgagtagttcatctaatgccaacgataaattaagacaaataatagttggataaagttgtaatgtatgccattgaaatacatagttaggagatttgattgggttaatgcctctaaaatgttttgataaaaataagttattccatatataaatattaaagtgtttatttagattgttaatttatttagaaatattctttaatttcaaaacaaaatcttaacggatgagccacaaatctataggaatgtcgtttgtgtgtgatcactgctcatcagttattgatttcgttggccctagattttctctcatatacataggaataagaagttaattaagaactcattgttctatatattcctcaagtgtagcggtggagttgtacttcttcttatctcatcgaaactttctattatgtacatgattttctaattaaat

SEQ ID NO: 323670 - DNA, 1510 bp, Cannabis indica
tattaatcttttgaaattgaaggatgcgaaatttatggtttaaataatattacatgagaacaatatataatattgtatatatataaataatatcagtttaaatatcaaatatcagtttaaatgggatttgttttatttttattttattattttattatgtataaataatatattattattttattaaatataaataaaaagtcacccatgaatttctcataaaccaagaatttagttatatagacacactttatatagaatagatatctattaatatcacttcaaattaccttgaatccaactaatcatatatttataagttgtttttatataaattcgagttaacaatttctcaaaaatatattaattaaaaaaaacattgctataaagtacaagtggtacctagcaccacctaaagatagtgttttgcgattagttagcaatattctatataaagttaatatattaaattaggaaaccgactttagtgacatggacatcaatatttgacaaaagacaagatataaaacatctcgaagttgagtagtcccgagtcatggtagtcgacctagaagggtcccttaaccttgtgcccaggttaactccaggaactctcgaataggtgtggatcccgctaagttgttttcaactaactatatatcttttagtattatgtagcatgaagacatgaagaatctaaattcaatgcctggaagctaaaacacaaaacaacaactcaaaagtcaacccgggtgcctagcacctaagttgacaaccctgctaaggttttggtttctgggcccatcttagtgcaaatgagttaaaatttgtactgagacatgagtgaaacctatcacaaacatatttaaggcaacataatcaaaatcgaaacatttgcagttttgagcacctaaagcaccaggttctccaggcacccaacgctcaggttgacatattatcaacttgggcatttccaaccacaatattatagaattatctcgagcattttcttcatcatcatccaaaacgaggaaacaagtgctttcgagagaaaacggatcgacttggaggccaaaacagggactagcacccaggttgacaaatgtcaacatggaacacttccatcagcagttcagataaattattttggacatattctcatttttcatcaaaaatatagatttgagtacttttgggaaataaacgaagtcgtctgggggtcaaaattgggacccagcgccgaggttgacactttatcaacctgggccattttcaaggagtttttctgagagttatttcaggcatattctcaattttgtcaaagattaaaatacaagtgtcttcgggaatcaaacagagtcatctggtggctagaaactggacccagtgccaggtttatattttgtcaatttgggctatttccagtcattcttctaaaaaagtgttctagatatttttttcgtcattagaaataacgaagatacaagtgatctcggggagcaaacgagat

SEQ ID NO: 323671 - DNA, 927 bp, Cannabis indica
ttctgattccttttcaaaaaactcttcgccagatttaatggttttttcttggtgatttccgtctccggcgtctgcccacacacgaacaaagttgtttcccgtgtgttttactgttcacagtataaatgaaatgatgttgggcttgggcagtacaaaagtaatgaaattgggctggggcagtaaaaatgttgtttttgccgtgtcccagtataattgtaaagttttggtccaaaaacagtatttttgtaaaattcccttacaaaactattaaatttgcgggccatataaaacctgccttataaaattattgacacaggacccctttttatttatgtttgggccatacaattttgataaatatatatcaaaatagcatgacacacatttattgatagctgagcctatagttattttattttcttgaagggtacaatggttcaaaagtttgttgtgggattaaataattggtattgacttatttattataatttgttttttccttccttaaaagatccacagatttagtcggacgtgtattcattatcacccatacaatactttaacttcactcacaccacaccataccaccatctctacctagctacacccattatgacattaatatctcactagtactatatgttatattattttatgtaatataacatgtagattaaataattaagtgtgacaaagtattaattttgtcaaattataacatgcattatggagttacaaaatttgtgtagaatgatctcaaaataggagtgtaaatcctttaaattgatgatcacttgaatatgtaactctcatctcttttttcactcttaaattagtaaaaaatgttactaattgtttatgaatgtgaatgaatgatagttattgaaaatattgttgttggagacttgatttattcatttataaggt

SEQ ID NO: 323672 - DNA, 1236 bp, Cannabis indica
atactaaccttcaattttttttggcaatacaataggggcttcatcacattttgaatcaaaatcatcgtcatcttcaacaacactctttaacttcttagagcgccgatcgtcagaggaagcctcagaaacaccactcctcttcgaaatagacacattcttatttttcttctccttatcagactcaacaaccttcgaaccagatccaaccgtttttttcgcaacttcctctgctttttccaccttcttcttcgaaccagatacctccggtgatgaagacattgaactcttagtacgcaccataaacggtttaacactcaaacgaaatgagaaaccctagcagagaaaaacctaatactttgctgaaatgagggaaaataagaaaatggaagaagaaacgaaaaagagaaatggaagtgattgagtgagtgatggcttgacagagaaaattacaacgtggaatcgtgtttaacactcaacccactctaaaaaaataataactgtgtacacgtgtcaaaaaaaatcattactttttaccaaataaaaatatattcggtatatacagtatttaattacaaaaagtgtcccacatcgtaattttctcttacatttaagtatagtaaccaaaattttcattttcaaatgtcctttttgtaaagtaaattttggattgagactatgattataaagttaataattttaagattgattagctattcaatcaaaataaacgaaatgacagaaataaaaacttaataaaaatagaattattttattcaaaatccattgaattattatgagaaatatactcgttattatttgcgttttcttaaaaaaatatatttaattattgtacttttaataatattcatttagtattttatattttaaaattgtatatatttaataccctaaagtataatttacctaatacaacttcttaatttgaccaaatagattttagttatatataattaaataatgattttttttttacaactaaattctcttaactagcattacttgcacttaattctctaatctcaaattttattagtaaaaccctccaaactacaaaaccattagcaaatttaaaatgttaattatttttcatagttagctgccaacttgaattgcttatgtgtacactcttctatacatgacacatttatattaatacacctaatattattatttaaaaattataatatttttatatttttaaatattttatttatt

SEQ ID NO: 323673 - DNA, 610 bp, Cannabis indica
gttccaaaataccgggcaccgaaaatgcaaaatatgaaaactactgaatgacatataatgcatcactgaattcaataaataacagtataataaattatttaaatagctataaataattttcataattaatcaagattaactgctaatttccaaattaaactaagcgggctttacagtggacatgccacgtcatgtgggcaaaaattgggataaaatttgcccccaaagtccctgtgcgagcgtctatatggataggaactttccaactttatttttgacttttggagccttaaccgggtaagtattatagcaactttagttatgaaatattttttcttctttggccgctcacgttccccaatagggaactgataatattctacatggttatttttgctggctgcatagttatttactgcatgttcaatgagaggggcccaccagaaactatataaggttacttggtgaaacatattctcattccacactttatattatctctcttcaaaaaaataaaaaaagaggagctcttcacttcccctgtgaggctgacgcacccaagtcctctgaaacccaggattctcgctttgtttcgatgatccaagcttcc

SEQ ID NO: 323674 - DNA, 510 bp, Cannabis indica
ttccaaacgagtccagtgtgatatattgtggtacagcaaacacacctaaataaatttcaaattaatgggttctggatgtggggcttcttatcaccacactttctcgaattcgttgtctttggcttggagagccatacagtatatcacaataagtttggagtcattttttttatattaaaattatattgtttttgtaatgaccgcatcattagacataaaaattaataaattattagtaatttactattaatcaattagataattttgattatatgtgcgttaatataaaaataagtcctcctattagaaataaacatttgtgatataatttctcaaattttgttgagttttaagtttgctatatatgttatatatgaaatttgagatttttatgttttatgcttagcaacagcaaacactcaagggattagccgataatgtcacaattagggccggcccaagtattgggctgcttgggccattgcacaaggcccccatttttctaaggcc

SEQ ID NO: 323675 - DNA, 1172 bp, Cannabis indica
attatacacgtaaataagtaggtacaatgaaattataggaggtacaaaatgaagaaaaataataaatgatttttcttttgtaaatgtagaatgaaacttttaataattaataatttgtgctatctagggtttcaaaaatcaaagtacgtacaatatttaaatatttttttattaagtgtgatgtctcttctaattaatattggccgactggtttgggaaaaagaatgtgatgttgttggggggtcctaggccagggtctttcttttggggtcttgtggagaatatacatgaaatgtggggggggctatccaattaaaaagaatatctatgtatgtaaaaacaaaacagagagtttattacaataaagcacacaaacaaaacacaaagtgagtactactactgaaatgactcactgtactaacaaggcaaagattttggcaccaggaccttttagtattgtcactattatcttccccggttctccaattaatagttcttgagaaatggtatgaggtcctaggtacatctcgtactgctatttgtaaaattaagtatcgggtcttatatgatttagggtaaatagcggtataagtatctaaagttttaagtttttaagtggcattatcctaatatttatttttagcggcataagtacttaatatttataaaactgtaatttttctctgatttcgtctgtacaaaccctgttattttcttaaacaagccacatataaagtctagattcttgatcattgggtctagacagaaacatgtagtatcagttacttaatttcaaatgttcctttaataaatttaaaacggaatctgtactgacaaaactgaagaaaaattataattttacaaatattgggtacttatgtcactaaaaataaacattgggtttatatgctgcttacaaacttaaaattttgagtacttatgccgctatttaccctataatttaatataacaattataaatacttttatagtaaaataattgttttggtatatttttatctatttcgttatttgtgagattcaatttttatttttcatgatcatgtatattatatttatttagaatctgttagagagttcctacatagctataatgtgtgaaaagataacagaatatataagaaaaataagctactcctcctattgccaatt

SEQ ID NO: 323676 - DNA, 560 bp, Cannabis indica
gaacaataacacaaggtagatcttctatctactacacttctagcccaagctgcatctgtataggttttaatttgtagatcttgtgatctaaacacgagtcctttcctaagttttccatactttagaattttgcagatggttttgaattgagtaggccaaatgaacacataaattgacttgccatcctcattgagaaaactgtcttgccatacgcattgagaatgctatgtctggccgtctggccgtgtgtgtgagaggtgaattattcttgcaactagtatttgataacgttcctggtccttcagattctctgctttaacattcgattcaattgatgtttcagtaggcttactctgaataccagataacttttctgtctgacacatttttatcatcacagtggctaccaacaatgtttttttcccaactttttttgatatttttagaaaatgaaacaaaactgggaattctttgtcttgaaattcaaatctatttattatttaataaatattttattttacgtttaaattcaacacaatagaagataagttagaagtttc

SEQ ID NO: 323677 - DNA, 1015 bp, Cannabis indica
ttcagaatggttaggagagtcttcgccagtgatattactcctgtttccaattactggtgcgatatgagtttccaggctggactggtacacagatgtgtgggtaactggtgtaagattatcagtaaagataccctatcataattaaataaattactgatatcatatttaaaatcaaaaactataaaaataccttatatattattgtttttattacttttttttttttgaaaaggattgttattattacaatttatatatagataaattgatttttcttaattggtggtacgaaagaaaaattaatgaaggaaaaagataagtgaaactaacatagaatacgtgcactcttcctctgccattaatttttttcccctatttttgggaaggaatttattcttgtttatcttatcagttattaatagctaccatataattaataaacatcatctatgtaaaatcactctctacgccatcgaactcacatgcatgccataataactattgtaatttgctgccaaaattcttttaatatttataattgttgtatataatagatatgattctaattaaaaaagtgacgataagtattttatcgtatgattttattacagtcgtattcttttttggttgttaagtgttaattaaatctgattagtactagctcaaaaacacatggcgatatatatttctaatttaatacgtattctaataatatatcgccacgtatttttgagttgacatttaacggccaaaaaatggtacgattgtaataaaatcgtaagataaggtacttttggcacattttttttattagaatcatggctaatttgtggtataaatatccaattgcaaacagatacttaagtttaatttttggcattaataataataactaagttatatttttgaaactctttaagtataaccattaaatattaagtcattatctacgtgttatttttttattggtatatttaaattaattttttaaaaatttaatgacttggaccaatca

SEQ ID NO: 323678 - DNA, 1481 bp, Cannabis indica
acgtaattttttaatttattacagtaaatactagttttttatgttgtattcattgttaatttcttattgtatttttgttatttgtattgttatttttgttgttgttttcatgtaatttagatgttattttcatgttactttatgtaattttttgttgttttcgagttatttttatgaaaaccgtaaaaatataaaaaaaaaatcattaaatgtaaaaaatgtaaatttttttacaaaaaatatatggtaccttatgtaattatccgtaattataacatacatcacatactgtattacagattttatagtatccaaataattattatatattacaatttttgttttctgaaaaattccaaataaaagtgtaaaaattgataatacgtgcttatcattactctaaacaaatatattaccctaattcaaagctttgtgtttcttagactaaaataaatatttgaaatcaatgaataatatatgcattatatttatactcatgatttataatatttttaaatataaaatatttaaataacatgcatgcattctatggcgcagccggccacattatataatttttttagttaaaagaatattatataatttttatgttgaaaaaaataaaaaaaaaatttatagaaaaaaataaaattatgtggaaaaaagtaaaaaaatatgacatttataaggaaacaataaaaatatgtgagaatataaataaaaaaaatattaattttataagagctaaaataatatattcaaaaatttatatataaaattttatatatagaaattaaaggtactaaataactcacaggcccttgccacattgtaatcacaattaaaaaataagatattttttttaagaaaaataccacatcggaaaagaaagtgttcatagtatctctttaactttataattatttctttttaaaaaatatatatctaagaatataaatgaaaaaaaaaatattaattttatagagaatatttattttataattataattaaatcttataacaaaattatttatttaataattatgagaatattttttttggattgtcatttcaatcgagagagatatcgcagcaatatcggaaagaaatttgaaaaattgtaattcgacatacaacatgaaaacatgattttcacattgaaataatcagaattaggaaagagtttcttcatgaaaaatgtagatcattaaattatctttaaaacggtacctagatcactgaaaacggacgtacgaggaaagagttatggtagttttagtgaaatagaaaggctaatactgatgagaatacgataatatctgactgtttacttgagtatatcgtataatagatttaaattttaaaataaagatataactcatcacataaaaatcatactaatataatttaaattttgaattttaaaataactaatttaattcctcactatatatttatattactatttaatatatatttat

SEQ ID NO: 323679 - DNA, 756 bp, Cannabis indica
tgtatagctttttaagctttctacatagataacctaattatttactatacattcattatttattattaattattgatttaataaaataaagttaattatgtcacatatggttataattaatctttactacaatttctcatatacatatatataaatttattttttctctaattatcattatatctcttttattctttgtattaaccttttttttcattatgatctttctctttcgattggcataagtacttggtgttaactggctctcagtttgcttaaatctttaaagaactagccgtgtgtaaaatctatggtagacaacaaagtacgcgcgagattagaagttgatcatcaacgacactttggtatttgatatttatattttagggtgattctacaatgtacctccttaaaatggatgtattgatgcacccttaacttatttcggcattcggaaaataaatttagtctaattttttttttcatattcatgtacgttatagctatttgagatatcctacaaaattttgagaaattcggaataatttacaatatagaaaacaatgttcaaacagtcgattttacacgcgtataaaataaaatagtcacgcgtgcaatacaatgtttgaatatagttttcgacgtgttaaacctttctaaatttcttaaaattttgcaggatgtcttaaataactaaaacgtacatgaccatgagaaaaaatttgactaaaaaattatttcggatgctaaaacaga

SEQ ID NO: 323680 - DNA, 2086 bp, Cannabis indica
gatataaatgatgttgcacctcgagctttggggaaggtgtatgtttgctacttatttcccaatcttcaaagcttgaatttaaaagatcgtcactagatgaagatgggcgagcacgaagacgaggatgaacctcgtatgaaagttgaaccaaatcctggaagatatgatgtgtgtctccccaaaactcaacagaattcatctataaaaggtaggagacaagaaagtgagagttggtcatagtaacaattgaaaaacatgttgtatataccgaccaggttcgactaagaaatcaaaagctaaggtttcacccaaaaatagaatttttgatcccaaaagttcaaaaatttgaattggaatcctatggaggagtggaaatgaacgttgtaaggataaagtcaaagcgtggtcagatagtcagatgtaatggttgaacataaatgagattttcaagtcctaaacctaggaattctatggttaacctagaacagttcaagaacaggcgagactcatagcgaaaaatcctaaaatcatactggcatttaattgtaaatgtgtaaaagaaggaaatgaagaacttactcactgatttgaagctttcttgctctgcgcggatggaattgtgataagctttcctatgaattcctcgaaggatttgggaggaaatttggctaaaagttttttaatgtggtgttgaagagttgaaatggctaaaacgattgtcatagatcgttaatcctatttataagcaatctgaaaagagaagtaatcatttcaaaattaattttctcaaatttccccccaaaaaagtacattgtgtactcgttacagggagtataaccgtcaaacaggtgcaagcttcgaactgtgattcgaggtaaaaccgttaattagcattaaatggacagaaagtaacaggactcctagtcgtggtcacatcggttcatcatctgacatttaggacacgcgtcacccatccaaacaagacactccaggctgagtcaattccacatgcgaccaggaaggtcccatgcaaacttaggggcaaatgttatcctattttttgtaccttgatgtggtaataggaatgaatgacatgtgtctcatgtttccactgtgttaacatcactgtaattgtgaataactatatgttctagatttaacaaaaattatatattaaaccataatcatgaaaatgacatcttaacttaaattatttctatttttctattgataacaaataagattataatgaaatgggttttatttatggcaaaaaaatcccaacaaacttctacttgcactaacataaaactagaagtgcctttcaatcaataaattgacttgatatccatattaagtgtagtttgtttgactaaacacaaataatgggaaatgtacggctgtcgtaagcaactgctttctccaccattacttccttcgtgttcataaacattatgtaatatcacttttctgtatctattactcctttagggatactgaattccttactacttgtagagatgtgtcttctgtacattcaaacacatctctaattctatccagaatggaatagagataaaataagttaagaactttcttcagtttgaataactttctagttctttttaaaacaactaagttatttagcttcactggtcgaaataaatgttgggttttgtgccctaaataaaactctatttcaatataatctttatcattaaattatcaataaagaaacattagtattttcatcacttatttagtgtatcacttggttcgtgtggtcctttatatgtttgtttgatttataaattcatccaaatccttatcacattgatattcttgtttattgtgtcgtcagcactactgacctcacttttagccaatgacagtgagtctaattttgtaagagacaagtagtttaaaacgactgaaatatagtaaagcaatttaaagacacgggaattttatagaggttcagccccgagcagtttgggaatagcttaatcctcgttatttgtattgacttaagaacatggagaaaggttacttttcttatagctcttaaaacagtatctctgaatat

SEQ ID NO: 323681 - DNA, 716 bp, Cannabis indica
aaaatatattccaacatgaacaagtgtaggtctttgtgagaaaaattttctaagtctcatttcacgaggaagtgagtatatatctttgggagaagatttcttaagccttactttaggagaaagtaagcacgcatcaatagttgaagaaagttcactacttagtgtggtttaaagatcgaattagcaatgtcgattacaaaaggtttccacaaatcattagagtaagtctaaatttatttaagtcaattgcttttgtaatctttgatactttactaattgatttaattctctaggtgtggccctatggactaagaatgtttgaaagaaaactgatagcacatataattctcttgtgtcgtgttttttaaattatgcatattttatttctatttcaatctattagtggaggtttttacagtgatgattttatcactattatgaatgaaatatattggcttctgtaaaatcatgatttttctattagtatcagagtggtttactaaactcttagtgagatcttgtggttattttcagtttaatctattttgtgtgaaatgttcttctttgcagaaagtggttctataccttgttattcaaaggttggcaacatgaaaagaatatccaattcctcaagaggtagtatttgttggattttttgtgccttaaataaaatccatttcaatataatcagattataaaatccatttcaatataat

SEQ ID NO: 323682 - DNA, 883 bp, Cannabis indica
ttgatttgtccgtccccaaccacgaaggaggtgccgtttgtgctatgttactgttaacagtataaaagtaaatattttaggtctggacagtataaaagaaaaaaaaaaggcttggacagtaaaaaagaaataattgccgtgtggcagtattattgtaaaatttgggaaaaaaacagtatttttgtaagtttcccaaattgtaaactatttctttgtttgtaagaggatttttttttttctttttattagttgtttattttgtaatatcttaagaacatgcaattttatggcccataatgtgactaagtgagcctttacctacaatcaatttgatgtgtgacattatcgtcaattcttaagaacatattttataatgaccgtatgatctaatcgttgatttatatataaatgctttatttaaaaaaaaaaaatcacgaaaagaagaaataaaaaagacctaattggtatgtagatttttacacagtattatttttggcacaattttaaaatttatatggttatacatatatattttcaattttacagttttttatttttctaattataattttataatatactataaaaagaacatagaaacaacaagaagataacaagaaaacaaaaattaaaaaaaaattaaaaataacataaataacataaatctaatatgaatagcaagataataacatgaaaacaatatgcaatatttgtctgtattttttgaaaagtttgtaagtcataaaggaaataattcttttggttaaaactctttgcaaccctaagttttttgttttagtttttacaccacatactgaaatttctaacttttttactttttttttactgtgggacagaagttttttcaaaattattgtgtaaa

SEQ ID NO: 323683 - DNA, 549 bp, Cannabis indica
gattccctcctggttggcctcattaacttcacttaccgaactatgcacttcttccatcaaagctatccaagtcaaccactttttaaaccaccttcaataaatacacagacaaaaggaacctttaagctgaaaagactaggaatcttaaagagaatcaagaaggaaactctatagcaagtatgacccacaatcccctaacaaagaaagcaccagtgagttaaagaataaaaggcttttcctccgttgggtatcccaacagtctcatggtagagagtgttgggatatgaatatgaatcaaaatgtttgaataattaataatgttataaattaaattaaaaattgatgagagaataatattttattctttggacgattagttatttgtcctaatataagtgggaagattcaatattgttattgtgcatttacaaaataagaagtgaatatatatatatgggtgcactttttatgattaatttttctatttaattagtaaagtttctcacttttacattatatgagctgggattgatccatcagctgaaaaaa

SEQ ID NO: 323684 - DNA, 854 bp, Cannabis indica
atatatatatatatataggtaaataaattgaagactatcaagaaaaaaaaataaaaaaattgatcctaggggacaggaggataatataacgtcaacatctcaaacacaagattttttgtttcactcatgtatatatggaactgatactgatcaatgcacccatttaatactcaatgcgctttttcttttcttatgttatttttttttaattagtggcgcatgaatttgcaaaatatattaataggaaaagattattatgataactttacacaagtaacacaacccactcacaatacaaaaaaagaaaaaaatatgttacagttttaaaaactgccgagaaaagccaaatattaaagaaaaaaattacaattgtacatctttaaattgctatgatgttattattattatctttctacaccaccacattaataacatgatgctatttttaatatactaatagttcattgaaagaaagaaaaaaccaacatattttgtaatttgtttgtattgttatatgtatttttgaaaagggtatatatgtaatttatcaagaagaagcctaaaatattgtggcttttatttaagttaagctaattattaatttttcttcccgaactttaacatatatcaaattatgcacactgaacttttttagccgttaaaaattcctcctgaactattgagattgttaaatttaaggatttttgtctaatttcattcaattttactgtttcagtgattatttatgtacaataccatgctccccagactttgatatctaccaatcattcttctcaaactttgatatgtactgaataatgcccctgaactttcatccatgttagaaatttttt

SEQ ID NO: 323685 - DNA, 938 bp, Cannabis indica
gtagttgtgagattatcctattcgaataatatagttttgaaggtgtagttaagtttactgtcgaaaacaatccaaccactcggtagaaaacaaacatcataagagaaactaggtttatcccgtctaaaattttccaataaaaaatatcttacacacatcaaaacactatatactgatttataaagcaatctgtgaaacactatgtatatgtatacaaatgtaacttaaatttcatggtactttagtttgtttgttgtagactctgtttgtttttgttttttctttataacacttgggaattagctgtgttttgtcaaggtctcttctagtgctcttgtttttaagttcataaaatctgcatgttatagcagaataaaggaaccagtccatgaacattttagtagaattaaattgacaatagtaggaaattatattatgtacccttttgaatttgatggctctaaaagttcaactttcggctataccataacaaatatcttgtttgaaaatgcatacatatcataaacttaaaaattaaagttcatctttcggctataccataacaaatgtcttgtgatgtggaattaattagtacttatcaattacattgtaagtttatcgagtttagcatgtaaacctcaaagctgaactttctaagtttcacaaagcttaatcttaagaaactccatatccatttacatttacatgctaaattccacatggtgactcattactactagaaactgtaagcaacagtgaagtgtaatatgcttgctttctacaatcttttaatctacataagcatgttaacaatgtatttggctaaagttacatgatttgattaggttcaaatatcacggtttttttaccaggaacgtagacaaggtacatccaaatgcagtcaatttttaggcaatatatatatcttatagtccata

SEQ ID NO: 323686 - DNA, 1010 bp, Cannabis indica
caccactactccttaaatgctttaagcctagtaggagaagacttaacatatctcaccacatttttgattgcagcaattgattcatgtttttccttcaagccttcactaaaattaagttcactatgtggcactacatctcacataaaagaactttccctttaaaataagtacattctatttctctttaaacttcctctttaagtatctattggcaacatcattagaagaagcattatctactgttatggtaaacaacttagagatatcccattctcttaaacataacttaatctgtttaccaatagtttctcctttatgatgacttgacaaaaattgataattctttgttgatacttctaagcatgatcaatccaatgagcagtgatgaccatgtaattcatattttgaatggaagtatatgtatcagtagtaattgatatcctctcatatctcaaaatatttctaaatatcaccttttcttcttgatacaacttcaaaacatctcaagccacagtcattcgagaaggggtctcaaatctaggttagagtgttttcagaaatcttttgaaactttcaccctcaacatgtcgaaatggtaactcatctaacacaatatattgtgagggcggtcctacaagcttctttgttataggccacaactactaaatttagtttcccctccttgccacccttattaggctcgaaacttaaaatcttttattttttatcttcattttttagtggactaagctcatacacttttttttcttcaaataactccataaatgactagtcccatgtttttaagtgtcacaataaaaatcactcgcacaataattgcagatacacttaggaacacgagattgaggttcttcatcatcatcctttatagctcgaggaggattgttttccttagtaaaatgaagccaaacatcaaactttcccttcttcttaggaataagcagaataggaggtctaccctttttttagtacccttacccttatcagta

SEQ ID NO: 323687 - DNA, 1624 bp, Cannabis indica
ggtttttaatttggtattgctgtgagatgaagtaggaggagtttttgggtgtttgaagtagccaattggttacaggataagggtatagttggggatggctgatgtgatgcaggggccaaaacagtgtggtcagtggggattcgttggtggctggcctggtgtaaaccaataggcagtgaagaagatgcattggggaaatggttatgatgttgaaatgtgagttgtggggtggtagcatggtcagccgtggggaatctatgcgtggtggaagtaggggcagatgggctatgattagaggattcaccaacaataagggaactgggctggggcaatggttgtgtaaccagttttgggatggttgcagagatagaggtacatgctagacgagttaagaaaggccatgcattccctttagcaaaatcttgtctatatctatcataaccatttgaaggcagttttgctcctttcatccaagggccatacagggaatcatcatcattcccattatccattctttccataaaagtaatacatttttcaaaaggatggccaaagcgcccacactcaaaacagaattcaggcaaacgctcatagcggaagtcaatccaaaattcatctttaattcttggtagactgatcatttgtccgcgggggagcggttttgcaaccaaaagcttcacttggatccttaagaaaggaccccatccttcatcgagagagtcttcatggacatcaacatactctccaattatattccctagtgttctagcaagagatttgggcttgctaagaaatgacaatcggtaaatttgaacccaaaaaggagttgagactagatcagtgatagagaccttttgcagagcatctggtgagtgtaagattattagatggttttggaaatgctatggttccttgttaaggactctgaatttgtctccttgacagccgaaagttattttaaacatatcatcttgaaatttagtgataatagctggatagcgacccttccagtggctcaacatttggtcgaaaaaggttggtttgtggacatggaagacagtaagaacttttgctattagaacatggacagtagaagacatagcaacagaggtgtcatcatcagcgaggaccaaagtagacctttcttcatcagtaagagaaaggttatgttgcagagaatggctgaggggatccatggcagaagagaggttgaatgaaagccgttgcagaggaaaagggaagaagaggactggggaaagaaaggggcgaacccagaaaaattagcagttacatgaagataactgatttggatcaaagggagaaaggggaagtggaagttagaagaaaaaagtttgttaaaagcacttaatagctgcggacccaagaaactataacatattagttattattttttgtcatctattctaatagcttttctgtttattttaaaatttaatagtcaatctattaaatttattttattagaattatattataatactttaaaaatgtaataaaataaataaataagatgaaaattgattatttcttactatttcattcaaatatttccttaaattttcataaagataaaccatatagttttactcaaagaaaaaaaaaa

SEQ ID NO: 323688 - DNA, 1858 bp, Cannabis indica
ttttgtgaagatgcctcatttctttcatgtgctttattatttagctaattaaaatttttactgtgaattttatatatactaaatcatgttctttaaacttttaaggtggttaaaaatgtctctgaactataaagattgttagatttaatgaattttgtccaattttaataaaaaaatctaacataaataaaagtttatgggtataatttagtacatgtaaaagtttgaagtacataatttggtaaatatcagtttagtatataaacaatcactgaaatagtaaaattaaatgaaattagataaaaatctttaaatttaataatttcaatagttgaaagaaatttttaatgaatagaaaattttggaaaatataatttagtacatgttaaaatttaggagtcaaaaattttaattaaccttattattttatcatttttcgttttaaccccaaaaaaggaaaaaaaaaaggcccagctggcttagactgagtctgagggctctgcagcactgtactccattttgttaccaccattacattaagcggttctctccacgcgccgagtagggagttgggtgaattcaatcaaacaagtgagaaaaacagtctctcatacttcgtaacatgtctgagactaaaattttcacacttgaaaaaacaggtcttcgcacgtgccactcttcctctcttctctctttcgttcctgtttttccttttttcttctaattctcttattactatacagtatacactaccactctatctctgttctttgcttcctctctcttctggtcctgttagagagagaaagacggggaatttctttagagagaaagagagaaagagggaaggagttcggtttttttttttggttttactcattattggtcttgatgaaaggggaagcaaagatggtgcttaagtctaaaatgaaatgggttggtttggttgggcttgttctctctgctatttccctctttgttcacatcttattagctagatttacagatgggggtatttcagaataccagtcaacaatcacaatcttctctagacgatccattggtgaagacttctccaaaaccgtaagtttcgactatttcatccaatgaaagatctcttttttgatttaagtttctttatttcttgtttaaattttcctgtcctctttcatatgcttgagttttttgtttttttgtcttttccctccgttttggaagcttccatggcggtttttacttctgggttttttgttaccatgttgatgtattatgcgctcaagattggttttgccccaagatggagaatgtgatgttttagccatctgggttttgagaaaaatatccttttttttttggttttgttttggggggtttgatcttaggaaattatgtgagactaatgttgaattttttgatacgtggatcatactattgcaatatactcgagtgtacttttttgcttgtccctatagagcatttattaacatatgtttttcttttgaattctaatgtgtgtggtgcagagtcgattgtataaaaggctatggggaccagtgaggcggcttgaatctttgcaccctgatgctaacccaagaagatactatgctggttagatctcacgtgtttcttattggtgacatttgaaaataattcaatttatgattttttggaagcttgtgtttcaaaattcttggttacattattgtcatacaataatagtaatgctaacttacaaagtttgaagttcaagacttgttctatgagttaaaatggggtaatagtaaattaaattttggatctttcatttttgggatcaatgttatccagtagttcactggaaagttgcagtaatgggtac

SEQ ID NO: 323689 - DNA, 995 bp, Cannabis indica
tacggttgtttcacagttgtttttcagttgttccactgttgtttttattgttctgatttattattctacggttgttttatagaaaagatagtatttttataaaaaaaaatctaccgcatagtaaaattgtaaacttttacttaaaatccagtatctttgtagaaactcctaaaaaataggggcatgtttgaaaagtcatttatgtgtaattgaagataattatataatttgatatttgattatatatttacactctccaattcttatgaccttaagagaatttagtgtatttatactgtataattattaaaaaaaattcattttaaatattaactactaaaaaatattacttttttgtgtatttactaattatattgtgaaacaagatatcaaaaattcatatgtaattaccatctcatatttaaataaattttatatttaaaagataaaataattattaaactgtctaattataatcttgataattacactaccctaaaatagtaataaaaaaatatgaattatatatatgtaaggtaatttaatacacaaaaataataaatatttatatttatatatttttagttattacactaataaatacaagcatataattatttaatttatttgacttcaaaatgatacttttataaagttcgtaatttatatatatataaatatatatatgaatatatcaagaacaaaaaaaaaaaaaccaaaaaaaaaaaattttaatttaacaaaaataaaattaatgtttaattgaggataaatatgttattttcaatcccccaatctttggaaggattggatttttctgaattaggaaagatttgctctccctccccctccccctccatccctctataaatcccctctaccaaacattaggtaaaatgttcaaaagattttgagtaaaaatatatgcacaaataaacgacacacaaacatgacacacatttagggtgcgtttggaagtaattgtgtaattacta

SEQ ID NO: 323690 - DNA, 783 bp, Cannabis indica
tttgttgaaaatatatgtttactgatttgctcaaaacaaatatacataaacacatatattttgttgaatctatcatggagtgctatgagattgatgagaggcttcaagagaagaatgatattaagataaatttggagagcattgctttgttataatattatttggaagctatcatatttcttgttttttatattctttctttcatacgtccagttatatgcctgctacccttattctttataattttattattaccggctcgagttaagtgtgtagcattttttatttttttaagtatatattttaaaattaataatgtgaaccaaattctacatgtaaatttgtgtacatatcagcaatacatgtaagtatttaacaaaactagtttaagagaagggtaattactaattagcataacataaatgatcagtttaagtacttttgctgaaaaaaattaatttatgaagttaaattgtattatatattatgcagttttactatcaatattcctataatatataaggtacaatttgatagtctaaaatatttaagtgctaattattattttttcttgctcaatggtggttggtgggcttttaacgaaaacaacatttgataatagagaaatgtaagtaaatgaccctaatttttaactctatagatagttaatgtccatttttaaataataaagcaaatgtctttttactttttaatacctaaataccttcattatataaagatgttatatgttttattcctttaatagaaattatgaaaaataat

SEQ ID NO: 323691 - DNA, 1699 bp, Cannabis indica
tcttgagtttgtattcaagtctgcaaaacaagaacaatagtactacctttgggagtttgttctacaacctttcggggagattgcattttaatttatcatttcatttctattggactactaatttatcatttccattgcactactaatttatcatttccattggactgactaaattactttgcaaaactataaattacttaattcaaaggaacattgcttattttttaaaaatgctacagatgaattatcaaccaaataaaaaaaacataaattatatgcggatccatataaagaattaagagtgaaatacaatttaccatttcactattctgtatgctgagatagtaaaaagctccacagaacttcaataatattctcctttagttatctttttgaaaaaaaaattatgtatagtctctcaatttaagtttaaaaaattcctacaatttttttttttaaaaaaataaaattaaaattttatacaatgcatgttttaaatatcaaaattttagatatttttttattattttaactatttttttttgattcaattattattttaactattaaaactttgatatttgtttactttcaaattttataatttaactattattgcttttaatatattttatttaactttttcatttcttagagcattagacataaattgcttcaattttatgttttttcaattactattgttatttttttactacaatctaagttatatatatctttatatataaaatgtggttatttaacaaaattattattttaattggggtttattttttattctataaaatttaacaaaggttaactcttgcgttaagttttagaaaaaaaaaaaaaaaataaaatccctaatttccattaagtttagagtactagtgttttctgtttcgtgtttattttagtgcatgcctaattttttctttgatttgaaactcattcagtaattttttgtttgttgttgagattctatttgtttactcaatttctatatgaagtcacacgattagagatttgtttagggattggtaatatacagagattaaagtcaccgatctgttttgttgaaacgattattggaactttactttcacaactcacattattgaccataaccataaccaaaactttgaaagaaggaaaaaaaaaagaaaaagaaaatcttaagggtctaatagtcaaccactagccataacaatttattaaaatactatagtcaattagctagtaccggttcggaagtattgtcgaaagtgataatatatattaatatatagggtacatcgccaaactcagtaaaattttcaaaactctttctgctaatatatgttaatggttgctagaggtaatgatatttatttaattctttcaataacttaattgaaatgtttttaggtttaattacatgattattgaaaagttaatgaaaggttttccaaaaaatcaaatattattttttccctaatgatgatttgtgcgtttggaaagtcataatgtaatgaaattggtgtgtaattagaggtaattacacaatttaacatgtttgtctgaccatataattatactgtaattgtctaatttgaaataattgaggggttccaattacaccctccaattttcatggctccccatgagaattgaatgtaattatactgtgtaattactaaaaactttccatattaaa

SEQ ID NO: 323692 - DNA, 1246 bp, Cannabis indica
tattcaaggatttccttgatatatgtgttttattatttatccatgacacccttgtgtacacttagtcagaaatggggcatgggcagcatttatggatggttttacaatgattacgagaacacaggctctatgccaaatttaaaagtgtgaatttttattatcccaagtgtcattcttaggacacattgtaagtaaggatgggatcatggtttatccaagaaagatttattctgtcagggatttgccaaggtcaaggaaagtcaatgaagttagaatttctatgggtttagcggattattctcaatgttttgttaaggatttttacaacatctcaatgcccttaacaaacttaactaaaaagaatcagtgtttatatggaaagatgagtttgaagcaagtttctaagagctgaagcaatgtttgatcacagctccggaactagcattactgtcagatcaagaaaagtttgtggttttttatgatgcctccagacaggtctagggtgtgttcaaatgcaaggggatagagttattgcttatgcttctcatcagttgaaggagtgtgagcagcgatacccaaatcatgacttagagcttactgcaggagttttttcattgaaaatttggcgacactatctctatggagtaaagtgtgagattaataccaagcctcaaatatttctttacttaaaaagatttgaatatgagacagaggcagtggttggagttggttaaagataaagattgtgagattctctatcatcttgggaaagctaatgtattggaagatgcccttagtaggaaaggtcccgagctggtattcagtaggattatgatttcatctcagttggcaaatgacatggtcatctcaagtattgagtttgtagttggcaaacttaatagtttgacactaccgtcagatttgttagatagagttagaaatgctcagttggtggattcagaactagtgaaggtacgagaagaattcttagttggtcaaggtaaagatttctcaatttttgcaaacaaaatgttacattacaaaacccgagtttgtgtcctgaatattgtggaacttagaaaataaattcttgacgaagctcataccactccctattcgttacatcttcgtaccaccaagatgtatcaagatttaataccctattactggtggtgcagtatgaacaaggatgtggtagaatacgtatctaagtgcctaacttgtcagcaaattaaggctgaacatc

SEQ ID NO: 323693 - DNA, 861 bp, Cannabis indica
aatttgcagtaacagaacagaaaaatagtacagataaaaacttgacacaagagaattatagtgatatttgtgttctttcaaaaactcctagactagaggtcacgcccaaaaaataaaattaactagtaaagcattaaagattataaaagcaattgacttaaacaaaattagactccctctaatgatttaacgcaaccatttgtaatctaccttgccaatataatctctaaaactcaccaagtagtaaaattccttcagctattgatgcatgctcacattctcccataatgaatctttgacagatttcccaccaggctacgtgcaactgaatcaaatattaagttagattgatatttaattagtatttaagataaatatgttgaaaaataactttatattttaggaaaacggtacactccttaataataatttaaaatatcatcttattttatgggttaatattaagagtgttcatcaaaccgctcaaactgcttgcatcgcactgtaccgtagaaaaatggggtttgaaatgttttacggtgcggtcgcggtttgaatttttcttaaaccgcgcgatgtagcgcggtttgcggttttgaattattattatgcgattcaaaccgcaccgcaccgcacattataaaaataacaatttttatatttatttaggtccaatatgtaaatgttcaactcaaagctcactaattattgtattgttaaaacttatttttttttatattatatttatttctaagtcttatggtattttttgactaaatgtttgcttcaaagtttttgttgtcattttgggattagtttaatttaggggttgaaaaatcggtcagttatggtcggttctta

SEQ ID NO: 323694 - DNA, 799 bp, Cannabis indica
gcttatttgatttatttttacttaacatattaagtttttgaaaatctgggtaaatattttggtactttcattgagagctgaggaaagacttagagccaaagtgtatctgtaacaatggtggctaccagaaatgtcatcactaagcccaccgcccacagtcaggacaccgtcatggacgacgttaacccacctcccatagtgcatgcccactaggaactgcgagagactggtagacttttaaagatgggggttgtccagccaataaagcccagcatcaggagaaatttgtcggtgaaaaccccatcgatgaagatgagaaggatgaccgagaagaagaccctaagggcgaaggtgacagtgaggatgatggcagagacaacagtaagattaaagacgggtattacaaagaggaatattattatgagaaagatctcgaggtatatcggatggctgaagaacttatagtagctcagcaaaaactggttgcacaagaagatatctcccatcaaatgcaaaaaatactagcgcagctacaggctagattcgaggcccataaggaaacctcagagaagaacgctctagaagagcctgtccctaacaaaaataacctcacaaaaaaagcaagcccagttgattttggacattctggacctgtaaaagacaaggggaaaggtgttacaggtgaacccaggaaaagactgctccactgttcctaggactaactagcctacagtcaaccaacctttgtggaaaaggaaggctacccctgcctgagggccaattgttgggttttatgccc

SEQ ID NO: 323695 - DNA, 629 bp, Cannabis indica
atataaaaaaaattattttaaagtgtaaaaataaaaaaaaaattctaaaatatttacaaacattaaaaagatgatattttcttctattcataaaaaggaactccgttaccaaaatcttgaatagactttgttgtatgcactaatcgatgttggccccctattatgtactcctaattttgttttggcagaaattgaattacaccaataataatattatcactttttgagctcgtttggtacgccgtataagggttgtattgtataaaataataaataatactatgtttggattacgcaatgtattgtattaattattatgatcgactaagttttttaatacaatgtatgttgtattatttaatatataataaatggtccgtattagcttgtattataatattataaagaatttgaagtcaacaccaatctccgaccaggatccggacccgaacccgggaccacgacccggatcccgccccggacccggacctagatccggaccccagacccgaaccccgacccagaccacgaaccccggacccgaacccggacctggacccggactcgaacccggtacccgggacccgggacccggacccggtgttgggatcgagtgcattaaaaatata

SEQ ID NO: 323696 - DNA, 754 bp, Cannabis indica
aaaaaattcaggaggcatgatttggtacatgtcaaaagttcgggggagggggggggggggagggaaatcctaattagccaaatattttgaaggaagaatttttttttttttattttattttaagttattaaaataataagcctaaaattcttaaattggtattatgaaataaattaattattaattaaggttgcggtaaaagttttatttattataattttttaatcacaaaattttataactacttttgttttttaattttaaaaacaaaaaataaaagtttgttttgtaaatctcagtttcatttgttgattttatttaagtcgggtacggggccgaggtccgggtccaagtccaagtccaggtccgagtctgggttagaggtcgggggcggggccgagtccggctctaggtctgggttcggggttaggcctgagtatggggtcggggtctgagttcgagtccaagtctagggccaagggcggggtccaaggtccgagtccgggtttggtctggggtctggggtttaggtcgggtctgttgtccagatcgaatctgaggttcgggtgcgagtcgagtcacggttctagtgtccaaggtccaagtccgagtcaggtccagggtttgggtctaggtcaaggtcgaggtccggggtatggatttgggttagggtcttggttagggtccgagttccaaggtctagcttgggttcggagtccaaaatattgataaaaaaacttgtttaaaatttttt

SEQ ID NO: 323697 - DNA, 645 bp, Cannabis indica
atatgacatataaaatgcattctgaactcaaataaatcatcataaattattaatttagaattaataactaattttcatatttaaaccctaattatcagctaattgccaaattaaagctaggcggtctttacattcaccatcataattcgagccttagtgatagagtacctgcccacgcatatcaaattggtacaaaatcatagtgtgtaagactgtaaagaatccaatcaaatgaagtaaaatcgggctcagagcttgttgatactctcactgcgagaaattcatttattaggggcaagatgtcttttagaggcgacatgtcgcccctaaaagatcgcctcaaaaaatctgcgcgtaaaagtcccattgggggggacaaaaaagtcgcctgacctaaaagtaaaacacgaattactgttttttacttttggaggcgacaatgtcgcccctaatacccaaaatatcccccctaaaaggtgttgcccaaatttttatatttaacttttaggggccacattgtcgcccctaaagttaaaaaaatatatattatttgaattattaattttttaatttataaaaaaaaataattataataacaaataaaataaaaattaataattaatatcatataatgttttcattaac

SEQ ID NO: 323698 - DNA, 2455 bp, Cannabis indica
ctaagttttgagaaaaatgaaaagagatgccactaaatcctttttacttcagccaacacttaataaaataaacatataattcaactaaataaagtccactaaaggacaaaatatcattgggcaaaaagaccattttgcccctccacactaaaataacataaataacactaaaggggtatttttgggaaattctaaattctcggccatccctgacattcccaatgtcttaaaaatctgtcccacactactaacatactaagttgtgattttactgagccaaacaccgagttccatgttaccgagcaccggaaatgcaaacttatgaaaactactaaatgacataaaatgcatttcaaaattcaataataacagtataaataattatttaaatagatttaaataatttcataattaaagaataactgactaatttccaaattaaactaagtggtctttacagttttcatgcgaggatctggtctcaagagtcacaaaatcgtaccagcatacttttgcacagctaaatttggttcgcataagaaccttaaggccttcagcatcccagcaacctcaccttcccttcacaaatcctgcgattatccatacgtaagatgtagtggtctcaattcctatcatccgatgtgaggtgacactaccttttcacccttttgtgaaggctatccttagacattacgacgtttctcccttctagttaattccaaatagttaccgcataatactgggatattacgcgatctacatggagtatgttcaaggggagccaacgattgaagaatttagctacttttatgatatagagagaatcggccatgacaatggtttttattgttttagcaaatgggctaattctaaaattaatggggtagaaggcaggatttccaatatgggagattggaaatccaaatggttctatgcatttaaagtgccaaggattagagttgacattaatcgccgacttaatatgttgcatgtcttgacacttagcatatattttcattatcttctatagttgctaatgtctgtttttagtgatcgcagatagactggctcgatttgtactggaccctgctcgtcgaaagatcgctgatgttttaagtggccttcctattcaagattgcgactactgtgtactactaaaaaatttcgagaacataatcaaactcatcctagagaacgctagacttcaacaagaaccatacaaggagccttctgagaagccaaaggaaagaatagacaagcatctttccaaacagacttcgagaccaaaaacttttaatgtttagaagtagatcttatttatgatcttatcccagaaattactttcctgaagctagctccaactttcaaccaaaagcctaaggctggaactgcaaagacttctccagtcattctgcaaaagaggaaaagcgacgttgttcctgcacaggtggctgattcgtcaaagaagcagcacaaagccacccaggaaaggggaagaaggttatgattaatccaactgtcaaggcccgcaatgccataactcttcaggagaagtttgtgagcgatgagtttgtctctaagatcgaggggattcccatcgagaacttgattccacgcttcggagaattggcattgtagcttttggccttattctctcgggcctttgttgcaggttccaaagatcttgatcttctgaggaagcagaactcacttctccaagagagtgtgaagaaactgaagctggaagcgattatgaaggataaagagatcaatgatcttggaaaagctaaagagcaggtggaggaaaaagtaaaggttttggaatcacgagttgaggaactcggtcgctaccttgagaatgaaaaagagatcaggaagaagaaatatgaccaggctatctctaattacgtctacactaccttcatcaagttgcctgacttcgacttcgtagttctcggagcagaggtggttgaaatggctgatgcatttcgtgccatgtcgcctactaaaacccagggacttgggggaaatattttccttgaggatgccaaaaatgcaaatgtagatgacgtcacagatggtgttgctcgcaaggttgcggatgatcccaacactccaaccgcttagcctttttaatttctcttgtgttatcgaacaacgtatcctttagaggatacttcttttgcacttatttagcggtacatgggtactcgcgtttatgttaacttgtgtttttaattaacaataattttatcttcgcaaaagttttcattgatctattcacagcttggtgtgataatttcaaagtatataaacttgcaaatgatgcagataaaaaattctaaaaattcaaaaatttcattaatcgatcaatagtacagtattgatggttacacccgctatacttagtatattctatgaattaaattgactaagtataaatacatgcgagtac

SEQ ID NO: 323699 - DNA, 1501 bp, Cannabis indica
agagagagagagagaaaacttttgaaatttctaattttctaagtttttgaaatctttgaataatgagagtgaaatgcaattacaaccttcacttcagccaacaaataacatcaattaacatttaaatttccaatttctaagtccattaaaggaactaagcggtctttacaatacctctcatctattggagttatatggtacgtactactactttcctaataaatagaacaccttcaatgttacttaaagataaaacagttttgaaatgctcaacaacaagatcccaaagtatgaacatcttcgaaactttggctgcctatcatatgcatccaacatcaatcatgatcataatttctctcctagatccaaagcatgtaccttcatagggatatcctgaaaatatgaaagccaatcctctacttgacatacaaagtaatcgcatttttcattgtagagatgttattttctatgaaaacatttatccatatcacaacaatagtcccaacaaagacattgctcgattttttcatcaccaacacagcaggtcagaagatcaattatctacagttactccaaatattgcagcacctgacccttctattgcagtaaaacattctgctgcaacacacattgcaacacctgatgtagtaaaaaacactgctgcaacaaatattgcagctcctgatacagcaaaagaaactgctacaaccaatattgcagcacctgatgctgcccttcctcacaccattaatgaatctactgctactgatcttacaacctctcttcctgctgcaaataaaaatacaaaatccaattcatctgctccatctaacatagcgaaatccagcaacagttataaaactaaatatggacggaaaaccagcaagccaaatcacctaaacgattacatatgtgatactcaaatacacacatcaatagctcatcctcttaccaatcacttgtcctacaagagattttcaaaaaaaattatagctgcaatccttgctgcagatcagattatcaaacctacatcctactcgcaagccatcaaatacaaagtctggaataatgccatgggaacagaaattaaagcattagaagataaccaaacttggatcgttgtacctttgccacttggacaacacacaatcaacaataaatgggtatatagaatcaaatataacccagagggatctgttgaaagatgcaaagcaagattagttgccaaaggatatactcaacaacctgggatagattattttgatacctatgcccccgttgccaaattcaatactttaaaacttcttttttatttagctgccatgaacaattggcatttacatcacatggatgtaaacaatgctttcctacatggtgatttacatgaggatgtgtacatgacactacctcaaggatacactcccaaaggagtgattccaaagaatgctgtctgcaaattacaaaaaagcctatatggtttaaaacaagcatcaagacaatg

SEQ ID NO: 323700 - DNA, 548 bp, Cannabis indica
ttgatttaattaaaacactaatatgttagaaaaataaaaataacaataaaaaaaatagtaatattagtattaaataaaataaacacattataatactaagttataaaattaaaaagaacaacattaataaaaataaacaaattaaggacgcgtatatcaaataaaaatgttaattttcaatatttttttggcgaacatagacaaatcaaagatacagatgcttgctatgtcttttgaaatgcattacttaatcatatgtgggagcaccataatgattagaaaattaaattatgtaggtatgattttatttttcttcttttttcaaaaaaaaaatatgcaatgttttaattgatttaataaatattatattttactaaattattttaaaattttaaattcttactagtagctatgatacaattatataataaattaattattttagattatcgatgtaaataatatagaatatgagtttttttaagtaaaatatatttattattttttttttgaaaaatgaaatatcaacttcattgaaatttagcatt

SEQ ID NO: 323701 - DNA, 998 bp, Cannabis indica
cacgtggcgtccctatatattagggcgttacagtttgctatatggatagtcgattaattatcacaatagataaatgatggttgttcttgtggaatttgaaagtcttgaaggaaatattgcaaccatgtgatttcactggcacataaaagctgtaataacagaaataaaagctttgtgagattcagacaatttgtcataagatagaaacttgtgaaggctgtgaggtgtagaaattttgtcttgaagcatagagtgacattcatattcatgtaagtaggcagtttgtcttgtgatttcgctggtgcgtctaggagcagggggtggttcttcctgttgagtggaagagttgttgttttctgcagcttgtgcctaaactggtgtaccaccatgtacatctgtgtcttgagtcaaggaattcacctaagaagaattgttagtgtaggaagtactagggacagaagtaggaaaatcatctactgttgtttcaaagatatcagtggaaggaaaaaccctgttagaaaaagggtcaacaaaatcatttgtggtgttaagtctatgaaatggatatatattttcatgaaaatctacatttatagaaataagaaattctttggtgttgatgtcgtacaacacatatcattttatgccttgtggatatcccatgaaaatacaagttatagcccttggtgtgaatttattcatgtgagcaataagagtgcaagcaaaaataatacaaccaaaatttctcatatgatcatatttaggcacttcacttaatagcagcttataaggacttttatttgtaagattaggtgtgggggtacgatttataagtatgctacagtcatcacacaatcagtctataaaatggataggaagtttggcctaaaaaataaaagtgctcttgcaacatttaaaaggtagttagtgttttcgttcagttacaggattttgttattggagtttgtaacacaaatgaactcatgcattatttcaaa

SEQ ID NO: 323702 - DNA, 1005 bp, Cannabis indica
ccaatccaaggctgcaacccaattgagaagggccaatcaaccaggttcttgcagcatcatatccttctgtgcaatcatagttggatcaaataagagacatgataaaagacttggatggcccgaaactatcagaccttgaactagataggtcaatgggcttatcattctcgacatacattaatgcacttccccttccaaagttcaagaagccaacttagaagatgtacacgaggaataaagatcccctagcaaacctaaaatactttgagatctaaacaaatctccaacaagtatctgaagatgtgcaatgccgaatctttctggtaaccctggctgaaatagcccaacagtgttatttcaagctggctctaggaagatttaattcttgggaagaattctcccaagaattctatacccaattatcttcctcaagacaaataccttcgcaactgaaggatcttatcaaaataaagtgaagacaagacgatcctttgaaagactacattcaatggttcatggctaaggccaccaagttcaaagacctgacataagaagttcgatatacggccatactcgcaggcatctttccattgagtattctaaaaagatattagaaggatcttaatgagcaacatgaaagagttccttgagcgagctgatgccttcataaagttagaagaagttatccggcaagcctagacatgagggcaggtcaatgttgaacagacacagggcatcatactaccccaagtgttgtttgacatgccagccagcgcagacaatatctgtcgatcctccgacaatgagaatattggaggcattgctctagccaaaataatggtaaaaaagggacattcaactattcccttatgccatgaagtctaaggaaaaagtaggagaattgtgcatgcttcactctcctaccaaaattcccaaagcaattcatcccaaacggccatggcacagatgtcaccaaaacctaaagcacctaggccatcgagctcg

SEQ ID NO: 323703 - DNA, 1202 bp, Cannabis indica
atttgatacatatcaaaatttaggaatgaaaatcctaattagtctagatttaattacactaaattagcaatcatctttttaaattaaaatagagtaataataaacaatggacacatatttaaattacaatcaataatgtgtatttaatttagtcagttttgaataataattatatatatatactttttattgtattgttaaaattaatttcaatgtaaactatatataaatatataaattaaaatttctatataaaaatactctattcaataataatctctactttattataaaaaaatcaaatcctaatttaggtcatttataaataagaataaactctaaatcgtaattagttttacattttttaaatctcgttctatataaaaataattatatcttaatataaaatatacatatagtttataaatttttttttatgtaaaattaataattttattctaaattgtaatacatatataaatattatatttacttaaaataattttattataatatatagtattaataattgtttattgttttttttttgaatgaaaaattcatttttattaagcttcaaaatcagttaccgacaagatagtaactcaattggaacagactccaaactgaaacaatatcagggaatactataccagccttagtaaagttatgagccactgcagtgacaaaccatttaacaaaacataaagaaacagaacccaaatcagcaagcaattgtctacacttgaatgaccataccgaacaaggaaatcatactaatggaacttcttaaagcttgcaatacacaaagacaatctgtctccaaataacttggttccattgttgatccttagataaaaattttattgtattaataaatcacaccaaatataacatttattccattactaaaactctattataaaaagatttgatagcatataaataccagaaatatcttacataacacacactcatattttatgtatatgtacgttttgatttttataaacataacattaataatttagttgtacctataatttcgtaagatttattagaaaacttatcccatatgaattaaatgtaaaaatattgaatcatgtataagaacataaactactctacttatcaccaattagttttaagatagaaccccataaggtggtgtttgataccaagctctatcacccctgcttcct

SEQ ID NO: 323704 - DNA, 637 bp, Cannabis indica
catacatggtagtaaatctacatcctggtaaaataattccaacaattgggtccatggtccgggttcagggtctggggccgaggtctgggtttgatccgctggggtccagggtctgagtcagatccaaggtgcgggtccaagttaggtctggggtccgagtatggtgtcggggtctaggtccaagttcgagtctaaggtttgaggtctgggtttgggtttaagtcgtgtttgggggtccgggtcaggtccaagttcgagtctaaggtttgaggtctgggtttgggtttaagtcgtgtttggggtccgggtcaggtccgaggtccaaatcgggtctggggtccaggtccgggacgggtatggggtttgtggtctgagttcgggatccaagtctgggtcgggcccagggttcgagtctgggtctgcagtcttagttgggatcagggtccgagtccgggtcgggatctccgtccagggttcgagtttgaggtttaggtcctagtcggggtttgggtcttggtcggagtctgattttgagttcgagtccgggttccaaggtctaggttggggtcagagtctaaaatactgataaaaaaatctgtttaaaaaaattttgaaagtaacttttttaaaaaaaaaa

SEQ ID NO: 323705 - DNA, 597 bp, Cannabis indica
aaaaaaaaaactaaaattagaaacaatgaagaatgaccttctctattatttttatgtatttggccgtagaggcaagaggaattaaagtggaggcaatgtttgacatttttgtacacaattgttaattttaaattaccaattaatgtataaataaataaaatattgaaatatacaaaacaagagaatgttgcttcgatactatcaaatatcaatcactactaactcattttgttttgacataattgattgaaaaatccaaaatgactactttacaaggtataatattcttattattgagagcgttattataaggcactaaggttacgtcttataaataattagtaattttttataatttttattaaattaaaataaataagattcgatattaaattgtaccaacattgatattacacttcataagtgtattaggcaacatgaatactctttagtatttctccactattaatataattcaatatcggatcccaattttataaaaattatagataatgttatattattttatataatataatatgtagattaaataattaagttataaataattaagtgtgacaaagtattaattttgtc

SEQ ID NO: 323706 - DNA, 749 bp, Cannabis indica
atcagtgtaattcaaccaattcatttaaatgcaatacattttgtttaccttgatctatttttctctcttgttctctaaagtttatttaaaataataaattgcaccaataacaataaattatgcaccttaacatttcttttaatttattaaacaacataaataattactaaccataacattattattggacagaagtggtgtttaaaactttttagacgtgtcactttgcgataggctaacgaatttttttacattaaactatataggacctaatacttagttggaccaatataataatctttacacatagaaaaatacaaagtatcactggtactttttagtatttctctatataaataccacatcttatagttatagctagtattaccttaattgataccaaattgcaatgcccactaaatacatatgtgagagcatataaataagtggtggaaagttaaatataattcatttaacaaaaattttgctttagaccatctccaatagaggtataaataagtggtgaaaatctaaatatatagctcatttaacagaaaatgtactccaataatatgccaaaaaagtgatataaatttggcacatatttagcaaatttgtgctaaatttgacacaacatttgctatgttttaaaaaaatttacactacaataaatgcaatactttttcatttacatttatattatttgtattattttattagtatatttaactatgaccactacaagaaat

SEQ ID NO: 323707 - DNA, 1033 bp, Cannabis indica
ggatccgatttgggattttccttgggaggtatcgggaaggaattagaatggaataatatcgatttatacagatacgtttatacaaaattcctatcccattaaaaataaattcccgcaataatctattcccacaatataaatttttatctctaattagtacagtcataaattaaagagcattgttattagacatcaatagtgtctagcatcttctcgacatgtcacgttgcaatttgctatcgatactccttaaaaattattacattaaactatataggacctgatatttagttaggccaataacaataagaatactagccaccacttgtaacttttaacatttttctaaattaaatgctgttttaatgttataactaatttttttttgacagaacagtgtttagtttctttctattcatttattttgacagataaccgtttaccttgtattcattacaaagagtctttttatgacaagtggcgttttcttagtgtttagaaaaacataacatgggatagcttcgcaaaatgtgatgatatgtgtcagcaacacctacctcacacttcagcctttaattatttaacaattattgccaaaaaaaatgccacttaaataattaatattaagaacaactctattattgaatttagtattaaattcaaaaccaaaagaatataatttagagaaattctacaatgcacccctttaaaatatatatactgatgtattatcggctgttttaatacccgaataattttttagttaaattttttcctatggtcatatatgttatatttatttaagacatccatcaaaagtttaagaaatttggaaaagtgtaacacgccgaaaactacgttcaaacagtgtgttgcacgcgtgactattttattttatacacatgtaaaatagactgttagaacattattttctatattgtaaattatttagactttctcaaaattttgtaggttaacttaaatagctataatgtacatgaatataaaaaaaaaattagactaaacaattctt

SEQ ID NO: 323708 - DNA, 1231 bp, Cannabis indica
cacctatttgtataaatcatttttatgtcatgtgctatatcagctacttttaaaaaaaaagaaaaaaaccaaagcttgtgattgcatgatggtcatatatgcagagatttttcatttgtgtggtgtgtgtgtgtgtgctcttataatttaatttatgatatttgctctcatgatgttagggtcaagttctgaaccatgctgtaccgttatttatgttgtgatgcttgaagctgtatttgagtgtatctataaaagagattgaagatttaatggatcatgcattaaagattgagaattttaagttatgtactcaatcttgttgttgatgagtttttcttggcagtgataaaggttattttgtggatctatttgtacgagcatcaaacacaccagcaataaagatgtatgaaaaggtatcattgctgttcatctccttaaactagaatgactattgctgccttttgccactaatatttcttttataattctgcacttatactagataattttttcttattgaaacccttatatacattgattatgcattatcttgtcatttttccttaaaagttgaatctaacatatttaggctgcatttgcaaagtgatggtttaagctagactttgctgtgaagcatattgcacaaaatggtaacaataggatattcaaatagtcaattcaatttaaacacacacacacacaccaaaaaattaaacaaaaatctgtctttatttagtaatcagatccatcttttgtattggcctgagctagcacccttaagtgtttaaattgtttgatgtttttttttcttgaaaaaagatcgtttcattaaataaaagtcaaaatggctcaaatcagttacaaaggagagcacctggtataacagcagggtcaatcatatcagtagtgtttgaatctagtgcccatctagcgatattatgggccatacaattaaggtctctacctatcttaacgaaattacaacccataaactgttttgaacaaaaaagaaaaaaatcagaaataagagaagaaatctcccagcagtcaacattgccatgtgtaacgtgcgtgctaagatggcacgttacaagctaagtgatgcccacaagttggccaagtggtggtcaagtggtggcgcatgttaaggtgcatgctagtggcatgttgatgcttagtttgtatgacagtgacatttttgtaaatatcttcaatattgtccagattggga

SEQ ID NO: 323709 - DNA, 1051 bp, Cannabis indica
atattcatatatacgttattatgatatcctaccgtgttccgtgctcaagtgtgcaggttagcctgagtggaagtgcagctcgacgctttacagggccctaaacaataatgttcaaaattctatgagagacacgctaaaacatctatcggggatttaaaattgaaactaaggataaccctatcgataaataagatgctaataccctaaacaacacaaaaacggggaaaactagggttcgggaaaaagccccaaccggcagaccgattcctaaccggaatgccggttcctgggtaccaaccggtcgaccggttctaatggtcccctagtatcggtcgaccggttctgtgctgggaacccaaaaattgaaccctacatctcaaatcgattccaaactttctaataatctccataccttgaatagacataaaggaagagactagggctccataccttgaaatcacacaccaattttagctaatacccactagtttgagctgagaaaattccagcttggtgctggttcttgtcaattcaagaggaagagggagagagaggtaattttctaggtttttccttaattctttctaacttaagataagagggtttcattttaaaattataaaacttatattcagcattaatataactcaaataagacaaaatgaagtctttgcctaaagacctttttgcccctctaactaattaaaatggttacaaactcctaagggtaaattggtcattttccaaaccccgaaaattccaacacctccaatacccaacaatgatatcctgataataatattctaaacgtataaaatgcgactctctaaagacctaacgtcgttttccactgcttccaaacacaatagagcaacgaggaatatatacaaaataacataactaattatatcaaactcaaataaattttcacaatatgcatagtataaataatattgaaatcttataattaaaccctaattattaataatccatactataatcttaggcggtcttacaacaagccgacgtccgttcgaaagcttgtatgttc

SEQ ID NO: 323710 - DNA, 1505 bp, Cannabis indica
tttcagcaacactatacgcatcagttctggtgttaaatgaagtgatgaatacgttgtattcagctggcagaccattaaagattgcttctatatggtcctggggagttgttggatgactaatcgaggcaagcgtatcgataatactcttgattttgagcagatagtcacccagggaggactgcattttcgtattgcaaaggagagtcttgaactgacctatcttagctcgattaagtgaggtgtagtattctcacagattggtccagatctgggcagcggaatcagatccaaccattctggtgagaaccttctcggacatggatgaaaggagccaagagacgaggatattgtcttgttgttcccagtcctcaaactccaaattcacattattctgtcgtcgatcttcagtggtaagatattgaggcggagcaaggttcggatcgaggaatttctacaatcgactccctttgattgcagcaagcacttggtgcttccatggaaggtagttaaattcatctagccgaactgaaagggaatgcgagaaggaaacaagattggttttcggaagagagttttgttgagacgaatttggaagagacttttgttgagacgaatttggaagagagttttgttgagacaaatttggaggagtcaacgatcttccattgatgccagctgaggaacgctccatgacagggacgactacagctctgataccatgttacagctcaaaaacagagagaatgaaatagagagacgaaagagaagaaactaagattcattcattatgatctaagattacagatattcaatccttatatatgtacaaaatacaaaacccataacagaaagttagttagaacaaacaacagctgtcctaactaaccataacaaacctttccaacagcttaactaactaggtactcttaacaagtatcacataacaatggagcacatctccttacacttagttcttcacactgagaagagattgatcaaacacacaaccctttaaattacaaccctccaagaagactaatcttcttcaactaaaacttccacttaatctaactctataactgaaagaatgacccttcaagaatcgtaatttaaaggatttgattagtcattacaaagttagtcttggttaactatttataagcataactaactaaactaagtttgcgagacaagtaagagagtgccaagtgtcctatatatagtgactagacccaaatccaccttggtatagacactaggtcttgaccacatagggagaataaatggttgaaccttctgcaactagatggaataatcattcagttaccaaatccaaataatgtctgaatttgacttgagtaacacatttgataaaaatgtcagctgggttgtgatcagtgcacaatttctttacttaaatctccttattggtaataatgtctcgaatgaaaaacaactttatgtcaatatattttgacttttcatgtaacattaagttcttcatc

SEQ ID NO: 323711 - DNA, 946 bp, Cannabis indica
ataagagagtcacatggagagtatcttgaagtgacgggagcaaaattggtacaatgtttaaaaaaagaggtaaaaatgatagactttaaaaaagatggtaaaaataaaagaggacattataaaaagggtatagaatgtaatttcctctttaataattgcctgtcgttttccagggatgactgtaaaactagtaacctatataaaagtcatgctcacatgatttggctaaattggctttagaaagtgaatcatgattgattgagattggaaatcatgaacgaaattgtgtgattagaaaaagtatttagtggcataggtatgtatagtaagctactatttttatttactaattattttataactttttttattacttttatgtgtttataaatcaatcaactaaattcaaaaattaaatttaaattatcaagtaaaatatgtgattttgtaaattaaaggtaattagttagtatatgatactgaaatcataataaaccaaatggttgttttaatttagtaatattgaaaaaatatatcattcctacatttcaaaatgactacattaactaattgatcatgatgatagtatttttgagatcaaataacaagtaatgttgccaaaaaaatattttatataaagtttaggaaaaaaaaacatctcaagataaaatataattatatattcattataattaataaaaggaaaaacaaaataaaaaaaataaaaaataacaaataagtgtgtagaataaattagaagtaataagtagaatgaaatgatctctctcttaatttaaagaaaacaatcatcaatatttatgtaaacgttaaaacataagatattatttttaattaagaagactcacgttaaatatttgtatattatatagaaaattaaggtggcgcatagtaaaatttttctaataactataatcattttgattat

SEQ ID NO: 323712 - DNA, 1370 bp, Cannabis indica
cttcttttagggttattatagaatattgtcgtaaacttcttgcatctttaaataatgtttccttattttttattaaacgatctgctaacatagttgctcatagtattgtcagagcatcttgttcttttctagattgagtgttcaacaggaatgatgttcttgttgaggtacaatcttatcttttgactgatttgataaattaatataatttttatatttgcttttaaaaaaaattattaagatgtttttaaaaatttataaacgagcttaattaactacccttattaaataaaaagtaatagtataccaacatacttactaccaaataaaaagtataccaaaatacttacattattccttttgttttatctagtacatgtattataactcatttatataaatagaagtagtaaagaaaactattaatatctttttaatattaaaatatatttctactttttaattttttattttattttgaatcacacacaaatatcatgttatttctcaatatgccaaattatactactaagaaacaaaatagttttggcatctatttaaaacgatcgaatatagtattatcatcaatttataaaagactgatgcctatgctaccgagataaaacaatatgaaataggtgtcagttacaaacggtcgctgataaatattatcaattgttataaattaacagtctaagtatgcaagaataggcaactatttttaataatcgttaaggaacatacaactgtttaaataatagctaatactttacccaatagttttacacaaacacatatttttatacctatttttaattatttaataaaaaagtcgaattgtatactgtgggacaagttgaataaactcatgtctcaacatgtaatacaacctcatctaaataaggaccgcaagatttatgaactgagatattttagtgttgttaggatgttattttgacaaacattcaatatctcgtaataagaatcttgttgttggtcgtaatacataaatcttgtagttgatcgtaatacaaggatcttgtagttggtgtaatacaatgatcttgtacctggtcgtaatataagaatcttatacctggttgtaatacaaggatcttgtacgtgatcataatacaaaaattttgtagctagtcgtaatataaggatcttgtacctagtcgtaatacaaggatcttgtagctagttgtaatataaggatattgtacttggtcataatacaagaatcttgtagctggtcgtaagacaaggatattgtatctacttgttgtaaagtccttttttgacaagttagttgacaaaataatttttccttttatggtaagattgttgtgcattcatattcgatttct

SEQ ID NO: 323713 - DNA, 1237 bp, Cannabis indica
acactgtgaaatccttagcttgaccagctagaacttcttctcgaactttaactaattatggatctactaactgagcagctttaactctatctagaaaatccaattacagtgtcaaattatttagtttgcccgcaacaaactcaatacccaatctgactatgtcatctcccaactgaggcaaaataataatcatgttttgtacctgcctggctgttttcctactcgaagcatctgccactacattggccattctgggatgatagagaatttcacaatcataatctttaaccaactctaactacctcctctatcacatatagaattttttttagtgaataaatatttgacgctcttatgatcggtgtaaatttcatacttttctccatagagatagtgtcgctagatcttcaatgcaaacacaactatagcaagctctaggtcacgagttgggtatcgctaatcatactccttcaattgacatgaagcataagtgataaccttattagcttacattaaaatacacccagaccttgtttggacacgtcacaataaaccacaaacttctcctaatgtaacgataatgctagtaccggagatgtgatcaaatgctgcttcagctcttaaaaacttccttcacagttgtctatccatataaacttttcattctttttagttaataactctgttaagggcgttgacattttggaaaattcctcaacaaaatgttgataataatcagttaaatccaaaaaacgtctgacttcagtgactgtattcggccttggccaatccctaatagaatcaatctttctcagatcaaccataattccatccatactgataatgtgtcctaagatgacacttaggatacccagaattcacatttcttaaacttggcataaagcttgtgttctcattttcgctgtaaaaccatttgtagatgctactcatgctcttcttttgactgagagtacacaaggatatcatcgataaatactaaaacatatatattgggaaaatccttgaataccctattcagaagatccataaaagttgctggagaattggttagtccaaaatacataactaagaattcatagtggccatacctagtacaaaaggcagactttggaatgtcttcttctcagttttatcaactgatgatagcccgagcgaagatcgatcctagagaagactatctttttttgaagctgatcgaacaagtcatcgatcctag

SEQ ID NO: 323714 - DNA, 2092 bp, Cannabis indica
tcacaaatatgattttcaggtacgttcttcctgaataactatttctctaatagctcatttatttttttttttattttgccaaaacaatagcaaatatgtaatataataaaagtatatctatataaggagtataattatttattgtgtagatgaaaccttcttctcatatggactcgctggttagggaagataagcctccgaaaaatgtgagacaagtatcgaaaattaatgggttaaagggtgaaaaatgtccaactgggtttgttcccataagaagaactaccaaggaaactcttatcagagccaaactgtttacaaagtcttatgcctcaagaattaattctcctcctacttttcatgtaagcatattttacattttcattttgttttgacaaattaaatatcatatttcattattcaaatataattacaatttgaatttgaatataatagcatgcacttgtttatacatctgatccaaccaagaaatacaatggaggtggcacaattgtaagtttttacacactatatgatgtcactggctcacaatacactttcggtcgaataaaattacaaaatggacttgatatcattcaagctggttggggagtaagttttatttttcttgaataatctttctattagattctttgttgttaaagataattaaactaaatatttttagataaactataagtttttagaatattttgttcacttgttattttggtatcatttcttaggtaaatccaagtgtatatggggataataaaactcggatcttcatacatttccaggttaccctaattttatgttattatttaagatttcttcatattctgtgtagttatgtgtaactcttgtatcaatatttttgtaggctggtgaattatcttgttttaatacagtgtgtccagggtttgttttggttgaccctcaacctatgatcgacagaattctaagagaaactcaccctggtacttttcctacatgggaaattggaatctatatttatcgggtaaataaaattaaatatttcatttaaattttatcttttttacttaccaagtttttattgaatatttttgttttaaatgaacaaaaaatgtgtcaaatatatttaaaattttaggttgtatttatattgtacttgtttgatatgatatactaggatcaaattactggaaattggtggcttcaacttggaaaagatcatgatcaaattggatattggccatcaagtatatttagtggtggactgaacgacttggctacatatattgattggggaggaaaacttacagtccactaggtcaaattggtcctccaatggggtctggtttacttctaaaacaagatactcgttatgatgcatattgtagagaattaacaactataaacgaggcgcacatacaagaagatgctaaaaacacaaaaatttcttccattgatatagacttttatttagttaaagattggggatttcatcgtgactttggacatgttatgacatatggtggccctggtcctagatgatttctgtacattgtattaccaccaaatcatctttttcatgggaataattaaataaatgtgtctttgatagatttgaatataaatatagttaaacacaaaaatatggacattttatatattatagtctcaagttcatgaataataaccgtaaaaggaggtgcattatgttgggttttgtgccctaaataaaactcatttcaatataatcagatttactaattaacaaagatcagaaattattttatgttgcatggttcacattatttatttcatgattatattctattaagtccagaacatatgtatttgctcatgattgtagtatagtcatcacagtggaatataatcatgattatatgtttaaaagtttaattctttgatttgtcagttcactcaatttagactggcatgataatcagcgataggtatactgacaccttggataagtgttatgtcctttcaagggcattgataaagtttaccagttcggatgtatggagtataaattagaagggactgatattgaacttggattagatatgataaatttaccgta

SEQ ID NO: 323715 - DNA, 561 bp, Cannabis indica
ataagaaattataagctagcatgcgtatctcttcctagtagtgtaaaaggtaaacatatagatataatgggaccctgacttttaaaattcaaacaaagaataataaaacgtgttaattatatataattatgtaaataatcacatttttaattatttaaaggtatgccatcttctatagaagaatattaggaatagagtttttatttatttatttattatatttttttttttgaaaaggtaggattataatttgttagtatgtatattatactgaagtctcaacactctttcagaattattgcagggtcagggtattaattaaaagtttaaaggttcatttgaaatgccgtattaattcgtattgtattatattaattaatatatatgaaatgaaatggtgccgtatgtacatatatactgcaccatttcatttcgtaataataaccatgtactgtaattaattattatatggccattagaaaatgtaattattggtatgaaagagaaccaaaaaagcatatgcaaataactcgattatatttatatatatatatacacgta

SEQ ID NO: 323716 - DNA, 705 bp, Cannabis indica
ataaatggtcttagtaattacaatgcacatgataagaaaaacaaaaaactaaaaagcttatagagaatatatcagaatggttatttcaagaaatgtacttaaaataactttgaaaatttgagaaaattatattgtatatctactttattttaatttttattttatttctatattcgttaagatatatttacttttatagatgatgttcacattataccccttaggttaatgtaaattatatgctagacttaagtagataataaaaccatattgggcaactcattcacaaaaataagtaaattttaatgagatataatataagaatattttttaattaatagataaaaaaaattactccttaacttctccctataaaatacttacaaattaatactaaaattatttcgcaataataaaagtttcgttacattttgtcattccatagggacttcgttgaatcttacatttaacctcaaaatatacttattttactttatttgtactggtatatagtaatttttttttttttacattaagagtatcaaaaaatttaaaattattatttttcttttaccatttctaggataaatattttgggaaaattctacaatgcatctctttaaaatagatatattgatactccctatctgttttagcatctgaaataattttttagtcaaattttttcttatggtcatgtacgtt

SEQ ID NO: 323717 - DNA, 513 bp, Cannabis indica
tgagaaataacactaaatttaaatttttaatatcctgataaaaatggacttagtacacataaagagtgataaatactattattcctcctaaaaaaaccaaacagtactaagaatatgtgaaaaaaaaatactttcctattgttttttcttttcatcacaagctaaataaaattattgtgtaaaaaaatgtgtacaatttaaatatatatgtatgtaccattattctttactcattaaatattatggtaaataatatttacttgaaaagttttttgcgttatttttaactattattttacttgcacttaatcttttaagtttaaattttagtagtaaaatcttctaaattactaaactgttagcaaatttaatgaacaatttattttccacagttaactactaacatgaactgtttagatgtatatttttgtacacgtgacacgtttatattggtacacttaatattattatttaaaaattatacaaaaataattcaaaatttataaaaaaaaa

SEQ ID NO: 323718 - DNA, 530 bp, Cannabis indica
ttggccctctaatggtgtttttaattttagagctgtttatgatgttttattgcttgatttgagtttattggagcataagatggtattttggagattatttgagtgtttggggttgatttgtgtttagggggtcgattattgggtttcggtgcaataaaccggttaacgggttttgtcccttaggaaacccagtgaaccgatcaaccagttgggaaattggtaaccctagtttgccccaaattattcatatttagagtattgccatatatttcatcgatatggttattccaaattttatattaaagtccccgagaagtgttttagcgtgtctctcattagaatattttggtttagggccttgtaaagcgtcaagctgtaattccactcaggctgaccggtacacctgaatacgaaaacgaggtaagatagcataaattatatatatgtgaatgtatgcttgttattaattgaatatactaataacaccaatgaaaatatagttttaagggtgttagtacagtgtagagttt

SEQ ID NO: 323719 - DNA, 1699 bp, Cannabis indica
aaggggaaaaatattgaacaaaacctggctaagcagcctgcaggtcaaaaaataaaatttagatttcatatgatgactggggccccagtagacgactatggcaacaagtttaacaattacatcaaatttcttgttcgcaataccattcctaccattcctatgaacaagtttgagtttgaggacgttgacgatattttcaacatagtaatattttgtaaataagtaaatttaataatattttattaattttttatagtgtttagaaataggctaatccccagacgggggaacttcccagtgctgtggatacttttacaaagttccactgtaaggataacaaatggcgcgatgaacacacacaacaactgtatgtaagtaattttatatttttaataaattcattgtatattttaatttctttttaactctaacagtttcatgaatttttttgtaggccaaaatggttgagattcgtgaaactcaaccagtgccaaccaatgtcccgcgccagtacaatgtcgaccccacccaatttcttgtagatatgcatgttatgaaacaggtgttgggtgagcggtcatgccacatgagaagactgggctagttaccgagacttaagacgcgggcaaaaagagcaactacctggacaggtccctccgggcagtccactgtcactcaagaggaatatgaggtactgaagcgaagggtggaagagcaaggagcacggaacgagtggcaacaacagatgatgatgactcagaatcaaatcatgagtgcgttccaactacaaatgatctaattggccaacgttgttccaggatttaacatgtccgagatgcgtccaattctactgattccaccatttcagcctcctagcgatgttgctaggtcctcctcacagactgcccattctggtgatgacgacaatgacgacaatgctgttgtcgatttgtagttcttttagtctacagtgtatataatattattgtttatgaactaaaaatacttttatttagtttataacatttaatgtagttttgtaattacaatataaatttcagttttataatatatttgatataatatttatttattattatttctattttaaatttaaatttaattatatattataaatttaattttttttttaaaatacttttgccaatgagttcatgtgcgccgtttaatatttttaatattaattgttttgttggcgggttaactcaaaattatttaattttttattattaaatactactgccgacgagtttatgtgccagcaaagagtaggcgccaaattgataattggggtcaaattcgtgccaattcttttgccggcgcattaactcgccaacaaaacctcgtccaggggacctcaaccgacacccttttgccggcgttgtacttatggcaacattttaattcgccagtgtaaagtattttgccaatgcatttactaatgtcgccggaaaaagttgatatgccgacaccctttgtcggcaaaaaggtcgccggcaaagctatgccggcaacttccctttagttttgctggcgagtttagtcgccggcaaaatgtgtttttcttgtagtggggagatttagtaacttggatattgctactgttagttcatctagtgacctgttagatgttgcaggtctgtccagttagcttctgagttttagttttttttttttt

SEQ ID NO: 323720 - DNA, 533 bp, Cannabis indica
atatatttcatttataaagaaaaaaattgcgttaaaaaattacaacttaagttatgtataaaagtgagtagtttgattcattatttaatttatttatgtactaaactaatctattagaaatgatattaacaattacaagtaagatacggtaatgatatcagatttgtaatgacgagtacaataaagatacgatatataacaatagttttaaaatcatatgattaattttctaatttatcaattatcatatatatatatttcttaattccaatttaatttatttaaacgatatatataatctaattatctttaaataaaatacagctgcacgcaaagcgcagtgtgcttcctaatttaattataaatgttcatgttgaaaaaaaattattgagatgtaaatacaacacaaaataagttctagactacatagacgattctccctctatctattgactattgtgacaaatagcagacaccacataattatttgttgcagtattatttgtgcatcttttgtattattattattatta

SEQ ID NO: 323721 - DNA, 793 bp, Cannabis indica
aggttttgccttccacccctgaagtttagatgtaagattgtccagaatgaaattaaaatcagcatctttttgccttgatctgaacagtggcaaacccaaatacttaagaaccccctcaggggtaccaatcccaagagcttccttaattcctctcctcataccgatcggggtatttttactgaagaaaattgacgtcttaagtttgttgaccttctgcccagaccacgagcaaaacttttccaaacaatcccaaaaggatttagcttcatttaggttagcccggcccactaatatgagatcatcagcaaagaaaatatgggatagcaccggaccccccctacttagtttaatcccatggatagtcccctccccaatcgcttcttctagaagtcttgagagcacttcagccgcacagatgaaaaggtagggggataacgggtcaccctgacggataccgcacgagggtgtgatcttccccaccggcccaccattgagacaaagattgagggaggaagtggaaatacattgagtgacccatctgcaaagtttttgggggaacccaaacagccaagacatggtcaataaagttccaacttagtctatcataagctttgaccaagtcatttaacccaaaaaacccctcttttcctctcttcttattgaaagagtggataatctcttgcactaacacattattatcttgaatactccttcctgggacaaaagcagcttgagttggacaaatgatcgagggaagaataggcttgattctatttgcaatgattttggaaat

SEQ ID NO: 323722 - DNA, 1481 bp, Cannabis indica
gattctgtgactgaaattgcagaaagctatgcagagaaagtctgagttctgcagtgtccaataactctagtctttactttgctaaacttgtgtacaatttaatagctataatgaatgacaagaaaatccagtgttctttctggacccattgatgcacatgacatgaatatatatgtgaatttagaacatggagaaaatgatcagtcataagttatagtctgcaaaaatatatgtaggtgcaactgaatattcttctgtcatgttcgaactagagggtgtttattgagcttgacaactcgagcaaaaataccaaccgaatcaattgtttttctctttatatatttaactttcattattgtcacaggtcaatgaaacgttacttaatgattgtattatattttcatgtaacatgtgcgattgaatcaagatacagtagttggcgatatccaaacttcttggttaattagtctctctattaaattagtgattttcactattaagttaaaagtttttaaggtataatattacagactgtcgcacagtttcaaaaagctatgtaaaatttaaagaaaaatattttgtaatattgctaaataaaaagtggtcattattattagaggaattattatagatattatttttttttcattatttttttttttaaatttactgtttgggttgatctgatagtttttatgtgagttgatatgtgaatttttgttacgatttaggttactctgctagttgttataaaagtttttatgtgtatttccgtaaaatatatatatatataaaaactatttaaatgaaaataaaaatcttattattattattattattattattattattatttacaaaaagctaatgtttacttcttttgtatgcaagtgagaaattgagaagggaatcatgctaatttattgaacatttcaagcactacatagcaaaatttagacagcttaatgggaaaatcgtgtgcccattattttatttttgttacaaaatgtggctactttcgacaattattttgaatatttgaaaaattcaatccacgaatattttatttttcaaggatgagtttgaaagtatactaataatttagaaaacattcatgctaaaaacccaatacctaataaataaataattttgttatcttgttatgcccactacacaatgtagtttgagaaaggaaacatataagatcatcaaaatcataaacaataccttaggatctctactttttttttggcttatgtgatgacataaaaataatggccagacaataataacaaactgaaaactcaactccatacataaatcccctaaaacatcctgatgtgctggtttggagagatatagttgaaaataaaaaacttccaaaaatctatagaggaaaaaaaaatagcaaaattatgggacctacctagcaaatgcacaccattgtgtgaaaaaagaaaacaaaaaaaaaaaaagaacca

SEQ ID NO: 323723 - DNA, 884 bp, Cannabis indica
atagagttttgtaacaaaaatttacaatctaattttgcaactcaaaacaaataaatcaaaacaagaaaaccaatataattttataatttgattttgcaatgcaaaataagtaaatttatagatatttaaaatttaattttgcaacctgttattgcaacaatattacaactaaacacaagtaaatcaattcaaatttacaatttaatttttcaattcaacataagtaatccaaataaattttggatctcaccacaaataaattaatttaaaattgcaatataattgttaaactcaacacttgaaattaatttacaactcaatacaagtaaatcaacttaattttgcaatctaattttacaattcaacacaagtaattcaatttcacagataatggtttctattgaatggctagtggtttctattttgtaggtttatgatttttatttaatgacaagttatttttattgtacatataatggtttctacttcaatgatagtgtttctattaggtagtgttatacctattttttgagcaataaataacacgtttgaatgtatgacacttgtacaacaaaaataataaattaactcgcgagtttatacacgctcttctcgacataaaacaacatatacaatgttgaggttatattatttttatttttcgagtttaaataattttaattttcaataagttgtttccatttttttatgatatattaaatgataattgtttctattttgtaaactatagttttcgtttctaagttaaattatttctattttgttatttctattttctatgtgggttgtttccatttcgaggttaaattgttttcatttttaatatgagttgtttctattttttatgatatttgtttccattt

SEQ ID NO: 323724 - DNA, 573 bp, Cannabis indica
atacttttagtcatggaccttttggtcacaaataaaaatgatgatttataattagtcacaactattttacttttagtcacaagtttgtgactaaaagtaaaaatttttgtagtgcgttctcattgcctcccctaactggaacctctggagcatcgttagtagtattgtccatgaagagatcaaaagaaaaacaaaaagagtagggaaagaaaagcccgtaaacaaagaaaaaaacaaggaagacacggaatcaaattggaagctccaatttctcacaaagaggaaaaacttgaaagcatgggaaaagcacaaacaaggacaaacaacatacaaatatgttgcctgaggctgagagagctatgatcagacaccacagatcacaaagaaattttcggtagtcatcgaaaatcacctcaccgtgtgagagagcgttgttgggctaaagatactaaaaaatcaaataaagaaataatcattctattcatggacggagggactttagcccatgtgtgggctaaagccctcactcaaatatatacgtcaaattttttatatgtaaatatatacatatat

SEQ ID NO: 323725 - DNA, 1311 bp, Cannabis indica
acctaattacatatatatggcatatcaaatactataaaaagatctaaaaacaaataaaacaccatataaattggtcaaacttaaatgtgtcatatttcataaaaacttttaaaatcccataataaatgtaatttaaatgtttttaagaattcgaaaaactatagtttataagttagactaagaaatgacaatgacgtagttataagcataatctagtgatttaactgttttactcatgaccaagagatttcaagttcaaatctccatccctatgtatataaaaaaaaaggcatttttattactcttttcagaatgaataattagcaattttatcttctaaactttaaatactattgatattgccttctaaaatattcgacttgttaaaaatttctcttaacttttatatttactaaatttactcattcgttaggatatttcttattatttcgtttaagactatattttttgtaaatttagcaactttttttttctaaactttttacaattatcaaatcgtacacctctctaaatcaaaatgagaaagattcaacatattttttggtatatcttaagagatgaatttagatcttaaaataaaattattttgaataattaagaaaattaaaaagtaaattaaattttttttaaaaaaattaattaacttttattaaaaaaattcatttaaatataaaaaattctactaaaaattcgtcttttgtaaaaactaaattttacgggaataaattttagtaaaatctatatttgtctaaataaacataaccatttttttttagtttaatttatttttctttaaaataattttaatgttgttgaatttctaaatgtttttctttattttttagaatataaatttgtaaacacaaataagtttgatttttctcttcataaaataaagtttgattttttttttaaataatttaagttttttaagtgtacttaatatttttttttattaatttaaaattttatcaatttttttaatatttttttttaatttttaaaattaacagaaaaatatattttttaaattaatttgttttgataaaagaatgtaaaatttagtattagttaaagttgacagttaaaataactgaatttaataaaaagaatataattatgcaactcttatattttatgaaaattttaagtatattttaaagggaaatttgattttctatacttacatatacctaatattttatttttaaactaatacatatcatcattgaaaatatatgaccactttatctaaaatccaaaaatacccctctcaaattttccatactt

SEQ ID NO: 323726 - DNA, 763 bp, Cannabis indica
ggatggggtctcgcggggacctacttgcaatagggcggggtatttttagtctaaatgagaacagggacgggattaatttaattctcgaatgttaaatgcaatggggatggggatgacactccccgcccctatcagaatccgtttaattcattaattatgttttattaatattttatttatgtgtgtatttttttagtatattgatattatttttaaaatttttggagttatagttttgtatattaaatagtaaataatgtttaatattttaatttatatgtaatttatacatttaaatttttaaaataaatttcatttttacaataggggattctttgccccatccccgttttattaggggattcctcgctccgttctcgatgggaaataattaggggatgaggtccggggatggggattaaaattcttaatagggatggggacgggggagcactctattaatttttcgccttgtgtgcattcttaattccacatctcgacttggccatcgacttcaaaccctgaatcttggactcaggcctcaatgttagaccttgaacctaaaagcctgactctagactcgaaccttggtcaggtcttaaccttggatctcgagccttgctccagaactcaattttctatccccaaccctagaatcgagatctaatttcgaactcaagtccaactttggatttcaaacctggtcgaaccttggactggagtatgtgaaagaaaatgtaaaaaaaaaatagacaaataaaat

SEQ ID NO: 323727 - DNA, 1012 bp, Cannabis indica
ggcacgattttccaatcatctaccgcccaagttgacatcagacaacatcttaattacaggattataaatctgggcattgggtgccgaataaccttcagtaaaacaaccataactcactcattattactccagttgatgcaattccaagtgcatttgaaatatcttttcaatatttgttatttcatgtctcacactcatatctcaattctgaatatttagttaaaaaattgttcccaagttgaagtgtgattttgttcgcaaatcacccgaaaacaatctataagacgcgattcgagcttcaaaaattgacgatcatcatccggagtcatttttaacaattaaataaccatcaattgtcaagatcaccccaaagtgaatttttttcatctttttttaatacatgtccttctccacaaaacacacatgagacattcgcacttttaatggcagcagctagctgaatattcttaggattcccgatactcatattcttcaaaacatttgtcatggaagccatttgagttgtcaaagtcgttattgcatctacttcaatgacccccaccacttttcgacttgttggagctcttgtgttggaccattggtagttgttgcttgtaatggtttccaaaatctcaaatgcttcgttgtaagacttggacaaactaacaccattgaccgatgcatctaacactattcgagaagttgtatttaggccattataaaatgtctccatctgtatacaatgtgggatgccatgatgtggacactttcgtaaaagctccttaaacctctctcacgcatcacatgtagattcatcttcaagctgctgaaaagacatgctttcacttctgaattttgcatttctagtaggaggaaagtattttcgcagaaactttttagcaagatcattccaattggtgacggaatcaagaggcaaggtattgagccatgatctagctcagtctcgtagcaaaaatgggaatagcttcagccttagcacctcttcactcac

SEQ ID NO: 323728 - DNA, 1239 bp, Cannabis indica
gtccccattttgcatcgtatcagtattttccagagttcttgaatccccatcatcaagaaaataaggtttcaaaggttttgatgcaaattggaagatcataccaatcaaaaatcgattctatggactccggtacgcttccgctattccttaatcttattgtttgattcttttgaattaattagggctaaactaagttttacagtatttctaacactttaacaaacgagactccattttcttaagtctaaccatcacaacacctcaaaagcccaaagagaatatcttctccgacatagaattccacaggaaaatttggagttggtgaaataatggcttagaaattagctgtctcaaatatgaagcttcgaactcattgtagcctgaaatgttaagtatcatagcctgatgtaaagtaatctcttaagaagacatggttgaacaattcctaaaatcagtattacttaaacagtaacttaaaggaacattagtaagaaggtgataaagaaaatccaacaaagccaatataagaaacaaaaaatagtaaaataaaataaaaagtaaaaaatataatgaaaacttatggatgattatgatttgattcatcgcatttgtacagaacaccgaagctatatgaacgttggctgatattcatccacggtggcaggagtgatttttcagtcgttgaatggataagaggctatacaactaagactctgagttttcataatacattatttcacttatactggaagtattattgattaatttacaataatacttgttgtgaattactctattattttaataagcttaaaatagcattattattttaatttcataatttgtcacttatattgaaaccattattttcatttttataatattcttacaatgatacattttttatattattttattatgaagattagttaaggaaataattatatatttaacatatttacacaaaaaaaaaataaaatacatatttttaattcgaagaaaagaaaaataactgttacaaatttacaacatgttatatgggaaaaaataaaacaatgtgaatgaaagtaatgacccagggtagaaattgtgtatgtatctcattatttcacaaaactaaaatcttcaacagacccaatctctcaacacttcacacttcttggaacaaccttagagtcttgctatttagttgaaatcactgcacaaaatatgaataattagtcattattatatatatat

SEQ ID NO: 323729 - DNA, 1050 bp, Cannabis indica
ttggtttaaaaatcaaattttttaattttctaagtatagaaaatcaaatttcccaatgtaaaaacatgagggttatattgcataaacttttgggcaagtctccctacctcttctatcaatgagtgttttgatagatttttttatctattttggcatatagaagagctatttttttttttttcataatcgtgtttatgttataattatttagaactacttttaaatttttaaatttttttgaataacttacaatatcaaaaataaaatttacatattttattgaaagtacgatttttttttatacgcgtagtaagtaactgtttaaactttatttttgacacggacacagtaaattattttgaatttagttaaagtttaggatgcttttacaatgtacctcattgatgcaccttacttgtttcgacatctagaagaattttttagtctaattttttttttatattcatatatacgttatatttaagatattctataaaattttgataaattcagaataatttatagtatagtaagtaatgttcaaacaatctatttcacacgcatgagtataaaataaaataattacgtgtgtaatatattgtttgaactctattttcggcatgttaaattttttcatatttctcaaaattttgtaggatgtttaaataattataacgcacataactatgagaaaaaaatttgctaaaaaattatttcgaatgtgtaatatattgtttgaactctgttttcggtgtattaaattttttcatattttttaaaattttgtaagatgtcttaaataactataacgtatataactataagaaaaaatttgactaaaaaattatttttgataccaaaacaaatagtgatatttcagtagatgaattcgaatgaggtataatattattctttttgtcgtatacagggtcggccctaggcataggcaggctaggcccatgtctagggcccacactttccgggggcctaaaataaacaaataaaaaaaaaaaatttggcttttatttaagtaaaatttaagtatattat

SEQ ID NO: 323730 - DNA, 1045 bp, Cannabis indica
ttagggcacaaaatccaacacctgctgctgatgaggctcttgcctctaatgtctcttcttcctcaactgttccttcagttcctctagaagggtacagtcctgcaacttggcaaagttagttgttctctcgggtgaacgatttcattgaagcttatgcacgtgatcaaatcagacagtgtcgatttgagaaggttgtaattgatgtgttgtctgctatgacttaggttttaaaatcttctgacgatcgtcctgatgttcctactgatggtgatttctctagttcttcaattggtgatggtgccttctctgtgcattccctaatgctctctctctatctaatatggatgtagatccatctgttgcttacatccatgatccttctgtccttgagtctaatgtttagccttcttctgtggatattgattagggttgtatgtcggttggtttgggtaatttatcctacatattttctaccaatctaaagtgtaggctgctaaaatttaagtaccacgcgccccatttaaaaaaaatctgtaaactgaccaacagtttagtcgatttggtcgagttaactcgcccaaactgaacaaactttttttttttagtttcaaagtcaagagtggtagcttcttacagaaaaaataatatatatctcaacatatattttatattatatatcattgatctttgcattaacagatttgtttactctttctctttctagttcatttggattggtcccaaaggaaaacaatgactccataataatatctcaatttatgcttaactggccttttataaaaaaaaaaagttctaaccttaaagaaaacactagtgacatttatgaaatcaatatggtggagacaaaaaaaaaatagtaaatgtaaatggttgcattatggtgagtcgatttacgaaatgggtcataaacctatccagaagagataaacccagattccattaaagtcactacccaattcaaaacaaataagagagagagagatagatagatagatagatagatagatttatatatatatatata

SEQ ID NO: 323731 - DNA, 912 bp, Cannabis indica
aaaaaaaatttgtaatacaaaaacttgttgattagttgatattgtttcgcatattgcaacgaggtcgatgtcttgttatttttctgttgctttgtaggtgtctttttgttgttttatagttattttcgtgttattatttaagtgttctatagttgtttttagtgagggtaatagtacatatcaactaataacttaggatcttggatttgaacctatgcctctcttttttccagttttcccactctctcaccactaagctagccttagtgactttatagttattttttagttgctttaatttttcttttaattttattgaaacacgatatttttataattttaaaattttaacagaatatttttaaaaacttaataacaaaaaacatatgtatacagtaaaaatattaaaaaaaacaaaaaagatatgtatttttgtaaaaccccctaaaataaataagacaattttttttttcttcatttgtttgatatagaatattaaaattattttttaaacaaaaaaagagtctacttttttttaaatggaaggattgagtgtaaagaattaaaaaaaatataatgtgcactttaataagtttggatatggttttatattattttggatgaccattatacttaaatactcctttaaataaacaacttcttatttaaaaaagtcttattacacaaattctgaagaaataaaatgcgcttattttgtataaaaaatatacagattttatataacacactttcatatttgtaacttgaattatgacaaggtttaggttacaatagataactaggtacacaaatacaatataacaaaaaggtaggtggagatgactttaggctcttggtagattattaagagggaaatttacatggtatactaacttttgtcatttttttaca

SEQ ID NO: 323732 - DNA, 1446 bp, Cannabis indica
acaaattagaaattattcttaaaaagagtattcttaaatggaggttctatgcaagcttttttatgagcaataaagtatataatatggttttttttaaaaaaaataaatttaactctttatataagatacatcctatattgcatctactcaagtactataattgaataaataaatttagagaaatgatgtccccacataaattatttatatttttaattaatataaatatataaatgtaataattagtttcttttttctttgaaaaagaaatgtaataattagtttaagaggtaaattttatttttgtaggagaaatcgatacaaaataacataagtaataaagttacacaactaatggaggattttcttctatctataaagatcattgtctattctaatgacatgtagagataccctaggagatcaaactacacaataaaactttaatatcaaaaaagaaaacttcaaaattgagagttgcgacttttaccccactaatagaacacctacaaatatatatatatatataataaatatttattaaaatatcaaattttatataaatagtcacatagaattctctaatgtaaagagtagagcttatatattctcttccattgtcaaaggtgactacagtatgtctgatgtgttattattagattaaacttccctatcaatatcaaaactagtcatatacaagctttacaaaactaaaaactaatcaagccttacaaaatcaaaactagcatgctagccttacaaataaaaactagtcatactgatcttacaaaattaaaattaaccttattgactatacaaaagaaagttagctacgtatattggtcatacaaaacaaaactagtaacattggtcttacaaaagaaaaaaaataagctacttataaaactagacatattgctttccaaaattaaaaagattagccataaaaaccaattaagttcatgaatatacaaatactcttttagtacaaaatataataaaattatcttcacataaatgaaatttattataaatcaatttacaagaaaataagataattaataatgataaaatatgatgttgttgatattaaatttaaaaacaaaattagaaaaattaattaaatatgatatatgatttccttaacaaattaatagtatataataattagaaacattggaacaaaatttaaaaacgaattagaaagtaataataatatcaaaacacaaataatcaatcaaaaaattaagtttaaggatgtgtttggaagtaattgtgtaattgtaattattagggtggtaattacaaaatttagtaattacactatattttaaaatgcaaggtgtctttggatatgaaggtggtaattacatataaattactaatatcttgtttggcaaaatatttagtaattacatgggaaaataatattttttagtaactaat

SEQ ID NO: 323733 - DNA, 1362 bp, Cannabis indica
ccgccaaaattttagaattgggggttagttgcaaaaactcgtccacttaagcaagttatgccgcaaatataaaatatatttgggtaattttaaagtttattttcgaaattattgagttgtcatgtattataataagctaccacttttatgtactaattgttttatatacatttttttttttttgaactagttttatatacatttttgttactttgaaaccaatatattttttttagtattatgttacattatttttttaaaaatacttttacgttactttaatattttccttatataaccatatttatgtaataataagttacactaaacgaaaaaaaaaactcatataactaataaactaacaaaatttgtaaataaacaaataacttacaataaaataatagaaaaaaacccacataacttattagtaaaatttataaatatttaaattgctaattagttatttagtatactttatagcaatatttaaataaaactatttaatatacattaacgccttcttttttcttcttttttcttctcatcaaagttatttcacaaaatcttgccatgataggaaagaagggaggaacaagcacatttggagagcatagtacaacaaagagtcgtatgctgcgtacaggaaggatgaatcgctccagaaaagaaatctattgattctctcccaattgattggaccgtaggtgcgataatttactagtcaaacatactttttattgtataagtattctaaattttaaaaataaacttgatattttaactaaataaaaattatagaatggtaactaatcagtatataataccaatagaaaactaattaattacttttacataaataaattttatttttatatcatataatataagatgtttacaaagcataattgtaaacatcttaataaaaaaaatagttattttaaagttatattatggtgtcttattatttaaaatatatttggataaccttaaagtttattttcaaaattaatgagttgtcatataatataatagtatttttaaaaatatttagcaccaacaattaactatatagtttcctattataaacaacgtaataaatacctgattaactttacactgcagattgagacaaaaaaatctgattttatacaaagtgtatgattatacaaatacaaactcttacatagtaaacctagagaacaaaccatgcactagttgtcaaagttcagctgtaataaaatattttgctctcacacaatggctgtactcaccaaaataaacttttcttgctacaactatttctcctaatactgtataaaaaaagtttttatgtcaacatacaaagacaacatactaccatta

SEQ ID NO: 323734 - DNA, 1225 bp, Cannabis indica
acatacaattaatggttgattggaatatcaaaaactatagtacgaacccataattttttatttgtggaagcttgcttaattcttataaaaatatttatagttactaatttacataaaaattataatggcttttcactattttgttgtataattatttaattaaatagaatatgtttaattttattttattggggctatatagcgctagtccccacacactactattagtgtgtctgtcaagagctgtattgttaatattgtaaattattcaaatttttttgaaattctactaacttaattaatattgtacttataacaattatcaccatgaaaacaaaactaaaagaaaaaaaaatggcatatattttcagacgcaaagattgaaatagaaggttgattgaaatagaaggttgacgatagcatcactaaaaaaaatcaaaatataaaaatcatatatataatgcatgtacattataacatacatattattaagagacatttaatttctatgccatgtttttttgtatcttcatgggcaaacaaattaaatcattattatgtatgcacaaataaaagatcaagagatttcaagataaactgaatttgctgaaattgatagccaacctaaccctagcaagctagctagtactatatagtattttggcaaaattaaaccacatatgttgttgttggatttttgcaagaaatagtattattcaagtacaatgtattataaatgtatacatgattatatagggtactaaagagttttctaatttttttttttataacaatacgtatatatttaaaatgatctgtaaatttttaaaaaaatctaaaataatttacagtgccaaaatattcatactgttttttaatttttatggtaactgtttgaattttatttttaatacatatagtattattcataatattttgaaaatttacaagtacaacatacccaattataaaataaaattaaactacaaaattctcttggatatctaaattcatgaagaatctacaaaatagctattttaagggtcggttatattttaaatttttgctatttatatatatactaggtaggagttacgtgccgaggcacgtaaatgttagttttaggtaaagtttatttttttttcttcttatttagattgtatgtgaaggtatgattacacgaatgatttgttttagcaaattaatatttgtgctattataattg

SEQ ID NO: 323735 - DNA, 842 bp, Cannabis indica
tggctcggaggccatgccaccagttgaggttaatattgcgatccacacatgtgaattctacgattaggataaaaatcaagaattattacaataatcattgaatctgctatgcaatgagtcacaagtacgaaatgcagcataacaacaaagaataagtaaacactttaacaaaagagttcgaaaaaggttatttaaaattaatgatttggttttgtaaagaattcgacagtaggaacctttgtgtcttgttgtggttcttggcttctgcttaatgcagttttatactctttaacaagtcctagatttcggtcagtaaactaaggtaactaacacgtatgagaacataatattgcattgctacaaagtgttagtgatgtctaacaccaccataaagtaacatgataatatgtaaattcgatactttattacatttacaccaatagtgatattatgacacattgtgctagcggtagtcaccacatcaagttgtgttagacaccatatgatgcgacaccaaaaccaaaaccgagttctcgaagggcgccaataaggcaagaataacttatctttagataaaatgaacgttcatgataaggtgcaaaagaggaagccttacctatccatctcccctgattggtgtgtttgctacaaagcccgcagagaagacattgggcatttgttctttggttgtagtttcacccgtcaattatgggttagattgataaaggaatttaagctatcgtgtgttatgccaagatttgtaccacaactgatagttagcaaattaaatggcagcaaacgtaaaacaaagatttagagaacgacaatactagcaataattt

SEQ ID NO: 323736 - DNA, 790 bp, Cannabis indica
gattaaaagtacaaaaatttgtactgtcatctgtcatgttgtttaaatgtaagctcatgattttttgcaccattatatactaataaaacaacacagaaataataatataatatataataaggtcatgtttggtttgatgtaatagatattgtaacgaaatcaaaattactattataatcttcagttttcttttaaaagtaaggtaatgcgattacaatgtataatggtaattacattacacaatagaatctttattacattagaaaagctatatgtaatgagaattacatcacaaatattaaataaataaaagtaaaataactcaaatattattttttatattagaataaaaattaaagtaggaataattttgtgaatgtataatttattccaacaagaaataaatatcgtaatccattttctttaccatttttatttcattacgttactattaatattccaccaaaataaacttcatctaagcttgtataatttttacactattatttactaataagagaataagaagacactacaagaattccccccaatagcggcgggcgtattagcggcggagctcctccgccactaataatgcccgtattagcggcggacccctgtttggccgctattgggggctgtaattttttttttttgaaaaaattaatagcggcgggctgtccgccgctaatgcccgccgctaatagtaatagtggcggggtccgccgctaataccccgccgctaatgagtgggcgggaaaaatcccgcccgttacatttgaatgtatta

SEQ ID NO: 323737 - DNA, 1194 bp, Cannabis indica
taaatttcacataatttaatttaataaataatataaaaaactactaattaatcataaagcaccatataaatataatatttgagatattaacagcaatgttctcaataaaaaatctgaaataactttagttaatatttaacacaaatgagattttgtatataaatatttttataattttcttttctttacaagtgaaatgacataaagtaaaaaaagcaaaatgattactaccaacaagctcattgattgattagatatacaaaatcataatgagttttcttaaagtttaaataaaataatttgtgatcacccaattgacatgtgtaaataaaacaaactacttagatagttatataaatttgaataggcactctaaaataataaatgttagcagtggtataccatcctaataaaaaaaaatggtagcaaaaatattatattaactgatatattattagactacgtattagtgtttcatttatttggaacaatatttaatttttatctatatacattttattcaaaaattacgtattaaataattattatttattttatcttataattaaaaatatacaatttttttaaattaaataaataaaagttttatagaaaaatataaagttttttttttatttaatacgtggttcaatatatattattatgtatttttgagttggtccttaatatgtttagttagcacttaagagtacagctgtaacaaaatcgaaagataagatatttttactgtcacttttttattagagttatatgtgtaacaattacaaatattaaaagagtttcactgcaaatattccttcaaattatttaaatttgctttcaactaaattactatgagttataggtcaaaaaaatttattataagttataaatatttaagtttgaaatgattgtactcatttgttatttttattcttttgcattgaaataatatttttattacataaaatatttatataaattcatttttttcaacatcacatattcttgatttttttttaagaacattcaataaaacaataatttaaaatagaaatttttacatgaaaaatccattttgcacaatttattacctaaatacctctacacgcctatgtctacatttttacttacaaagttggttttattacacaaataccacttagtcatcatttcatcaatcatcaatcaaat

SEQ ID NO: 323738 - DNA, 751 bp, Cannabis indica
acccgatcatagacatgttactgaaataagactcaccattcttgctaaagccaaaatgcctctcaatcattggtgagatgcctttgtctctgccacttttctcatcaataggttgtttgttcaaaagaataaatacatctccccatttgaaagtttgcttaatagaacacctgattacacctttttaaaagtttttggctgtgcttgaaacccttttctcaaaccatacaacaaacataaattcaattttaaaacttcaatgtttgtctttcttggttacaacctctctcacaaaggctatagatgcctccatccttcaagaggagcttacatagctaggagcgtcacatttgatgaaaatatttttccttactcctctttgtttcctagtgcagcacctgctcccaaaacctccactcagcctactgctattccttttccccagttgcctgcacccatcatcactgtaaccacctgtccccatacttctcccccaccatctaacccaatcaggtccacatatatcttttcaccccaacaacaaacacatattacatttcctatgccataacccaccacgaatatagaacaacccccgtctcagactaagcaaaacatcccacaatcactgcctgtttctactagtaaccagcaactgcccctgaccctccctctcttcatccaatgtaaataaggttgttgaccgaggttttcggcaaccaataaaatattataagattagagagctgta

SEQ ID NO: 323739 - DNA, 1302 bp, Cannabis indica
ctcccactgcggctctggcttggttgtgcgcctggagatactccttcgccgcgctcgatagtggtgcttcggcggcttcggctgatgagccgccgaagatgaatattactaggaggaggaggagtacggacgagggtgaatatgacgacatcgtgcctttttttttaaaaaaaaaaaaaaaaactgaaatgagaatttcacgtgttgggggaattgattatgagatgtgttatttatagaagagaagggaatgtaaatgattttactaatttgccatttctttaatggaaaatttacaattgtatataatttttgatgattgtgaagaaggggtgttaagtaatagtcttgagcctttttttatatatatatatagtacaatcttgatccattaataactctataaatttgtatttttatccaatatatatctttaggcatagaaaaaatagaagtgtttcaatgaaaagtaaaaaagaaatttttttttttgaaaaaaaaaagacatagttattgaaaatctatttttgaaattagaataatttattaatattttaatttataactttttaataatattcaaatactttaaaatatgtaaaaataattataaatatatgaacaattatttaaataaaataataaatcaaaatttcacttattatctcatacaaatttaggtataaaaagcaaaagtttaaatttagtcaaaggggccatactcatagtctaaaaatgattttaagttttttttttccctctaattcataactttcttgctatttaatatttattaatttgaattatatgtgtaaaagagtacgtgtaagtagggattggaatgtaaatatacatataggttatgggaaagcaaagtttggtagtggatcattatgggattaagttaggtctatagtactttaatttagtgttattttaatttagtgaaagattgagaaaaaataagtgggtttccgagtagaagaggaggttaattttataagagagatctttatataaaatatagggcaagtctttagtacacttctataaagaggtgttttgataaattcattatttgtttgggcagttgagagaattttttttatcatcataaatattatagttatttaagaatgcttataaatttttaaaaaatttcgagtactttacaatattaaaaaataaaattaaatatattattgtgcacgattatcttttcttatacacgtggtaaataattgcttgaacttttttttttttttgagaaaataattgcttgaattttatttttgatattgt

SEQ ID NO: 323740 - DNA, 642 bp, Cannabis indica
aaatcacacgtgattagtaaagcggcaattcaaaatcggtggcccctgggttaggtggatcttaagcacaggcttagcccgcttatgtccaaggccaagcctgacccttaatcgattgatgaattggaatcagaataagttatttacttgacttgtaggaattagaatcagaataagcggtattctcttattgatgtgtatatattactttagaatcggagtagattattttaagtttaaaaaatatcctttattaaaattttatttgaatattttttaattaaaaaatagtaaaaattacatttcataattttaaaagaatgtgagtagcaatcccaccaacttagccaataatctcattcctcaatcccaaattaacgtgggacccacatatttcactaattccataagtaataaacacaccatataattctgtttttactattttcttaatttagaagttattgtcttatgaatatggttaataatatatttaaagcaatgggaaattctacaatgcaccgctttaaaatgaatatattgatgcatccttatctattttagtacccgaaataatttttaattaaattttttctcatggtcatgtacgttatagttatttaagacatccggcaaaatttt

SEQ ID NO: 323741 - DNA, 885 bp, Cannabis indica
atagtaaacatcacattcaacaacttacaaagtttttaatcacaacaatgtaatcatagcatgatctaacaactaaaatagcttattttatttatttacatattttggtaagaaaaaaagagaaaaccttaaagcgatttagtgaaggaccatttggcattgaaaaagaaatatgttgtcaaaccaatcctaaaattttctaaaacaataattggtcagccatagcaacattgttcttacaaaatcaaaatgacaatcccaacaacaacatttaacaaaaattgcatatcaacatgaaaaataaaataaaacaacaccactaaacaaaaataaaagataagactaatacatacctcagcatcactaacactgctgtaaaggtttcttgaattagcatcaccatttttggcacctaaaatcgtcaaaattcaattcaaacatgtgtataactaaccatttatgaatgttaagtaataatgtgactgaacacacctgttgggttttgagtatcaacctttcgcattggattagaaactacggtcgattctaattgttcggcttttttgtcgtccatggcagaggaaggaaaagaacaaaaagctttatcggtgagtttgagaattgagatcgaagtttacgtagcttgctatttcgccgcctcatatacttcgattcccgcctggactgtttgtgctctaacaggctatccttttgggctatttagagcttgtttggctttcaagtttaaaaactgttttcactttttaaaaactaaaaatagttttttaaaactaattgatagtgtttggctaaaatttttaaaaatcatttttaaaaactggattaaaaaaaaacaaaaagctgaaaacatcaaaatgatgttct

SEQ ID NO: 323742 - DNA, 546 bp, Cannabis indica
ctatgtggcgtcggcagccagcttaggcgagctattacagccgccaaaaacccgattaaccagaaagccaaatcccttcttaatctactatgaaaaataatcatacatcattaaaaaaacaaatattttacttacaaagtgggactaattgtagttagtaaagaataacgacactaagttttttttttttgctaatatataaaaacaaccattgcttataaggaagaatgcattatttcaaaaaatgtagttcttgtgagtaaagtagtaaaccttttttagctactatgaaattatacccaaattggctaatgggttcttccttacctggaaaaatcctcactctggacaaacaaagtgtagtatctaaatttaagaatcggtggattccgttgtatccaaacagtggagatgtaacaccctaactagtatagacgtgttagcgtgatctttaccgtattgtgcagctcgttgctaatcaatgaggttattaaaaatcatgaataattaaatttacttatttaattaaaaacataaagtatacat

SEQ ID NO: 323743 - DNA, 836 bp, Cannabis indica
atattttattcatttcaaatataaaatattgatacatacacatatattttcatacaaaaataattattaaacttaaaatacttaaaaatatatatatttagagcaataaataatattctataaatatgaaacataaataatgtattttaaagaaactttaaaataaagaaagagtttagaatatatgttgaagcgtattaatttttagtgcaattctttaaaaattttaaagcctctattttagagaagctagtgtgtattctcatagagatatatatttacttcatatgcattgagtgcccattaatataattttgatattttcaactaaccacttgaaaatcactcatcataactttggctaaaactccatcttttttaaatattttttattctagaataagctttatagtattataaacattcaactcttttaagaaaactcaacaaacaacttaatttagctctgtaccactttgttaagcatcacaatatttgaatataacataattacttttattattataaaaataattacatctaggagtgttcattggaccacattcaatatttttaggcatatccagatccgatctaattatatattagatattaaattttaccatccaatccgattcggttaatttcagtcatctaatcgatctagcatatatatttatttgaatttgggtttacccaatattttaaatctattatttttgaatcagatcggattcatctaaaattttaggtcaagtatcatgtattggattcgactggatccatccaataaaaaaaagtaaaattttaatgttaatttttatatgtataaattt

SEQ ID NO: 323744 - DNA, 801 bp, Cannabis indica
gtgagtaatggataaagtgattacctcaagttccaaatacaataacccacacaagattcttggcttttccttccaaaaatggttgaaattgaagaacaaagtgagaaagagaaagagaggggaggggtcggccaagggttcaaacccaaaattctggttttttccaattaatcaacaaaaatttgatttcttttcctttttgttaaaaatataaaatatggtcaaatgaccaaaatacccctaaaatcattaataagcataactataaaatcaagggcaaaatagtcatttcatcacacacacatataacacaataaatttttgatttctcatttatcagcataacacaataattaaatcccgaaagtgtattttgggtcccgaacccagttcgacctaaaatacctaattgtgactataccgcgccgacttgtcagaaaacacctgcagatagacaaaataagcatattatataataatatagtccatgagcacgatatatcattaaaattatgattttactcttctcgggtcaaaattatgaaaatgcccctaatacaccaacggggtcttaaaatgcaatttatcagtatagtttcatatattaaattatataataatataatttctcattaatacataattaatctagttagggttgctaatccagtttcataaaccttaagttattatagatatattgtaacgtccccgcttcaagcctccattgggcccttacacccacagactaatggctcttatacacgagtatgccactctggctgcttcctggattgatga

SEQ ID NO: 323745 - DNA, 1075 bp, Cannabis indica
tttaaaaaaatacagggtctattttgtcatttaacaaaacagagcgtctaattggtaacttttgcaatacataagctcaaaaatagtattcactcatttagatatgaaaaattattatgaggaacatattaattaatttttttatggcataaacaggtttatttgcagcctacaaatgaagttcttgagagagtgttcggggattcatcgagcggagagtttgctgctcgaaatgttatcccaagactaattactcggtcgttatcagtagtgatagcgaccaccatatcggctatgctcccatttttcggggacatcaatgctttgattggggcatttggtttcatgccacttgacttcatattacccgttgtgttcttcaacttgacatttaagccttctaaaaaaagctttgttttttggcttaatctcttaattgcagttgttttctcagctttgggggtcattgctgcagtggctgcagttagacaaataagccttgacgccaaaacgtatcgcttatttgcaaatgtataattttcttttatatattaattgtgggatatcacttttgtttctattgtagaagtattttttattttttgtattttaaaaaaattgattggtattatatatatatatatacataatatatgttatagttatagtatatattttgtctgttttcaagtataatttggatatattatggtgtcgaaaataaatttaaaataattaattgcacgcttaaaataaaataagattgtatgtaagattgacactataaattaattaaaaaaatttagaaaacaagaaggatacctaatataattataaattataatgtataccattatctaaaataatttacaaaaggagtaaaattgatactcttaccaaataaatagacaaaactttataagttatttaatttattactccgtttatttatttgttttcttaaaagataatatgttcaaacaattatttttttttgctattatatatttattttgtattaattgatgcatggtcaatttgatttgatttactgtgatactagagtgttcatcaa

SEQ ID NO: 323746 - DNA, 1478 bp, Cannabis indica
  modified_base (944)..(944): a, c, t, g, unknown or other
aaaagataacctcctgtagctattcattttagaacgagaaactttaattttttaaattgacatctaaatagttttaattctattatatataaataaatacatgacaatggacaacgtagttctgcaaagttttaaaaaattcgaaataatttacaatatatcaagcagggttcaaacaatttattcacacgcatataaaacaaaagagtcacgtgtgcaacagactatttaaactttatttcagcacgttaaattttcctgaatttgtcaaaaatttacaagatattttaaataattatattttttggtaagattttaaataactacattgtacactctaaaatttaaataacatttttggtgcatcaatttatcatgcatatccttaatttaatttggatacatgttatatttggtaggattttatcaaaaaaaaaaaacttttgtgtgtttgtccctcattgctcatgtgttgagtaatttgtggtgtttatattatacttagtagctaccaaacactaaccccgtaatagaattttagtaattagataaatgctatgtttagtatgattttgttaaacaaaagaaacttgtgtgtgtttgttccacattacttgtgtgttgagtaatttgtaatgtttatattacgtagagttgtacttgaataaatattatgtttgatgtgatttttatcaacaaaaaataaatttgtttataacacgaattagatctcgcacaaatgtttggtttaacaatgagaaggtagtcttgttactatttaagctattcatagttcttttagaaggcttttttagttttggcttagtagttgaagattgtaaagagggccaacccaagcatatgacaacttggaccattacacaagtatagtatacataataaataaaaaaattcataaaaagcaaatatgcacttagcacttntaaaaaaaaaatcataaaaatcttgtggtcccactacacatgattttaattttttttgtctattttagaatttatgaatgtattttttttaataaaagattcaattttaattttttattgggtcggctctgattgtaaaagtttattgcaatttttaaacaatgttgtttatattttgttaaacgtctgctaatcgagatgcacattttcttgtgaaacaatctcgaattctcaatgttatgcttgtggtatctttaaggtgagatgtcttttctgaactttatgctatccttttgagtaattagctcttgtttgtttaaggaaaatgaatttcattagggaaatttgagttattatgcattttttaatacataattggtttggagaacacttactgtaggtaatttttaaaataggaccaattttcaaaaacccccaaaatagccttgtcaaaatcccaatccctttctctctctgtaatatccagattaaaatagtatttaatttttttttctccttgggatattaattgtg

SEQ ID NO: 323747 - DNA, 1809 bp, Cannabis indica
tggccggtaaaaatgaacagagaagccagacaaaaaacataattattttacagaaattgtattcagttggtcatgtttggtttggcgcatgggtaatcggattggaatcaccattacaattatattatttggtattgaaagttttgtaatgtcgttacaaatgtaatcaccattaaaccactcttatatgaataaaaattacagatctatacctgtgtaatgactctattatacaatttatttagaaacaaaatgaccattatactcttccttcaccaaaagaatttaaagtagtatatgtttttcaataaacaaaacatcttaacaccattactattactatttctattaccattatgttacactaaactaaatgtcatctaatagcaaattattttcatgattttgaaaatatttaatcaaccaaatgttgcagaaagatgattttgtttaatacatgaatgcaatcacctctgctgtgacaaatatcatgccagttaaagaagataatgcaatctcaatttcattctggtatgagtattttaccaattatacataaagtacaaatgatatacaacttatcagatgacgttgatctaaggaaagagatgtatcggtaatagtccatcgcaaacttttggcagcaatgcttttctgcactttccagcctttgtccacgtaacagaactaactattacttccctggaatttgcaaatgaatattctttcagaatggtaggtaggacttgaaaattttcctaaaggaatgaaaaatttaaaattccaacatcaagttctcagtaatggaatctacaataactcccattaatttcaaatgttacttgtttctgtcattttgtctcatcaagctcgccaaggattttgtctcactacaaattctaatggggttatcactttcattgcaatttcaagagtaattagaaaaatcttcaagcaattccataaacacaaagatttactcaaacttcaatacaacaaggaactgagaaacattctccacctattaccaaacactacactatattctcactaaacattaatagataatagaaacaataaatacccataaatatagccttcatttagaggtctatacacatgttattccagaattttttttttctaacaatcatttcatcaaatagtttacaggtatacgagaatatccaaaaaagcagagtaaatccttaagcacagaataatgttaagaaggaaaaaaggagatgtgcaatgaatgaaatgagaagagaaatggtaagaccttgggataggtggagtgagccgacggtagaacgcagctgggacttggtcacaatatcgccgagattgtagatgtcgatgatggcagggatagatctgcaagcagttttgaagaaatcgaatacaccgtgccttgcttcctacaaggtccctgaattgggaaaaatattaacatatgaaatttaacacgatactctatctgatgagcttctctgttcatttttacggtttcccctaaccttgggattcaatgagtgcttcctgcagtagaataatgttcaaatgattggattagaaactcttttatttattgttactttttcaatactttaatataaaatgcttactttgaacgacgatttgtttcaaaaatcaatggaacaatcgaaagaaggactcaatcgatggaacatgaattgagataggtgcgaaagacagtagcggaaaacctagaaagagcctcatcatcactgatctctgaagctccattcacggagatggatttgaagaaatacacaaaatgagtcg

SEQ ID NO: 323748 - DNA, 2161 bp, Cannabis indica
aaaaaaaaaaccctacaaaataacttctttatcccttcccaagcaatgtaattcaatgaatcaataccttttgaatttcaaattcaaacatatatatatactttcaatttgattatatccaaaacatatataaaattctctactgagtttttttggaaactaatgaaataaaaatttagagctaaataaattattagaagagattaagggaagagatttttacgtgatttagatgttaatgaaccttaactcacaggtcaatagtattgacggtgaaaactcaagaattaaattatagccggaaaatcaaaacttagatgcaagtcctaggattaagatgaagatctgaaaatatgaaaacgtaaagaaaagtgtagagtagctacggagaaagatagaagtgtaaatttttctaggtcaaatgttacaaagattttccatccgcctatcacatttgagaaataggtatttattggctctaatagcctagggtacactagtggtcccaagggacatggtgacatccatgatctgcaggttgcaggttgcaggtggtggtcttgaacctcgtacttttgtctagtgtcaataggcttgtcaaaaagatacatttagttggatcgggttggagctccgaattgacggatcacttctgatttgacccgaaccttgacttcgacccagacctagacttgaacccaaattgggacctagacctagatctaaatttagacccagacctagacccagcacccgagacccggactgagacctagaactaaacctggactcgagacccagacctgggtcgcagacttgagacccggacccaggacctaagctcagacctataccttgacccgagacctgagactcagacccagactcagtccagactcaggactcagacgtgaacccaaagctgggacatgagacctgagacttggacctggactagagacccagacccggactcgggatccgaacccgaaaaaaaatagttggtcggatcaaatcaaatccaatctgaataagtcggatcagatatgattctatccgagtatttgatctaggtggaatggggctaggcgaatcattacatgatctagatcgggtcggatcagattcgactcgatccatttagactcctgggtgtcaagtggtctcgagatgcaagagtagtggttgttgtgcacgcttagtcaggttgtcagggcttacaggtttgttgcttccactacttgtaccttcttgctctcagaacttgcaagtgtggtgcctccactacttgtacatccttgccctaaaaacatgtaggagacgtggttgtacccaccttgcatgcatgccttgtccttgtgaccgaaaccttgttgccttctattggagcttattttaccaagatctagatttactgatatgtatgttgattataaatttataatccaacatcctaaacatgactttcctaaaacaatgaaataaatatatataaagttgtagaaaatcttacattggtgacagcataatataatggctccttcctttcaaatctctgatccttgtttctttcagtcgtatattattaccaagatctaaacctggatctccttagatgatggaattcttcacaatctttcatactaagattaagtattaacttgaattgtgtgagcaatcactcagctcactatacagttaaaaaatttgaagaagaaagagagaggaatttgaattctagaagtggctctttattttctcaattgtttgacaaagtagtctaataagcttatgaaaataagagcctatcattatctatttatagaatttcttctaagattaggatttagattatatgaaattaaaaaagataaaataatgacttcataatccctttaagtggtcggccatataagtgggccctataagtttcaattttaccatttatataagaacttatcttttctttcacaaatgtaatattttaattttaatcctataaatgtcaaatctatccatttaataattataattaattattaaataaaattgtcatttaattttatttattaattaaatctaacaaaatttcttaattaacaaataaaccctaagtcctctattaaactcttgcttagtgaaaattcataaataagacata

SEQ ID NO: 323749 - DNA, 1389 bp, Cannabis indica
tttattaataataattaatgtataatattttaatttttatggagtttaatatttttatatagtaaaatttttattacaaactttatttttattacgaaatttcctaccccatctccgatggggaataagcggagatggggattaaaatccttaataagaaggggagagcactccccgccaatttcccgcttggtgtgcatccctaattttaaggctttgcccctatttttatggcttgtccctaattttttagggtagtataggtgagagtatgttgctactagccaaagagtaacaccttcggcttggtatttttaggttttttcattgatttttacttgatagaatcaagttgtagagtgtaagattttagtattttattgatatattattttgtttgtagattctcattctaatatttttttttttttttggtgtgtttgttttatgatgtttgaggtagattttcaatgttacaagctaacgttctagctcttctggtgtgttgtttgagaatgttatagttttactatctaaattttttaggatttttttatcccctattgcttttcttcttctgcagctcatagtttgatatagcacgtccttcgattagataatgagcttaagctatcatagttcgatggcggatgtcagtatcataaattccgataataatattctatcaccatgtcaaaaaaaaaaatatactttcgtttcccagcatgaaataaataaacaaaaattacaactatcaacttaattgatcaaaatgaaaataaaacgtgttcaagcagcaaaacacgtgttgtgtttataaaatttaaatacagggaactaatttaaggttataagtgatattgaattaatacgattctcttattatgtatagcacttttaataggtaactttttataatttgctagcaatatttcgtaaatatttttttttcttaggttatattagatttgatacttatttgcattaatatcggcatgataccgaaaagagtgttaaatacaattggtgccttttgataattctcatatatatatttatatacagggatatgattttgtcccgtgatgtactttcacaaaatgtattacgtggtacattagatgggtctcagggtacattaaatgagtgtcaaattacgtatatactttttaatcttaattacccctagatcaatctcagttgcagatcaaatatctccctcatctgacggctgccgtacatcacggattacaatccgtgaaagtacaataacgggacaaaatcatatccctttatatatatactagcgaaaagctacgtgcgaggcacgtatatactaaattttatgctagatttttttatgttatttgaaagtgatacaattaaaaa

SEQ ID NO: 323750 - DNA, 555 bp, Cannabis indica
tatatatatatatatcttcaatcttagttgtttgcttttataaaatgatacatacatgcacttaagtttatattaaattttttattctcattattaacatgatatatatttttaattaatataacttatataaaatatgtcctatcaaagaatatgtgtgaattaatataaataaaaaaatagtattacttttgtaatatttaaaataaaagtgatgatatagacaagaaagaaaaaaggtgacatgtgcataccaagatattttcttctaactaattatatttcttttctaaaatccattatcttagagaaaaccatgtttataagtgcacaaaactatattcttaagtcaaagaattgggtctaaaaataagaggcctaatattaatatagggatatgattttgtcccgtgatgtacttttacggaatgtattccgtggtacattagatgggtctcaggcaggcccggccctgggcataggcgggctaggcctgtgcctagggcccacctaccccaggggcccaaaataacctaccccaggggcccaaaaaaa

SEQ ID NO: 323751 - DNA, 945 bp, Cannabis indica
attgtttgtgtaatcgctgtaaaaagggcgcttacaccatctgtcaaatcctcttatggaggttctgatacatttttcccatgcgacattaaatgggaagtgactgttcgaacaatctctttccttctcggagatgccttgtgacagttctagcctcccagagggtaaaggcgtgtcttatgctctcctccgggaggctcactccatgagatgcacttccttgctcaagacttaattgattttcgtgagtgaatccttttttaggtccacgtgtcaccctctgccgctaccacgtattttggaaaagatctgaagcaatacatattataaagaagaagaaaacaaagagagtaatgattgcaaaattaattacatgcaaacaaatttaactttattcaattaagttataatattttattcttattcttctggtaaacttgtttcatcgaaccaccttggaggatcaaatccagatccacctaaccaaatagataaataaatcagttaaaataattattaaaaaaaagaccaaaatgattaaggttaagattataaatgagagaataattaccaagaggattacaacgacaaatacgccaagtagtcaaaagggtaccctttacaaatccatatttcttgtaagcttccattgaatattcactacaagttggtacaaaacgacaacttttgggcaatattggtgatatttcacctgtttaatttattcattatgtaaatttataaatattttttagagtcagaaatagcgcaattcaactaatttcatcattacaaaaataaataaataaataaacttacttttgtagaattttaagacacacaaggcagctttaactcccagattatccacttctttatctaataatatgattttaatttagaacataaagttaaaaataaaaaataaaaaataaacaaatttat

SEQ ID NO: 323752 - DNA, 1206 bp, Cannabis indica
aaaggttttttatttttaattttcatttaaatttgttaagtagtttcttttatttgaaaagcactgtaaataagtaaggtgttacacccagctcattaaacaagctataacttttactaagaagataccaggactgtctttttacatcttgacgcgttgtatagaaaatatttaatgtatatattaattaatgataaataaatataatattattataataatattaaaaactaaatgaaatgaatagtcttaacttccctaaaataaaagagatacatgtctctaataaagcgattgaacttgtttttggtaaagtaaattattatgaaatttgtttatcaaaattttgaagcatattctgaatacgtatgtcgttttatataaaaaaatataattataattatttaaataatgaaaacaaaatttggagtgaaattttatttttatattacactcaatcttgcattattttttttttttaaacaatcatgcattattgttacgtgattataattaatttatgatgacagacagagagtagttggtatagatatggatgtcggttaattgactacataatttatagtaacgatcttcacgtgttaatctagaatttagccataaaagaagtgtagtgatgtatgttttattattttagaattttaaaaaattattatttagttttattttttttataattattatgtaagttataattatttaagatattttataaaattataataaatttaaattagattacaatgtataaaaaatagtactgagaaaatttataactttattttcttaatgttaaagttgtccaaatttccaaactttaattttagaatatgttaatgcataaatataaccaatacaactatataaaaatgttgcactggtacacccatttaaaatggtgcgccataaaatttttgtaaaagtacattatttatctattttagactaattttttctcctgtgccatgtgttatatttattggtgtttttataatccagcgcaaaaaaaaaaaaaaaaatgctcttcgatccatttttcaaaatttgtcaaattttgaataatttttaaagtagaaaatattattcaaactgtcaatttaacatgcttgtgactatttagacatgtgttaattttttttttaaatgtattaaaattttataaaatacctcaaagaactacaatat

SEQ ID NO: 323753 - DNA, 803 bp, Cannabis indica
aaaaaattgaaaaaaactactagtcgaggctagtggctatagatgatattgggaatgcatgagtgggtttataggatcgaatcctagaatgcatattaagatgcttaaaaaaaatcatgtgagaaaaaacccttatgaggctttgcccgtatactagacaataataagaagcaagcggctaaacttcctaagtgtcacctttcatgttacagtttttctttttttttgcaaggttttcatgttacagtttgcctcgaccaattcaaagtaggaaacgagattggtatatattaggctgaaatagaagaaatttatgtaacccacaaaagaagatgctttgtgctagaagccaaagaggaaattatagttagtaacccaccaattcgaagtaagaaactagattggtatatattagagtggacaagtcagcgaatgcgtatttaacaagcagatcactacaattgtggtgaggcttgactaaatcaaagcaagcatcatcactgttatttttctaagcgaatttgtatgtgaatcacttagcacattgacagccaaaattaaattctcaccacaaaaatttcttatgttagtggtacctatactatacgggactacatagcttaatataatgaataccaaaattattgaaaactaatatgtcaaaaagcgccactaatatgtaaattaaaatcagtttctacattcaaacttgttaggtaataccgtagtaagtctatataatgtgtaatataaatttataataaaattattattttagactaacttaaaataaaaaatgtata

SEQ ID NO: 323754 - DNA, 1948 bp, Cannabis indica
tcggattataattaaactttattttagataaaaaatcaattcagggtcctattgtactatttagaaatacagggtctatttatcatttaacaaacataggttccaattggtaacttttgcaaaacagagaatccaaaatggtatttacccgtattatatttatagtattattttacttttactaagtttaattttattactaatttctatttttttttttttttttttgtcttttaccatcacaattacaagttgaagtcaaatttctttcaaaactacaatactaatccttttttttagcccctacttttctaattacataaacgtccttccacgttgatattaaaaagatattgtgttggtattatcaatagccaataggattattcatttgttttttatttaaaaaaaataataataaaagccaaatattacaaatcaatgaaaattagcaaaaaaatattaaatttacttatttaaaaagttcaaatcttttttttagagaagttgcttaaaggtaattattaaaattatactttttaaaaataaatataatgatatacagcctaaaaaaatatgatggatcatactatttgtatgactagacttagatatattgttaactttgttcataataaataaatagatattaatggcacgacatttataataaaattttagatgaaaattagcagcataaataaaaaaaataataaaaaaaaaaaccattaataaattaattatttaaaaattattaaatgggtttaccaaaaactcccaaaactctttaataattttcttcactttggtcacgcaaaatttatatttacacactaataactctgcaagcaattcaattttagtatcaaaagtctgggtagttttatttataattttgttaatcataaaaataaaagtaaaatttgtgttttaaaaaacaaaaatatgttaactacttttattttttaattttaaaacagaaaataaaagtgtgctctataattttcatttttatttttatttattgattttatttatgtctggggtcggggacatagtccgagtacgagactagggtgggtcaaaatctaaaatattaattaagaaaaaaaagttgtttaaaaaaattctgaaagtaatttttttttagaaaaaatttgaaattttgattttcatttcaagtgaaaacagttttataaaacatatttttagaaaatatttttacttttttaattaaaaaaatattaccaaactcacactaattaacttaaattaatgtttaatttttctacattatttttatttaatatcaataattagttttattttaatttcaatttttttttataattatgtatgatttgtttaaaaaaaattctaatgaaattttatataattttttattttaattgttttactataatatttaaaatatttttttttattttataactatatttttaaaatatggaagaaaaaattaatataaattaaaatatatatttttatatagaataaaaattattaaaattaggtgtagttgaaaataaaatttccaattttattattatttatttatactttcgggattatttatttgaaagttgggaaagctaataagagtttagaccgattctgttactgtaatgaaattctgaatgccacgtacgtttaggtttcttattatctttatataatataataaataaatggcactagttttccatatcttagtgactgacttggtcagttcatctttccagaatctcaattttcggttacaatatttaaacattttctttcataataattttcctcccaccacgcctatatcatcattttcaaaaaataataattttggtcaattcattaaagtcaacaatcctttacagactaaactcgttacataaaaaaaactaattagtatttttgtcccctgaactttgac

SEQ ID NO: 323755 - DNA, 392 bp, Cannabis indica
acatcaaagtgcaaaagttaggataacagaaggcattaaatgcctagatattgaagagatagtcgtatttcatattccctcaatcaaaatcacattggatcaagacagagcacgaagacttaacatgtgtcccccatctgaccaacgtaatgggtgaataaatccacatgcgagcatatggttcccacacgaacttggggggcaaatgttaccccaaattcttcctagggtcatctagaatcaagcaaggtgacacatggagaacattgagaagtttggatgggtagttttcccttaacatcctagccagagaatcctctacttaaaactatccaatttattgttggaaattattttaaaatttagtaaaccttacattgggtgcagcggaa

SEQ ID NO: 323756 - DNA, 850 bp, Cannabis indica
taaaggggtgatccaaatctaataaattaattaagccaaaaaaaattactaaacatagactaagcagattgagatctgactgaatcactataatttgcttgtcttttttatatttctattcttgctttgtctattttgtagcccaaattttgattatttataattttaagtgaatactcgcataattgttggtgagtgttttttatttcctcaaatatgcacactcttttgtgttgtctaaattcgtctgagaataaatattaaatgatgattaatattaattatagtttttttttatatctttatattagagaattataaataatgaaactaaatataacaaaaattaagccaaatgtaacataaattttacatcgcattagagatagccttaacaatcgatgtaattacacgtgggaaattatggaaatgaaaggctcgtttgatacgccgtataagggtcgtattgtattaaataataactaacactatgtttggattaagtaatttgtattaattattacgaccaacctttttaatacaatgtatattgtattatttaatacataataaatagttcgtattagcttgtattataatatttacaaaagattggggtcaacaccaatctctgaccaggacccggaccctgcacccggactcgggacccaagatccggaccaggacccaaacctagacccggacccggacctggactcgagacccagactcgggacccagacccggactcggacccggacccagacccagacccgaacacggacccaaacccgactcggacctgcacccagacctcgaacccaaacccgcaccccagacccggacccgc

SEQ ID NO: 323757 - DNA, 805 bp, Cannabis indica
ggtaaaggaaaggcgaaagctagacaggagtgagcctggcttggatgggatttgtacatgtcgtggcagcgtgacctggagtgtttggtctcgaggacagtgtggggatttttagtttttgagtcgatgtgcgacttggatattgtattttggcatatttgtgtaaaagtttagtaatgggatcccggtgtttgtaaattattatgtaaattatgaagtttaatatttattataaaagttttaatttgacatgttttttgagaaaaaaatcttggattagcaaagatagctatgtaattgaaaaagcactatagtgtgccttagcattaggacgttatactttagttaatagatctagcaccctatacacaactaatgtacgacttttttggccaaggccttgcacccttgggatacatttgactacctctaccagttggagatagtcccaatagaagaacactaatggctcaatttgtggtaatcggcgtgccatcaaccttcaatgcaatgataggccgaccaaccttatacgacttgaaggcagtaacatcaatttgtcacctatgcttaaagtttccaacaagacatggggtgggatgcctaagagatcaacaatctaactgacactactacaacttggctatgtctaaagccaagaaagaaaacacacttgccaagagctctaaccaagagcccaacaaagggaaatgaagtccaacccaaagcaaagaggcagacttagatcctcactttggggattgttatgaaaattattaaataatacacaagtgcacgcaatcaa

SEQ ID NO: 323758 - DNA, 1053 bp, Cannabis indica
gtatatatatatttttttacattctcgatttaaaatcgctataccctgttataggcgacagttttaaaccatcgggaaatccacattagcgacaatttttaaccttcgcttattttgcctgttttgcgacggtcatataggcgacaattatagaaaccgacaagaatattttaaatgactgtttaaaaacgtaaaaaaaaaaactatttttctagtattgagtcatagtcattaataaattattattaggtattatagtgtcaggtaccactacaaggtggtgcctcacgaatgttaacggatttttatgattattaaattaagatatataaaaaactcaatacgtaaatacactataatagtacaatatcttataatagtataatatcttctagaggtatgtatctttagtgtcctttagtatttcatactaagtactatagcatatattttgtttatataaatttatatgattttttctattatttttttacaaaaaatagagtactaaattcgaaaggttaagattattttgaattttgtgtttgtaaaagttattaatttgaccatctgtcttgtaaatgatcaatcgaaccttgtattttttaaaatagtacaaaatagtatcctaatatcaattttcgataatttttttaaataatataaccaatttgaagataatttctaataacaatagatgcagatattgtatttaagttttgtcataaaaactctagatatcgagctattattaatttttattttgagtaaaaattagttcataatactattttatgccattataaaaaatacaaagttcaatcagtaaaaaaaacataaaatttaaaatggtattaattaacctaaatttaaataaccctaactaataatcaataaagtgtgatgatcatacacagtgttaaacatcaatatatgacatatattagtaaacaattaatgtgacagtcaatagtcccgtgatccgtaaggggaaatatcaggtaagttgtgtcaatcccacaccgcctgaggaaggtcaaatgggatgattct

SEQ ID NO: 323759 - DNA, 1093 bp, Cannabis indica
atatatatatatggtaagattaacgtaccatgagaaccaccaagttgttgaagggcattcaagaatctcttatgcaattctggggaccagtttcgcctctgctttctctgattctgcccatctttatcttcttctcttttgttacttccaccgccggcgtttgaactcgtcgccggagcagaagctaccggattcgtcgtcgtacatgctgacgaagacgacccatttggtttcacaacatttttttctctttgaaaaggttgaaaagcaccaccattactctttacctccgtaaccgaagcttttttaggcaactgctcctgtttttagaaaaaacaaaatgaataaataaataaataaataaaaagattcaacactttcccactgtttaatcttttagaacttttttaaaaacggttaattacctctttttgtggcgaaactggatctggagttgtgttccacaactgtacagatctaagccaatctgatttctttttattatccttttctgtggtctgacgcttaggtgattgttcttctttttcctcttcttcttcattatcagaagatgagcttctttttaaaggcataaactcttcaaatacatgatgtccttcgcttgaggtttgttctgaacactctgattgtccatgtacgtattcggtagtcgtcgtccctgataattgttgcttacatctatcaatggctgaaaatcaaaccaaaacaaaaatgagtaaaacaaaaaataaaaaaaaaaaatgaagaaaaatattaagctaagaaaggaaaatggtctttactttggttcactagctccaaacacaaaggaagttctctctgaaagacttgaattttcttcctttctacctctaatgcttcgatatattcttcgaaccccatacctgatgaacactgcattttttcttttacagattggtaaaaagataaaaagaaaaaaagattcaatttttcttatctgggtttggctctgttttatagtttttggaaccgggttttatctttatgagaagctggtatatatataagagagagagagagagagagagagagagagagagagagatgtcgt

SEQ ID NO: 323760 - DNA, 1395 bp, Cannabis indica
ccatcttccatctatttttctgaataaatggaaaaggttattgaaaaagtgaaaataatacaaagcccaatacaaacaaaagtcaatcattttagcaagagaatgagcaacaacatttaacaacgtactttaagacaataaacaacttcatcaataataataaaataaaagttcacttgtagcccggagatcatgtcttcatgaatcactaccccaaaagaggaataagtcgccacaagattattatggtctcaatcatcggtggattgtaagaggagaaaatccatgatggggcatggtttacacatggcctctaagggcacaactttagtcatagtaagtccattagcttcagccatgtcaattttttctttactaattctctcccattcaaagcactgaatcaatgatcctattgtccatccaagaacacgttcgactagtccaacacctggacaagcccgtctcccgaatccaaaaggcatgaatttataagcttcatttttgatattattattttcgaacctctctggcttgaaactctcggcatcttcccataatttaggatctctttgtatggcccatgcattcacaagtaccattgtgttacgtggcacatcaaatccactaatagtgcaatcactagatgaataatgtggtatgaggagtggagctactggatataatcgtaaagtttcagatataatattttgaaggtatggtagttttgagagatccgattcttccaaccattgttgttgaccaattttagaatcgagttcttctcttgctttttgtaaaatacgaggatgatttaataaattcgccattgcccattctaatgttacagatatttcggttcccgcaatcagtaatatctaaaaaaacaagtttattattagttataaattaattagaagaataacaaataaaaaataatgcatggaaaatgagaaggttagggtttcattttattataaaataaaaaaatgaataattaactattaattaacaattagtattagcgtgaacaaattaatagtatataaatgaaattaaaattaattaattaatcaaatatagataataaatttaaataccaaacaattattgtcaactaaagtaatacattaaatttctcttttttataactaggcaatataaccgctctttgcgcggctaatataattatttttagtgttataataaaaaatagctatttattaatattaaaaaatagtcacttaagaataattctaataagtaatataataatataatcacattagttaatttcatgaattactattatttggagttatttaataaaatgttaaaaatttatactattaatgtatatatatagaaccaagctgctcatggcttggctaaaca

SEQ ID NO: 323761 - DNA, 1552 bp, Cannabis indica
aattttaaaatatttgtgtgatagtttttttagaataatgtatatatatatatatgtatatacatttagttatatgaattaatttaatttttaattatatgaaattaatatttaatttaaataaattaactaataaaaaataaaagaaaaatatagttaaaaataattaaaaatatttaatttaaataaaacaaaaatatttaaaaatctgaacatcctaccgcgtcaattatttataaaaattgacgttattaaactcttcagcgtcgattatttaaaaataatcgacgccatagaaacattattctaatatgaaagttcaattctcccccttatgttgtcggttatttcataataaccgattgcattgagttacaataactgacggtatagggttattttacagcgtcaattaatattttccttgaaaacattggctggaacaacgtcggtagcaaattttactaaaatcgacgtgaaaacttttaaaaactgcttttaaagcccaattgtcaagtagtgggaagataaataattaaacaatggattgtacaaattaaaagaaaactacagtatatgggaaattatttaacatattgtataaaatgttgaagaacatgatttgatctaagtaggtacattgtttaagtcaatatattctcatgtatagctcttcagattttattcacatgcacataaaaaactatttatgtatatatgtcctaacaaaatagatgcttaatgtgaattattgagattaaaaactcataataaaagagagtagtgcgactgaactagattcttcgtgcgaccctctctctctctctatttaaacgtggaccagcaatcttgtcgggcttagctctcaatgtctgatcgtatctttgaccaaaaacttcacgagccaaagaaagggaattcaacctctacatagaaactaaatgaagggaccgaatccatgttaaattaatcaagctctgttattattataagtctttaaactagtaaattttttttaaaaaattaaaaattatatatgtgaaataaattatgtattttatttgataataactaagtaataaaattgtatcaaattttaatattattaattattcatgtaaatctcttcaaaaaaaatataagaagttagatgtaaaatcaaaccaacctgactcaacgatttaagatctaggctttatatatgtgttatgtttaagacaataatgaagtctatactgataataacagagtctgtcaccgcctcatactttagctttatatatacatatagatagatagatagataggttatttttaactaatattgttatttagagattttaaaatgttatgtcagtgtatcgtatctcttatatatatatatatatttgagttcagagtagtatataagtatcatttgtacacacctaaaattaattatatatcatccactataagtaaaagtaggaattttttttagggtaaataaccctgtgttttgcaaaacttacagattggacactgtattttgttaaatgacaaaatggactat

SEQ ID NO: 323762 - DNA, 558 bp, Cannabis indica
cattttatatataaagatattacctagatttaagtttcattgttgttggaagaaagaaaaatgtcttttttaagagtttaaaaataataaagtgtaaatgtggagagagattgatgataattttcttaagaaaaaataaattgacaaaaaaaaaattgtaatgtaaaataatattatttattaaaaacttaaaataataattattaaaatattagaagatatgttagcttgtactaaactccatcattactatcatattcttcaacttcttattaccataagattattaattaatgtataacaaaatatccctacccgcaaagaaaaaacaaacatctcgaagtgtccatatatttatatgaaattacatcaattagatttcttacaacaatgatctggagttgtctataaatacaagagttatatttttcactatactatattttgaatcataggaagagataataaagagaaaacaccatttacacattaccttgtcaatttatttaaatttgtttttttaaaaaaaaaaaaattatttgactttgtttcttttgc

SEQ ID NO: 323763 - DNA, 664 bp, Cannabis indica
ctttttgaatgcaacttaggattttatgatggaagcttgtctatgtttgagcttggtaccatactgtgcccaaacatatgtaatgatgtatatttctttttatattaattttatatatttgatagatcaatgtcatcatatttagttcagcaatagcatgatgtaagtactatctgggtggactgaaagcaagattctgacccaatgttttttcttctttcttcttttcatttacttatatttttatatttcatcaaaacataaaatatttactgggaagtcattaaattcttctcaattttgtttattgttctagatatatgtttttttgtaatgtgctcaaattaattacattgtcctattattcaaaaaaaaaaaattaatttgatctatttgcttcattaatttataggagaaaattttaattttttattgtttaaaataaatttattggcatgaacagtaagaacatgtaactgagtgtcaatgtcactatgagagaatctctttctagatcttgtgttgtgtttatattgtgttatatatttattggtgaaataggaattatgtaaaaataattaacttgtatatttgtggaaataatgccttatcataataatttatgagaaattttatttacattaaatacaccccattttaataa

SEQ ID NO: 323764 - DNA, 771 bp, Cannabis indica
atattaaataaaactaacactacgtaacaatcacctagtattatataaaaaccccaaagataaaacgtattgctagtaaagactaatgaaaaattctttatagctctttatttcgtactaaaaatgtttaattaattatttactacgcgtataaaagaaataatcacacataaaataaaatatataaatttatttttgataatataaattactcaaaaaaaaatttataaataattttaaataagtgtaacataaacgatcataacaaaaatttgaaaaaacccattagcattagcgtgctttataatttctattcttgccgagtctctacttaattatttaatattattattagacagtattaattagttatattttataaaaattattaaattaaattatataaaatttaatatttaattataactagtaatattatattttaaaaaatattaaataccagtaatacatttttaaggcttctccttttgttattttctttttaaaaaataaaacaattaaaatagacacaaaaccaaaagatcttcatatcaatacttgaaaattttacgagtaaatttagttaaagaatggacaaaaatattactactgtaattacaataagaaatagagaatggaaaagactttcaaaggtaaaaaaatatcagtaagaacaataatatatctattgaaataacctaaaatttaagccattaaaattagcttaatgacgagaaagaatgggaaaaaaagaaaaaagacatactataa

SEQ ID NO: 323765 - DNA, 2159 bp, Cannabis indica
aaaaaaaaaaaaaacaacaatcaaactgtctaccatctctacatcacaggcttatatagtcaagtttagctcttacaaaatacagtcacgtttggttgaagaagtaacattagataagacttgaaattgaaaaatataagagaagatgtaaaagaatgattgagttaaattatttgacaacaaaaaattaaatagcagaaaacaaatctgatacgataaaattctggattaatctttccaacttcacataattaaatcacaagattctagatctcaaaaatgcatagttcccccactaaaaataacaaacctgtcgagtgaatgcatgagatatttaacctaaaccagaactcatgttgagccccaaatcgttggtctctaactagaaaagtatttaatacctccaagcataagctatctatataaaaaatcaaatgtcatatgtactgtacagtagaaaattcttccaaactatatacaatttgcctgagaaaacatagaaaagctctgaggatgttaagactgtgttgaccctatctttaccctcaacaatataactttcacgcaaattgccaccaaatttcttaataatacttccaatcttactaatcatgtaaaataattacacaacacatattggtctcatagtattgtgtttggattaatattccttccaacaaggtattattaaaaacttgttgtcacagcagactagcctaatcaattaataagtttttctttttaaattaaaaaacaaataaaagaaaaataaatcaatatatttcctcaacatcataaactcaaatgttcctaaaatctctattgtagccatatgatttccatggaattttaccaatttctcaaccaatatagaattgaaattaatttaatagcagggtcgtatatctaagaaaacaaaagcgaaaaacttttaggaagaaagaagaggaagacttacggaagaagaaggatgaatcagttgtagtaaagttcaagacccatgccatcatggatctcgtagtccttgagagtaatatgatccttgtagatgttgtaccacttctgaattcgaatcttatcggctctggttccggtctgggcagcaaccagcttctttaggtctccgatcgtatcatcctcgttgcatttaacctttaccttctttcccaaacgatcgttcaacactacctcaatcattcttcagtcgcaagatggggacgaagagattgggaagaagctttcagcgctgttggtggatggtgatgatgatcaatgaacaatctagactccaagggtttcaaacttcctatttagggccttaaatacttgcaaaacccgtaaattatactaaaacggcgccgttaagtcgcacacgcatacagacccaccgactaagcgggtttttttttttttttttggaaaggggcgacttattgagcgtttttataacaagcgtttatttttaatttaaattgttaataattttcaaaaataactagcatgggtccaaaataaaaaaaataaaaaattatggaattgaatgtgtcttcgacacatatgtgaatttgatggtgttaggtgttagaatttggtagtaactctaatattttgtttatagggggacttacgtatacatagagtgtagggaagatttaagccatcttcaaatttcaaaacatattaatattatataaaattagaaataaaaatatataatacataattgttagagagtgttgtggacattgtcccacatagaataaatggtagagaattaagccatatataagaacataggctactccactcattaccaatttttatatttaatttataaaaattgttccaatccatataatagtttcatttgaaatttaagtaaaaaatattttatatatttttttaaaaaaaatactattttaaaatttcagcataaattttagttagcccgttcaccctaaaattatatcatgagcccgcaatgtctataatttaagcagaaatatgaacacgacaggtgtactagagccagggccggccctgggcataggcgggctaggcctgtgcctagggcccacctagtccaggggcccaaaaaaaaattttgcccttttaaaattacacaatttttttgctgattttgaaaaataccatttttt

SEQ ID NO: 323766 - DNA, 1252 bp, Cannabis indica
tattttatcttttttaatctataaaatttaaatcctaaatcccggttgaaatactataaaaggaataagatgctcctcattctcatccatctcacataagctaggtttcattctttgttaaacaactagaaaaagagagcctctttccttagtatttcgaattcctctctttgttcttcatcaatttcgagcctttagtgatagaatactatgcccactcatatcaagtcaagtactcaatcatagtgtggaagactttggttaaccaaactgaaggagagaagatccaggttcagatcttgataatgctctgctacagaaaagaatcaagggttagagatttgaatggaatgagtcattattattctgctgccattaatgtaaggattcttaatctcttatgtgtttattttatcgtattaggaaattcatatttagggtgttaaattatagattatattcaagaaacatattagatatgatcatggtaaaataatctccaataatatacacatatatatatacatatatacactattatatccacatatacgcatgcacacatatgtatatatatacaatattatataaatatatacacttacacataatatacatacatattaatagatatacacatatacttatatattatatatataatcaaatattatacatattaaaactaaatatacaaaaatacaaaattaatagattatacctatataaaaatataaacaaatacatatttaaaataaaataagattttacctaaaatggagaatcggaggcggcagagcggtggtgcctagagacgatggacctggagtagtggtggccgaccgaacttagagaatatattttaattttttttgtttgagagagagaggatgagagatatagagaaatgatgggagagatggatagagaaagagagtgagaatcggagagggggagtgagaatatggagagatgaaaaaaaccaaaaaataggggaggaggtagtcttccccaatttattttagaaacttgaaatgcgctagtaaaagctatataatgcactggtaaagattggaaaaaaccccccaaataaacaaaacgaactgtttcaatttcaattttaacggtgcaaatatgcatcgtcaaaagtttgcacactaaccaaaaaagtcacgctagaacttcccaccaactttttttaggcttttatcggggcatatatgttgggttttgtgtcctaaataaaacccat

SEQ ID NO: 323767 - DNA, 939 bp, Cannabis indica
tttttttgtagcagaaaagtaacttgcattggctaaaggatttttttgggataattgggaaatgattggcaaagatatatatgaggctattacttccttcctgcacactggacaactgctaaaggagcttaactctacagtgttgactcttgtcccaaaaataagtgtcctaacagagtgagtgattatcgacccattgcatgctgtaatgtgttatataaagcttccatcaagctaatttgctcaagacttaaaatgattgatcctcaatcggtggcacaataccaaggtggatttgtgcaaggaagatttattggcgactatataatgatatgtcaagatcttattcgacattatggaaggaaatcaagcaagcctaattgtatgatcaagttggaccttaaaaaggcatatgataccattgagtgggaatttatataggagatgcttcatgctttcaaattccctgtcaatttcatcaagttgagtatgacttgtatttgaacaccaagattctatccaatttctccacttctctttgtattaggcatggaatatttttccaggattatgaagaaaattgggcaaaagcaaggccttaagtttcatgagagatgtggggacttcgagctcaatcatcttagctttgcagatgacgtactactattctgtaatggagattttaagagtatgtacttcatgctgcaagatctcaaactattttctcaaacatcaggtttaatgcataatccttctaaatctgctttttattgtaataactgttggattttatgccctaaataaaactctatttcaatgtaatccagattattcaatatcaataaaataacagaagtatttttcattcatttatgtatgttttggtttatcttatcaattgtttgtctatttgatttataaattcattcaaaccctttt

SEQ ID NO: 323768 - DNA, 646 bp, Cannabis indica
cgcaaccaatctaaagaagtccttattcgaatgttagatagccaggacttcttagaatttaggggcgagtatggtccttccgtgtcccaaagacactaattggctagagataaccctccacattaagcatccataaaacctctctcggattaacggggcatctctgtgtggaaccgtgatgtcatctctattaatctgggaggttgtcacatctttgcctctaattatgccacatgtctcttatttaaaaacacgaataaaaataccaaacatagttagaaagagtaagatcaatagaagttagcactaatcatgcatatattggttatatgcgataaccaagtgcatctctcctataattatgtataacgatcgccactacaaaaatgtttacttttagtcacaacaaaatttatgactaaaattaaaaaagttgtgactaattataaattgtcattcctatgttgtgactaaaaggtccgtggctaaaagtattagtcacaaaaattacaatttgttatgactaaatgtgtttttagtcataatattgattgtgactaaaactaaattagtaataacttgtagctaaatactatgttttagttacaagtaagtttttgttgagactaaaagtcacatttagtca

SEQ ID NO: 323769 - DNA, 824 bp, Cannabis indica
attatttttaattcattccaattgttacaatattttatttatactaatttttgtagtaatttatcttcctgtggatacgatatagtccggttactaatacgattgtagtgtaacaaattggacgatattaatttttggaatcatttttaagaagatttttgcactataagaggttagtatagtagtgtacttttaattttcattatttatttttctatttgtttgtttgtttatttccaaaaaaaaaaaattgttagtgtatatatagtgtagttattttttattacttattctttatttctttttagtattatagttatatgtgtatatagttctattaaaaagaaaatctgtagtaaaattttttttctctcattttgttattgtagtaaaaataaaatctaaatttcgtatagtctgcatatatagtttctttttcatttatgttatttagtaaaatttaatttactctattagtttatttattttaattcatcatagacatattttagttataggtttgttaatttttcttttactttattgtttctttaatacacttttatatctagaattagagtctttttttaggttagttttaggctactaacttaaaaaaaaattgtgcctaagataattctatctaagaatgattggctttaaaaatttgtggtagagtactctctacactttctagcaacctcaggaagttttagtaaagtgtggaatggagcggtaccttagcaactttctcaatcagcctgggaatatctcgtgtatatacccttaaattattacatagttgaactttatactaattaaaa

SEQ ID NO: 323770 - DNA, 1286 bp, Cannabis indica
acaatgagtggatgaaggatgaagaaatagtctactcagacaaggccaaatggaacatccacagaacatatttgcccagtgaacgtatgagtaacatcccaatcatgatgtatgcccctatagttggaaaggcattactagaagaatatacagacagaaacaagctctctagatgaatcgtccgaactgaacgatacactttttgaaagtacattttgtgacctggacggaccttacattcttcgatatgtcgtctagagtgagttattatccaaaaataactcatttgaagaataagctgaaacattcggacagggtaaatgatgccatccgatgagcatcaatctcgcatattagctcgcatacaccaaccagggtgaatgcgactaacagatctttaaagatacttttcttatttattttatttattaaattcttattttaataggatttccgcacgtaattgctgtaaattaggaaagtaaacatgttttccattttattttttatttgttttaggaaacctaattgatgtaatttttatctataaatagtggagttatttcactattgagggattcgaattttgattcaagagagctcttatgctgtaaaaaattgtaagctttcaagagagatcaagatcttacttgcttctcttctcacaagtattacaagtaaaagggaagtaggctgttaccactatcacgtggccaaatctctataacaactttgtgttcttattgctcaactttattcaattattattgttcattctaatcactttaattgactcaacgttgttggcgacaagtgatgtcaataagctaatatctaaaaaatgataattaatttttatgttgaagactaaatgttatgtatattataattttattgaattattattttttagtttgtttaaaatatatatttaaattataaataataaattaaatatcataaatattttcttaataaaatttaaatgcgaaaataataattttaattaaaaaattttatttatttattttaaaatgtataattttattaaattttatttaacattaatattaataaaaaataatttgataaaattaaagtttttcttttgatgttgtattcttcattagccatagtatagcattaatataatataatctaaaccaatttaatcgtgtagtattattatttaggttaattaggaattttttcccccgaactttgacatgtaccaaattatgcccctgaacttttttggttattaaaattctccctgaactattgag

SEQ ID NO: 323771 - DNA, 989 bp, Cannabis indica
gagtgaaatcaataaaatttgaaaaagataaaaatgaaaaaaaaaataagataaaagatgtattagaatagaactcatagaagacgtcacgtcaccccttatttttctcttttatatagatatataggtggataggctggaaaagcttagggattacaataaatatgagcactctattttcttctcgagcttgtgagttaagaaattttaagcctttgcatgaaggattcaatatgtatttatagagaaatagatgtcatgcttagttactattttccactaatggggagtttacaaataatacatagatttggactaatctagtgaagcccaaccatgaaaccatgcgtgtatgatgaggtggaggtttgattatgatgatagttgttcgtactatgtcccctgattttggataattaatgcaatattaattatttgatctttaattatgtagtttcctattttggcttgatatttattctctgtttgagatctgagaaaagtgatttccttattctgcacgtaacagtaaatgagaaactacatctagcttccagatacatgctaaagggttcttccgaatgcacggaactaggatccttccgaatacagactagtcttggcggaagctcgcttgagtgagaagtgtgattactttcccgaaaggccacgttggtaaggggcttgacccagttcatatcgtttgggcccattgatgggccttaaacttctatttagaattcacgtgtcctaaaccaaaaatacggataacatttacccccaagcttccagattgatgtgcattgcggaggcttgcttcagtctgtacaggtagacatgtggaggctaaaggtgaaacttttatgaaactcaaatgctttatatgaatggaagacaactttcttttttttttaaactttctatgtcttacatggcattatcttattggccccacgaagcattggttcacttgatgaagcgtgtgtggc

SEQ ID NO: 323772 - DNA, 637 bp, Cannabis indica
tttttctactctattgatatgacactatttcgtttagggaaatcctagttagcttttggttataggttataagaagtaaaaacataaaaataggaataagaataaaattgtgaataagaatataaatagaaatggcatagattaaatttaaatacataaaaaattattaaaaaattattaaatttttcagaataattttttctttcattttaaaataaaatagtcattccacattaatagtagaaacgtcattctaatactttaatatacagtcaaacaaaagaatataataaaaattgttacctttttatttcattaccttcaactaaacaccatcttaatttctattttggtgttcattggatcacatccaatggatttagacccaaccaatctaattcattatttattagatattgaattttatcatctgatccaatccaatcgaattgagtcattcgatctgatcctgtaacatccctgcttcaagcctctattgggcctttacagccactgaatgatctcacttaactggatgtccccgcttcaagcacacttaactggatgtcctcagaatcatctcacttgacctcccccaagcaatgtgggattgtacaacttacctggtatttcccct

SEQ ID NO: 323773 - DNA, 1222 bp, Cannabis indica
tttggtaagagaatcgatactgattaaaataacaattgtaacaatcttacataagcattggaggattaagagtgtaaaaatattattaaatataaatttaaattagtagaacatgtaaaaatattacactgtaattaacacgaattgtgcctaattcgcctcatcctttcttattaactgtatctgttagctttggtaaatcttgacagttatttctgttaagggtatttttgtctttctgggctagttagtttgtttccgttatttgtgctctgttgagcattgtgtatatatactgtagttctttgtatcatttcaattaattcaatacaagatttcttttctgttcaaatgtgttttcgtgttatggtatcagagcggggaagcagaggagcttcccctcgatcttgaccctgttctctttcgctgtgtcgtcttctccagcgtgtcttctcttttctctcttctgaagttctttcctgaacttcacttcctggttctttattttctttcgatcagtgtttccttcctgatctgttctgtctctgtttttcgccatggaaaccgataaccaagctgaattacatggaattggtgatgatggcgtttctgctactgttgaagaagcgactgaaacaagtactcaaagtaatcgagcgcagcaaaggaatccccttgaagatcctttgaatccttattacttacatcatggagacaatccaggaaacatccttgtgtctcaacctctcactgggcaggacaattacatgtcctgaagtagagccatgcaattagccatatctgtcaagaacaagattggattcttggatggtaccattcctaaacctcactcttccaattttgttatgtataatgcttggtatagaaacaacaacattgttatttcttggatcttgaattcggtttctaaagaaatttcctctagtcttttatatgatgagtctgcagctggtatttggactgaccttaaggttagatttcaacaaaagaatgggccacacatatacaatttgagaaagaacttgatgaatctccagcaagaaaaccaactgtcagcatctatttcacaagactcaaaactctatgggaacaactgtctaattacagacccaattgtgtgtgcaatggatgcacatgtgggggtgttaaaaagacttcaagaacaccaccacatggaatacataatgtcgtttttgatggg

SEQ ID NO: 323774 - DNA, 1031 bp, Cannabis indica
ttttttttgtcacattttttgtaattatgttgtttttgttgtacatttatgaaaaaagccctattttttattccttgcataccagattttgtacactgcagcaactacacaagctgtatagcagttctttttgaatttgctttatttttccctattaatccacctcagaacaccctgcaacgaattgatttttgacttccgtcctagccaatttttcaattcctgcaggcaaggttgtgaaaacctacagtcaaaaaatagatgacacatactctctgcttcagtattacacaacaaacaatttgttttgtacagcaatccataacaaaattatgttttggtacattcaacctgctccaaatctgctggctgaggtgaaaattcctctgttcctgcatcagcaacttataaacagcagagattttgaactcaaatgttgcaaattgatcaggaggaataatttgtttcaccaaatcctttgtgtacactactctcctccaataccagctgctgtgactgggagcttcatacccccaccaatcatcctcttcaatatacacactatgcacccactttacccataggttattcttcttagaagcaatcacccacacatgttttgcaactgcagcttgattccatttggcaatatcttgaaagccaatccctccagcttttttagacttgcacagatgctcccaagcaatgttgcctggtccattcatgttacttctccctgaccaaagaaagcttctacagatactctcaatctctttaattactttcttaggtaggataagaatttggctccaatacatatggatggttaggaggactgagttgattaacacagttctaccagcaaaagaaaggttctttgagctccacagtttgattcttgaagtcatcttctcaactaaaattgaacattcagctgatgaaattttcttggcaccgataggaactccaagatacttgaaagggagattacttctctgaaaacccgaaggatctacaagccttcttatctc

SEQ ID NO: 323775 - DNA, 1211 bp, Cannabis indica
agtataccatgtaaatttccccttttcttattctatagacaatgagcataagagagttgttaagcttgcagagaatttgccatccgtcaagcaaagagcttttgatgcggagattaaggttactgacttagaaaacatagtcactgagcttgaaactagcgtctcaaatctttgaggtgccacaaacaatgccaaggatcgtaaaaagagctcacaactttgagaaggaagacttctgaagtagaagagtcccttcgcaagtcccttgctgaaaagaccttaagtgttattgaattggaaggctagattcatcatcttaagggccaagtggcagccctagaagcaaaggcagctgcaaacattgccctttatgagggctattgctttgatgccatttacaactcttggtcagtcaatggaggagctgatgactttaactgggcagccttcggtgaagacaagatcacattcttttcgagccaatgtgaccgctgcgcaaatgaggtagttctttgtgacatcaactttaacttgaatggtgatgtccaagatgtcagacatgctgcgggagtcgaaggctaccaccctaagcatccaaacttggtcgcagtcaaaatgtaccagaagagaatgcaacacaaatcgaggagatattgcaaaactagatagctgatagttctttgaggacattgtcttagtccatctttttttattagcattttagctttaatgtgttagtcagtcgtcttgggtgaccttttagtgtggatatgccttagtaaaaacattatcagaatttgttctaatttaattagaaatgaatttcaattcaattagactttattctaatattttttttttgcttttactttatccgttacagcacaacctttaacacttgcacaatatttcatgtcttaagaaactcgattagtgggagtaacattaatatttcttaacgtttcattaccttgaaagtactacttaggtgtgcaattttttttgcatgcccctgtaataactagctgtcatttagtagggggtatatgccacataagtgatcaaagaagtgccttcatttgtcacttgccataccaaatccttttcggttatcttaatcatgaatcttgaggaattgttacatgttgagcaaatgtccacttatttgtagattcgtgggttggcagtgtttaactcaccaaagaaataat

SEQ ID NO: 323776 - DNA, 979 bp, Cannabis indica
tttaattgaaacatacctctttttatatatatggtacccaaaataccctgatataagggagtcacatggagagtatattgatgtgacaggggtaaaatcggtaaagtgtttagaaaaagaggtaaaaatgataggttttaaaaaagagggtaaaaatgaaagagaacaatataaaaagggtatagagtctaattttctataatgggtaatgccaaaaaaaagtaattttttttcctattttcttttttttttattatttttgaaacataaataataatattattataatgtaatattttttgaataattttgaaagagtatatataaattacaaattaaaaaaaattatggatttaatttcatatttttatttcgtagttaggtgtcttattttcttgttaatatgtatgtgctttcgtgttgtgtttccaggctttccatgtcgtgtagtacttcaagcttatatattttatattgtgtccaagttcatatttttctcatgcaaagttgggccaaaacccataaattttagtatcgtgttgtactcgtgccagtttcacaatatattaaaaagcccgatctaaatatacaactctagtcgtcattaaagcagcgccaccaccatcgcacaccaccaaccctattcccacattgtcgtcaacactattgaaggcaacatcaacattagctttagcgattccaacagccagtttaatctagaggagaggtgtagcaacacttggcactaccccaagaagcagaagttctctctagtcctttgtttacttcttgattcaaatccaaaaaatcaagataccataaggcagtggtattcatggccagcatcactttgtcatggaagaatctattccaacaaaaccaatggcggaactacatacatctatggagtggccatggccccccctaactttgaaaaagaaaaaaaaaaacataacgtataaattaaattaggataatt

SEQ ID NO: 323777 - DNA, 707 bp, Cannabis indica
gtgaagcatagtttatgtttcttacgtaaaaaatggcatcaagagttgtaatattcagtatggtatcgttataataataataataataatcctgtgagcaggatatggtgaaaccactaccactactactactactactactagtgtactcatgtgttttgaaatggaaaggtaatctaatcggcggacccttctccgaacaccttatcggagatcctaatcctaatcctcggtcagctgcaacagctagaaataatatgagcaagacaccatgagagaataaaacatctactactttcaccatcgccaaaaaattacacccttttgattgttagttttatcacaaataattataaattgtttgtaatgatgattgagttcataaaaagaattagaaaataacttacaccagcaatatatatatatagacataataaattcttgaatatgtgtctcgattattgtaatttaagagggacttccttggtgttaattgttgaccaataacaagtgttgactctaaataattaaatattcatattctttgttatttttttaattaaatatatttatataatatttaaaagttataattaattttttaaaaatttggatgatatgatgaagaaataagacaactgcaatcaattacgagaaaattacattctatactttttttataatgtcctcttttatttttaccctct

SEQ ID NO: 323778 - DNA, 557 bp, Cannabis indica
atagtttttagtttatttttaaataatcttaagaacatattacagttaaattataaattacattatttagatatacataataataatctcacctcataaataataacattttttctttaattatataacttttatataaataagaaaatacctaacataaaaaatttaatataagtatctcgcacgtaactttttactagtacaataacacgccacaataaataacaagagtctttgaattaatttcggagtattgtttctttggtacgtatcaaatatccttgattaatttcaatataatctttttaaaattctatatattctattttcacatgttctacagaaaaatattaatccagtgtgaatagaaactcaacacgtacaacatgcatgttacatataaaacatatatagtagtcaaggtactttttgttcattcaaaagagtaaaataaatatatttatacatatatatatatactagtaaaaagttacgtgcgaggcacgtatactaaattttatgctagtttttttctacgttattaaaaagtgatacaa

SEQ ID NO: 323779 - DNA, 1490 bp, Cannabis indica
taaaaaaaatattattagtggttaatacattttttgatgttaaacattctattgacgtaattaaataacaagtcctataatttaagaaaattactattgctaactaataataaagtgacacttatacaaaatgttagacaatgttaatatttaataacaatattttttttattttatgttgtttgattatgttcttcttttcttcgatattttatatctgaaattgatagatttggaagggaaatcataattgaatgaatgatgtgacatttatatggtttggggaatgctccatttgtacacaaccatacaatttgcctcggccaagaaaacagtacccaaacaaaacacacccgctaacacacacatgccccttcacaaaacacacatgccccttcacaccacacatggttggtctacgtccattatataaatatatatatatatatacacatatatattttagaatgaaactttcattaggtcaaaaagtcaattacaaatctagactgaaataaaattatgttaatccggccactatgctctcgctacatcaagcgttaacgccattttagtaaaattataagccatttattatttttttttagatttattaatcttctaattacctattagttttgtcaattaattttgagatgtaattacatgcatctaactaaatatttggaatataattacatgtctagtgttatgagattcgaactcatgacattgtataatatgtcatacactttaactaactaagttatgaatatttattgtttacaatacacttaattttagttaaataaaattaaagtctaataatatttttattttttattttggaccccaaaaagtatgggtctagatacgggactagcccgcctatatttaaagccggctttgtgtttattgtatttgtttgtcttaagaattatttttcaagttggttatataaaaaaaaaatatcaaaaattgagctcaagatgccgtttatacaattttaaaaagtatataatccattttatcatttaacaaaataaatagttcaattaataatttttttaaaacacatcatttaaaataatattaaccttatattctttctcgtgaaagaagtatattttttatataaaagttttagaaaagaaaaatgtatatatagtttttgaaacaaaatgaatataatatttaatcatgagaaatcaaacatatttgtggttactctacatgtgaatgattattactaaactacggaatgcatgtatgaatcatgtaccccaaatatagttcatgatgcaaatttattcttatattaatttaaaagagtataatctaattgtgattttttttttcttcggcaaagttttataattgcgatttagatgccttaattttctacatttatggaagctataataatagtggatttaatctatgacattgcatatgagtaatattttcctacttttttttttttttttgtt

SEQ ID NO: 323780 - DNA, 974 bp, Cannabis indica
tttaacattaattgttttttttttaaaaaaaatggtacctttttttactaggtttggtggtggtttgactgagaacgactgaggacggtggtgggtgtctactgagaacggctgggtttcatggtggttatttcgactagatatggacggactttcagtgggtttagtgtggtagggttctcggaggttggttgtggcgagagaacgcgagggaatggaggttgagttcgggaatgcctgggtttatggagcttgagttcgagaacgccttgaatggaggttgaacgtcggttgggtttcttagaggtaggtggggggttgggaatgacgaagtggagagagagagagagagagaggagaagagagacaaacagagagagaagttaaaattttaagttaaagggcaagttttgggtattcttaggtaaaattataaacatctatttggtacaaattagtttagggtataaactttgataagaagttattttattaagtattgatagtgaaattttcccttttgaaatggataaaaattattatttagagtttgacaataacaagaaaaaaaaaaagttaataggacttaagtttgtcccataagaatacaaatctagtactagagagtgctttggttaggaagtctgcgagttggccatatgttggagtgtgttttctaagcaattgcttgttaaggattcgtttttgaacaaaatataaatccagctcaatgtatttggttgatgagacatgaaaaccatgatttggttgtcataccatatggttgaaggttgttggattttgataccaacctaaaaaaaaaagtgactaaatccacttatttcaattgtgtattgactaaggctgagttactccgcttttgtactaaaactggaaattgttcttgcttctttcaagaccaggagataatgtttgggcctagaaaaaacacaaaacccagatgttaacttcct

SEQ ID NO: 323781 - DNA, 1056 bp, Cannabis indica
agtatgagtggttggacatgaccacgctaatcaaaatgaattgatatgttacacttttctattctacgaaagattaattttaattatttgacagtcattttaagagttacgccattgaacttgctcttatgtcatatcatatgttttttcattggctagccatatggtaaatatgatgaatgtaaaacttatatttattaattatagaaaattgatgaaaggtacttgtagtgcgcttatcagttttttttttattatactgctatgatgtaattaaatagcggctgccacctaatgtattgggctacaaatataaatgctcttaattataatatattaccatagtttatataattaataagttgaacaagtccaaccagaagaattttaaacttttgtcctaattaattattatattatatattgtgacgcctacgtataatattagagcatacaaattacaataaataaaagtgaattgctaaagtaaagaaacacactaagttctagcacaaataaagtattgcggaaagaaataagaacgagaacagagaaatttttttcgtgttattggaattaaatgaatgaaatacatctaagtacaaattatttatagactagaaagggagctaagaccaactattaaacaacaatcccaattgaataataacagctaataactttcttaactaattaatcacacataccaaaataaacactaataatcagccttaaatgatatctgaatataatggtcacaatattaccctatatatcatatacagatattttgcgaatataaaaagtgagggttgtagaaggaagaagcttggtaaaagcatcagctagttgtaaggtattgttgaaaggaatgagctgaatttgagattgcgttattttgtctctgataaataaagtgacaatcaaactcaaagtgtttttgttcttttgtgaaaaggtcaggttatttgtaatatgtgttagagatattattgcagtggaagaaaaatcaagatattacaactctattgtcaatataatacaaggaccaacaaa

SEQ ID NO: 323782 - DNA, 1792 bp, Cannabis indica
aaatttgtttctatagcagtatttattatagttataatattatttcggtaaatttaaaaaaaaaaaaatatattttaccgtactaaaaatagggttccttttattttattttaccgtgcatgttcaaaaaactcaaacttattttcggtaatgtaaattatttcaaaaaaatttcaagaatgatattgttactataacaaaaatgttaaatactaaaaaaaaaaagttatattatttcggtaaaatttttcaaaaaattttcaaaaatgatattgtcatgtaaaaaaaataaaaataattaatacaaaaatgttacaacctttctaaaattatattgctttttacttttcttgtttccaaaaaggaagaatttcattataacacaatagttcgaaaggaatgggcattttcaagtaattgtttggtaaaattaaaggaaaataatcaacataaaattgttacatcttatatttcatttttattaagggagaaattttttagaaatgttggaaaattctagcaacaaaaaaaaaagtaattgaggatcgtatcttatgtgtttgacacatgtattctttttataattctaatgaatattaaaaaaaataattaacaaataatccttacaactcacatttcattttttgtttaagtatgaaataaaaggtttcacacgagctctccttctgcggcgtggcgacaggaccgatagagaattggctttgagtgtagataggataaaatttgcaagggttaagaagaatttcattcaaacccattacaactagtgctgtaaataagggctgagcttttagacacgacatgaaaccggcataagcacgactatgcaccaaaaaatacaggtttggacacgacacgacacgatgctacaaattggcacgacatgatacgaaaaatatatcattaaacatgacacgacacgagaagcacgaaagacacgacacgtaaaaacgaatagactagctcgaaaacacaacacacgacaagctcaaaaagcacgacacaacatattaaaaacccttataatttaataataataattattattcaaataataacaataataataataagatatgaatgtatcaattataaataaattaaaataataataaaatttaaatataatactaaatattataattctataataaatactattaaaacataaaaaattacgattatattaatttatttataaggtgtgatataaaaatttgagtatttaaatatttaaattctaataatgttaataatttttttatataattatctataaaactttaaaatatacatataatttagtaattgtaaaaaaaataatataaaaaagtaaagtataaatataagtccagatatgaaaacgagctggcttgtttaagaaatacaggatgacacgaatccaagcacgacacaaaaatattaggcctatgggccgtgctgggcctatcctttaaaaatattggcatgatacggcacgacccatatttttctgtggcacggtacgacacaatctatctttaaaaaaaaataaaaataaatacggactgggccaccacaacacgcgaacttaagcactagttacaatatatatttttaaaattatattgcttttagaatttcatttcaaaattgaaaaggaatggccatgtttgaaacaaaaacgcatcttcaaataattctaggtcatattttgtgtttcgacatatatattattggaaaattttataatgcacccctttaaaagggatataccgatacatctctttct

SEQ ID NO: 323783 - DNA, 921 bp, Cannabis indica
ttttttttatgaattagagaattatattgcacaaaccaatttacatcctaggagcactcctaaaaatagaagcctcaagtttgaatctatacatactttgtatttacattattacaaatcataaaaccactctctatctttacaattcaatttcttgggcaaaaacatgatgatttggcttttgagtctccatttcaggttctctatcaacctgctacaatccaactgttcaccttgccaaataaacttgtttcgagcctcctaaatactgtacactaagcctgtaataatagcagcaagtacattcttcctaaacctactcacatttgtcctacctatccaccttatgatctgtggcaggtctgaagttgaggttctccaactcagccaattcttggctgcttgtagacattggacagcaaaagggcacttgaagaacaagtgttgtgtgttctccttttgtgtattacacaagatgcaacattcctccacttgtatactaaatttcactagcctttcctttgtctttagcctattcaacattgccaaccatagaataacactatgctttggaatgttcaatcttgccaaaacttcatggctccaagacactcggttaggactaggtttgaacaaagtatatcctgctgaaatgtggtatttctgtacctgaaatatagcaggatcttgtattgttttgaggttgtccttgagagctacaagcttcttccaatgccagctggagtggatagaagccgagtagcgctaccaatcctctctcttgatgtaaacactatgaacccatcttagccataggctttcttgtttgttcgcaatagtccaaatgtatttacacatagcagccttattccattcctctattcttttaattcctaatcctccatcttttttctgttggca

SEQ ID NO: 323784 - DNA, 1125 bp, Cannabis indica
ggggccatggcctctatacaatgtaatatacctccgtccctgaggacgacacatacaaattgagaaataaattgattgatactatctatatcaacaaagttcatcttattttcggtgacctattacttgaaaactcaaaagttaagcatgtttgacttagagtaatcttaggatgacctcctatataggaagccagaatgagaacaaagtacgctgaaaacactcgtgttagtttgtaggactagtcatcattccacgaagtaaccaaagtgaaaaacccatgtataagagccgtaattccgtggctctaaggatccagtaaaagcttgaagcgaagacattacaaacttcctagactgaactaggaatctgaagtacttggtcgaaagaggtgataaaagctctatatgtagaaaataagcttgagtaacacaaataacttggtacctggaaataataaatttagttgatgtgctacattttcttacatataacctattgataacatcaaaaagtaacccgaggttttctaaagtaacttagtaccatggaatattgaatttggttgagtgtgctacattttgattggtttaaagcaaaagtaacatgtttttccatttttgtcttttatcatgctttctaaagtaacttggtacctcgaataataaatttgattgatgtgctatattttttacacatgtaacttattagaaacatcaaaaagtaacccaatattttctgaagtaacctagtacctagaatattaaatttggttgagtgtgctacattttgactggttttaatacaaaagtaacaagtttttctattatgtcttttatttttctttctaaagtaatttggtacctggaatattaaatttggtcgtgtgctatatttttacacatgtaacttattagaaatatcaaaaagtaacccaatgtttgtaaagtaataacctagtaccttgaatattaaatttggttgagtgtgttacattttaactggttttaatgcaaaagtaacatacttttctgtttttgtctttatcctgctttctaaagtaacttggtacctagaatattaattttagttgatgtgctatatttttttacacatgtaacctat

SEQ ID NO: 323785 - DNA, 1794 bp, Cannabis indica
tctcaagtttgggtcctagtctacgtcccagtacgggttcaggtttgagtatggctccgagttccagtttgagtccaggcccctgttcgggtctgggtcggggtcacgatccgggtcccagtcaaggtctaggtcccggacgaggttctggttcaggtttgggttcgggttcaagtcctgggtctgggtctaggttcgggtctagattcgggtctaggtctgggtcttaggttccgatctcggcatggatatgagtctgggcccatgtcattgttagggtttaaggtttagggttttgggtttagtctttagggatttaggggtaagtgtaaagagtttagggtttagggtttatggtttaaggatccgcttacagttctcaatttggggtcacagggtacgatttaaggttcgggtgtgggtttgggtccgagtcctcgtctaggtctaggtccgtgtttgggttcaggtccgattcgaatctttggacttggtccgtgtccatctctgggtccgggtcttggaccgagactggggtcgagttttaggtcccagtcctgggtcttgattctggttttaatttcagttttgtgtccccaatctaggtttgggacctaggtccatgtctgagtctccaatctcgatctgtgtcgtgcgtctgggtctggtccaagtccgtgtttaggtttgggttcgtgtcccaagtcccgattcgagttttgattcgggtctgtgtactagtcagattctagttccaggactgagaccggatcctagtccgctcgtcttattttcgggtcgcggtctgctttcggttccgctcctagtttggggtgacgagatacgactccgagtctgggtctgggtttgggtccgagtctgggtctaagtttgagtccgggtataggtcagatccaaacatcgactatggttcaggtcgaagccccgagtccatattaggatccactttgggtcctaggtactggtccgggtcctagttcagggttcgggttcgggttcaggtcctgggtctcagtgctagttttaaagcttgggtcctgggtccaagtcccccatccaggtccgagtcctaggtctcggtccgactctaggacccggtctgggttcaaatcctattctgagttcaggttcgggtttccgatcccaatttgggtcatgatcttggttctagtctagatccaagttcgggtctgagtctcgagtttcgatctgggtgtgggtttcgaggtcgcatccatgccaactatctaggtctgggtgctaggtcccaatccaagtccatgtttgtgttcaggtcctagtccttgttctgatattgattccgtgtccgtgttcggtttcgggtcggggtctgggtcggggtctgagtcctggtccgagtctaggattgggtttgggtccaagtttcgatcgtagtctgggtctaggtttgggtccaggtccgagtccaagtcttgggtacaggtccaggttttggtcttggtctcggtccggctccaggtcccaagtttcgatccttgtctgggtatgggtctgggattgggttcgagtctacgttcatatccagatccatgtctatgttcgagtctaggtttgggatcgggtcacaggtttaggtccaacgcaatcccggacccagaaccagaatcggaccgggactgggactagaaacctggcatggactgtaacaggacccaaacctaaaccaaaactcaaaccaaaacccataccaggacttggacccagactgagacctgtgacctgggacctaaa

SEQ ID NO: 323786 - DNA, 1059 bp, Cannabis indica
aaacaatgttcaaacagtctattttacacgcgtataaaagaaaatagtcacgcgtgcaacacactgtttgaacgtagtttttggcatgttaaacttttccaaaatttttaaaattttgcaggatgtcttaaataactataacatacataaccatgagaaaaaattgaacaaaaaattatttcgggtgctaaaacagacaagggtacatcaatgtatccattttaagggggtgcattgtagaatttccctaaaatatatgtctttaatttataataattttctttttatttttctcatattcttcaaaaaattcccatataaaatataatttaaatattaagtgacaaaattaaaataaaatattttatgacttattagaaaaataaaaaaaatacgaagataaatttaaaataattaaaattaatgaacataaaattaatttgagtttatttatttttttttaataataagatgaatttatcattttatgaaatggaaataaatcttcccaaaatgcacttagtgctatctctcgccctctcaaatcatttttcttaaccattaatataagtacaaagtcatataagttatagttataccctaaaacaaataattaaaaaatatccaatgaatgttaattagactcattaatgtctacaaaattggaccttttcaaatttagaaccaataaattagtttcattttattaattaattaatttaattattctataataattccaaaaaataaaaataaaaggatgctattacaatgcatacatctaaaaagggtacattgatgtaccattatctgttttggcatctagaataattttttaatctatttttttatagtcatatacgttatagttatttaagaaatctaataaaattttgaaaaaatataaaataattaacaatatagaaatcaatgttcaaatagtctatttcacacgaccatatactaaaaaagtgaagcatgcaacaaattatttgaactctgtttttcagtgtgttaaatttttttaaatttcttcaaaattttgtagaatatcttaaa

SEQ ID NO: 323787 - DNA, 1117 bp, Cannabis indica
taatgccccaaccacgtaaaaatgttgcgtattaacttcttacggctttcatatatattattatattggttgccgaaaatctcggtcaacacatatatcacatcatctaatcaggtgaaagtcatatatcacattgcctagtcaggcaaacctgtgccataatctggcactaatatatttcctcacctaatcaagtgaactcgtatatcacattcacattgttattgcctaatcaaacaatcaacaattacgaaacctatcatgccatgtggtacattatacttttcttacctcaagtttcggttcaggtatgttggtcgacctgtttggagaacgatcgacgatcttgggtcttctgtcataacaataaaacaagagtttaccaagtaatctatccttatttcaggtccaaaagtttacttccaagggtcccctataggtcactagggatccctactttcaattccaaaaaaaatacaaaaattgggcttcagaaacaccaacacaaacgacctactgttttctctaggtttcttgacagaaaacagctagtcattttctcccaaacgacagaccgtttctacaggaacgaaagttccaagttttggactctccaaaataccattgaaatctatccaaatcattccaaacttcttagggcacataaatgctataaatacaacagttcttacatgagaaaatttaaaatcgtatccttaaacagaaaacaccattaaagctcagacttaagattttaaaagttccaaactcaatttctaactcaaaatcatctcatattcaacaagtaaacatcgaaactagtcccataagtacttaaaaaatagttttatgaagtcataatccccataactactctaaatcacccagtcaatatataaaaccaatcatttttaacttaaaacgaaatcacaaaaagtttcgtcgcaccaaaaaagagagttttgtttatttttctgtttatgttttaaaaaaaacaacttaatatatatactgataaagtataaaaaataaattttattatgattaataataatattaatatattattaataaaactttattaataataattatcttattatttcttaatcactaa

SEQ ID NO: 323788 - DNA, 585 bp, Cannabis indica
ttaattaaaataatgtatacaaaattgtaaaatgccctaaaatataaagaaaaggatagcagttatccttttaaattaattatttggtggaagtggaataataaatcactattcatttatgaacattgataaaatataaaagaaaggagaacactgatctctctaaattaattgtatatgatagaacgtagaagtggaataatatatcactatttatttatgaaattataaaattctttttaaattaatttttcataatacttttagaagttaattttgtaatttttaacaaataaaaatagtaaattattcttcttttaatggaaggatttaaaattaattatttaagtaaatttattatcctcttacctttttttttcctccgagtgtccttcttgttaaataaaaagctttctcctacttttttctctcaccaaatatgtcacatgtccaagtggcagtctaacatatgtaattatttaactcacaataggggcgataccttaaattaagggtgggtatctgatccaatctaacttttttttcctcatcaaatccaatccaattagtaattgaatttagaaa

SEQ ID NO: 323789 - DNA, 1280 bp, Cannabis indica
aaagaagaatagttctcaatcttccaaattgaagacacttgattaagagcaacaatcatcactcttgagtcttgagtcactctccacgataatgaactcgtgccccttgagctttgccatttcaagagctaaacaacacgcagctgcctcgccacaacaagcattagagaaatccaaccttacagtattagcccaaaccacctcacgagaatggtttttagctaccaccgcaatgcaagagaatcttgctctctctcgctttcgaatatagtctctaatgatattggataattatatgcagtacactaattaataaggacgatttagtatatttctttatcggtttgattattaaaaaaaagaactttttacctcaatttattgtaataatcaatatatatatataaaggaatgtataagagaggctatgtggcatcacatataagctatcttttctactctttattttctctatttttttattttaaatatttttatttctgtttgttctgcaaagaccaaattgaaacttcagagcatttattcttctctttccccttctttaacctttgtctatctcaagttgaacatttaatggctacaaggctctttgtcccacccaaaacaaagtgtattggagccatgaggtatggaatagacttaatatacctagacatagcttttgcttatagataactatctaagatagacttaaaactagagaaagactgcataaatttaacatcattggagaagatttctgtttgttctgcaaagaccaaactgaaacttcagagcatttattctcctcttgccccttctctaacctttgtctatctcaagtaaaagcttggcttggctggagagttgaaaaaacaccctgaagaggttgttaaggtggttagaaagagccaaaaccagcaggtttcgcaaggcagtgcttactgctgcagtagctgttttggtgtaccatttatggaagaaccgaaatgatatgtatactgtgaaattcaggaaagcaagcacatgaacaggtggttcatgtcacaaaggtagatgtgaagagtagagtggtctgtaattagcctaaaaatgtcaaaccgattgatgttgagtaattttcagcattgtaactcagttctttttgttcaatagagttaaattgtttgattatatactgtattcatcgtacacatataaaatttacatcttcaattgaagatgctaataggttgtaaattgatattttggagtaatgaatttcaaccaaaaaaaaaaaa

SEQ ID NO: 323790 - DNA, 1453 bp, Cannabis indica
gcataaaacccaacagttgagtgatgacctagtagaattggttatagcagaatttgatattatactatttcttgtccaagtacgctgctagtattgattgtaagcagaagatggtgatctttcaacctgaggatgaagagccctttgtatttgtgagggtcagttcagggttcttaaattccaataatctcgatgttgaaggctagagattttttgcaggagggatgcttagggttatcacaccacccgagtcaatttggccagaagatattaaagtggtacaagagttcttagatgtatttccagaagaacttttagggttacaatttcatcgagaaatagattttgtgattgacttagtacttggagtggagccagtttcaaaggaaccctatagaatggctcccactgaactcaaggaattaagatacaacttcaggggatgcttgacttagggttaacccgacccagtgtgtcaccatggggagctctggtgttgtttgttcaagagaagatggaccacttcacatgtgtattgacttacaagaactgaacaagttgacaatcaagaacaagtaccctctgcctaggatcgatgatatttttgatcaacttcaggaaaagacagtcttctctaagattgatcttcactcaggctatcattagttgagaatctgagaggaggacatttcaaagactgcctttcttactaggtatggccactatatgaattcttggttatgtcttttggactaattaatgctctagaatcttttatggatctaatgaatagggtattcaaggttttcctagatatatgtgtcatagtatttatcgatgatatcttggtgtactctcaatcagaagtggagcacgaggaacatctacgaatggttttacaatgactacgtgaacataaactttatgccaaatttaagaagtgttaattttgtttacctcaagtgtcatttctagggcacattgtttagtagagatgggatcatggttgatctggaaaagattgaattcgtcagggattggccaaggccaaagacaatcactgaagttagaagttttgtgcgtttagttgggtattaccaccaatttgtagaagggtttttcaagatctcaatgcccttaatagagttaactaagaaaaatcaacagtttatatggatagactagtgtgaagcaagttttcaagagctgaagcaacgattgattacaactcgtgtattagctctactgtcaaatcaagaaaagttcatggtttattgtgatgcatccagacagggtctagggtacgtgctgatgcaagttgatagggttattgcttatgcttatcgtcaattgaaggagtgcaaacatcgatacccaactcatgacttagaacttgccccaatggtctttgctttgaaaatttggcgacactatggagaaatgtgagaaatct

SEQ ID NO: 323791 - DNA, 1298 bp, Cannabis indica
catcttgttcctttcagagaaaaacctgagtgccttctacgtaacctagccgccacttatctttctttattctgcattattgattcgaaccccttaagtgaatgagtagtgcccacacacatcaagtggtacctcaatcatagtgtggaagatcgggaagaatctagattcaacaacaaggacattcgggctcagatcttgataatactctgcgacagaaaggatacaagggttagagatctgagtggaaggagacatattattccgctgcaaccactgtaaggtttctcatactttatatttgtttatttcatatcgttttagaagttcatatttaggatgttaaacaacatacttgtgagtagatctaacatcctggtaaaataattccaacaggcaggacatacaaagaagttggcctataaatacccccaaaaaagtacaaggaaaggggaccgcggggttttgagaaggaagacttattcttcctcatcctaagaaaatgcatttttgtaaccctactatcaactccaaaatatttctactaagcttcgtcttcttcaagaggaacatggtggaagggagtttcaatccatcgtatctctacttgtattaacagttaccggccgatgagcctaataaaatggactcgtggactaaggatagttaacgcctaaaccacataaaaatctcttatttgttatcttgctatttattctatatttactttccaaagctctaaaaaaatatttcgttgtcgaaaaactcggtaaatattttagcgctttcattgagagctgaaaaaagagacatgcacggcagttacgtaccgacgcaagtttgtcagaaagagaacccatgcaagaaaaggaggaagacctcctaatctcctgccgaggtctagttgatggtcagaaatgtgcaggtcgggggtgttacccagactgagggctgatgctttcgtccgcacaagaaaaatactgaagactttttagtttgactctaataccatgtttgaattcaagataagatgcatgagatttcctcttaaaactaattgactatgggaaaagtagctcatttaacatatatatgatattttattttcacacattgacaatgtgaaattaactctaatagtatcatattctataattgtggaataaaaagctcattcggaacttattacaccacacactaatttcgtggcgcaatcgcgcaactcaagtccactaagccttaaagcatctctaatgaaaaaaatttaaaggatgcttggtgaggtggacataatatgt

SEQ ID NO: 323792 - DNA, 1279 bp, Cannabis indica
aaaattaatcaaacctgtccaagtcttaatctggcatattgctaatattttaaccatagttgttttttaatgcttgcatgatctctaaaccgaccaaaccaccgtccgatgtttataaatattcagtttttaattaatttcttttaaaaaaatttgaataggacatactgattagatttaattaatctaattaagttaactaaataattctgtgaataaattaagtgagacttagttgaccttttttacaccgaaagataaaaagatagaaaaggaacctattgcaattttcaattttattttttaaaaaattatttttgaaaatctttatgtgtaccaatggctttttcttttgaatattttaatatggattcaaatatgttctaaaggtatgttaatttgatttctattttatcatacttaggcacatgtaataacatttattagattgatgttttactttaactaataaactctaattggatcaatactttatgaatttgattaaaatttatttaaaagaataaacttttgtgtgcccacattattcatgtataaataatttatagtatttatatttcacacaaaatcataacttcaagatataatattttagtaattagatccatcctataaatttgattaaaatttatcaaactaaataaactctagttaattaattaaaaaaaaaaatacagtaacttttattttttatttttcgaaataatgaaataattctactaatttgtacaaagccaaccaatcaaaacgatcaatacaaaattcaaaagtaaaagacagggggaagacttgagcactaaactttaacagtatccaaagaatgagcaatacaagcaagcaagtgggctaatccattaaaggaccgcttacaatgagaaagagaaatactagagaaagcggaccaaacatttccaatatccttaataatagcaccaaattcagtggaacatgtttctttactcaatgtaacttgtgttaagaatattttacaaagatttagatttactaacaaatatgttgaattaacatcctaaatatgaattctctaaaactatgaaaaataaacacataagtgtttaagaaaccttacattgggtgcaacggaatataatgactcattccgttcaagatctctagaccttgattcatttatgtaccagagcattatcaagatctaaacctggatctctttctctcattcgggtttggttaccagcgtcttactcactatgattgaatacttgacttgctatgtgtg

SEQ ID NO: 323793 - DNA, 2712 bp, Cannabis indica
agcatggaacaactcattggaaatataattcgcagagtatgtttacaactcgactggctgaatagtcttttgcgagacagaaacatacgaactgctaacttatttattaacgagaaaccatgtcggtgcacacgttcaggacgaggcctcaaccttcctgcatgagacagaaagcgacaacactaaaaatactaagcgtatattatacaatgtacaaactaagtgtaggtagtttgacgagccacgattgtcgacagcgaggtgtttatctcgcaagaagatggtatacgtgcgaggaagatcctctagacaccagagaagtatagttatcaaaattaagataatattattctcgagaagctaaaatgacaagtaactgctcgctatcaaagagattttggttcccttcttggcgaggcatccctatgagataaggcttaccatatatctttaattacgcgttcatctcggcccaataaaagtagaatattcatagctgtgtaaacacctcatttatttggcttgattttttaacagacccacaattttaaggataatggctataaacatatttttggtcagttatgtaattaactgccactatgcaattataaatagtggcagcaagatcaaagggggggggggatgaaaaaaactcttacgcaagaggtcctgaaaaaaatactcagaaatttgaataagattgactcgtggactatgaagaattttaactgcaaaaccacgtaaaaaaccccgatgtccatatttcatttttctattgcttttattttttctttgttgaattatcattgtgaggctcaaatttggttaacaaaaatctacgttaacagtttggtgctttcattgagagcctctgtgaaaaagctcagaaagaagcctcctgacataaaagtgatggatgacaccaaagataataatcctcaagtggaatcaatcatcgtcccggaaaagaacccctgagtccttagggatctatcgagtcatcgcatgaaaaaactgcaagtcctaggaagacctagtattgcagcccttggcttgacggaccttggatgagcaacgatcggtcactccataactaggttgatgaagatggcacttacgacccattcagatacataccaatcatggaattagaaaatcaccatcttaggtgttgattggaggaagtaaactggcataataccgagttagagcatgaaatagctgcaataaaggcaacgcaggaggatggtactcaaaatcaacctgaccttgggagaagagatttgcgaggcaaacctcgcgactcacaaattaaggggcaggagatgacccagagatatgctcagaactcttaggagatgcaacctaaggaaactgaggaaagtcttggggtacagcctgggatacgtggaacattgaacaaaaatcacaaaccctttcttcagattcaacaggaagaaattcgcacaaatccatataggtagaataaggcgaaccaaactctaagaggaaggacaaggtccaatcacaaccacgacatgagtgatctacgagagtatctgaacttgaagaagcctgacctccgccagtgactcggtccaaggcaaaaggattcattccatttgcgaatgcgtgagttagagaataagtctagagtgcgtcaaatcacaaagcccaggagacgaccggggaacgatactgttgaaaaacttgattcggaggcctcggggtcaaagaaaaaagacgattcaaaaaggctgcctaataataagaaacccaacaagtatatccctctttataccgaatccatcgagctcaatgaaaatcaagaaaaaatctacctcgcatatatacgggaaattatttttggcgagccaagacctatgaaacatgcgaggcacaagagggatccaaatacgcagtgtgaataccatgatgatattggtcataccacagaagagtgtcgccagttgaaagatgagatagagtgtctcatatcgcaaggacaccttcaataatatataaaagggcaggaagaggcctatgatcagttcgatctgcccattaactcgagcgactaacgattataaccctcctccaccagaagaagggacaattcggttatctcgagagggagcgtgtcgcaagagtacaaaagccagttactccgctaaagcaattgtgtagaaaggattgcgacgtgagtagatatcagcccactgtggttgccatattaagctttgacgtggaaagctggaagtcaaacagtagcactcgaagacaaagaactaaaaccaggatcactctacctggaaccctagtgtcagggatcgaccctgagtattgaaacaattatgggagaaggttggggattgaccgtagacatcaaaacaaattttgtcaaaaccaaatactctcgaaagattgataatttaaacaattgaactggggaagttcttttgagattgatgattgtaaatcacattactggtgaaatattttgaattctagttgtgaataaaataatcatttctttcaaacaagtaattacaaagcgtaaatccttcaaaattacttgaggggcatatatgtatgattaaccaaagttgaactggaaatacatagtacaatgcaaacccatacatagttacaaaaaaaaaattaaaattttttgaaaactttttaagagggcctcgaccaaaccttttt

SEQ ID NO: 323794 - DNA, 1796 bp, Cannabis indica
cttaattttgtatcacactttataatagcatatacattatacatatgtgcccacaatacctatgcctattcctgagctaagtcggttgctgctaagaacctggaacggagggagtctttggctcacaagtactctctgtgttgctagcagtcagagaactcccatttacggaaactcttcccgcgaagttggtgcctttatcttctcggagcatcaatttaggagactggtcagctaatgactccttagcctttcttgattacaatatatgtgtcatgattacaaaaatgtagataacaccaatttaaataaaatcaacaaataaaaataaaaaaatacaaaacacgcttttattttttatttttaagatttgaaaacaaaagtggttatagaacgcattttttttcaaaatcaatttttttttaaaaaaaattgggtgtgtttggtaacacttttttaatcagtttttttattttttaattagaaaagtgaaaatattctataaaactgttttcacgtctaaaattgagaatcaaatattttaaaattttgaaaagaataaaaaatcacttttaaaatttttgtaaacaaattttttttcttaatcaatattttagactccgaccttaatctggaccttgggacccctagccccggccccaatcccaaactcggaccacagtcccaaacccgaacttgttccagacttaaataaaattaaaaataaaaataaaaattatagaacacacttttgttttctatgtttaaaattaaaaatcaaaagtgtttatagaacacatttttatttttgaaaacacaaattttacttttaattttgtgattaaaatatttaaaaataaaaggttaccaaacgctacctaaactttagttatgttactgttggttttttttttcttcatcttaaagttttaatgaaatagtaaaatgtaattcacactaaaataatcgatctaatcctcactattacagattagattggattagatttaaactgctatgcggatttgattggatctaaaatatgaaatctacatttagtgcagattggatgttgtttgaccataatcttaattacatagaatacatgtatatttagttatattcttattttgtttatgtatatttttagttgtataattgatatttttttttgtgtgtggatataattcaataaaaaatatcatttttattaaaaaatattttatttaagtgctatgtaaaataaatataataatattcaaaacttattgttattatttaaagataaaataataataaaaatatattttttagatatgtaaattgagtcaaaaaactaataatagaaatatatttgttagatttatgcatagttttgttatacccaaaattcggctggcacttcagaggatgacacgtgtcaaccttgaggaatacaaatcaacaaatataatggccattatattaaaagaatattaaatggaataactcattaaatgtagaatcaatagagtatatttataacttgtagactgcacaatcttcagcgaggcaaggatgtacgaactatcgattcgtgtattaacgagaaactattttgcgtcagaaggcacattcatgaaaagggtaccggtaatgcatagcgaggcatatacctcgcgatacatagagaagcagtgacgagacgtactgcctgtcagagcacttagcgtataatatatatatcatactaactaagtataacagcttgaaggatgtaacaccctaactatattaggcgaattacgtgattttta

SEQ ID NO: 323795 - DNA, 515 bp, Cannabis indica
aaaaaaataaaaaaaaaaatcggaatattaactagtggtatattagtgtattattaactaattattcaagaatatatatagtctatagttaggcattgataaataaaaatattaatgtaagcatgaaaaaccacataaaattattgcctctatgcattcaacaattttaagaattaaagtttgtaagaaatcattaattatcatgttaaattaagggttacatagttgtagctattaaaaattaaagagctaaccaaaaatcacctcattgatatttgataattattttataaggggaattttaaattttatgattttatttcttttttgcaaagtttacaaaaatgtatgttttttttagaaaacattcaaaaaagttaaaaaaaatatataggaaaaaaatttagggtatacccaattagggtaaccgcttatattaggttgttttttccaataacttctttttcaaattttgggaaatttacaaaaatactgtaatttgggttaacttttac

SEQ ID NO: 323796 - DNA, 889 bp, Cannabis indica
aatttaaaatcgtcggctatactacccacacttaaaaactgtcagtgaaacaaattgaaataataaaagcctaattgaagtccattatataaatatatataaacatgctttagggttaaagagtagcgcagtcgtcctttccttctctttcgtcacacactctctctctctatatatatatgtatatcaaaaaccaccaaagaagaccatccgagtcgcaccattcaatcattctctctctcaagccaccggagaggatcaccaccctttcttcttctctctttcggtctgggtgggttcggaagtggtactccggtgtcatgaagtgtttgtaatgggagttgcagtctcgtattgatttcgtttctttttatttttgcaggttcagtcgtcttctttgtcgcgcacatactagagctctggtcatcttctacatcacacaaggaaactgtaacgtccccgctttaagcttttattgggcctttacactcatggaatgaatggctcttatacatgagtacgccactctggctgcttaatggaatgatggctgaccctacaaaccaacacgagtgtttccagcgtactttgtcctcactagcacgcttgctgagaaaacttctcaggaggtcacccatcttgaaattaccccaagttaagcacactcaactatggagttctttcatgatgggctaccgaaaaacaagatgcaccttgttgatacagatagtaccaatcaatccatttaagccctcttcaactgtgtagtctcataccaacacagtctcagaatcatcacacttgaccttctccaggcgatgtgggattgcacagcttacccaatatttttccttacggatcacgggactactgactgtcacaatcaccc

SEQ ID NO: 323797 - DNA, 1809 bp, Cannabis indica
gagagagagagagaatcgcgagttagagagagattaaaaaatcaatcgtattaactcacttctgttcaattctattggttgtttgttatactgacatatatcattataatattataaacaaacttttatttaatccattaaaataaaagataatatttattttaaattgaaattcaaattaaatatcatataactgattaatagaaatcacttatatccttatttaaattatcttttcaaatttaaatacattatttaataatatatttaatacaataattaaaaaataattattaatttattttaatgacaaaataatcaaacaaaattttcacgggcctttatttgttaacctacacgtgtgggccatattttaaggtccaaaaattaatttctcaattttgcaacaaataaaatttattatttatattgctaataaataataattgattaatcctcattaatctcttatttcattaggattaaaataaggaaatttagcccagatactattttttaactttttttttaaaacaatttacggtttgggttgatgcggtagtttcttcagtggttgctatgtgggttgctatgtggattttggttgcgatttaagttgctccgttagttgctataaggatttttatgtggaattccgtaacaatgcaaaaaaaaaaaaacaagttttgaagtgtaaaaataaaaaaaaaaatcccttaaaataaatattattttcattaaaataatatatttctctctttaatattatttaataataatattatatttaactaattaatatagtttcatcaaataaaactaaatagttaaatactaattaaataattcataattgatgtaattaatcaaaataataatttccacaaaattactattttgtccttaagaattatttctcattagaaattaattcttactcaaattttgttcatcaaattaaaccctcccatgtacggtgttgtatagaggtgacttggggaccatggacctatattttgaactcatcaaaaagataatccaatttattaattctatcattactccactataaatgtgaaatttcactctttgacaatataaaattatatttacagaattcttacaggtacgtagtcaattgatataatcaatataagtagtccgccctccaattattagttcataattaaagttagtcaaaattacctttttactcttctaattgtctcttgattctttatgtaccattaattcaatgtgaacagttaatttataatctaattatagatttagatccaacagttagcactcataaaattaacactataagagaactaatattcgatcatttcgtaaagcttggattccattattgtatagcatgttcccatccattcatgttttaagctcccaaaacaaaagttgtaaaaccatcttctttgagaaattttaacaggtgaattaaagaactcaatgaacataaataggagttcatgtatactcaagattcgttgtccggactctcagcaccctagtcggccgcaggcacctctgcctagccaacccctggatctctaccgacaagaggttgtgtggcctgctccactataccaaccctacccatttttgccagcctggcgatgtgagggtcaaaaggtggtgctttacgacatgcttagttctggccatagtgtatcaatatcagcctagagatcactcagaaagttgcgggaacagactggatgctaactcacaaaggctaaactaaatggacctatgacaacgcggttgttgttgggttttatgccc

SEQ ID NO: 323798 - DNA, 835 bp, Cannabis indica
caatagaggcttgaagcgaggacgttggaagtgggctacccattcacttcttagatcccaatctcagccactcgagtggccatcaagaagttgttgggccttggcctttaaacaaatgactggggcaaaaaccattgaaaaatttctttgtgaacaaaccttgttcaaccctatcttggacatcgaagattttaggtgctacgaagctaaaaatggtccaagaaaacaaaaagctactgatggattcttcatgctacctgagaagatcggttctccattccacgctccctcaacaatgaatacacccccgtctctcgtcgagcatcgaagacctgcaactctgagaaagggaactggtgctacacgaaacactagtttctctccaagatcttgtgatgatcgaatttccaactgtaaaaaggagcgccctaggaaagcaaataaaccttctgggtctttggtccaatcgtccaagaagagaggaaagaccaaaaaagtcactgactgagctagggttaagccttcagtgtcttaagaaaaaaggagctttgaacagaccagaaagggcctcaaagcattaccgaaatctatggaatgctggtgtagttgaattagcaactgacttacaaaaccactttgtggttattgacaatagtgttggaaattattttaccaggatctatttactatcatgtatgttggattaacaacctaatatgaattctaaaacaatgaaaataaacacatataaagttagaaaaccttacagtgggtgcagcggaataatatgactatttttctctcataatttcgtggcttatcaagcatacaagag

SEQ ID NO: 323799 - DNA, 574 bp, Cannabis indica
aaattaccctgaataaaagttgttgcaaaatatataaccctctgcagatacattctactcatatattttttaagcaatttgttgatataatacaagcataaagttaaatatttggttagtgtgaaaacaaaaaataagataaattatgaaaatatgtatatgtatttttagagtaaatgtttgtatgttaaatgctaacaaattaaatgaatttcaggtagcctataaaagtgttaaatagattatcgtgctgtaattatatatgtaactcatagttgtataaataaattaattatttaaaaaaataagcaaaatgtaaccataaaaaaatatttgtaactatttgtataattgggaaaaaaaaaatttgcaacaaaaaaaagttgaagaaaaaaactctacaaaggttgggaatcctattttgctattacaaataagatacatatataacctaaaggaaaaaataatattggttttatttttcttaattttgacttgttgagtgcgaaaaaattacattaattaaaaaatatataaaaattgacgagaatatactaaggtgtcgtttggtaac

SEQ ID NO: 323800 - DNA, 2031 bp, Cannabis indica
taataaaaataaagtagatgtagtcccattaccatcgcaataagaggtgaactgctataaattcctagtgtccttttttatttttcgcggctttatttagcaaaattaattcaccgcagtcatcttcttttttacgatcttcttagattagttgataaaaaaccgcgtcaataactcattattcatttaattttttaaatgaattgagatgcaatttaattgatatgtaattgagtgattggtgaatattggataataaagtaggttatttattaaacaacgagctatataattgagtgtaaaataagttttaaagtgtttaactaagtatgaagatagtgatgattgcaaggaagcaatggtggcgtatgaaccgaggagtgaaaccttagtggtaatgatagaaaaggaacgcgagagtctcagatgtcgatgaatcattattaccaatgcgggactcactataagttggcatggtagtacattacaagggattgtcaataaaatagagaatatacatgaggtttgtatatttttgaatgtgtttgaaaagattatcaagatttctaccaaacatagaaaagaaacttcaggatcaaggaatgatctttgattaatcgttattagttgagaatttgggaaatgagtatttccagtttagttgtgggtacttggtatgagcagtgttgcctctaccatataggtttaatcaatatactttataatggtggttaaccgtaaatgattaagaaatttaaaagttgtgtcaattctagggaaattggtacaagttaaaattagtggagatgaacaagattcaagttgatgataagttggaaattcctcatagttaagtgaacaataccaatgaggaattgtaagaggctaatgaagggagtgatgagaattgtctttttttacgaaagaatgaaggcaagaaatacaattaggaatgaaaaagaagcatctacttatggataacccaccatgagcttaccttggagttaagcatacttaacatggggtaatctcaagatgagaaatctttcggggagtcatctcagaaatcatacgagtgaggataaagtacgctaaaaagattcattttaagatgtagaattgatagtcgttccagagatttctaagtgaaagaatgtgttaacaagtaaagatttacaaggtatcaagatgagcttatgttggtgggtggaaataagaaatgctttaatagagtatctatcagatgctttaattgagtatctattagaaacaagtaacttgttattaagttaagtcagtagatcagcttgggaggtcccataggagaaataaaaagacataattatgaattaaggagtatgggatcttatgatttcgaccaagtagtagtggttggaaatgctgagttaatatgctgtctattagtgcagacaatttatacaataaataaagatatagaattcatatgaaggaacagtctaatcttgtgaaattccaaagttgatatctttgactatgatgttaagaattaaagaagatttttgagaaccatggagattaaagtaaaaatagtataatattttattcctaaaggatggataacctgagaggatcaattgaatatttgaaatatgtcataggcatattagataaaggttagattatcttagaataatctcttccccagataaagtgtttgtctaaacgtgataattaaatgtactattatttggtactttaataagtgtggtacgagagaaatattagacacctgttcattagagtaagtaggccaagtagcctatcagctagccttcgctccatgctgagaaaatatgtattagacttgactcatattctgagctacgacaatattaaactttaggcaaatttagtatatgggaaaaatatcttgtccaggttttggactagaaaaatgaagtactatgaaatgagacaattccactagttgagaaagtgttgtagcaaaacagcaagatagaaacattaatttgagagttagaatcataa

SEQ ID NO: 323801 - DNA, 744 bp, Cannabis indica
gttagtcgactgagaatgatcatcattctcattcagattagtagtgaaaggtgtacgcctattggttttgtaaagcttgcatattacccagctggaataagtatcaggaacctgcaaagaataataaatgtacataaaaattatgtatgtatgataatttagtagagaaaaaagaaaagaaattaaatatatatcgtacttttgcgggatgttttctaaacattaattcagcctctccataatattctgtcaatttccaatcagtacggtcacctcccttttttctatattccaaagtcctcttaatgcctataacgccgtctcttccacggattttcaccggactcgcattagccttccaactaccattttcagattttctgaccgaccactgcctttgattcttcttacgcgtagttttcttataaaaataaaaccactctttttttgcaccagctgcaaaattaattagtaaaataattaaatacaataatattaataaataaggtaattaataatattgatgaatgcaattgctattacctttgagatcctcttctgcagtttgaatgatgtgtttgtcattaatatctaatgcgtcgacaactttgatatgagggatttcaaattcttcgtttttattttttaagtccgcatacccaacgcattcttcatgtgttggatgaaatccctctcctggaaaagctttgttttgaaccataattaatagttaggaagtatata

SEQ ID NO: 323802 - DNA, 710 bp, Cannabis indica
aataataagtaagaaaataatctctgtatatatttcttgttttaatttacactagaaaactcatatatatatgctcctcccaatcacgtaactcttgttatatattatttataatgtaatataatattataataatgtgataaatagtaaactgtggcaaaatatatgaaagatttgaatttctatacactttaataacaaaaaaaaaaaaaaaacatcacatgttacacgcctttcaaaaatataattattttcccctcattctctttctcttgacaaaaattggacaaaaacttccaatttaagattgttgggtggtgcgggtttaagttattttttcaaatcaaactgcacatgtggttttttcaattttttaaactacaactgttctgcaagactttaaaaccgcgcgaaaactcaccgcaaaaatatggtgcaatgcggtttacactaacatcattagtctaataaaattttaacaatcaaataaaaaataaactatcttatcaaacttttaacgtcataacatatacactaattgagttattgtattaaattgtctctaaaaaaattatataatatacacacatatatatatattacatattatatatatatatatatggaacacttcttaatgagtaatacccattgatgggaactaaaaaaaattaaataaggtaataatctaataaccttttatggcaagt

SEQ ID NO: 323803 - DNA, 621 bp, Cannabis indica
tatctaataattaacaatgctcatattatataatatattgtagtacggctttgctgtgggcacaagtaatcactaattcatgaaaatgatggaataagcatggtatggacaatgacaaatccaattatccaaataactaatggtacaaacatatcttgattaattaagcaataagcatttggccccaataattacacttatatattaatctcctccaacacttatatattaatcacctccattatgaacaaatccaatttagtcactgctcattatattatatcttcatcaaacatgaaaatttatctttgtaaaattgggatagccgatctgcgctgttgatcattatgtggaattattgccaaaatctatgcataattggattttgtattattctaaagctgttcatttttattaatttatataatagtttaggtactagtctgtatatgaatccattagtagcagtctagtagatatgtaaaggcagcaaagcatatcaaaacgtctttttcatatacagtcatttagcaacatgaagcatattaaataaaatctaaaaaaaactttgtagggagctccattaattcttcccatatatatatatatatattaggtaca

SEQ ID NO: 323804 - DNA, 2596 bp, Cannabis indica
taaaataatttccaacaactgcagctagtcctccagtagtaacaagtcagattcttgtcaacgactcctactagactttactatctgactctggagctacacattcatatgtggcatcgagagtaaataataaatttggtaggccttctgattttataaaattaaggtttggaaccctactacctagcagagagtaagttatctccaaaagatggatcatgtctatgccagttagaattgaaactagggagttgagtgttgacctagttgaattggatttaacggagtttgaaattatactaggaatagattttctgtccaagtattcgaccaataattattgtaaatgtaaaatggttactttgcactcagagcttgaagatccatttgtttatgttaggatggtttagggtttttggatcccaatcatttcagttctagaagctaaagatttattttacagtggatgtgtaggatttttagcgattgtaattgactcgagtagatctaaatagttaggcctgagaatgtcaaggtagtaagagaatttattgatgtttttcctgaggagttaccgggattaccgccatagcaagtgatagactttatcattaatttggcacctggggaagagcctatttcaaaggcccatacagaatggctccacttgaacttgagttaaagatacaactttaggggatgctggacctaaggtttacctgaaccagtgtatcgccctggggagctcctatgttgttcgtaaagaagaaagatggatccctccagatgtgtattgattatcgagagtttaataagctgacaatcaaaaataagtatccattgtgaagaattgatgacttgttcaatcaattttagggtaagatagtgttctctaagattgacctaaatttgggttatcatcaactgagaatttgagaggaagagatatgaaagacttcattttagaacaggtatggtaactataaatttttagtgatgtcatttgaatggataaatgcttcagtggcctttatggatctcatgaacaaagtgttcaaggatttcctccaatactctattataatctttatcaatgacatccttgtatactctcagatgaaagtggagcgtgagcaacatctctggattgttttataatcactctgtgatcataagttatatgcaaagtttaaaaagtgtgaattttggttctcagaagtatgcttcctaggatatatttttggaaatgatggaattatggtagattcaagaaagattgagtcagttaaaaaatggttgaggccaagaataattactgaagtttgaagttatcttgggttgggaaggtattatcaatgttctgtagaaggtttctctaagattttaatgccattgatagaatttactaaagataaccaacgacttacatggatcgagaagtgtgaaatcagattccaagagctgaagcaacaattgatcacaacaccagtgctagccttaccatcaaactaagaaaagtttgttattttttgtgatgcattcagatggggtctgagatgtgttctgatgcaagcttatagagtcatagcttatgcttcctgacagttgaaggattatgagcagtgttatccaacacgtgatctagaactagctaagggtgtgtttgccctaaagatatggaaacattatttgtacggggagtgagatttatacagatcacaagagtgtcaagtatttcttcactaaaaaagacttaaatatgagacagagatggttgttagaattagtcaagcattatgactgtgatattttatatcatcttgagaaatccaatgtagtggcagacactttgagctaaaaaggtcccgggcaggtttttagtaccataatgatttctcttcagttggcttcagacatggttaaagctagaattgagtttgtggttgggaaactacacaacctgacacttcaactagacttgttagaaagaatcaaaaagtgcaattggaagactctaagctagttcaaattcggggggaggtattggttagtcagcttaaggacttctcaatctcgaataatgaaatgttactttacaaggctcaggtttgtgtttcgagcattgatgagcttagaaaagaaatacttgatgaggctcatactacgccttattcgttgtatttgggaaccaccaaaatgtactaggacttgaaaccttactattcgtggtgcagaatgaagagagacatttttgaatacatgtcaaagtgctgaacttgtcaacagattaaagtagaaccttagaaactggcagggttattacacgttccatgagtggaagtgggaagatattataatggaatttatggttggtttacctaaaactacgggaatgtgtgatttagtatgggtcatagtggatcattttacaaagtcaacacacttttgccgatgaaaacaatttacaccatagatcagtatacaaagctatatgtaaatgagatagtacatcttcacggggcttcgaaatccatcgtttcagatagagataaaaaatttacatcaaaattttgggtgagtctttagaaagctatgg

SEQ ID NO: 323805 - DNA, 767 bp, Cannabis indica
gccttactggtcttaccaaccattttacaaccatattggtttacccaaaaacaacaaaaccatactgaaaatcccaaaggtgcaaaccacaaaataaagcaaacaacaccacaatatttttctagaactaaacaaaataaagcaattcatttataaactaaaaaagaaagtaataagagactaaaagaaaatatataaaaaaaaaaaaacaaaacaaaaacaaaacaaaactactacaatagatctagtcggccacaaaacaaatctagacatgagaaaaacaaaactagatccagaaacaaacagaagaagagggcttaccggtgaacccaaaagagtagcatccgaaaatgacggaaagataatcccccttctattgtttctcagggctccaaatcttattttgatgcaaaaaaaatgataccataaggattctcaaccctgaatctgagatactcatcctgacataagaacttccattgtgcagaccaacttttacaaacgtcgtcaccataaccgagaaaagatccaccatctgttacttacataatattaaataaatatttcatactttgttgaccattttatgtaatatatatgattttaataatatcatactcatatgagatcattttcttataaataaatatgaaatttttttatatttatataaattattcaaaaaataattaggatatttaaatgttggaaaagttcttattacaagataggataggaggattataatcaaaatactcaaaatacaa

SEQ ID NO: 323806 - DNA, 1305 bp, Cannabis indica
agaaatggctgggtgtatcctagtagcctaatgatcatgttgttacataaaaattaaggtataggagcacacccaccatttcgagaacttacgcaatcttctcagattgtaaatcgcatatgtgtgacggatagggtgcctcaaaaaatggctaggggtttcacagtgacccaatgggcatgcgttcttgagcatgaccatggagttattgggaaacacccaacatttcgaaaacctgaccaattacaacatgcgattacatcgtgcatatataactagcggcgtatctctagaagtagctgtggagtctctagtgtcttaaggaacatgcatttctcgcataacaattgggtcaatggaaaatcctcactatttcaagaaaaccaactagttaaaacatgcgattaagcaggaaaagagaaaattggccatatgtcgcaaatggctgggtgtatcgcaataactcaaggaacatacgatcgcacggacgaacattaattaacgacaacacacccaccattcgaatgacctagccagtatttccaacaaaagcatatacaaaacataaggcaaaccctaagttctaaacacgggttgggatgactaaatccccagattccctaagtatacacatgcgagtattcaagatgttcatcgcaatattcgcgagtattcaaaacagcaagcaaaaaagatgcaaatactcgaagtgttcctcctaaaactcacaattatgcaactttttggcctattttctcctggggatcacctagtttttagcagaaaaaaagtaaggctctatgtgtattccctacgatgagatacattctttactccttaaaatttaaaatggagattgtttctcaaaatccgaagaaaaattcacaagttgtttcgaaaactaaccttcagatttgtcgattcttcttttgatcggtttcgattgcctctaaaatttagaaaagtttgagtttcaggagagaggaggatagaaatttagaaatgggtttttgaatctttgaaattacagagagaaaggggaagaggacaatggaaatgagagggaaaatatgaaatgggttcatattaggaggcttaaataccattatcccacattaattaggattatgacacttggaaaaatgaatgcctaaggtcatcccatctaacggttatccatgggcacgcctacacgaaatccgaagagtttcgtaatttggcagcttaaataggatgaaatgtaataattacgaccgtcattttttgaaaccctcgatgggacaaccaaaggtcaccacctcgtga

SEQ ID NO: 323807 - DNA, 1078 bp, Cannabis indica
ccgtccccaaactactaacatactaagttgtgatttctactgagccaaacgccgaattccaaaataccggacaccggaaatgcaaaatatgcaagatactgaataacataaataacagtataataaattatttaaatagctataaataatttcatgattaatcctaaacaactgttaatttccaaattaactaagcgggctttacaaattcagaaggagattttagacgttagatctcagttggaaaaagaggtttcagaattacgagcagaaattcagcgcgtatcagagataatgatggttcagttaacccgtttctttgcaggggaaaaagagacgacggagacgatcaccgccagcaacgaaatttatcctctggccttcctccgggatggctctccatgctcggctctgccaaaagtcactccggcactcaagcactcactccaaatggcaccaaaaaagtaccaacagatgaaggtgatgccggagaagatcaaatcgctagggcaaatgttggccatggtgaggatgaaatcgctaacgttgagcacacaagaagtctcttacgagaagaagaccgctgaaagaaaaaggataactgatcagatccccaaaccctttctaaacaggcccaatccattaactcattacccatattcggcccacatcaccaaaattccaaatttaattaatcaagcttatgggccagctctttgggacccaggtaaggcccaacacacttctcaaatttcctcttcgtctctttgtcatgagtaggggttctcttttccaatagcttctctttgtcaagcggctaagacaacaaccattgatgtcgacttccaagtcgttgttgtgatattttgcacacacaagtgtacgtatcgttacaagtagtaaactcaccaggagtgaggtcgatcccacagggattgtagttaagtacgttgaaattaaacttttacctctatttggttaaataaaagttaagaaagaattaaaaataagaaaactagtaagaagcaattatttaagaaaattgacagttaataaaaactagggcttcgatttcaat

SEQ ID NO: 323808 - DNA, 891 bp, Cannabis indica
  modified_base (12)..(12): a, c, t, g, unknown or other
gagtccatgtgnataattgtctaagtgtcgtggaagtaggatactgtcatctgcattcgatgtgctcgactggtgccttattgctgctgctgattgctggtgcaaatcagtacaatgtagaggcaaaccatggttatctccaacttgctggcaattggatcgggtaggattgtatagtgctattggagatggcattcctgtagagttaacagacgtgctgtgttgctggtgcaaatgttggtgtgcaggttctgcttcctgagtgccagattggtgagtgactggctactgcaattttttgcagagaaaacctttagcacttctgtacttctcaatgtaattcaatgtaaaagatgcaattgtaacgagatctcgttgttttttacgagtttttttttttttaaaaaaacatatgttgcagaaatatggtataatatagcaacaacgataatttttttagaataaccgtaaaaaaagattcatatttttgtaaaaaattaatccgtaaaaaaataaaaatattgtaaatccatatttttgtaaacttttttatcatttttcgatatttatgaattaatccaattcaacttagcctaaggtcatggttaattttataccaataaactacattttcttaacaataataaactacttcattattgttgagtagtctccaaaatttagacaataaaaaatcttaacatgtgattaataacgtgttttgcaagcatgaataatacattttaaattgggctattttcaaaaatatgggaaaaattattaaggttatgataaatatggcataaaaagtaaatgccactaaatatgacattatctaaccaatcaaactaaaaatatagtttttttttaaaaaccatataaaacattaaa

SEQ ID NO: 323809 - DNA, 962 bp, Cannabis indica
tgttgtttgtaaaatggtacaacttttttttttttttttaagaaaatcgtatttgattaataaataacaagttagacttcacggtcattacataaaatgtttgaagggatgatagaaagcagaatattaccaaataacttgtgggtaaatacccagttagctacattatggccgacaaaattacaagtcctgctaatattagagaagatacaactagaaaataaagaaaagtgattattacaaaaggagacatagtttccaataacccaacgggactacctataactatttcttagaaaacttgattttaaatgcttgaagaaaaaactaaaatttagcttgagatatatcttagatactttaatggttcttacctttttcgaaaaaaaattcaaaactaaagcttaacaaacatgctatcatattatattacttcttgtttcattggggtttcatgatgcactacctattctaatacatgcctttctgcttggaaatcttgaatgatctaacaaggtgaagtgcatgggaataaggatgaagttcactatagcacgtcttgatgattgacatcttcactttgatgatggagacctcctcaatgctattattcctctcacaggtaacttgattaaaattaagtcatagtttgcttgcatcattaactatttatttagttttccgagccacgtaaatattagttttatttaagatttggtatatttgttttattttagggcatctccaatggagaaactcaaatttggtgttaaatcaacaccaaaaaactactatttcaacactaattttttttttcaattccaaccacaacactaaaaattacaccaaatattatattctttattattctattattttagtaatagaataagaatattttaatactaaatatttgttaaatccaataaattatattagttaatattattttattttgcggc

SEQ ID NO: 323810 - DNA, 1022 bp, Cannabis indica
tcccatcttttattcttttctataattctcaaataattatcaattaggagtagtgtgaaagaataaaatcacatgtttgtttctaaattttagtttttattacaacctcaaaataatacatattatatagtttctgtcatgttctccaactttaatggaaattctctctccctcacccatattaggtagagtgaaagggtttgaaattgaatgtgggaagctggtggggataactccataatgaatattataatctgtgtgaacatggccattctgattgacttttgatggggcatgaaatttataaattgttattagacactattaatgctcagtattttttataagtgatggtcgtcgattgattagcgatatttcttaaaaattatttattttttttcatttagggttcgttcggtattgacttctatggcacataaatatataatattttactataaattaaagtttaatataatattatatgaaaatatgatatataatctaatttaatataatacaatgcgacttagtaaacgtaaacgagctattaagcatttatatattataataatgcataacttaggactcgaacctaggacttccaacacacacacacctttctatggccacctgagttagtctcaagtggttaaaagctatttttttaaattatatgaaatttgatactaaattacattaatagcagtatgacaccgaggaggatgttaaataccaataatgtttttaagcaattttctttttataaaagatgaaagaattaaattgtttataataagatttgaattcttaagcatttaactctatgaagagatttttgtaatttgataaaaactatatttggtgtaattttataaaagaaaaaaaaatctaattctttacctctcacacatcataaatcttctcaattacctaaactagttcattacaatgctgagtgtcacgggctcatcttttcaggcaacggaacactcgtgcggcaccttgacttctctaagcca

SEQ ID NO: 323811 - DNA, 822 bp, Cannabis indica
taaattaataatttagaattaataataattttcataattaaacctaattttttactaattttcaaaattaaagctaagcggtctttacacccaccgtccactgtctgcatgtgtgcccgtgcaccgcccgtcgtatgctcacgggcctaccaactgcccgcgcgctcgttgtctgcccaccgtctgcgcctgcatgcccgttcgtgcccgcacctcttcgtgtctgcgtgcccaacctccaacactcctgctattattcttttccctcctgacacaaacagtctaagcaaggaagtgtctgacgagataacaatagcacaatgagtgttaataggaaaaaagttcatttcgcgtgaggtacaaaatgaaaattgtatttttaggggctgtttggaatgggttaatgtgaggagaggaaaggtaatctcaatgattaccctgtttgttatgaggttttaaattttttgagtcatgtaatgcttttaccctagtattccaactaccctaaaaatggggtaatgttgatccttcaaaaaaatgtgggattcaaacattatatgagttatttgaacatataattaaaaaatttattaataaaaagtcaaataataattttaaaaaaatgaaacactacacgattgaaaaaatgtttataatatatatagtactccttaatctgttattaatattatcctcaccatcttcttctatttactccttcaaacaatataaaattaccacaacttaatctgccatttttattattctcaccatcttattctatttactccttcaaacaataccaaattatcatagattttt

SEQ ID NO: 323812 - DNA, 535 bp, Cannabis indica
atctcaagcgtctttgcattatctagatcttattttgtttgaatcttaaacgtctttataacatccagtaccatcgctctgatactatactactaaatatgaaatttcatttcaaaatcaactgaagataagtggagtagctttatatggctcaatatttttcatttaattcatgtaaaacaatattctccattgttatcaagttttacttgtttattgtatttgtttgtgatttttatgagatcacgtcttatatatacctttatatctctttttcttaattaatacaaagtagtttcttttcaagaagataagtacacttctgagctccgagcacaggagccatcaagatatgccacactatttaatttgatgtaactccagttccttcagaaatagtaagatctttggcacaagaaaaaggagttgagctgtatcatcttgacttggttctgaacttctctatttttttataagaataccgaatcgggctcttctcttacccgtatcgaatagaacatgctgagccaaatct

SEQ ID NO: 323813 - DNA, 620 bp, Cannabis indica
aagaggagctaaatatacgctatctctctttcttccccctctcattgctgctctttcttcttcttgcgcagggtgaccattcaatggtgtggggttagattttcttgactcttcgagctccaatggtaatggctgatttctctaagtaaagaggcaatggtggttttttaattctctttgttcatgcttcgcaacatataccttggagtttcatatcgttttctctgtcgaataagtcgctgagatcgatttcctcaagcgcccaatctatttcgaaatcaacatggttttcttagcagattcaaaattaacacccatattcgaaatcaatttcctcacctaacctgtttgaagacccattttccttttcaatctttcgttccccatctcccgaaactccattcgacaggtcatcgtctccgcttcgtctctccaatgcaggtaatcggtcgtcgtctccgctcgtcatttatgcgtttctcgtcgataaccgaagagccgacccaagaaacccaaattttttttatataatattttgattttttttttgttctgggaatattgtatattattctgggttgatttttttcgttctgggattgtatattattctgggtttt

SEQ ID NO: 323814 - DNA, 544 bp, Cannabis indica
tttttttacggaaaatttcatgaaatactcttattttaactattttaaaaaatatagggtccattttgtcatttaacaaaattaaaggtttcaatcggtaatttttgtaaaacacgagatctaaaatagtatttacccttgtgttaattttagtaatatgtatctatatacatatataaaggatgaaacatagggtggtgatgtgaaaccttctatgagttctattagtaatattaaaatcttaaacaattttaggacttagttatcattaaataaaagatataatttattttatgtaaataatttatatttttgttaaatccaccacgaagtaagaattgtttactagtacgttatggcttctctaatgggacactaaaatcttaaaaatagtggagttctgacacaaaattactctaatggaacactaaatgttatcctatatatatatgtatagtgtctcactatttttagtgggacactatatatcacactaatttttttttctttttttaattattaaaataatatgtttatgattaaa

SEQ ID NO: 323815 - DNA, 455 bp, Cannabis indica
atctgtatgtaaagtctaggtgaagcagaagtgtgggcttttctagatgactgaagcctttgatgagctggcccagtccaactagggttacgtagctaagtactatggattaatcaggtacgcatatctaattattatatattatgattgtattctatattatatacaaattgatcttgaatttattattaacttttctaacagcatgtgctgaggtttcttcatggctatggcatcgacaacacaatggggaactcactatttggtggtggtgaacgttcacactagtaggaagagcatcatggtatacatccgccagataaaatgtttgattttcaaaggtagctttatattccagatcaactttcaccatttttttgattaattgtaattgagggtgagggctcaaattggcgtagaatatcatatgtatgatggtaaccagaatttactgt

SEQ ID NO: 323816 - DNA, 1065 bp, Cannabis indica
atatatatatatatatgtcaaaactacaaatattaaaagaattttgccgtaaatatttttttaatgtaacattttgtgtagtagttattaggattcttaaatttaattatattaaaaatatatatatatatattttgaacaaaatcagatttattagtttaattttagtctaatttgtagcgtaaatatttaagtttaattattggttgctgataaatatcaaagtttaattttttacagtaataacacctaagttatatatttctaaaagttcggtaggtacttagccgttaagtgtcaagtcaatagtcacgtggtaatgtctgattggtttagctcattaaatttttatttttatttaaaaaataaataaatataccaacaacaagaaaatgacacgtaaataattatttgacactaacgaacagatactaacaaaaatatatagcttaagtattattaatgttaaaaactaaacttaattactcataattttattctttttataaaaaataaaataaattaatttttaaaaataaagcatgtagaagtattaaatatggaatgcatgtgaataaaataataataataaacaaaaaatactatgcactcacatgccttttcaacaattgtttaactctgtctttgttttcagccacaaagatcgaataatatttgacaggtaggatattatatataataataacaaatgctatccatatataccaaaattttttaatattaatatatatatattatttaaaaaaataaaaataaaaataaaataaaataaaatggtggctaataagtgggcttttaaacgattggatcggaccttggcgaaaatcaaattggagattttggcccaatataagaggccaagaatcccatgcaaatttaattatgtgtaatatttttagggaaacttacgaaaatattgaaatttggattaatttttacaaaaatactatcacacggaaattttttcaaaaatactgtatttttataaaataccagtaaaacacaaagcagaacaactcaaaacaacagtagaacactagtaaa

SEQ ID NO: 323817 - DNA, 1004 bp, Cannabis indica
acaattaatatccaaatgaaaaaaattaaatactattttaaactggatattacaatataaaatttctaatttaagaaaaaaattgaaatatcttctttcagatgttcgcttcgacttctcgctcctgaattgttctggtcttctctttgcttaacattatttcaggtatatatctactcgcctttctccctttctcttccaattcacattattagtttgtttgtgtgcgctttacttttgtgtcttttcctgaaaaattctaggttccaattttataaggctattctttgggttgatatctttttctttttccttttggttaatcttactaggaaatgggcttttgttgattgtatccttatctcaaacctacaatttttactcaagtttttttaaaagaaaattttctcttttttattgttttttagtaaattatggaaaacatagacaattcggacattccttctcaaatatttgactctctttcttcaagcattgccccttgttttgtcaaatctttactagtttcaagttctccttctatggaaggtgttgaaggtactgaacttaattacctagaattagagtgtttgggtagcattgttgagattttatgccctaaataaaactcattttaatataatcttatttgttatcaatagaagattagaagtcattcatgtttacatgtattttttatgtttatggtttaatctacaatttctgttaaatccagaacatatagttattcacaattacagtgatgtcaacacagtggaaggtaattgtgattatatgcttcaaaagttaatgtcccatgattcatcagtgcactaaattcacactgatgtgatagtcaacgataaagcttatttacaccttggataagtgttatgttctttttaggatattggcaaagtatgctagtatcggatgtatgaagtatacattggactgggaccaatattgatcctagtaaagatattataatcttaccgttgtat

SEQ ID NO: 323818 - DNA, 662 bp, Cannabis indica
tctctctctctctctctaccaaactccaaaacaccacaatcatgaagctgccagagccactagtcatgtcccgcccatcgcacatccattgttccacgtcgacctttgcacttccgcctttggcccttcgaaggaaataatcattatgacaaaagacataaaacataaaaaaaaaaccatcgattacccatcaagaagccatcgagaagccattttaaatgacctatcgagaagccatcagaagtcattgataagctatcgagaagccatcaaaataacacctcagtttagctttttacataggaaccccaaatcagatcgaaaaataccacaaccaccttaatcttaggactcaaacaaacacacacaaaataaaagacaaaccacaaaaatctaagcaacaaaatcaaacctttggctcagttgataggggtggggctttgacggagatgggactatcagcgaggactcgagatctggtctttcaagctcgagatccgattcggtagggcttcgacgacggattgggttctgtcttaccgatgttgatcgtcttcttgttgcctcttggatgggtctgttgggttttatgccctaaataaaactcatttcaatataacaaatttacttattaatatagatcagaaataacatttaatgtt

SEQ ID NO: 323819 - DNA, 2323 bp, Cannabis indica
aggttattctatgcctctacttcggtgtgttcttccgacagaagcaaacgagatcatcagagaaattcatgaaggcttttgtggggatcatgtaggttggcagagcctatctaaaaagatcattagacaaggatattactggccaacaatcaataaggacacccatgagtttgtcaaaaagtgtgataagtgtaagagattttcacatgtacctcgcgtaccaccaacagaactaaggatgatgacctcgccttacccatttgctatatgggggattgatctaattagggcactccccatagggcaaggaggacccaagtacgcagtggtagcaattgatttcttcactaaatggactgaggtcgagcctcttgtctccataacctgcaagaaagtccttgactttgttgtgaagaacattgtttgtaagtttggaattcccacgaagatagtatctgataacggaacccagtttgatggcaacttgttcagtgagttctgcaaaaggaacaaaataattaagagcttctcgtcaatatccaagccttaggcgaatggacaagtggaagctattaataaaaccttgaacgatactatcaagaagaagttagatgctgccaaaggcaggtgggtcgacgaactacctcaggtactttgggctcacacaactaccaagaagacagcaacaggacatactcccttctcgctagcattcggctcggaagcaatgctacctgttgaagtgaacatatcgactcatagacgagagttttatgatcaagaggaaaaccaagaactcctaaaattatccttggatttgcttgatgaaaaacgaactgagtcgcaagtcactaatgcagcgtatcaacaccaagttacaagatacttcaacaaaagattcaagaaaaggctattcaatgttggagacttggtgctaaggtgattgcgaacacgacagatgcgtctgcaggagtgttcaacccgaactgtgagggtccatatgtaatcgaagcagtagtaggaatcgaggtttacaaattggctcggctaaatggctcgctaataaaaaactactggaacgtggaacatttacgaccctactaccagtaaattaatgatataactcacattgctgatgtaatattttaaacttcagttatgaataaagcgaatcatttcttttatttaagtaattacaaagtcttacactttaaaattacttaaggggcctttatgtacgattaacctaaattcatctgaaaatacatgatctaatgcaaacccacaactttaaaaaaaatttaaagttttttgatcaaacctttctgacgagaaaggaatcaaataatcataactttttgatttaaacctatctgacgagaaaggaaaatcgaaagttataaatgagatataactcataactcgcgtacaaagctgaatattaatggctcgtacaatataggaaagtattaaatgagacatcaaggtgtcttgataaaagtacttaaacctagtgtatggatagataatataactattcatgtaagcaatcaaaaatttacaaagtgataagatcattaaaagtatattcaagtttgcctaagacagattataactgttattgcgaggtataattaataaactgtcggtgcacgtagaagattactaactattaaaataggaaaatcacgagcaatggaaagaccaagagtactttatatctaatcaaaatatagttaattacattgtaaatgaaaatgcaagcaagcacaaatatattaagttcaaatgtaaaagtacaaggcatttaagataagaaaaaagctaagttggtcagttaactttacaaacatatctttacaaaaatgccactaggggtaaaccattaggccattttcctaaacaaagaatacaaggttcattataggggacaggaaggctcgagaaggaccagctttaaacaaaaaaaaaaactcgacccggtgtactgactcggtaggatgtccctctacaaccctcgctgcatagacctcattctctgcatcagagaccttcattcctcgcagcagaagatcctatttcttgcagcagagacctctttcgctgcggtcgagatctcattcctaacctcgagaaatttatcaacaccagtgattgtcgggctcgaagatttcctcgtgtaagctttggtcttgagccatttgggttctttggtggaattcgagacttcatcagctcgaaacctggagccattaaacttagggacatgcgtgatcttgaggaatggaattatgacaaatgtaccttcaatggtcatttaaaa

SEQ ID NO: 323820 - DNA, 1359 bp, Cannabis indica
ggagaatgttagaattaatattgtggactaatataatcataaacttaataccataaacacaatcattaactatgtgcccaatatttgttcataaccataatgggatgattgataaattaattatgtattagaggcacatgagagcaccctttatattataattgacccattaaattatagtataccataaaatgaccacttaagccctattagtgagtaaccccttagggttataagggtatgagatgtatatatatattattgatggtagagtggttttaaggttttatggtaataagaaaatagggattgctccacattgtggctttaagggtttgggttcaatcttgagaatttggttggtgattcttattggaggcattaaagcaagatgattcatgtggatggattgggaggtatgtatatttatgattttgatgctttaaataaatattgatcttggttgatgattatgagtaataaagattagcatttaatgtgttttgttagctcataatttgtagaaagtttaacatgatggtgatgatattttcttttttttttttaaatctggtgatgataatttataccataccaaaaaaataaaataaatgtagtaggcttgattataatgtgggcacaaatatttttctgaatgataaataagctccacaactaaaaattctggttggtcaacactattgatgatgatgatgaccaagaagctagtgacatactacatatgcaaataaaaaaaataaggcactgactaattaaaaggagcggtattaaatactagtagcgcctaatatttctagatatctcgtttatcgttttgtgtttggcttaggataattcttaaaaattattatattaaattatatattactcatatactaaattgaactaccttttaacaattctcattaagtaattttagtgctatatatagatcgaaaataattgcatgatgagccaagcaccagcgtgcatacacatgctccattcatcaacattacatggtccagtccaagtagctgaacatgattttcagcaaagaagtccactcaaattaaatgaccctatatagcaataaatttttatatatatttattgaactggctatatttatagaatttccaccgcatcacaatattattattaattaaaataatatacattgtgctcttatttgtaatgatatttttttggggaggggtgaaattggcatatgatcatttactatagtttgtaattaaattaaggataaaaaataaggaaaattttatttacacttcaaaaagttctaaaagcacctcattttaataatttttttttttatataaaatttatattttt

SEQ ID NO: 323821 - DNA, 976 bp, Cannabis indica
tatttatgaaaaaatccctttaaataattggtaacatattttgaagaaatgaaacaaattaatataataatcaatagttattaatttatatgtttgcataacaaaactgcaaatgactctgtggcccaatggataaggcgctggtctacggaaccagagattctgggttcgatccccagcagagtcgagattaatacgtttttatttaatgttggattttagtaagaaaaacaaaggtaaggggtaaatagaagaaaaaatatgtgtgaagaacaaaaaaaaaaatatattttttcatatttaacataaatattaaattcattcgtaaataaacattacactctcgagtctcgatattatcacaaccgatcactcgaaccaaaccttgactcatctaaagacttaacaaattcgacttaaagactctaatcaagatcaaatcttttagagtaagcaattgaaaatataagaaaaaaacatgtgaagaaccaaaaaaaaaaaaatcatatttaatataaatgttaaattaaattcactcataaacaaattttacaatactcaagaatcatattctgaaattattacaaccgatcactcgaattaagccttgactcatctaaaggctcaatagatttgacttaaagactctaatccagatcgaatcctctagagcaagcaattgagctccaagacgtagctcaaaaattaaggtgaactttgagaaaattctagtgttttctgttccactttctttttagtatttaatgataaaacactataaatctgattttagctctaattaattcatgagaatcaaacaataggattgaggaatagctaaagcgtaccggagtgcattgaatcgcttgaagaagggtataatcttccaattttgcatcaaaacctttgaaaccttattttcctgatgatcgggaagaactctagaaaaaatacgatacgatgcaaaatggggacc

SEQ ID NO: 323822 - DNA, 609 bp, Cannabis indica
gcggtgtgggattgcacagcttacccggtatttccccttacggatcacgggactactgactgtcacacttgattactttccactgtgttgacaacacaacaaataagaatatcaatgtgataaggatttggatgaattataaatcaaataaataaataaatgatcatatgaaccaaataacacaacaaataaatattgaaaataaatctacttcttaattgattaatgaatataaaagattaattgaaaaaaagacttttatttagggcacaaagcctagctctatgtccacttggaccttctggatacacgaagataataaattgttcaaacaacactattgagatacataacccgaagctagtggatatctttggcatagattcaccgactcgccaactttgataaatattgacattacaaatgatacaacacttacctattctcccaaactcatagaaagtacttttttttttaaattgcttcccacattactaatgtgtggaaagataatagaatatataagacgaatgggctactcctcccatagccataagttttgagataaaatctcattcacctaatcctaaattctaacatggtatcata

SEQ ID NO: 323823 - DNA, 898 bp, Cannabis indica
agttaaatgatctgtgcatttattttcttgtaaatgtgtatcacatgtataggtaactctagttggttataatcacaaattgcgaatcttactggaaactgtgattgggaaaattgcaagcttcaaagtgaaacccgacaggttctctgtgattaaggtacagcctccttttttttggttaaaagcttttattttgaatgctacttatattatgttgctacattctaacttttgagcatcaggatgaatttttgttatggtgatagtcaaattcgacattatgatcataatataaatgaaacaacagaaatgctgaatcattttagaatgttgtatcaataattatatttcttccttgtcaggaaatggtaacaaaagagtaccaaaatttgaagtttcaacagccatatcagcaagctatgtactattgctcattaattctacaagatcgtacctggccgtggatggaagaacttgaaattcttcctcatcttcaagctgatgatcttgctaagtttgctcctttaatgctttcgagagctttctttgagtgctacattgcaggtgcataccttcacttttcaacagaaatattttatcatgaaacacattattatttcgattttaaattacacttcctaacctccctccctttttcaggaaatattgagcgcagtgaagctgagtcaatggtcctgtacatagaagatgttttgttcaaggagtcaaatcctatatgccgaccgttattcccatcccaacatttgacaagtagaattgtgaagcttgaaaacggcataagttacttctaccctgtggaaggcctcaatccaagtgatgataattcatcccttgtccattatattcaggttttttttctgtctacgtaatataagaa

SEQ ID NO: 323824 - DNA, 941 bp, Cannabis indica
aaactaatattataaatgttactatcaaaaaatttacttacacatttaaatactataaaggtagtttttaaatagtagaaaagtagttacatacaatttttttaccacaactcagctttatttatctatatatatatttgttatttttccacaagaaattatattccttcaaaataaatacattatgtatctatatatgctaaacactaggcaaagcttattgtaacactatttctttcaattctgaaccttcttttttatcagcttgctggcagttctcaacaacactattggtcttttgctctatgctttttccccacaaaacgctgtaaagacctacgatcaaaaaagctccacctaaaatgctgcaaccaaaagtagaaaatgactataaattacacagcaaatgcaaataaaaatattatatatatttacttttttttttatttttttatagcatattatatatatttacttgtaataatttcttagggtgtttttaaaatagtgaaatgttaaaagagactcgtggtgtctagcatttttctatgtgttaatatttttaattggttcaattaagtatcgggtcctatgtaatttaatgtaataacttttaaagaatatcactaaccaatcacaacgcaacatattgaagaagggttaggtactactaatacttaataacaatactctaaatataaaatctttaaaatcctttatctttttataaaagtcaaaaagtaattttgaaggaatttagtttttctttcctctttatttaaaagaagatttataacgtggtcagggacgacagacctaggtgttagggtggggctgtagccctcacgaacaacacaaaaaaaaaaaaaataacatacaagaagaagaagaagaaaaatctggtaatggtagtattctgatcgggtgtacttggattccca

SEQ ID NO: 323825 - DNA, 991 bp, Cannabis indica
tcagttatataggcacacacactttatatagaatagatatatttagggaagaattttcattgtcaactatagagacgaggatagtttgagttgggcagagaattgatgaaaatttaacaaacccgcaaagtactgttaaataaaaaaattaactgcaagattaattttatatttcttaaccacaaactacaccttacttatctctcaaaaaaaaaaactcaaccgtacctatgtccggtgcaaaataatgtgattaactataattaaattaataattttatatattaaataaaaatgtaaaacaaattcaataaacatattaaagttttttggccatactgctagtaatataaagaaagaatttttttagctactgatattttgtgtgaaatttaatatattttttgtatttttattgaatttcacacaaaaatttcaataacaactaacgaaccaatttaaatcatactcaaaattcatataacaatacacttaaaaattaccagagaaatcaggaacaactcaaaattataaattttaaaaaataatatataaatattactacttaaaaaaataaaaaatattgtaatttatcatcaagaaatatatatctattttacagtttttttttttgaactcatatctattttacattaaacaactataataatatataaaatattaatattatatatatggtgtggtataaatattgaggtttttttaatatttattttacttaatctcaccgtaccgtgaccatagagctatttgtgtcaacattctgcctctcaattcttcgcaccagcagcaggtacgccacaccagattccggtttgaaaagatatggttgcaagaggaggaagctacagatttaattaaaaaaaactggcagcaatgttcctcaggaaatgcagcagcagtgtttaaaacgaatctcactcagtgtactgcttcacttcagcaatggcatcgacaaaagtttggaaac

SEQ ID NO: 323826 - DNA, 1037 bp, Cannabis indica
aaataattcatgctaatgagtaaatcatgaataatgtgaagacatcgataacggtaaagttgtacgacataaagaaaaaaggtttgtaatttgtatgtctccaaattatggagaaatattgaaaatcgaagtcttgatgctatttattgatgttactgtcaaggtgccatgcatacataaaaaattaatagatacttaaacttaaagcaaataaaagaaaaagagaaataaataaataaatgggattagagatagatggagaatcttcattaaaaaataaaacacaaaaaataaaaagaaaaaagaaaaagaagaaatagtataagagaaaaatgtatataaaacaatctttattagaaaacaaaaagaaaaaaaaaaaaaaaacgtgagatatatagaatgatatataaatatatatataatatatatttatagatttagagttatatgtgttttaaaaattagagaagatttaaagttagatatttaagtttttaattggtttattaaaataataataaaatataatttatagatttatgcttaaataaaatactaaaaatgagagaattaagaagattagaaaaaaatagctttagagtaatttgagagtgaacgttaccgcctcatacttctccttcatataaatatatagattttacattccctaaaagggatgtattgttgtaccttgtttcgacatctaaaaaaattttttagtctaattttttgcatattcatgtacattatatatgcttaagatatcttataaagttttgagaaattcaaaatatttacaatatagaaaataatatttaaacaatttattttacacacgtataaaataaaatagtcactcgtgtaacatactgtttgaacgtatttcagatactaaaatagatagagatgtatcagtgtatcgcttttaagagatatattataaaattttccaaattttatttctctcaattagattcactaaattacgttgaaaacaattagttttgtttttttaaatcaatttaaaatttaaaata

SEQ ID NO: 323827 - DNA, 1057 bp, Cannabis indica
tttttgtaattatgttgtttttgttgtacatttatggaaaaaagcccaaattaaaatccaaaaaaaaaaaaggtgtaaaattaaataaatattatgtaatataaattttttattattgtttagtataaatatattttaaatgatatggacaaaaatataaataaattgatgtatgatgtaatataaatgtgtgagataaaatagagaaaatagagttttgatgagatatttttaatgataaagtagagagattgtaggaagttctcatctatattgcatgaataagggtagagttgtaaataaatgcttgttgtgctagcctaatttgtatcttttgggctttttaaaatacgagtcgcgtcgtattgggccttaaaaaatatgcgttgtattgtgttgtgctataataaaatatgggttatattatgttgtgctataaaaaatatgggtcgtatcgttcgtgtcgtcttttattcgagtcgactcgttttcataaatgagctcaaattcgtgctctatacttttacatctttattacgattgatgagctaattacttatatatgtgtattttatagttttaattacttttacatctttttccaataatagttatacacgattatataaaaaattattagaattgttagaatttagatattactatcactataaatgaatatttattattattattattattcttattgcaattattaaattattggactttttaatatgtcgctctttcgagctaatctatctgtgctaacgtgtcctgttttcaggcttgtcatgtgtagcgtgccgaccaagatgataggatacaagctaggtgatgcccacgaggtggtcaagtggtgttgcatgtcggtgtgcatgccgattcttagtttgtacgacaatgtcatttgcgtaaatatcttcaatatcgtctggattggaacaagacttggtcttcatcatttatttgggtataggaatacaatgacgcaatcaaatttaagaaactctgagaattggtatatgttgatgatcgtatgtttatagagcaaaaa

SEQ ID NO: 323828 - DNA, 911 bp, Cannabis indica
aataaaaagaaaaaaaaagatatagcgacacttcatgtgtgtggctgatatatgcctatagtgacacacagaaaatgaatgtaaaaggtttcaatgacacgtgtgaagtgtcactaaaaattgtctttccagtcatcctcattagtgacgcgcgttgaagtgtcactatatacttttagagttacttaatgtgtgtcactaaaatctgattttctagtagtgtgggtgctgtgcggtccctggacaatccaaattcaaggtcctagattctagtgcggggcattcacaaggaaataggggaggaaaaagccacagtcaaaatgattcggtgaagaaaccaaggaaagattatgacccaaagtacaccaaatatacaagtttaataaacattggagagaatgtctataaagagatatgaaatatggtccattatcgaaagcccccatgcatgtcaaatgatggaaggaacagatgagaccaaagcaagcaatgtgagtatcatggggaaaaggggcacactatgaatgagtgtgaatatctgaacgacgagattgagatgttggttcgagccggacattaggggcaatggttctggattccaatcatttatcccaaacatggggtagtctagggatatatgatacttcccgaacagcagggtgctataaatcccccatagggggttgcacgccctcaagctcctagaatgtctccacctgctcttcccactccgctagctacaactggggtggcctttctggctcttggactaggaaccccatatcctctcggaatagctccaccacctgtggacgggcatgttgcaacaatatccggtggaccccatctcaccgagagtacccgtaatgtatcgaagaggtacttaaaggttctaagagtggattcaacga

SEQ ID NO: 323829 - DNA, 1107 bp, Cannabis indica
atatatatatatatatcatgaatcatatatgtttacttattaaatctctatcaattacagaaaataattgaagaagaaagcttgaacaatttcaacatgccattatattgtccaagtgaaagggaagtgagaaatgtgattgaagaagaaggctcattctttctacataagttgaatgtttttgagactacttgggatgcaggtttcactactcatcaaaataataataataattacaataataatctaattgagagaggaaaatatgtttctgattacatgagagcagctatggagtctattttggtgaaacaatttggagaaactataattgatgaattatttaagaggcttgctaataaggtcattgagtccatgaccaaagaaaattggcaatacaagaacttggttatttctttgattaagaaataattaagtatataatcttacttaatgaactatagctagctactctgagatttgttattcatcagttgtttgtttgtgtgtttttgtatgagaatttataagtgtatttgtaatattttcactaaaattctggacactaattaaaataaaaaaaaaagttatgaaagtttaattggagaaactataataatagatgaattatttaagaggtttgtaaatgaacttggttatttttttttattattatgttgagtgtacactatcaaagttctgcattgtttaaaaatgagaatcaattggtatgaagtcttttgggtagaatacaaaagcaaattcatgagagtttggacctatattgatgtagagatttatggtgtctaacgtcttaacaatacgagcattgctattaggcacctgcttagcactttctcgatatgttgcgttgcaattagctaacgatactccttttatattaaactatatggtcatataagaaaaagtctttaacataggaaggtggtaggcattactggtgtactttagcatttctctaacaatatatatctaatgagaattgctaaaaaacactattggtgcttagcactcttttcggtgtcatactgttattagtgtaattaaatatcggatcctatataaattttttaaaaataaattttt

SEQ ID NO: 323830 - DNA, 1077 bp, Cannabis indica
aagaatatgaattgaaagaaaaagttaaaaaaaattagtacaattaaaaatataaattttatatgaaataaaaattatcaaaatggggtgcctttagaactttttgaggtgtaaataaaatttccctaagaaaaatcacgaaaaaagataattaagaaagataatataccctggacatatatgaaaacaattaataactctattttacattaattaatcaattcaaccctacctacctacctattttggagataacaaacaacaaccaattttggttaatgagcttttgtgattactcataacattaatgaagattgtaatagaaagtcatacaaaattctttttgttatagtattggtttctttctttgtcaaatacatgcatggttagtatatctatctttgcttattattttagcctcaaaggtatatgatctggcaatatgtttatatatatataataaatatacatctttgtgtagttttttttatgaaattcgagctgggtaagtactggatgtttcatcatatgatattttagagtttgaactaggtttcaagtggggaagcataaaactcataataggactttgtggagattcatgtgttgttaaacttatggtcttccaaatttgttttgtcattaaatctcttctgcttaatgctcttctttaaccttttaaccttttctttttcattgctacctaagttatggattttcaatgctagctagatagatacttggcttaggcatatatatatatgtatatatgtatatcaaatatcttcttttatatattcttctgatcattattaactcatcattttaactattaattcttgtaaagttcctcaataccatccatgtatgtatgtagttcatgaactactactgaaccatgcaattacttgaaaaatcttcaacataatcatattccttcttttaggtttcttttacacatccatacatagaaatggcatttaatttacaaattctattatttttatctataatactttctttttgaattcaattttttttctcttttccatcttataatattccttattataaagg

SEQ ID NO: 323831 - DNA, 1598 bp, Cannabis indica
acaaagatgattcagtttgagggatgtacacctatcatggaatttgaatcctggccattccccaatcttcataaatattcgagacaaatattccttgccaagaacaaaaagaagaggggacatggggtctccttgccttaaccctctatttgcttcaaaaaatccacacatggagccattaaggagaagagaaaactttggagtcctaatacaattcataattagctgtataaactgcaaaggatactcaaaagcagttaacatctcctccaagaaatcccaatcaattgcgtcatatgccttccttaggtcaatcttgatcatacaactaggcttacagtttttccttccatataatcttaccaagtcttggcaaaccaagatattatgtgctatatacctcccatgaacaaagccaccttgattttctgcaataagatcaggaaggattttcctaagtctattgcaaatcaccttggtagctatcttatataatacattacaacaggagataggtttgaagtcaactacacttttaggacaaactgattttggaatgactgtgatggtagtcgaatttatttccttaagaatcttccccgaattcaaaaatgataacacaacttcctcaatgtctttacaaacagtttgcaaaacaatcctggtaaaaggcactaccaaagccatccgggccaggagccttgtttccagggatagagaagacaacttctttcacttctttagcagagtaaggaggagagagaatttcctttgtatttcattgagtttggggcccaaattaacaatcgactggtgaacatgtctcctgttaggcaatgcaatccctaacaatcccatataatagtctaagaaagctttttgaactccctctggattgtctctccaaatcccagcttcatcttcaatggagaatattttattttgaattcttctagctttcaatgaagcatgaaaaattgctgagttctcatctccatatttagcccaattaagcttagccttctgtgtgataaagagagaaaaagctttatgtacctctttgtaatgctgatgtgctctatgttcctcctctatcaactccatgttcatagggtctttgctcaatcttgtttgtatatctgcaagggatgaactggttatcatatcttcattgtgaatttccgagaacccctctctatttaatttctttaaaacatccttcagtctcctcaacttaatgaccacttgatacattttcgaccctaggattccaggactccaagaatctgccaccagcttttcaaattgaggagctaacttccacatattaaaatacctgaacgacttcttccctgtgttgctttccttgtaaatagatactagaatgggagagcgatcaaatgatatttcaagaaaaaaaattgcttctgagcttgagaagaaattcattcaacaaggattgatcataagactattagtaagacttacaaaagtatgaaacaatggtagaagctcataagataaaatggccttgactctcgcctaaatgggacaacgctggtgtaacaccctaactaacataggcgtattacgtgatt

SEQ ID NO: 323832 - DNA, 2809 bp, Cannabis indica
cttactttagtaagatgctagagtatttttctaattgctaactctaaaagaaatcttttggctcctagagatagagtttatttatctaaggaacagtttcaactattcaagaaaagataaaggccaaggaaagaactccttaagtatcaacagagagaggtctcgtgtatgctctggtatgcattagaccagacacctactgctgagtaggagttaagagtaggtatcagtttaatccaggaaaggaatattggaagacaatcaaataaattttaagattaaggaggacctatatgttagtatataagggttgtgttcttaaaatcctttaggttacactgactcaaatttctagatttacattaatgctagaaagtttaaatctgcgatagtgattaatctaggagtgtagtgatttttggagaagtgtaaaaatatatctgaagttccttaatctaccagtgagactgaatattaaagtagcacagaaggctaatagataattattcaacctatggaaagttctatactatttttgacattattccaatcatcaattaaccactactgttacttcctgataacacggatattaacgtagatttttgttaaccaataataagcctttttgtaataaatttaacacagaaataaataagatataaataaaagaataattagtataataagagcaccagatattttacgtggttttgcagttaaatctgcatactccacgtatctatcttattccagatatttttttagtattcaatacaatatatatttgatcgtatgtttatatttctctccaaaagattctctgtccctttttctatgggatctgcccctatttataggaatatagattgtcaattatttacatttaaattcaaattataatcgtttaatgaaatgtgggaatagatcacgtttcatttaaatcgtatgctggataatactagataactgcttaactacatgttattcttatccttaaagatggtcaatgcctatttggacaataacatctcgcttgacttgtcgatggttaatgctgatttggacaatagcatcttgcatgtttccaagttgttatccttagctactgtaatgtgaaaaatacgctaagtgtttaacaaatgattcgtcttgtcaagtttcttttaaatagcaaggtggacgtctcgctatatgtagtctgaggttgctttggggtaactatgtccattcttttgtattaataaattagctccttggatctgtgtattcggaggcagacatgtatcttgtcaatcaagtttcaatcattttgtatcccttcttgcttaagctatacagtcagcgagttatgaatatactctattaattctatatttaacgagttatttttctttgtattaaatgatatagctttattatatcaggtagttcatattccactaactaacacatgtcatcctctgaagtgtggctgaatttcgggtataaaaattgccccttaagaagttattttttattaaaaagagctttttaaatgattacaagggtatttttgtcttaaccaattttgaaaacttgcatgctttgagttttggaagttcatgatttcgaggcacatcattagcattaaatgcccatctttttcaattctccattgttcccatctgttagatctttattcttttaatctaacagttatcatccttaaagtataaaactcaagagaaaataaccatttccccatttctaccatttgaaacttttaagcttttctgcaaaaatcactttcaactattcgaaccattgcatgccctctttatccttgacctgtttcctgcgagtttcttcgggtttaatcttcaaccttaggagttctatgagtacacttagtcattcgtctcaacttcaggtacagaattctcctttgtgaaaaaacatgtctctgaatagtaagtggttcattcctttctttctggtatttctttttcctgagttggttttcttattaattaattgcatcattgttcactttgtttggttttagtaatttcaatttaattaatttcattttgtcgtatttataagcttctggtttaaataaatttcttccaagaattgggattgttctttttataaaaatgtcccaatctggttttgaaatttatactccagaattcttataaaaagaatgtcctcaggaattggccctcccattcaaacgcaaaatcaggaaacctcaatccaaacttgagataaatgatgcaaaaattagggaccatttaataaaaaccaatcaagataaagtttctagtcgccataggcgttttttacaagagataactgagggtaaacgtcgttacttgcgagatgcagcctgcctagaacctatgtctttatcttctgttcccctagctaaacctttgttttcacccaaagtcactgttgctttttcatcaggtgacgtagattttgaaatcatgtctactaagcctcataaatcaaagactcgacacgactctaatgtcacctttgaagctgaactaattgaatccaaagtaagaaccattggaaagtatgttggtggtgttttaaagtcctgcggcataaaacaaaggtgtggatgtcgtattagatctgttgctccaggggaattcagctgcttcccctcccccccccccacgaaggagttactcgcgaggagtgcgatggtaagagtactagtggctcgtctaggataggcacttggtgttggaaatttattttaccatgatcttagatctacccacaagtatgttgtttaacaccc

SEQ ID NO: 323833 - DNA, 1318 bp, Cannabis indica
aattctaaccacaacactataaattatacgaaaaaaatactatttattatttttaaggaaaattgcaacaaaagtcttcaaaaaagtttattttgatgcaaataagtcctaacctcgaaaaacagcaataatagtcaccaagatcagacttcttataagtctgttagtccttatttcaacgggtccgtcttattaaaaataatgccacgtgttgaaatctcattggtccaagttatattttaattaaaataattttagaaaaacaaaataaattatttgaaaatcaaaaaaaaaaaaacatgtatttccttttattcgttttcttttaatttttttcgtcttcttcatttggccatatcctgactccccaccctacctccacccacaccccagccataccccaatccccacacgaagaaggctcaccataaaaaatggaggccaccgatatattggcttctatacgaaccagtaaaacaagtaaaattgttttctatatctactattttctctacaaaacaaaaatcacttctccactcaattaaaagcaaaataagccctaagaactcaaagttgccaaatttacaaactcaaagaacaccaaaaccaataaaattgaaaacaaaaccaaaatctaatctcatctagtttcttgaacaataaccaaatcaatgctaaatcaccaacaaaaatgaaggaatcagactccaatagaaattcaaatctgaaaaggtcgataggttagaaattgaaaatccttcaaagaggagataaacaacaagtcacctgcgtcaatgacgaccatggcaatggaaaaattatgctccccaattttgtcggatcgactttccatttgagaatcgaaacatacgaggctcgtcttcaaattgagataattcccagagagctcttatcgaaacaagaaattggaaaatcagtggcctccattttttacggcgaggcttcgtcgtgggggttggggtgtgggtggagctagggtgggggtgtcggggtagatgaagaagacaaaaaagatgaagaaaaaagaaaaaaaaatatgatttctaaataatgtatatgggaattaacagataattagggtttattgttagaaataaacttttaaattattattttcgaaactatagagatatatttaaattttaggtgtattaattattgaaaaactatgtttttgcaaatgtcagttgtatatacgaaaatataaaaactgtacgcgtttgcggcagcagaaagtaattctgctacagcagaactgaacaggcagaatataaaatatttgcagaaaaataaataa

SEQ ID NO: 323834 - DNA, 1223 bp, Cannabis indica
gaggcattggtttcaaaagaatagctgagtggaatagggctgccttgacaaaatacgtttgggcgattgcaaacaaggaagataacttgtggatcaaatggatacattgtgtatatatgaaaggagagaattggtggacctatcaagctcctcagcaagcgagctggtattggaaaaaactggtctatgtcaaagatcaaatcagggcgaaaatggatgtgcaacagtttgttggcacttattatacgatctctaaaggttatgatttattttgtcctccttaaggaaaggtaaaatggagtcatggagtttggaataggcaaaatattccaagacaaagttttgttatgtggactgcagtataggatcgacttcgaacaagggcaaggctgaagcagtctaatgttattgcagaggatcaccgtctcttctgcagtacacattctgaaaccaaaagtcacatttttttctcttgttccttctctttacaatgcttactgcaggtcaaaggttggctgaattggaaaattgagtcaattgatttggatgccatgttgagatggagagatcaaaggctggcaaatttaggcaaagtttctggtttgctgtcatggctgcaatggtataccagatatggagagccaggaatttggctctttgggaatcagaggtgccgattgcttctaaggtggttaggaagataaaggaagaagtaaagagcagatttttttatgtttggcctaaaaatgtaactccacatgataaacaatggttcttagagattgtacaggtataggaaaaaaggaaaaagggggaaagagaaggggattcatgtaaaaagtgacaagaaccatgttcataaatagttatagatcttcaatttgaagatgctaatagaatgtaatcaaatgtttgtagtaatgaattactctgatttaccaaaaaaaaattatcgtttcatttgactttaattgtctaagttcaaattttagcggttaaaccctccaagctactaaattagtagaaaatttaaggtaacatcacgttaagtttcaatatggactgcttatgtatacgtttttgtacacatgacacgttcatttaggtacacctaatattattatttaaaaattattttaaaaatttattttgaaattaaataaaattataaaataaaaataaaatataaaaaattaaaattttaaaataacttttatattttt

SEQ ID NO: 323835 - DNA, 560 bp, Cannabis indica
tgcaaccactttagaaaccaaaccgtttttttttttaaaaaaaaaaagtcaaaaaatcagtatataaaataattctccttttttttaatcattaattaatttttagtttaacgatctttaaaaaaaaatacatttttaattctttaaatttaaattatacatgtaacattaacgtgacaacaactgactaaacaaccatattattatattatttgtcatgacaaaatttgacagaataactaatttatttaaaatactgtgaatacttcaagaactatttttaacgtactgaaaaattaagaacacaataatacatagatcatagtttagaattaaaaatcctaaaagccttattggaatgttgctagaattagttttatacactcaaattacactaattagtaatcacatcactttaatggcacgtttactatacagtaatcagaatcggaataaattaatggagaaatgtaacggaataaatgaaaataatcgaaatcaatatttgtaatatgttgtttactaaaattttttggaaatggaatagttgtgatttatct

SEQ ID NO: 323836 - DNA, 711 bp, Cannabis indica
tttatttagggcacaaaattcaacactatataccgttttgaagcttgcgacaagctcaatgatatggtatatggtatatgtatttgtattacagggttcggtaggaaactctaagttgtcttttacaattgttaagcagtattttggaataaatacttattggtttatcattgttatgacatagtgcccaggatcatcgatcgttctccaagaaggtcggccaacatacctgagccggaacttgaggtaagaaaagtataatgtaccacatgttatgacaggttctgtaattgtcgattacccgattaggtattgatgatgtgataataccatggatataatatatgggctcaacttattaggtgatgcgttatacctggctgagtttgtgtgtctcacgggtgttttatggtgcaggtaagggcaaggaaaagttagagcagctatgacagtcttctctagaaatgtacatattgaccccacaggactatgtgccaagttgctaggagttgttaggactgactgtatttgctgtgtattttgattttgtgttttgtcactgtcgtcgtatatagtcttttgtaaactttttataacatggatccaaaaaaacacctttttattgtcgttatgatgtccgtttttagtattttattttagttaagtttttatttgtttggtaagtatgtttacctaggatctagatttact

SEQ ID NO: 323837 - DNA, 714 bp, Cannabis indica
ttttttttccttattatttagttcaataatttattgttattgaaaaaaaaaaagaaaaagaaaaactaagttctaaaaccaaacaaaaacatcatagttgtttgtactaagtagattgggctacgtgacacaaaggccatgttcttaaacacgtgccaacaacattgaaaaataaaaaagtaaatatcttttcatcatttttttttttttattttaagaaaaaaataattatgtaatttaatccaaacaaagattccctttgccttttgctcacatatataatagtgttataatttaaaagtactcaaactcaaatcataaacaaaattccaaaaggcatcaataatatttcttttttatttaattttagaatatattttttttattatttatttaaattaattgatagtgaagtggagtcttcatgttttgttttgtagcacttttcactactttgcccatatgagatttgtcctatgccatgccccacacacctatgtatataatatatattaaatatttatatttattaaagggtaaataccattttggaccctctgttttacaaaagttaccaattggaccttgtgttttgttaaatgacaaaatggaccctgaattttctaaaatagtacaaataggaccctgaattgattttttgtccaaataaagtttaattataatccgatctaaaagtgttatgacaaaactgtt

SEQ ID NO: 323838 - DNA, 2198 bp, Cannabis indica
gttatttccctcacaaagaattagtcataaatatgaatcatgtccgataataatctagtttcatgtactacttagaatttaattaccttgcagtataatatcttgcaatttttttacaaatttaagttccatcatcttgatacactccaaagctgtccctccctcacaccaagcgaagggggtttggatcctccatgattggctccatgaggtgttgtgagtgcgggaggaggccagaaaagtaggcatgtcaaaaagatctatttagttggagcgggtaggagctccgatccgacggatcacctctgatccgaaacattcggatacttattggatcttggatcagatccgcttcgccctgccaaatttttttctggatcgtatctgatccgacccatttaaaaaacttaattcaagactcaaaccctagattcagaacccttgggacctggacccagacccgacctgggacccagaccgggacccggtccggacattgaccccggacccggaccccgaccctggaccccagacctggaccccgacctcggacccgggacccggagccggactcgggacctggatccggacccgggacctgggacccgaacccggacccggacctcagaccccggaccccaacccagacccgacccgggacccgatccgtaccccgaatcccgatcgggacctagacccagacccggacttggacccagaatccgaacctggacccgaaccttgacccaggacacgagacccgaacccgaacccggacccagacatagtattgtatttaataatactaatacaaaattaaaatggatataaaattataagttaatatttaaattcttaaaaaaaaaagtgtcgggtcggatctgatccttcccgaataagtcgggttggatctgatccgatccgagtatctgatctagtggggcgggcgaggcagatccttacatgatctgaaacaggtcagatcatagccggatcagatccgactgaccatttacactcctacggagaaggacctttttggttcgtgtgacctccgcttgaacctaaccgaactaaatggactgagagacgaagctctcttagctttgcatgggcctgggacgattgtccttttacgtgagctaaatgttggattaaaatcctattgtgggcacatatgtataatgtatatgctattaaaattcttcttcaccactagaattggctcgtcaaggagaacaatttatattgagtcatttcgcccaactacatacttttcctagtgacgtttttgtagctcagtcccttttcgacaaattttttgtgttgctgcataccgatttgactaatggttagcatgggtgtgatttacttgtcgaggtggtcgttttgatatatactactcctatttttgccgacatttccggtacatcgatttctactgcacttaatattagtcgtattttatgtctttagactcggttttgaatgtagaatgtagtgatattaattatttatttaattgtatagatgaaagtgatatctaaaattggtttgaataattggagctcaggacttgagagcttaggatcgtcctttttggaaaaagtttaacgacttgggagaggtaaggaattaattaacttgattatagggcttaattttatatgtgttgaataacattagacatatctaatttttataatttataaaatatttgaaaaatttaaaatttaatctacatatttttcgggactgttctagcgtactgagtgccaaaaatatttttgtacaaatatttatgtaggttatgattttagatttattcaaaatacagtcgttatgctgccaaattttccaaaataaaaggaatatgttcttctgttattcttattttgcttgattttgattatactgatgagagccatattaattatgatttgtgcatattgttgtttcacgacctactctttgtgtcatcataagtagattaggtgggcattcacctgtaggtgaaagacctagaatttgtacaggaagtgaattgaatctgaggctcggtattatggtggttatcaattgcgactacctaattttggatgtcgttctctatgattggtattgagagctaagctctaatgggcagtgtgatatgcatttgaagcttgattttgtgattatttgtagtctctctattt

SEQ ID NO: 323839 - DNA, 587 bp, Cannabis indica
taatgtcactccaccaacttcccacaaccaactattcccctaaaccaaataagcatttcaaactaaattaacaaaacccttccatagtattcaattttcagaaggaatagaaaaacgaaaacccacctccaagtaagtgagtttgaacacatcagtgcctgaagaacttgacccagttacgttttcttgagaaacgacagcagaaacagtgccactcaacctgcaaccgaaaatttggggaaaaaattagcttaaactttcatcttaaaacaaataagtgtggaaaggcatacatacatgggagaaaaaacctagggcattgagaggttcaacgagtcgaaacttgagaaaactggcttggtggtggtggtactaagaagagatagagaatgggagaaaggtaaggaagcagataagggtcttctttttccacaaggtttggaagagaaagcgaaagaaactccgggaatggcagccattgatgatatgattctcaagctctgagatttcgaaacctcgactcgatcagtctgattgtactgaagcagtgaaacttgaaacgaaacctattcattcgttttgcgttc

SEQ ID NO: 323840 - DNA, 1450 bp, Cannabis indica
agaaaatagtatataaagtaattccccattatatacacttctcttatttattaattattgatagttactaaaaataataataataatgtaacaagttattttcttttttaataaatttataatcattattttatccaataaaatcagataattatatattcccaaataattacaatggtggacgagattaaaaaaatctatccccaaataatctctttgaaatgcaaaaactttaagaagaaaacttgatttctggatttagtgtgggtttgaaaccgaaactaaaatcaatagcactgatcctaaaaatttatcatcacaatttctcaacacattagcattagttatgcacttaggctactagagttccttgtacactaatgcttagcattagtgataggaattgacgttgttgatttaattctagtcaataacgttaattaacgttattgatcgacgcaaaaagacctttcttgatgtagtgcttcatatgtatatttttttttggaacatataaatatataatttaagagaagtaaatactacactttcaaatttaatcagtattatgtgtgctttttctaccatttacatttcaagagagataagttaatgtataaatatttatttataaaaaaaaaaatagatatatttgtataaatgaaagcaaaaaaaaaaaaataaataattaagtggcattttatatgatttttttctatatttactaatttgttagactttatcattttaggaagaaaaattggatataaatgttttagaaacaattccacattcttaaagaactattttttatgttgtcatatatagtataaataagttttaaatttttatttttaattgtcacaaatttaattttttttatcacatataatggttgcataaaataatttttttattatgtaacgccctaaaaataaggaatgccacgtgttgagactgaacatacactaatcccgctaatcagagatatactagagccaagagcagaaattaaactttaaaatacataataaaataataacttgtaataattacactttaaaatacatctaaaaagagtacactttattttaggatcccgtaaaatattttcaaaatattacaagtctacacgctgacctaagcggtaaaagtggagattacaataattccacctggcagacccaaccctcgtggtttagcttggcctgaacatgtacaatgcaccgcaaaggccctcaaactcatggctgatcaattaccgacttaccctttcttacacaatagagcacacgtgagccaatgcccagtaagatagtataaacaacaatatgaataacaattataattacttaagtattgatgtcactgcatttatagtctatttaacatagacatacgtgttacgctcacacgtctatttacaataaggtcttagaatggtttatct

SEQ ID NO: 323841 - DNA, 1407 bp, Cannabis indica
aaaaaaaatatattgtaactaaaaaaatttcactaaaagtaacagttttttgtagtgtaacatagatcctaattcattacatacagtacctcataaaataaatataacttaaaactaaaccgtaagaactcagtgtaacgctaccaacaattttactgcttttgtttgaatgattatataactacctataataacaagtaacaacaaagtaaataatgagtccttataaagtaatattcactgtaaaattatttctttaaaatttaaagtaaaaaggatattagtagcatatgctcgacaactaaaatttgaatctattttatagacttacaatgataattgatcatatttataagtaaataagccattgggccgaattaacatagcacaacaagagagcaattctcgagtaacaacaatgatgaagagattaacatttcttaagattgcactaagtatcatgagccccaacaggcgacccaatgtggagtgtaaaatatgattgtacatgaattagcacttcgcaccattaaaaaattggacaatcttggcatattttcttgtaaggaatggcctagacaattttcttttaaaactgattgttttatagatttgtctaggtcgaatgctctttgaataaaggcatcccctaagagaaaatcttcaaaaccaaatcacgtctaggaaattggccttttagaaacgatcatcttggcttcaaaggcttattttaggcccaggctcttctcaccgtctagaccttgtattgtataaccatccgaatgactatgtttcttcggttagatgaaaattgtatttagttggaggatactctcttaattatttttgtagttgtaataaaattatttaataaatatagtagtatgaatcacataaattttactttttgattttttgtatagcatcgattatttatatatgatttattataatttgaatatttttgattatgtattgtacatgatcttttccttaaaaaatatgtataaagaaaaatatgtaaaaatattttcgattactttctaaaatattaatttccaaaaaaaaaaaactccaatctaatctatcataaatctcaaatttataataaaaaaaaatacaatacatataaagaaaaaataacatgcattgaataaattggtgaaaaagataacctacatgcacaataaataaattttgattgcatgtgagattaggtaaaattgaaaaattatgtgattttgtattattttgtttcatcaataatttcatttcattttattttctataaacaacaaccatattttttatattttgttttaatggacattacctacttgcctttagtattttgacctaatagcttggataagaactattcaaagaaagaaaggaaagaaaaaaggt

SEQ ID NO: 323842 - DNA, 927 bp, Cannabis indica
agagagagagagagaagagagtttgttgttagtgattttgggggacggtgcgtgggggtataaacgtcattgagggcgaaagtgtgtgacgtactggtacgtactgccaaccccaaaagaaacattatactttgtgagtaacgacacgcgctaacgcgctactatgattgggtttgggtacgagggcacgactttgctggtcccgctggcacgtgtgattccaatggtttacttggcgcgtgagaaacaacgaagaaatatggaattttttttttggaaccaagacttgtggaattcttcacgaaagatggcgagaatttattttttttttcttaaattaaggattttttttttataacaatcttaaattaaggattgagaaagaaagggactatcttttcaacaaaaaaaattgacatagactccttaattaagacagagtaaaaaaaatcaaaacttataaaccaaaccaaatgtatagagggcgtttgggcatttggaatgttttgaaaataatttttttttttttttttgtacaaaatttacaatgcccacgtccgccactcgtactggaacctcttcgaaccaagatagctcatcgtctaactgcaaggtgaaagttttgaaaataatttaattataggaaagatcatgaaacagaatataattgtagaaaagggtaactatttaatggttacatttttattgtaactggttacatttttctttaacctgtaatagcaggttactaataggtaaactttctttttttagatttaattaattataattaactattttcttaaaataattaattaaatagaaattccttttttcgatttatttaattataattaactattttcttaaagtaattaattaaatatttaacaagaccttttttagcaattaatatttatatttaaa

SEQ ID NO: 323843 - DNA, 1585 bp, Cannabis indica
tttctccaattaaattaactcaagaggttttaacgagacttttttctaaaaaaaaaattaatatcaaaattatagttatattttgtgtaaaattaatataacaattttttatgtctagtaaatactataatcatgatgatttgacgaatttttcttttacctttattctttcactttataattattgcaagcaagcagttttatattttttttttttttttaataggcatttttcttgtttattcaaaattataaaaagaaaaggttataaaaaagaaaaaggtaaaagaacgaaagccaacaaaaaaaaaattaaataaataaataaatctagcctagatatactctaactaaactttaaaatcaaaataaaaattttagggaaataattaatataattatagcagtattgtctaagcctgcaattgaagtcattgatatgctagaagagatggccactaatagctataattggcctaatggatgaaatactccaagacaggttgctggtttgcatgaagtggatcctatgacaaatatatcagcccaaatttctactttatctaattaagtggatgccttagctgcttattagaagaatacatcaattgtagagaatgtcgatgttgcatctacattacaagggcctgatatgagtatagaacaagcacaatacatggccaataaaccttataacaataactaccgaggtgctccaatgcctaactaccattcggggttgagaaaccatgagaacttttcttatggttacagtaaaaatgtcttgcaactccctcctgggtttaatgcacaatagcaagaagagaagaggtccttagaagacattctgggtactttcatgatagagaccaacaagagattcaacaagaataaaactaggttagataacatggagactcacttgtctaatattactacttccatgaagaacatagaggtagaagtgggacaattagccaatattgtgagtgctttgtagaaaaataataatttccctagtgatatagttgtcaacccaaaagagcaatgcaatgttatcacactaaggagtggtaaagtacttgatgggggtgtagaacacaagtcaaccggtcctgaggttgaagatatagtagaagccaaagaagagattctaaaaaaaagcatactaagaaacttattaagaaagaagatcttccaatgtataaactgccaattccttatcctcaaagatttatgaagaagaaaattaataaggactttgctaagttcttggagatttttagaaaaatcaatatcaacattcctttcattgatgcattagagcaaatgcccaattatgttaagtttatgaaggagctgttgacaaataaaaagaaatttagggaatgtgaaactgtgagtttaactgaggaatatagtgccataattcagaagaagttgtctcaaaagcttaaagatctaggtagtttttcaattctttgtgagattgatggtttaaaatttgagaagtctttatgtgtgtaaagtccttttttggcaagttagataccaaaatattttttcttttatggtaagatttatt

SEQ ID NO: 323844 - DNA, 726 bp, Cannabis indica
ttaatagttcagggggaatttttaacggccaaaaaaattcaggaggcatgatttggtacatgtcaaagttcggagggaaaaattgctaattagccataaattaaacaaaaacattactcaaactagcaagtaatttttacaatcttgaataataaaatcaagtaaagaaatcatattaatagagcttcgtaatatttatacctcttaaacaatcagtctccattgtgacattcatattagatgaggtatattgttattataacatatattttgttattattataaaatttttcgaataatttacggtgctaaaaaaatgaaatttaaatgattaaatatgtttttttttataagtaggtaaaataaattatttaaacgtatcaaacaaaataattgagatatttttttaaaaaaaaatgtaccaaaaatgaaaatgttaccaatatgaacaaaattgagcttggttatggatggtttagccaatgaaaatggatacttgttcttcaaaaggtagtattttttggctttattatttttttttttgggatgtgttgtcaatattgaagatcaaaatcaaatttttacttatgtaatacgtatgtaaattaatatgttcttttatatggtatacataattgggtctagattatagtacactttcttaagtatttttgtagtattcttatctatttctagtatctagaagtaattttttagttttttttt

SEQ ID NO: 323845 - DNA, 1371 bp, Cannabis indica
aacatacttgttagtaaatcgagatcctggtaaaatatattcgaacaagcccatgcttctatctcctcgagcaaggccattgagaccttgtcggccgtagtgggagaggttggatctaaatttgcccaggcgtatgggattgcttgctggcacaaacttaagactctccttccccctgattaggatctaatcaattgtgggagtccataagagatgcttttgaagaacttggactacaacttcatggtaagttggtcgtattattattatttcttttctcttttctcacatttatttgttcataattctccaggcttctttcatttcttttgcttccaatcgatgacttttgaagcggctcaaataattggagggtgaggcccagaaattactatcccaatgcaggaatgtgactaagcaacgggacgacgcctagtaggaaatcactggcctcaaacaagaagctaagaagtcaaaagaagaagccgagaagaccatctaggcctaagctgatgaatttgagaagaagctcgctgagaaggagatcgagaccacagaacgatgcaacaaggttggccttcgtactttatatcgagcctggatggcgaatcctaatatagacacaagcttcctggaggagagggaagaggaaactctggctttctgcaagaagtccagggcagaagaggaagaggccgaggcagaggaagaagaagaagaagatccatccaagtctcccaccatgtagacttggtttttatttatctcccttttattatttttttaaaaaaatggcctttcggctgagacaatggtttgcccctggtggcactttttgtaaagacatatttgcgaagttggatggccgactttgctttttaattttaagtttaaacttcaacatgtggttgtttgcctacatttcattgacaatttaaacaatcatatgcataagatttattagaagtttccattgcttgtatttttttctaacattaagtagttaataacctactttatgtgcgagcggcttatcttctaccctaccgtcaatttgtgagcagtcattagttctgcctcgcgatcatcagaagggatcttatttcaagcaaacttaaatatatttttaatgaccttgtcactttgtatatatctttattgcttacatgagtagttagatcttctacccacgtgttacgtttaagtatctttttaagacactttgatgcctcgtttaatacattcctttagcgtgaggcgttagtattcagctttatgcgcgagttatgagttacatctcatttataacttttgattttcctttctcgtcggataggttttgaacaaaaaattatagttgtttgatccatt

SEQ ID NO: 323846 - DNA, 1146 bp, Cannabis indica
gagaaaaatcaaagtcaatagatggttacatggatgttatacaataagcattatcccaaagaacaagggcaggagaaactaacattaatgtgaaatagaaaaaccatatcaataacgtatttttaaaatgttagtcaattaaggtggcgtttgattgggagaaatgaaaatatagaaataagaatagaaattggaataagaatggaataaaatttaaaatgcataaaaaaaattgataaataaaattattaaatttttgcaagaaatggtctttccttttattttaaaatggaatagtcattccaccaaaatgattgaaaggtcattccatcagaataatattccaataattttaaatgcaattaaacaaaaaaatggaaaggaaataatttcctttccatctctttgttttaggaatggaaaggaaataattatgttttaggatttctttcattctttctttcttcttcttagaaaccttaatcatcttctacaattctttcaccaaataattcatatagtttcacatcaatgagtttctttgacaacaacaaaggcacaagaaagacttctaaaatcaaattatgtaatatcaacagggttcgtatataagcaatataaaatttataatttttgaatgatcccgtcactgcctattccgaacaatcatggacaaataacttactatagaaagcaaccgatatgatttattctccgttgaaagccatagccaactatcgatctcgcttgtgtcttcgatttattctttcttaaggttaaaatcgattgaatactatcacattccaatttggtttatggttgacgatataacttttttttttttttgtagaaaaggtctgttatcataaattaagaagagtcttttacaacaacagagaaaatggtagggggaatatcctcatatcacatacaatcattatgtagcgttaatgcttgtttagccaagtcatgtgcagcttggttcgcatctctacgaacatgagatacacaaacattagggaaaaaagataattgatttttaacatctgaaataagatcattaaagactaaatttcttgatgctaaaccatttactgcagaaactgttgggttttatgccctaaataaaacttcatttcaatgtaa

SEQ ID NO: 323847 - DNA, 1577 bp, Cannabis indica
gtgtggggctcttaaaattattttaaaaaagaatttgtattttatttttaaaatttatgacactaccaaattatatcctttaaaatatacattataataataaagttttgtgaactattctatttacaaaaatatagtatttttgttagcttttgggttttttttttttatcatttcaaaattgatgtgtcattgtaaattaattaattttcacatgaacatgaaattaaaaaaatccaacctaatatattattgttgatttagatgaaaaatttacaccttctcaatttaggtttgtaactaaataaatatgagttgataaatattaagaattttgaatttgatttgtttaagtgaacttaattttctctaattagagaaagaatcttaaatctttttttcttaagatttattatatttttaataaaacaaaataaaaattacataaaaattaaatttatataaaaagataatatgataatagttaaagttcaagataaaaatgctaattatttaatattataacagtaaaaataagtaaaattttacataaagactgattatgtaaggagatatttttaatcttccatatagaatgataaacacactaattattctatttaaataaatcctaaatataagttctatcattcattttgaattaaaaaatttcttttcaaaagttttagacagtggacatataaattaataggttcttttacagtgcaccacactcaaaattaggtgtaccaatggacttttttttttttttttatatatataatatcttaacaattataattataatttttttgtatgattatatttattttaattatttaaaactttggtgatgtagttatttaatagggttctagttataaaatgataatagttaaaagaagcactttatataatgatgtttattctagtaatacaaaaatgggattcaaataatttcacatgcgtattaaataaaagagacatatatgcaacaaattgtaaagggtgcaccataaaagttttctgtatattattatggattctgaaatagtagagagtgtatcgatttcgtagaggatgcaccataaaagtttctcttatatattattattgatattgatatgtttataaaattgaacaatttacttatttgattttaaagaataacataataatatagatatttttttaacttttaatactatggtttgaatagagttaaaaaaaaaaaagaagaaagaacttgaatgttaatgattaattatctttctcactctcagtttctatctctgaaaaatatatttgaagttgttttaaaaataataacactaaatctttttttaaaattcccctttataattacatttaaaatttgtaaatcatgaccaggatgttgtcacaattttcttaagtcgcgactaacaatttactttattacaaagcgtagaaggtcgtatttgtgactattctaagttataattttttaaataatttttcttaactattttttattttttgttatttaaaaaattataaataaaccattctaaagattaaaatattatttgattctt

SEQ ID NO: 323848 - DNA, 1339 bp, Cannabis indica
tttttttttttgataatttattaaacacgtaaactcttttgaattagattagaattgtgtatagctaggtatatacaataaatatggtactgaagatcaataattctacataattaacggtttaaaatatgtccctataaattcccaccatagaagttttctcaatctataaaattaatataaatatatatatacacacgaaattgtatctgaattttttaatttgagttacgcggcactcctaattaatattaattaatataaatttattttccgcgtccaaactcactatatataatatagctaatgcatgtagacaacataaatagcaaaacattaagctcaaaactaaatatatatacatatatagtaactacttgccatatatatatagagatattaatagtagttaattagggtttgcaataataatatggatgacttgcatgacacggcaaccgcatactatgatcttctcaaacatgaaacaaagctagcaatcaaagcattttgtgaagaaatggaaactaaagtacctgacaagattagtttcgaagaattctccaagtacatgaacatcgtcgggttttcacagtttggttcgaaaaaattctttgaccaactaaggcgaagagggagagatcacttgattttcgcggatatcataactcttttgtacataatagaaagcgtaggccattttgccaaggaccaattgcgaaaataatttcattcctggaatgtatttacttgcgtcaaatgctttttcgagaacaattgcgattatttcttcaatgtttgccctaaatgtttttacaatggacattataagcattgtcacaaggagtttttggatccaattgtaatgcttaggctcaaaaccaagcaagatcaatcatcatctaataatgatgttacctatcagaaggtacgtacataacataacattaattaatttgatttttgctcctatcttattttgtattattttttatttaattggtaaaataaatacatatgaatttgagctagttttttttaatatatatcatatataattttattttaaaaaattaagtagaatatataattttgtgatttgtctctggtcaaatttcatatataacaagattttgactatattttaacaaagaaaaatttatttatatggtactgttcaacagttctgattttttattgtttataatttgctttcattaattttattttagtatgtgatttttattaaagtgtaaattttggaattatcatgaaaaatctatatattattatgattaattaatatatgtgcaaaaataatatgaatatatttttaaat

SEQ ID NO: 323849 - DNA, 2366 bp, Cannabis indica
ttttggaagtttgagaatccttgaagtaagatcaacaaaggaggagaagagaaaaattaattttttttttttttaaaaaaaagagttgacgtcgagaaagaaaaaaaaatcctaccttggagggtgaagaacactataaggcttgatgaaaatgaaattccaaggcattttttaagtattgggaatggagataaaagtgggaggaaggaaaattttgattgaatactctcttatttataggtgagttcaatctccgaatcctagagcaattgtgagtttttaaatttaaagcttttaagaaagaggtaaatgataagtaaaataaataaatatatcttttcccttttcttttcaagctaaattttgaaattcctatagaaataggaatatgaattcaaatttaataggtaacatcaattcctaatgctactaagatcaaagaaaaattagagatttaaaagaaaaagataaataataagcaaaagatcaaaagtcttttctcttcttattttttcctctaatttttgattggtactatcatataggattaggattcaaagccaatcaatccttgttgcataacaaatgtaagaaaagttcaaatttttgaagaaaaaggtctaagataagttaaaaaaaaaaaggataagcttttcctctttttatttgttaattgatttttgaaaattccaaacgactaagaaagggaatcaaaagtcctaatttattggggatgcttgaagaacagaaaaaattgcctaagaatttcacaattgattcccatctggtagttttaagaaaacaagcccgcttcacgtcatcaagtcaactccacacaagtgtaaaagtttacttagggggaaaattttaaccgaaaaaacttttcctaatgatgtgtacatcaatgtttggcagatgacaagaaagattacgtcatggagttgagtagacccaagtcatagcagtcgacctaggaggggaccctagccttggacccaggttgtctttgggagctccgagatagaagtttagacttttattacttgaatccaactcactatctttcagtattatgtaccatgacaacatagagtaatcaaatccaagcctcgagagctgaaattgcattaacctgcaaccaagaatccaacttgggcacctaggatttcacccagcgtccaagttgaccttcgtaactagggttttagtttttgggaccgttttagtgcaaatgggtcaaaccttgctttaggacaccaactagacatatcacggatatatttgaggcatcataaccaaattcagagcaagttcatttttgagcacccgaagcattcggtgctcgagcaccccagcacccaggttgacaatttgtcaatctgagtaccttccaagtatcaaattgaaaatctttcttttgcatcttctttgtgttcatcaaaaatagggaaatcgacacttttggggaagaaacaacacttcttgggtgacagatgtaaagcccagcacccaggttgacacatggggctagcccagctcccaagttgacattttgtcaacttgggccgacttcgatgatttttttcaagaaattttccaagaaacttctctttttctagaaaagattaagattcaattaatttcgaggaccaaacgaaacttttgaaaggctaaaagggggatatagtgctaagttcacacctggcactaggcctagtgcccaagttgataatcaacctgaagcgttggttttaattattcaaattccaaatttgatttgactaatgaatcaaaatagtcaaaaatgtggtaggagaccccatcctcaacttcaagaaccttggaagtatcaaaataagatcccgagagctcaggttagagtactaagtgcccaggttgacaaatggtctggtgcattgggttctgcttatccaattttgattctattttgattgtccatctagtttttctcaatagctaagatccatgaagtcaaagaagtaaaatttacgactttgaatttctcttttccaacatgggaaactcattgggagatgaagagtttcgagtctctcatttccacagaacatcgacatctctgagaattggtgacatgctttgtcgtaacacagaaatagaataagtgatgtgaaaatatcacttaggcattttgaagtacatttattggaaatttttacacttatccagcgtccaggttggcatcatatgtcaacctgggcaccgggatgttaacctaggcgccgggtgtcgggaatattttaccaggatctagatttactaacaagtatgttgaattaacatcctaaatgtaatatcccggaaaataaataatatttaaatagaca

SEQ ID NO: 323850 - DNA, 687 bp, Cannabis indica
ttatgtttctgtccaaataagcatatatgtcatcgttctcggagtttattcatcgtacgtaggctttaaggacgtcatgacataaccgtcgaggcaaagtatggacataaaagattgaatagaaagatacataaacaaaaaaatctcttagggatgtacgtcgatcggtttggtcggtttacactacatattttctaactcaatgtaaggaccgggttgcaaaattataagtgcaacttgcccaatttaaaaataaaataataaaaaaaattaattcgaccaacagtttggtcggttaacccgtccaaaccaacctaaggttttttttaaaaaaaataaacttttcaaatctagtagtggagttaacacacacacacacgtagacacacacacaatattctccttgcaatcgtaagtctccatattcctcttagctgttttgcaagaattgaacctaatagcccattctagaaccaccaaaacctttgtgacattgctaaattcttccaaccttgaaaaattaaactctatttcttgcataacaaaaccatagctacacgggttaaaactcaaaacacttctatgattattgtagctctccaatgtcaaactctagttgacaagtcctttaaggatggaagttttgcaatagcctacgccagagcaagacttcaagtcaacttcgtc

SEQ ID NO: 323851 - DNA, 769 bp, Cannabis indica
gtgatttatttatttataaaaatgaaaaataatatatctcaaaatgaaaacaacataatattaaaatgaaaataacttttataaaataaaaataacataatcttaaaatagaaacaacataattaacctcaaaatgaaaataatttttataaaataaaaaaatctaaaaaacgtaaaaatagaaaaaaataaaataaaaaatacagtatacatgacaattctatttttttaaaaaataagatccaattaaagatgttgtttttggttgaacataataaacatgattctacacattattagatatctatagaactatgcgttttgaagtgtatataattagctctaatcactttcaataatacaatatatgtcaagttatttttaatttttctaattattaaaatattataaataagaaaataagagataaactgataaagtaagagagtagatcgattaattaaacacatattttatttttgtaaggactaggagacaaaaaagaaaaaggaaaaaaatattctaaacttgctagctagagatgtaaaataaagattgtgtttacatagtggtaatgctcagtttgaataatataatatagggattttttcatatataaccttattagagtcaaattttacatttttattactataagaaaaaataaaccaaattagaaaaactaaagttttttttttcaaaaatacgggagtcttcttccccaaaaaacttctccttcttaaaagagcaaaataaagtgagttgttct

SEQ ID NO: 323852 - DNA, 858 bp, Cannabis indica
tttcctttctattccattcttttcattacttccaaccaaacgccaccttattcttgtgttttcattcctcccaacataacgtaaccttattcttaaatgacatgaaaaccattcaactaacattacaacttcttttctccacaattaaaaaaacattggtactgagttttcttatgaacaattctctttagtggctgcatttactaagaactcatttgcaatcattgcagctcatccctatatggtggagatggtactactggggctctccggttgcctggacaatctatggcattttcacatcccaagtcggcgatgtcaccaccaatgttgaactttccggtggaaaagtaatgagagtgaatgattttctcaaggataacttaggatttgaccatgactttctcatcccggtgatggttgctcatgtcggttgggttcttctcttcttcttcgtcttcgcctatggtattaagttccttaacttccaaagaagatagtcaaatttcatgatttcaaattacatactaatcacattgatttttacatattctttatttgtaagtaggcttttcatttggtttggggtaatgttaatgttatttttctttttaaagttaaaaagttttgtcatgtaattataattatgtaatcacacaaagaaaagctttgtatattgtttgaatactatagatgaaaacaaaacccattcttctatttaaacatatcttcggtataatttgatcatcttcttgtatatgaatttagggttcgtttagcatgttgtactataccgtataaaaattaaaacataaggaggttttgccacaaaaaaaataaataaataaaaaataaggg

SEQ ID NO: 323853 - DNA, 1225 bp, Cannabis indica
tggtttttttaacatcactggagtactgtcgggttggatgtctttaaagctatttaagatttctttgattcaggctccttcccaaaagagctgaatgaaactaatcttgttttaatccctaaaaagaagaatgttgctacaatgggcgatttaaggcctatttctctttgtaatgtcatttacaaattgattcctaaagttcttgcaaaccgaatgagaagtattattgatcttattatctcagatactcaaagtgcgtttatccctggacacctcatctctaataatattatggttgcttttgaagtcatgaactatctcaaacggaaaacaaaaggcaagaaacactatatggatcttaaattggacatgagcaaggcctatgatcaggttgagtggagttatcttcgtgctgttatgcttcaaatgggatttgctgaacgatgggtaaagttgattatgttttgtgtttcatcagtaagctactctattatgcgtgatggccacggaatgggacctattctccctccacgaggcatttgtcaaggcgacccattatccacttatctctttattatctgtgctgatggcttctctgctcttatcaagaaatttgaatctcaatagcttttacaaggatgtcgtgtggctcatggggcacctgctattacgcacatgctctttgttgatgatagctatctattttgccaagcaacactcggtgcatctgtgggtattttaaatctgcttcatgtctccgaaaatgcttcaggacagaaaattaacttccacaagtcgacaatcttttttagtccaaatactattgctaaaagtcagaatcaaatttgtgacagactcggaatgcctaaagctttagaagggagtctctatttgggtctcccaaacattgttgggcggaataagaatgcatggagtatacttacaccttggataagtgttatgtcctttccagggcattggcaaagtttaccagtatcagatgtatggagtacacattggaagggaccgatattgaggtttgattagatatgataaatttaccgtaatatctattcaattcaatatcacctagttgatcctagatcaaatgatcttaatcctgacatgattaggttcaatctcaagagtgctatttgtgttctttaatttgttagtaaagcctactttttggtcagggtgacacgtacattttgggaacatgata

SEQ ID NO: 323854 - DNA, 1461 bp, Cannabis indica
aaattccattttgtatttttggtgtaaaaatttctaagttatattttagaatttcgataagtatctagtcattaggtataaattattatccacgtgtcattttttttatgggataagttgaagagtatctttttttttgtatccattaactaaaaatactctcatattatattttattaaaatatatactcacttttataagtgatatgcccaatatactctcattttctacttaaatctagcatataatttacattaacctaaagggtttaatagggacatcatctataaaagtgattatattttaaagaatgtgaaaataaaagtaaaaattaaaacaagtaaaataaagtgggtatacaatgcaattttatctttttttttattggtatatttaaattaatttttaaataaaaataaaaatttaataacttgaccagagactgtaatgtgaccattgacttgacacttaacggctaggtgcctacagaacatttgaaaatataacttgagtattattaccacaaaaaattaaatttagagtatttatctgtacaaagaattaaaattaaatatttatgctgcaaattactctaaaatatatatcttctttattaaatgatatgtaagtgtggaccattcattgattcaacatgcatgtgattttgtccatttccttttccttacctttcatcttttttaatagagcattgctattagacaccagtggtgcctaacacctttttgacatgtcgcgttgcgattgactagcgatactccttaaaaactattatattaaattatatgggacccaatacttaattggaccactagcgatattaacacataggagggtgctaggcaccactggggccttttagtatttctctttttaatagagcaaatgttctatacctttcctttcattgattgcatgatgcaggtgttggacaattgttgtgctctaatacaaatatatcaaaccaacaagattacaactcaatgacaaataatacaaatgacaaaaatatagattaaataatattacaacactaaacaaaatatacacataaaataaataatatagagatgaggagaagaattacaactcaaagcaataagctacacataaacacaatatataaataaatagcatatatatataagaaatgcgagagcaatctcaacaccacatacaccacaagtgtataataggggaatcaccaaatttgaacaaggttttacacctttgtccaaaagcttatttccccctaccacaagcacttagggaaaagaaaaaaatggaaataactttctggatttatcaagcctaaagtgtttctagcaatgtgctcttttgatagaaacttgttcactctcaaagtgaattcaagacctctatgtatagtgttttgatgatcacatataaaaatcaaagtctcttcaccacatggctgttac

SEQ ID NO: 323855 - DNA, 1621 bp, Cannabis indica
ccacttaagagtatttttagccattttttatcttttttttttaattccatataattgaaatctaaccctaacagaaatcctatataaggaataagatgtctctcattctcatccaacctaagttaactagttttctaactctgacagacaactagaaacttgagagcctccttcaaaagaattcaaatatccctctttttatcttcataatttttgagccctatagtgaaagagtgcatgcccacccatagcaagtcaagtactcaatcatagtacggaagattgtgaagaatccaacacctaaaggagaatcgagcttagatcttgataacactctgcgacaaaaaggaacaagggttagagatctaagtggaaggagacatattattaccaatgtaaggttttctaaagtgtatatgtgtttaattttattattttagagaattcatatttagggtgttaaacaacatacatgttagtaaatttagatcttggtaaaataatccctaatagaaaagtcatcaacaatggttaagaaatatcggtaaccttcaatactagtaatgtgaaaaggaccccatatatcaagatgtattaaatcaaaagcagaagtggcaaaattgttgttagatgtaaagagaagtcgcttttgtttggcaaaatgacatatagaacaaataattttgaaaggtttttaaaaaacttgcaaacaattatttaagatagtagaaatgttcacagaaggatggccaaggtgaaaatgccatgggtccttcaaattacatgtattgtttgcaaaaataaaattgttcgtagtgagaaaacgatgatcctgttcaaagaaaaacagttgtccaactttcttagctgtcccaatcgtagaagtcagggagagatccaaaatcaaacattgatcaaaagtgaaggtgggtttattaacacaatgttcaagataatgaaaaataaattgaatttaaattctagaatatacaagatatccgttaaaaaaagttggtcagatattttaacagttccaaatttgttgatatgaatctgatgaccattaggtaacataaccaagttagcaatattgtttttatttaaagatgtaaagcaatgaagagaatgacatatgtgatgagtggcgccactgtctgctatccattagaaaagagaaaaaaattgtcattactgaagacgttagaaaccacaaggagatcttcacaggtggatggagcaccttggatatgttgaatgagaaaggaaatcaactattgactcagctgaagttgggaagaaccaaccgtagaggggtatggagtggtggtcactaaagcatgatttacccgagcaatggtggtggtcttttttttgtcaccatacccgggaggaaaaccgtggaggaagtagcattgctcaacaaggtgacacggtttaaggtagttagaacaagtgggtcgaggtttcttgctctgggatggttggttgggattttatttggccgaagtagcggcaacaacaacagtgttgccaagatagcgctggcgctcttgttgaacaaccatagagaacaccttaaacaacgaggggaaaggatcatagaggtgttggaaattatttt

SEQ ID NO: 323856 - DNA, 2146 bp, Cannabis indica
aaaaaaattaaaattttaatatttattctatataaaatatagctatgtcttagtttaacggtattttttttattttctacattaactgttaacccattttttgcactatgacgtggtagcacatacgagtgacacgtgtccagcattctttgcatctgggcaaagatgaatatcccgaacagacttcaattaacatttgcaccgcgcgtatgatctctaattacccgagcagggtaaagggcacactacccatacaggggcaagtttcactttctgaactacttacaaggactcccttcagattgatatcgtgaagtccaagcacaaagacaatcctacaatcatgggattgaattaaaaggatacggcaggctgtctcaatctcccattttgtgtattctaattatgtaatgaatgttccttcctattatacacattgtaagcaaaataaaaaccttccctcatgcactaagcccctataaatagtgatctaatttcactgtaaaagggatcaaaaaaattactttaaagagagatctaagataattactcagagatttcattgtaagagctttgagagagaaaacactgtgttctttgttctcgagttaatacaatctaagggaagtaggctattaccgtactaaaggggccaaatctcttcaaaatctggtattctttatcacttattggtttttgctctatttttattacatttctaatcgcttaataattaactcattgtcgttgactaaaagcaatgtcaacattttggtgctttcattaagagcaaaaacctaagtttgttctttgtcttaagtcttaacaggcatatagaatggtggtgcaaacttgcagaggcctggtcgatcagagtgacccaatggtgatggaccctggtgtgcgaacccctgggaacatgagggtaccaccggggatcaatcccgagcaggccaacacacagccgcctattgtgggccatggtgtgacttcccctctggttgggatcacaccaggtgtgcaagagactgggaatactagttcagcagccgaccaaactcccaacactagagtcccgtccaccactaatgctcagagggcggtagggaatgacactgagatccaaaacctctgtgctgcccttgggctcatgcaaggccataataatgccttgcatcgtgatcaggaggatctccgtgctgctataaaccttgcatttgatgagcagcgatgccagttcattgagtggagggacagggagatggaaacattgaaggctcagcaagcagccattgatgaccgcacaaggcaggctaccgtactgatacagagggcctaccaggttgctaatcagcaaccagctaccgcgtccagtattccactgggcggtacagaagaatttgctactgcgcataccgttcaagctcataatggtcggccgtccaatccccagccacaagtccaacctgtgggccaagcggtagacggctagattctacttgaccgctctttaggtggaattatacctaataacttcattcaaaatgatagttctggccaacccaccggccaaaccaatcagacaccaagaccacctggtacctcagtattcaatagattgggtgtggtccatgacgcagggttgacctgaacaaaagaagatgtatggatgaacaatacgttcaaccagttgctcaaccaggtatccgcatccaggacccaactccaagagatcctgatgtgacacaagtcagtcaagaggctgaactagttcatccatctgtgcaagcacgcggatcacccttcacccccaagatcgacgtccttgaattaccccttaaattcaagatgccaacttggaagatgtacacaaggaaagaagatcccttatcacatctcaaatattttgagatgcagatggatctgcagggagtacggggtgatgtgcagtgtagaatattccctactacacttgtagaagccacccaacaatggtacttcaagctaccaccagggaggtttaattcgtggaaaaccttttcctcagaattccacgtaggggtgagcataaaatctagaaaactgaaaaaaccgttcaaaccgacctaccaaacagtgttggaaccgaaaccgatgaaaccgaaaa

SEQ ID NO: 323857 - DNA, 659 bp, Cannabis indica
attatatctacattatctgtggaaaacaaatgagagatgccactcttatttttggacacaccttatatttttcctatacagtagtacagtgtaagcttaatggcttgattgtgtgttcaaattcattcatcattgttattctttttgcatgctgtacttagcacatatatatcatttcaatcagtaggtaattatataaccacgccaatcgatattcttaacctggtcttggtttcttttttttgtagcttcttaatttaattactaatatacctatatatatagggtatgacaaaaaagaaaaagaaattatttagagtacttgaagctagtgataactagtactatatattgattgtactgatgatgagcttgcaataattttgtgatgagctcctcccatgtgggttttcaaaagtgaagataaatattttccagcatatattttcaagtgggtcatgatagctgcaaaattttatgcattatgtggagccttttttttttattattattattattattattattattattattattattatttaccgtattaatgctattattatgcagctagctagggtttgtgtgtatatatatactaggtgaatgtacgtgtcgagccacgtatggctagtttcatttaagattttagtctt

SEQ ID NO: 323858 - DNA, 1058 bp, Cannabis indica
aaaaaaaaaaaaaacttagtattcgataagagaaatttgtaatgggagcttaagtgaagaatatattttttgatctgagagtgtgtagcacatttctgcatagtgaattcaactcaagacactaccttagtcttagagtaggaccagttacattgactcgcatctaaaccaagtaaattggttgtgttcttatttgttttatcttttcttgctttaattcttttttgatcaccaagtgtttgcattgtgttatgttttcttgtttgtgttttttgaattgagatttttgctagttttgtgtgtattgcaggttggaaattctaaaaaattggtattagaattgggatacttgctgcatcaaagttgcttccattggattcaaaaattaagatctccaagactcaaggaattttgcagttctttcataatcaagagcttgattactagttaggaataagttcttatcaagatgtcgacattaaaatttgagagggagaggtttaatggaaagaaggatttctgtttatggaaagcaaatatgatggcacacatggggaatcttagacttgaagaagccttgaaagaagatagcaagatttttgaaaaatcggaaaaaaatgaagaagtgttaatttttttttagttacgaaaaaagtatcacgtggtacatatcactttctcatccttcagtagagtagatttaacaattctattaactatatgttagttataagggtcttatactttattctgctttaattggatcattagtatacaccttttaattaaaataaatagaattccatgcaccatacttttaaaatattattttgaaatcaataattttcaaaaaaaatcttctaaataaaagtaattttaaaaggtaaagattggattctcttttataaattaaattttaattttttaaaagaaaacttaataactctcaatttctagtatgacgaataattttttaaatttagtgcaaaaaatttggttctatttaatcaaattaaaaaaaatgactaaaattaaaatagtatattattatctctatt

SEQ ID NO: 323859 - DNA, 561 bp, Cannabis indica
gagagagagagaaagagatagaggcggagagagtaagaatttaagtttgagttctttgtgactaagaactcgaaggatgtttttggtgtgaatatagagagctattttgatcatgctatcagagtttttacaagttcgacattattcatattgaattagtgattatggcactcagttggagtataggtaagaatcaattcgatctctaggataaatccttgtcttctttattgcttttctatttatatttaagtttgattcattaacttgtgttgttgtaagtgtttctttaattgtgtttgatctggataggtgttggatgaatttggttgttgtgtgtgaatttccaacaataaattcaaaattagaagcacatgcaagcataataaaatttagaaatcatccctcttcagtaccatcgaatgctttcttcttccgtctatcaggtagatttgcaggcaagtaccgtctgtgacccatataacacatcttgtaaccttttgcgaagcgacgagttgatgtgttagtgcaacaaatcgaacaaccttcgtaaccttttgt

SEQ ID NO: 323860 - DNA, 821 bp, Cannabis indica
tcttataaacttagaacaaccggatacaaaaaataataaaatacgtaggactcactatacagtacaacgaaatacaatctgtaattttacaagatggacacaaaatcgttcgcctatatatattccgtgaaatttaacggctgtcgtatttcacggaatacattccgtgaaagtacatcacgggacaaaatcatgtccctatatatatatatgcccacacacaaaaaaaaacattaatgcatctctctccatcacatcataattgttaattacttcaaacatgttattaatcaattatttaagttataataatctatcaataataataagaataatttggagatttattccttaaattattacaatttttaaatcatgctttctaaatttttctatttaataaaattttgtcaaaaactatttttattacttaatcatacctcttttgtcgtgttagttatatgtgactaggctaacaatataattttgttggcattgatgtggcatatgtataattcaattaaataattttattaattgatttgttattattattttaataattttttgttataatttcatttataatttaaaaataatttataattatattcgtagagtttatgtaataatggctatgaaggacttatatatagaaagggctagagccagtcgtgcgcttcgggtccccgaacacttaaggttctaaaattatatttttttttaatatatagataaaaaattaaataatatagtaaattatcactacaaaaaaaaattatttttggtcacaacaaaatttgtgactgaaagtaaaaaaa

SEQ ID NO: 323861 - DNA, 580 bp, Cannabis indica
gttgatcttgctgctcccattgatgaaataaaggattaatccgattcgcaacatgatctttatcaaaaataaatttttaaggctgattgacttgatcagcgatgtaatcatggagattgtgacctcaaattgcaaaaaccacttgaggatgctagagaaggaagttattattaccgagattcacaaagagcttatgtgagaaaacaacgagatgaaacgaatgagttggagctacaaggaatttacagtcgctatatggatggacaagatcaaaaattatttgatgaagaacagaagcacataatcgaggaagagaaaaacaatcttggagagaaaaagaattggctactctgataccatgataagattcaagaaacagatttacaaaatgattctctttattgataaaatgagctctagctcagtatttatacaatgctcaaatcataactaacaacctcggttaacagctgtaactattgaattacaatcttttaacatccaacattgtttattataggctaaataacccataagtatttaaatttttaagtttgtaagcaacataaactcaataatt

SEQ ID NO: 323862 - DNA, 1040 bp, Cannabis indica
tgatttgatgcatatacatatcgaatcttttattccattatcttagggactgtttcaaaccatacaaagacctattaagcttgcacactaattcaactcatttcccttctacctgaaacataggtggttgcttcatatagatctcttcatccaagaatccatttggaaaagcagtctttccatcaagctgttcaacttcaaattctaaatgtgctaccaaggacatcatcaaccttattgttttgtattttaccacatgtgagaagattttagtatagtctataccttccacctaagtaaaactcttagccactaacctagctttgaacctcactagttcattctcattgattccctctttcaccttgagaatccatttgcactccacaatcttcttgttctgtggtttcagcacaactacccaagtcttgttcttccgtagagaatccatctcctcatccattgtctgcagccatttagacttgcttccacttgaaattgcctcttcataggttctgggctcttcaatttcaatttgttggactaccgctagtgcaaaggctatatagttacttctgcaaaccttgttggatgatgaatccctctccgggttctatcatgagccaattgataactttcaagacttgtctgtctgaatccttcttgcgcctctgtttggtctttgttatcttgttcttttggctccacaacagcttttggttgtgcactgtcttccggttccacactattttctgcttgtgaaccttctttcgggagcttcgttccgtactccacttccacacttgtggtgtctttgtttcatgtttttcctgtaacacacggagatacactactcttcccggaggtcaagtgaggatattataacttattgaaaataacatttctagcaatcactgtaatgaccgcacattagaatatgaattagtaagggcaattaacattaatcattaacatttttatgattgtaggtcccattatcaaaaaaaaaggcattagagttataatttctcaatttcgga

SEQ ID NO: 323863 - DNA, 2240 bp, Cannabis indica
attactaattagcctaaaaaaagagaatcgtataggttttcttcaaaaataaaatatattaactcgtataatattaaaattaatattaaaaagaggggtaatctgtcatactttttttttcttttttgaaaataagcgtagatttatattagaagaaactagacctcgtggtcgttacataatatgttttccggaacagaactgatcgggatcgatccatacacctggtgggtaaaagcccacttagcgacattgtgtgccgcaaaattacagttcctactaacattagaaaaattacaacacattaaaaaaggagaagacttagtacaaaaggagacatagttctctagagcccaatgggacgccttcccattgagggcgttgattactagtctcgagtcactctccacaataacataattatatttcaaatctaaagcaaccgacaccgccaagcaacaggcgccgcttctccacaaagagcttccgcgaaatccaaacgggatgtgtgaatagaaaccaccctccccagatgattcctagccactacagctgtgcacatactctccaagcccacacgaacatcacagtttaattttacccaatccaaaggtggaggcgtccagctatccttcaccggcggcggaggacaaggcaagagagaagtatgtgcctctgcaaaagaagaacaaatatggtcaatacatttaagaacattaggagggcaattattgtgtacgacgtcgttacgcagtttccaaatgttgtccacaacaagcgaggcataaagaaacacttcctctactcggagaccccgcctattgaggctccaccaaagtcaaacatagtaccaagtgtatagaatttgttaataaagggcaccaagtaattatttttagaaacataaggtactaaacttgtattttgataaagcacaaggtactaaatatataattactgtttgtaaataaataaattaaaaatataaaaaacaataataaataaacaaatttaattaattgaaaaataaacaaatataaatataaaaaaaatataaaatatctttttgtttgaaaaaattaaaaaaataagattaaaactttttcaacttaaaacaaataataaatttaatatttatgtttatatcgtatgtgataaagtagaactaatatatggatctatttcttgccgatctcagtgatttaatagtgttgtgagtatgaatcttggataattttgttggcggggtagcgattttgattaagagagcacttaaggaaatgagagaaaaaataagtcttcatatttatttattttactaattttatttactgaaccattaaaaatagttatggagatggtggatgataccaatcgatgaggaaaaaatagacgaaactgacacatgggtgtgtaatattataaaagataaaaatacgttgactctagctaaaattaataaagttataaattaaaaagtaaaatgaaatataaatatatcaacttataaaaaaaatagaagggtacagtctacctgagcgttctctattagttttataattatttttttaatatttgctaaattttaaacttgtatgcatataatttttaaatttttaaataaattatcaaataaaaactaaatatttaggtaataatttaaaattaagattataggtgtaataatttcaaattataaaattatatgtgaaattatttcaaagtattataatttcaaattataaggattgctacaaatattaaaatgatttaagtgcaaaaaaaattaattgctaaaaaaaacctggttaacaaaaaaattcaaaaaaaaaaaaaaaataattaataagtataattaatttaattttaaaataaaattattcttaattaaagctttataaagataaaaaatattaggttactatcatgttacattgttattttttatttaatttgtaaattaattagaattatacaataatgattaaatggctaaaaataaatataaccatcatgatgacatatttaatgtaactattgacattgtgcttaatatttaggataaataccattttggaccctctgttttacaaaagttaccaattggaccctgtgttttgttaaatgacaaaatagaccctgtattttctaaaatagtacaaataggaccctgaattgattttttgtcaaaataaagtttaattataatccgatctaaaagtgctatgacaaaactgttt

SEQ ID NO: 323864 - DNA, 799 bp, Cannabis indica
aataaaaaaaataaaaaagaaagaaagaaagaatgaatgaagctgaaaaaaataatgagactttataaagtgaaccacgcgcatatatatgttgattttttaaaaaagaaaatacaaaaagcgaaaaaaaaaaaaaaaacgtgccggtggttggtagatttggagtacctttttcaataataaaataaaaaaaataaaaaattaacgaaaaaataaataaatgtgtatatttaatatttatgcagttgataaaaaataaaaatgagagaattaaagagaacaaattatactaattagagaaatcttaaagtgttatgttaccgtcttatacttttcgtttatattaatatattgattgataggttcttttccttcaattttttattaagataaaagaaaatagtagtttgagttatcagtacatgtgtaaaaccataaaattatttttcttttaaaaggtgggaatttttttttttttttgatagaatagttgagaaattttgtaattatgacttagcagatattaatagacgcgtaatttcaaatgtggtttttaatttatttatcaaaaggattttaatgaatctcctaaatgtgattgtttttgtattaaaaaaaaaatgaggcatattaaaaattctttttccatcaattttttatttagattaaaaagagagtttttgcccgttaaactctctcaactataatctatatatctatctactagcaaaaagctatatgtgagacacgtatactaaattttatttttaatttttttttttatattatttaaaagtga

SEQ ID NO: 323865 - DNA, 818 bp, Cannabis indica
tcggttttcggtttcttggattttttgctcacccctacccatgagagttgatatccgccttaggttcctgtagtgcgcatttggggagccatttgaaacgaaccttcctgttagacctttttgggtcgaggagagacatttcttatcccgctcttgggaaacaaattctgccgtaagtaggctttcgcatatttcagcgattgtgcatctgttaaaggactttaattcacggaagattaattgagccttttccattaaatgcaacgtgtcttgtcttgcataaaacacagataacatttactttctaagctttcgagacgcaacgcgatctgagagcttgcagcccttcttagcttttttgtgataaacccctgacacgtgggctatctgagattgcttcatattcctgaagttgtcgtcataaatacataagtttaactctcggttgcaaataaatacataagtttaatttttggcggtaataatactaagatattgttggaaattattttaccaggatcttagatctactcacaagtatgttgattaacaccctaaatataaacttctaaagcgattataaaataaacacatataaagtatgagaaaccttacattgggtgcagcggaataaaatgtctcattccgttcagatctctaacccttgtatcctttctgtcccagagtattatcaagatctgaacctgaatctctttctctcatttctttagtgctgaacttccttcttgttcctgaagccttcactatctatttatagtcattccactagggttagatttgaattatttggcattaaa

SEQ ID NO: 323866 - DNA, 1109 bp, Cannabis indica
tggtaaaatatatccaacagagtgatattgaaaatggattgagattcaatggttgagatgctcaattatgacctcagatgatgatcgtgaatgttcggagaacgaatcacgtaggttggattgctttcgggttagttatgaaaaaaaattgcccttcagcttgggagcaatttttcaacttgaaaacttaagaattgagatatgggtgttaggtgtgcatagaaagatcttaaaattatattttcaatgcacttagaatcacattaattggagcaatattgagcaatttatggccagtttactcaagctagttcaacacccaaagatcaggttaatcattatgtgattgagaagttattagacgtcaacctgggcgccaattacttggaatagtgtgttgaagtcatattttatgaagtataagtgatatgtttgcatcacttagctaatttcttagctttgtgaagttcttcaacagttcttggagatttttctctttcacggaattgggtaattcgtgacttttcgatttcgaataatttttcgatatttcactttttcaaagaaaaagtgaaatatcaatgtctgaatttgactttctaatgtcgtagatctcatttattatagaaaaatagccagatgctcaaaatggaactgaaatcagataagcaaaatcaaacgcgtcatgcaatacgtcaacctgggcgctaggtgcttattctcaggccttttcgagtgtcgttttggtacttccatgatatttgaatcttctagtgagggaccttcccctattttggaccaagataagaggaatgcctagaacaaattttcatctaagtaacaaaaccatgcccactaggttaattgtcaatttgggcactgggaccagtgcctaggtcaacctgggccctggtcaagtcttttggctcccaaattgtctcgtttgctccttgagaacacttgtttctttgttgttgatgaaaacggagaaaattccaggaagactttgttgggttttgtgccctaaataaaactcaattcaatataatcagatttactaattaataaagatcagaaatcattttatattgcataattcacatgattta

SEQ ID NO: 323867 - DNA, 528 bp, Cannabis indica
tacctaaccattaattcaaagtaaacataagccaagtcgttgaatatttcatatgttgtagcaaagactttttttaattctcaattttcacctcatatgggaccactcagatgacttatttattttccattttctaattaatttggttcatagaaaactcccatgaaggagccttttatcattttataaggaagtagatatatatggaatattccatgaatatatttctcaactcaagtgctgtgctgtgctcgacatggaaaatgtatcccaattcctgtatgtaagttaatatacaaatatataaatatatatatttttatatttctcaatttagttatatttttaatttttatttttattatttgtatttttaaattttataagaaaagaaaatcactaattaaattttaatttttcttttaaaaaatatttaaagttttaaaatttgagtaaaataaatataaaatttaaaaatattaaaaattaaatatacttctaatattaaaaataataatgttacaaata

SEQ ID NO: 323868 - DNA, 558 bp, Cannabis indica
agggtatggatgtctcctggaagtaatggattgaattcttttacatgggtctaattgtctttgaaggagtaaagatgaatccgaccgctaagactcaaaataaagttagccagcagaatactattgaaggttatgatctgcgttctattcccttgaatgtaacaaaggagagtggtcttgcaacattcttgtctttatggctaagctgtttcatttttcctgccccaagtcagaacattaggcctgaatctttttaaatggcttcgataatggcacatgaggtcgaactttcacttgcaccttttgttttgggctatatataccgtgctttatataattctgcatcacattgtcaagagcgaggtgagtgtttcctgcctatgcattatgtgttgggtggttagctgagcattttcatgatctttatcgtggttgggatctcgttttcgatttacctcatttgagtaagtatgctggaattccagctacgaaccaaactttgaataaggctcgacacattttaaggggggaagattatgttatacatcgaccatatta

SEQ ID NO: 323869 - DNA, 1405 bp, Cannabis indica
ctacagcgacttcattaaaaaaataccgaatagtatttcgattgagccaccctccatgcatcaaccgcatcgctctttgagtggaccaccctatataaaataaacaataatatagtttataatgtattttaagataaattatattttaaaaataaaggataaatattattacttacaaagttgtgacgtataaaagtcaatgatcttgtgccttgcgtcattagatatttcatcagctacctatttgtttttttttttttcgagcggttcaatttttttttatttgatgaatagttcgcaaataggcttcaaactcaccttattcaagtggtcaggggcaattcaagaactttctctcaatctttttatttagtgtaatgttgcttaaaaaacttatgtctgttagtctttcactcactatacatcttcgccgtcttcgtatgtagagtcccgattagtagctctcgatggggattctcgacaatattaaaataaaaatatatgataaagtaaataagaatttatattaattcttaaatgaccatataaaataattaaaaccataaataattgaaaaaatttcacccttattcgattaaacacttgatctttatattgttacatcaaaaaagttataataatgaccttgacacaaaatggctacttactctaaataagcttgtattttaggagaattctaaattatgtaccactcgactttttaacgagtgttatgatcaagaggctttataattcctttggtcaagggacgacattgagaattaaaaactgtaagagtgcgagagacagcaggtgcatcttcattgcgattaaaatgattaaatcttattttgtaccctttaaagtacaatgaacaaaagattaccgcctcatctgcaacataacctttggtgatggatccttcaagacgtgccttgctaaccacataattcttcaacttttttatgtacctctcaaaaggatacatccacctcataaatattggactacctagtatagcttcttcaggcaaatgtaaaactaaacatatcgttatgtcaaaaaggacaggagaaaaaattaattctatcttgcacaatatcaaaattagatccttttgagcatcatctatatcttttacatttagagttcttgaacataattgtctaaggaaattacatagctgagtaatagtagttgcagtatcacatggtagatatttgcaaacaccaatagaaaaaccacgctccatgatgacatgacagtcatgggattttattcaagaatatttaactcatctagagaaaatttgttctttaaatttgaatagaagccatcaggaaacttgattcctataacaaattgacaaaatagctgtcttttttcacgaatcaaaacataagga

SEQ ID NO: 323870 - DNA, 562 bp, Cannabis indica
atgacacttacacaaagggcatggctcacatgcaactccccaacccacgcacacacgcacacaactgatgcatggctcacatgcgagcccccgactcgtacacacgcacgcggacacgaacacacatacaactcacgcacagctcgcatgtgagccccgacttgcacacacacacggacacaaacacacacacaactctcgcacgacttgcatgcgagcccccaactcgcacacacacatgcacattcacatgaacacaactcatggggttggcctttgatccgcttggacatatccccaggcacgtaaatatcgatggcgactttgagaaatgcagagcgcaagtaggctaatcgaatgcgcctgttaattctttggttattaggcgactgagttaatgcaaattttcataattaacaaaagtaaatgtgctttatatataccacaataatattatcgttgattacaaatactgccattcaaaatattaaaaaaagacaatatcgtctactccaactccattaattatatagaattattttgcgacataaataccatatgt

SEQ ID NO: 323871 - DNA, 1771 bp, Cannabis indica
ccatatatatatatataatacattaatgtcataattatgatgaatcatattcatataaagtgttcagtagtcacagttaggagacaataagagcctaaatgaggaacacatattttcaagaaacagacaaaaaagagtaatatatagttgttgcaacaaatacaaaatagtttttctttatgcaactcatcataatatatgtatatattatttgtagttttttttttgaacacatattattggagtttgtataacaatattattactagctatatatattttgataacactagctatacaatattaatttagactttacatgacaacattaactttacactgagaataaaattcttatataatataaaattagaagctcaataagatgtagtctccatcaattgttaaagagtattatatttttcaataaaattggaggaagttgtgtgtgaacttgttatagtagtgatcatagagttaaataataggtaggtagttaggtcatggatttatattttcaaatcagaatgtatctagtgcctatggtaccttccaaatgctttataaatatatatttgtatataggctaattaaaaaaaaattctcttcaactttgataagtattaaattatgtcccctgaatttttaaaatcgttaaaaatttctcctcaactattaagattgttagatttaagaatttttgtccaattttagtaagaaaaatctaacatagataaaaatttagggagcatgatttggtacatgtcaaagtttgaggagcatgatttggtagaaatcaaagtttggggagcatgatttagtacgtaaaaaatcaccgaattaataaaattaaatgaaatttgaccaaaatccttaaatctaacaatctcaatagttcaagaacaaattataacagccagaaaagttcataaaggggcaaaaacttttacagtcgtgagcatgatttggtacattttaaagtttaggaggaaaaaatcttaattagccttatatatatgttatcgtgcaaatttctcgcctaaaaattcgagagcagcctcatataaaattgacacgtggacccagttcctgatagaaaagatgacgtgttaattgatagctcccatagaattagcctcgcttgatctaaactcgcgagatgatacgaccgagacagggtcaagaggatttgatactgatcgtgcatataccgattatatgcgatgaccaagtaggcctctcctgtgactaaaaaagatcacttctttacctatgattagtctgaatgactaatgtgttcgacaactcgtcaggaacttgcatgttccacattgtcaacgcataggatgtctatttatgcaattaaaggtgaatgaagatttccaaacaaggcctgaaggccaccgtgcaagtacaaacaccctagagcgcctgtgagctcgtgtgttggaatatgaacaggcaactcgcgactcaccgtcacatacgttgctgcactaaatataagaacagattaaattattcttcatttattctcttactttgtttaatgttttcatttaatgtaaaaacaattttaaaacgaatcagttattgttgcgaaaattattaattactacgcaagtgcacgcaatcaagtagtatactcacgcaagtgaggtcgaaccacagagaattggattaattactactaaactatacttacaattctatttggcaaatcaaaagtatttatgattgaaaaaggaagaaagaaattcaagaaacttaa

SEQ ID NO: 323872 - DNA, 1313 bp, Cannabis indica
ctcaagaaagaattgaatgcccattcttgccagaaaattttgcctacttagcccgacgccagctgagagagttaaagcaagttgggatagtccgagattatgggaagaagttctccgaattgatgctcgacattaaagacatgaacgaagtagacaggcttttctacttcctcgaaggactcaagtcgtgggctaaacaagagctgccaaggcagtgtttgtcagacctcgccactgctcaagccgcagctaagcggttgactgattacacctctgagaatttgcaagagaagaagacgaatccccagaccagctccaacaatgctgggagtaagaattcggggaagtaaaggccgagtaaaagtgggggaggagacaagaggactcctgaatctagctcctcctctaagagtgatgctgcaacagggaagaagccccttaaatgttggctttgtcaaggcccacatagggcggttgcttgcccataccagtccaagttgagtgccataaaggcatccattactcaagtggagcaaggatgtggggaagatgatgaagatgaagactgcgcgcacatgagcgtcgttcgattgttgaatgctctcaagaagcatggcatgggaggtaagaaaacccttgggaatggactaatgtttatggaggacactttaaatggaaagtagaccaagagcgtgttgattgacactggcacaacacacaatttcatttatgaaatcgaagccaagagggtgggcctaaaactggaaaaagatatgggtcgcatgaaagcagtcaattcaaaagccatggccacgattggagtggcgaagaaagtgaatgtcaagatcaatggatgggacgggcaacttgatcttgcagttgttcacatggatgactttgatgtggtattaggaatggagtttcttatagagaagggggccattccgattccagtgacaggaatctacttatcatgggcgagaatccttcaatggttcttgctaaagtaagacagcctccaaattcaagcttatatcggccttgcaatagaagaggggtctgtagaagaagaggccaacgtttgtcattgctcccgccgtgtacaatgcaaaagtggaagagtccactccacctgaaattgagcaggtgttagatgaattcaaagatgtgatgtcggataaactcttgaagagactgcctctcaggaggggagttgatcaaaaaatagagctggtgctgggtgcaaaggccctaactaaagcagcatatcgatcgtttcccccagaacttaaggagttgaagaggtagctaac

SEQ ID NO: 323873 - DNA, 601 bp, Cannabis indica
aacatctggtcggatagagacttcctaattctcgtcttgcttatagtagcctctgtcgcgcaaccttgtgtagccaagtattagcatttagcatggcatgcgtttagatctttgatcctctctcttcatgtttgcctcatcttcgttttttttttttttgaaatgaaatctcttctttgaacttgccattgataagtttcaagctttttaagcttttagaaactttttgattctcacgttagattgtaatatttttggtatattgatctgcatgatagttttagaatgtataatgtgtgattttcttatgaaaaagattcgattttggctttcgttgtgattcttgaatgtttgggtcatgaagaacacgaagaacacattcgagttttgagaagaaaaaaaaaacacattttgattcaaagctaaccttggtcggccctagggatcttatttgagacctaaccggcctaggattcaatcatgggagtttgacagctctagggttttaccctaagaagctagcctgttcatggttgggtttggtaaccctagccagttcttggctgagtcatgggaccctggccgaccctctcaaggcttg

SEQ ID NO: 323874 - DNA, 2021 bp, Cannabis indica
ctattagtgaccaacacaacagtaagttattaaaataatttttaaggattcgagacagtacaatttgacactacttggcaaacaagcatggagattagtggtgaatgatacttctttggttagtagagttttcaaggctatatatttccctagtggttctttcttgactactactttaggaaataattctagttatatttggaggaacatcttggaatccaggacctcattaaagcaggtgctagaaagagtattgctagtagaattcaaacatcaattactgaagatccatggcaccctgatgatgatttctcttatatttgtactgtccatcttggtttgaagaatcattcagttggaaccctcttatgtgtagataaaaaggagtgggatattaagttaattatttgatgaaagggatcgaactttgatacttagtatccttctgcctttgtctgttggacatggagcaaagaggctacatttttatatacaataaaaagtgcatatagatggctgcaaaatgaattgatgctgactgatatggaccctgatttttggaagttttttttggaagattaatgttcaaccgaaggttttacactttagttagagggctattacaggaacacttgcaaccaaggttcaactcaatataaaacatgcaaatgttaattagggatgtacaatctgcaacattacagatgaatctattttgcattttgctatgtcttgttggcacagatcttcactcaatattgtagccttatctcggcagggttttcatgactggtttcaagctttagtgaagattaacaacagtgaccagatcgaagaagctttaatggtagcttgggctatttggaacgcgaggaaaaacctgttgtggaaccagaaaatatcgacagctgcagaagtagtttttcaacacgctttaatctttaccaatggcaaagtgctcaacataacagatttgaacctctgttaattcacaatgagttaagaattgaggtggagcactggactaaaccaacgattaacaaggtaaagataaatgttgatggagccatttttgaggctacaaaattatgtggtttcgatttcatagcccgaaacagttctagtgacataatcgaagtttcttcaagtaggaggccaagtttcccctgtgattgcagagttgattggaattaaagaagcacttagttggatcaaaggcaaagcatgacatggtgttttgcttgaaaccgactgccttgttgcagttcaagctatccacagtcaggtattgttgccttctccttttggtatgcgagactaccaacaactgttatctgagatgattcatattaagttgtattttgtaaagcgatatgctaataaagttgcacattttcttgcatttagttcttgttatttgttaggtcggacctttgatgtaaacaattcttcttttgaattgtaagacattgttttagctaatatcaatttttaataaaagcatcatttccattaaaaaaataatataaataaagttaattattttgtatattttcaatgtgtactaatggtaatgttgacttttatagtaaatttgtaccttgtgcattggagcacaaatattgggccaaatataattttatagtatattttaagtcaaatttaattcaaaatatacaccatccatcggagatgatctaagaaaaaatagtgttctaaaaattgtactaaatttggcacttgctaaaaattgtgctaaatttggcataagatataatattgtgtcaaatttaatccacaataaatgataatttttttatttactataataccactaattattttgattcattaatttttactaaacttaaatttttatttaccatattactattatttaaataattaaaaataatattttttagggtgattctacaatgcacccccttaaaaggaatgtactgatgcatccttaacttatttcggcatccagaaaaaattttagtctaattttttttcat

SEQ ID NO: 323875 - DNA, 778 bp, Cannabis indica
aaaaaaagtgagcatctaagttggcgatgaccaattcagtcatgctgatgcgagtctcaaaggtgctacttccaacatgatgcaacaacaacacattatcaagctccaaaagttgtggtggaacattaggctcattttggtacacatcaagccctgctccacctaatcggccctcaaccagagcacaaaccagctcgccctcgtcgacgtgagcgcctctcccgatgttgatgacaacacccttgggccctagagcatcgatcactcggcggttcacaatgttgtgattgtccggcgttaatgaacatgccaccaccaggatttggcagttggcagccaactccaccacatttgggtaatacttgtatttcactcctgccttttctgatcttgagtggtatattatgggacaattaaatccttctacccttttggctatggcttctccaatcctccccaacccaatgattcctactgtttttccactcagctgataaaaaatgaattgaaagcagaaacgaattcaaactcaaaaggtgtggagattttgtaattgtgcattattgttattatagaaatttgtctaattaatgtatattttaattaaattaggctcaaatgatagattataatatacacaaaattagaaagtttcacaacacatacaatagataaatattttaggacattaatataataatttcatttattgttataccaataaaaagcacttttaaatattataaaaataattattttttaatattatttattaaat

SEQ ID NO: 323876 - DNA, 1562 bp, Cannabis indica
tatgttctggacctaatagaatttataatcatgaaataaattatgtgaaccatgcaatataaaatgatttctgatatttattaattagtaaatctgattatattgaaattctacttggtcgaatgtcttctttacacctctgctcaggaaatcgataatcatagatgctgacgacttatgtgcaagttgctaaggacatttacctccacccatgtataaaaaatgtgagacacgtgtcgctcggtcatcttaccacgtcaatgtgtaaaaaattggataacattttccccccaagtctgagcgggaccttcctggtcgcacgtggacttcactcgatctggaatcttgtccggatgggtgacacgtgtcctaggggtcgattgacgaattgacgtgactctgaccatgggtctcttcaatttcaactcattaatgctaattgacagttttggctcgaattgcgtcttaatgtccacacgtgaagacgattattctgccaacaatgagtacataacgtacaattttgggggaattcgagtcatttaaaatttgaaatgattacttcttcctttcgagctgtccatagataggattaaaaaccctaattattcattttagtcattttgattcttgaaaaactggagcgaagaagtttttctctctcaaattcttcgaagaatttcttggaaactcttgccagcaccatctgagaagatcaaaagcttcaaatcagtgagtaagttcttaatttctttcttttatacattttcatgcttaattttctggatttctgttctgcgaatctcgattgttcttgaacctgttctaggataaccatagaaattctaggtttaagacttagaaacctcgattatgcttaaccacaatgtgtgattatatatgcgctttgattttaactccacaatattaattttcacttatccatttgaggtttagtaagaatcagacttcaattcaaaattgaacttctgggttgaaaattctatttctaagtgaaaattctattttttattcctcaatcgaactagtcggtatattcaacttgctttttattcgtttctcatcttctagtctcgtacattttttagatgaaccctggtgagttttggggaggcaaacaccatatcgaccaggatctgcttcaactgttgtacgaggatcatccttgtctccgtaccagtccgtcctcgtccattgatcacctttctaattctagctttgaagattgggagacaagtagtgagtacacgccttccccaagacccgaggtgcaacaccatttttatcccgactagatccaaggtcaaagatatggtcgctttatttgggaaatcaagaaggggtggagacactatcttctatccgactggacgtacgcgagaagagggaaagcaccaacaacatgtttactatgttagtaagaggttactgggggtagaaccgaggtatccccctcttaaaaaacttgccttatgcctaatccacacatctcacaagttacgaccttactttcaggaacatccgatcaaggtgttaactaa

SEQ ID NO: 323877 - DNA, 880 bp, Cannabis indica
attcatcggcaatggcgacgaattgaaacggatcgttagaacaatgtgcgacgcagccaaaagatcgttaaaaagcacagaactctcaatacctccgtggagaaagaatcgttacatgcagaacaaatggttcggtccgtacagacggacggtgaatccactaccggaacaaatatccccgtcggtgacttctccggcaccgactcccgtcgtgaaatgccgttgggtgggtttcgataacgccgtctctgacggccacgtcaacattgtccgaacaagatgataaggattgcaataatcgcaattaatatatataatatatttttaatattaaaaataaaatagattaattaaactaatctcatgagatattgctctttaatcttttattattttaattaaaaaaaaatcaaaatgtatgtaacgcggagaatgaacatcgtgtacatagcggcgttacagtagtagaagaagaatgatgtaaggagtcattgaaacaaatcgacgccgttaaattagtcaaaattttgtagggtcggatagttaatcgagcggttgtaaatttatattatattatattaataaattaaatcaatttgtttttttttatccgtataggataatataaatttatgattgcgattacgtggcagacaaggttttgttcaccgtagaagagtagtttagttttcacgagctatggatggatgtgacgtgtttgatgagatgtgttgtatagttttgggtaaataccattttagattctgtattttgcaaaagttatagattgttaaatgataaaatggaccttgtattttcaaaaatgtaaaaaatggaacctgagcttaatttttgacaatttttttttaatacaaccaac

SEQ ID NO: 323878 - DNA, 685 bp, Cannabis indica
gcacgggttaatggccggccctgctccacatacactaaagggacctaacccacctgctggaaatagccgattctctagtaggcagtaaagcaccaaaaccacttagtaaaacatcactaggtttgtgtagatttccaatcactttactcgacaaataagaatgcgttgccccggccagaatcaattaaaatagtcaacaaggtactatcaatagaaagttgacctgtcacggtagaaggaccaacatcggcctctgcctgagttaaagtaaacacccgagcaagaactggagtatcatctttcttctgttttggtcgttgtaactgtggggaatttcttttcagatggcccaccactccacactggaagcaggctctagattaacattctctctgatgacgtctcttgtacctcgggcactttggataggtttgccaatttttatttccactgcatcgaaaaccttgattaccttggaatctcttattaggacccatagctgctgggtcgttaggccttttcctgcaatcactagggtcagcatccttaccaaaactgacacttggcgattatttccacgaatctcttctcatactgtttctctttaagatttggtccttcgcaccctcaacagcatgggctagctcaacacctgagcataggttcgaacaaaccctagttgttt

SEQ ID NO: 323879 - DNA, 878 bp, Cannabis indica
ctttgtcaatgtcctgaaaagaatataacacttatctaaggtgtaagtaagttttatcgctgactataatattagtgtaaattcagtgcactgatgaatcatgggacattatcttttgaagcatataatcacaattatgttccactgtgttgacatcactgtaattgtgaataactatatgttttggatttaacagaaattgtatataaaaccttaaacatgaaaagtacatgtaaacataaatgatttctaatcttctattgataacaaataagattatattaaaatgggttttatttagggcataaaatcccaacagtctctgtcttcttcatagtttggaatttggaggtctttatcgtctctccggcttttgtaggagaggccttactcgacccccctaatgccatagcaatagaggaggtcatgttcatcccctatgatgccataacaatagaggatgtcttcttggcaagtgataacgaagcgttataacactctcgggcagttccttgatttctaaggagacaactgataccagccgttattgggaattttatggacaaatagtacactgaagagatggctcgaagttcatagagagcaagccttccgagcatcacattgtatagagacttcacatccaccactatgaacatggccatgatggtggtctgaattggggcagtgccgatgttgagtggcagtttaatcttaccacatggagcgttgttggctccgctgaaaccatacataagctcctcgcatggttgcagattttttaaggtcaaacccattctgattagggcttacttgaacaggatgtttgatgatgctccatcatcgtgttgggttttatgccctaaataaaactcttt

SEQ ID NO: 323880 - DNA, 574 bp, Cannabis indica
atgaacaccatccttataaaatttatgtatactgtatatatatgttattactaataacataaaaataactcagttataaaaaacgatcttagagactaaatatatatagtaatattttatttataataaatagtatttaaatttatttattaatttaaaatattattcaaattaatataatggaaagaaataattaatcccactcctttttttttttaatgtatccaacattatccaagatatttatattgacatttcaacattaaatcctacctatacatatctatacagtaacgtgtgattattaattaattacaaccatacaatttaaaataatataattctcatacataattatctacggtaaaaattaaattacatcattgtgtaaaaagacaataatattatgaattactcatttaggaacatacattttttagacataatgtattcatttttttattatacgaataattatagagagatcgagcacaaaaatatcataggttaaaataaaaatttagttcaaatagtttgatgcgtgttagactatatatatagtgtatgtaatata

SEQ ID NO: 323881 - DNA, 1015 bp, Cannabis indica
gatgtggcatctcatatttttttcatagtatttttactattttgtggcatctccaaccacgaactcaattcctgttctgattttatctccaacaacttttggtgagacctttttcggttttacaaacttgtcctagtcctcttcgttttaaagcatccactaccaatttgcttcccagagtggtagagaaccacaccgttataaccttcaatcaattctaaccatcgtcactgcctcataattaaattccttcaagtaataaagtatttgaggctcttgtgatctgtatagactttgcacttttcccagacaggtaaaagtgccaaactcccaagacagaagccactgctattacttcaatattatgactggaataccattactcacacttcttcgatcatttagaagcgcaggcaataactctcctagactgtatcaaaatatattctaatccttgttaattctagaaaacctctaacctcggttacagacttgggtggatgccaactctaaactgttgtaatcattgctgaatctatcaagatactatctatatccatctcatgctctaagaaacttacttagggccgacaaaattcacatttcttgtatttagcatgaagcttagacttccaagacatcacaacaccatccaataatacctttcaaaatccgtcctttgagttagaagaaatcaaaataccataaatgaagacattcacaaagtcatcggttatgaaaagctactttgggaatacccttctcttgagtcttcaactggtaataaccagatcaaagaccgatcttaaagaagatggttctcccctaaaattgatcaacataacttctatccttgataaagaatacttattcttcaccatgaatttatttaacttccaagggtcaatacacacttataaagtttcatcctttttcttcagaaataaaactggcgtactccaggttgaggtactcaatctagcaatttaaagcccaacattccttgtaactaaac

SEQ ID NO: 323882 - DNA, 906 bp, Cannabis indica
tcttaaaattttgtaagatatctcaaatagctataacatacatgaatatagaaaaaattagactaaaaaacttttttggatgccgaaacaagtaaagggtgcatcaatatccattttaaggggatgcattatagaatcaccctatatatacggttttctttcctaattttgttagcttattgactttttgtttctcattttattaaaatttatatatttttttaaaaaaataaaataaaaagtgagttgtactgtacgtatggttttcatttataaaaaaacaaataagttaataaacaattaataaataaataaacaaatacaagtaataaatttttttgaaaatataaagtgagttgtattgtactatatacggtcttcttttactctgtcaaagcgaatgtggtcttttattacttattaatttttttttaatgtattacaactattttttattatttttttttaaaaaaatagataattatgcatgtcattaaaaatcactacaaatagtgacacgcagtgtgagtcagaacacatttatccaatcatgtttgacacatcactgtaagccatcaatttcaaattaataaaaattagaaaattatgaattttattctttagtaacccttcaacacacattataagagactaatgttgaatgtttagagtataattatccatatcactaaaaatcactcttaactccttagagcaatatctccaatgataaaattttagaagatgtttgatgaggtagacatattatgttgcaaaacattgagatgttatatcgttgacgagaaaataatgtcattctaaaaatttacatggatgctatgttgtagcattgatgctattcattattttttaataaaaaaataagctaaaaagttattatagcta

SEQ ID NO: 323883 - DNA, 613 bp, Cannabis indica
aagatttatttatttatttttgaaattaaattttccaagaacttaacaaataaaatgctatcttcttcctaaaaaattaatactattttaaactttgtaatttataaaaattatcgattgaacctttttttatataataacaaattagatcttatattttttaaaatggtacaaaatagcactctaaactcaattctcgatttttttaatataactaagaaaatgtactcaattttattataataactctaaattggattattattaatttttattttgacaaaaaatcaactcaagatattattttatactattttaaaaaatacaagatttaattttttatttaataaaatagataaccaaatcaaaaacttttacaaaacacaaaatgaaaaattaaaataatatttaccaaaaaatgaaagggtattgttattacttattagtcacgacacttatcagtgagtcggttatagcatcatcaagctttataggcttggttaccaaaagtgtcgtttctgacaattacattatacgacatgtcgttattaatgtcatcttcttattattattttttttttttgtagggtaaccgatacatgttaaaataaca

SEQ ID NO: 323884 - DNA, 830 bp, Cannabis indica
tgtccatacctagtacggaatgcagtctttttgatatcctcttctcaaactctaaatcgatggtaacctgagaaaaggtcaatctttgaaaacattgtcttacccttcaacttgttaattacatcgtcaatttggggtagatggtatttattcttaacagtaagcttattcagttcttgacaattgatacacatttgaagctacccacctttctttttcacaaataacactggagcaccgcaaggggaataactcggtctggtaaatcccaagttaagtaattcctagagttgaatgttaaattcaatcaattcttatggagccattcgatatggtgcctttgatactggttttgctcctcgaaccaactctattatgaactcactctcttaggaaggtggtaatctaggtaaatcttctggaaatacatctagaatctcgcacacaaatctcgtattttcaggtcgaaatgaagttggttgactagtatccattgtagtatctaggaatcctaggaaacctaaatgcatcagatctttatcttttaggattgttattctgggtatgcacgatccttgtaccttatgttagaattattttaccaggaccttagatctactcacaagtatgttgtttaacatcctaaatatgaacttctaaagtgatatgaaataaacacatataaagtatgagaaaccttacagtggttgcagcggaataatatgtcccctttcactcagatctctaacccttgtatcctttctgtcgcagagtattatcaagatctgagttcgaatgtccttcttgttgaatctggattcttcacgatc

SEQ ID NO: 323885 - DNA, 953 bp, Cannabis indica
tttttgtttttttccctaatattaatcatcctagctagtaagaaatggttaattaattaattagttatatgtggtcctaggcagctattgcgtgtggccaacaaaaatagtgtgctatggctgaatcagtgtacaattcattcacaaagcttgaggattactacaacaactaatcgataatatccaactattgtatgacagatggctttaggtcccatcacctttaaattttcctttccccctcactcattaatcatacatctttgcaactagttctagaaccaataataatatttccaatttgcattacaaaatttccaataatattaacttttgaacttttacataaaagcattttgaatactttctcctgataaagtaaattgctccattactacaaaattagacttgagagacaatgtttaagggttttcatcatcaattttagtaaaatttactaccaacactattctaagcgacactgtaaaagtaaaaacaacacacaacatagggccctataaggtcagttattcataaccgacaccataagactttatggagtcagttattatgaaataactgacgccatatgatctttttatagttttttatttcagctttacaattttgtgttttaacataatttatatatattattttattattaatataattaaattaagtataagtataaataaaaattaattaaaaagttaaataaatacacattaacgttgagtattgatttgagatagtgcagattttacttcgaatatgtgatgggatgcagaaagtaaagtgagtgaagagcacttagtagcttttgaatggcataactttctcatttcttaactaattaagtaatgtgatcacttgtttttatataattttttaagaccaacaaaatgaaacaataatttaaggactaaaaataaatggaaaaaattagagaa

SEQ ID NO: 323886 - DNA, 1861 bp, Cannabis indica
gtcgatagagaaacaaattggttatgttttattgtttttgttgccctactttgaatttttttaagttgtttgttttatttttattttattttattcttttttgttttattaagcaggatttattttctaaggatgatgatgattttgttgatgctggtgctactatggcttccagtgttcaagctattgagaagatggtatttaactgttattttaaagttctttctgttttgtttttttattttctctttttgttgtttcgttatttttgacattagttattttattttagatggagtcttcctctattgttgttgttgctggtcagtcttctgtttcttctagtttttaagttttggttgagtatgatgttcgtaacattgttgttttcgatgagactccaatcttaattcttagaaagagggacagaaagaaagaggctattttgaagtctccctttattgaactagcttctgttgatgataaattagattcagtatctaattctcctaatgattttgatttaaattgtgaaatatgttcatgaattatgtccattggatgataagattggggaacctgttgacccaaatttggaggctgactttgatgtttggttaggataggttatgggatcaaagaaatcaacgtaactatttttttattattatttgtttgtctaattttattaacttcagatttattgttgctaaatttatatttgtttttgttcttgtttcagcaaaagaacaaatgtttactagaagggcaaggatgggatttctccttccttttgatttggtgttgaggaagttgataacaagatgtggtttcacaagcttagttatcgtgataattttttgacttcttcagtaagtggttttttacagttttttttggttgtttgcatgttttcattacctttgttttgtgttgtttcttagttttttttttaatcttcctttttttttcttttttagcatattgaatcattttcactacctgcgtaaaaagaacaagtatgcacaggagccaaaattaaaggttaccacaacttattgcattttagtgctagcatcacaaatctatatgataggtttgttgctaaacaaaatgatatttatgttttatctctagatcatactgtggcgtagtacattatggggaaaaaattttatgtgctactccatggcacttggttgatgatgttatttttcctattaatatgaaagtctaagagcattggatatgtagtcgcttaaatgtatttgagaggggcatatttttatacaacttcctcaggactggtaggtttgagaaagctacaaaggaggctttctgtgtatgctttcactgctccaaagaatgacaggttgtacttggcatcatgtgttttgaaggttgttcagtaggtgatatccacagtatgcatgtgtaatatctgtgtatatttctcttgcttctttgattaggctctcatttctatttgaaattagacactgattttctcttaccctatatgcttcttttaattttttgaaaaacaatttccaagatttgtaattttctgaatcggcaacacagaacgcaagtgaaaatatgtttcctgctgcatcttgtgtgcatgcagacagcaatgttcctacgtaagctgctttcaggaatgtaccgtcgaccactattatcggcctgcatgttttccaccattttatcgaagcatccaaagccataaaaacaaatagcaagctgttatcttttgttgttttcaaatccacaattaatccaaggttgtttttttccattatgtgcaaaaaacttggtaataggttgtatgatgttggatattattttaccaggatct

SEQ ID NO: 323887 - DNA, 873 bp, Cannabis indica
ttttttattattatattttgtttttaataaaatagagtattctttttaaagttattgctcttcatttgatgtgtttagcatgtttaattttaatttttcaatgtatgttaaagtttgtaatgcttttattgtgtaatgtatgtgatatttagtgtgcttaattttaactttttaatgtatatttatatttataatgtttgtattgtgtaatattaaaaaaatatacaaaaatttaataatattttatttaaaattataattaaaataacaataatttatggtattcacaatttaagctccacataataaattaaattctagattttataaatataaataattaacataaatgtatacaaaatattattatatataataataaaaaaaagatgttgttaggggtgttcataaaatacgaaatctaattcaatccacgatccaatcaatctatataattcgcaaagtgtggatatccgcacttctgtagattggattagattaaaaaatttaaaattcgtacttgcgcggattggatgttgattgacatataaaagttaacgatcaaattcaatccacaaatatttatatatatttaaaatatatataattagtattttaatgataaaaaataataatttaaaatttaatacatatgatacaaatatattttaaaatatggtagatcaaatatagattttattcttatttatcaaaaaaaatataatttaaaacagaattcaacattttttatacatatatatttttttttctttttgctttaaatttttatgttttgttttagattattttagtttgttgttgaaacataaaacaacaataatttattttatttttttgttagtaacgtgaaaa

SEQ ID NO: 323888 - DNA, 604 bp, Cannabis indica
ttttattatatgtttaatttcttccgtttctttttgcacttatttattatcttattatggttccataagaaaacaaaaactaaaaacaataacttttagttagcttttagccaatgaaataaaaaatagactgacgtggttctgtgttggcattttgtaaaaagttttcgtttgatggggctaaggttcattaattggccaattagaatgttggttgttaatgtcttttggacttggcgtaatacataataaatagggatcaatttaatttatggttaagatttttatataataaggttcttgttgtggcaaacagtatattcacacatgtgatatgacttggttttttctttcgcatatatgcaaactttatttcacaattctatccaaattgccacaatatttatgtttagatagcgggaacaacatcaatgaaataagactttcttttaaaaaaaaaaaacaataatattaataaaaaatattcccttctcaagttgatctgacttgagcgtattatttcatttgtcctttctattctttgtatacatattatattacatcaatatatattaattttataattatccctacaaaatctcat

SEQ ID NO: 323889 - DNA, 574 bp, Cannabis indica
aatcttaatgcgtagtgaaatttcaagtaatctggtgacatcattatcactcgtgtccccaagccattcttatttgatgctctatcaatatataatttccaagtttctgtatcgtgcttgacaagtggatcttcttttgagattatcccttcaattaggatatcgaccaaagcttgacctttgattgatgttgtcaggtggtatgtaatatcgaatttccccagctcgattgactattttatgaatcttcctgaagcattaggttttgataaaatttatcttagttgttgatcggttaagacttttatgggatgtgcttggaaataaggtcgtagtttgtgagatgcatgaatcaggcatatggaaaaaatttcaagagggggatatctcgattcggcccccagtaaccttttactaacatagtaaacaggttgctggtgtttctctcttctcgcaccaaagctttactgattgcactctatgagatagctaagtaaaagaataaagtttctccagttattggtctgaccaaaactgtaggtgttgataatgttggaaaatattttaccaggat

SEQ ID NO: 323890 - DNA, 1191 bp, Cannabis indica
agttgcaataggggtttctatacgattttttattgcaatttaagttgcactagttacaataggagtttctatacgatttttttattgcaatttaggttacactagttacaataagggtttttatatagaatttcataaaaatgtaaagaaaattattttaaagtgtaaaaatgaaaaagtcccaaaaatttacactttcataattaaattttttaattttttatagaccgttatttatttattttttttaatgatatgtaaaaatgaaaaaaaaaatacaattttagatattttgctaaattttcgctatttatcaaaataataaaaggaaaactaattatagttatttaatcgtgtttttcaggaaagaaggttatagcgcaggtgtgaaaacggggtcgtataattagtgacagattgtaatctaagaaaaaaaaggggaatataccactgaatattatggatgaattttgcatataaattcacaccttaactctcttctttttctcataataacttcattttctctctctctccaaacaaaaatctctctccttcatttttttttctcaagaaaactacaaagaagaaaaggtcagtactaaaactaactatatctatagtaattatatatatatatatattgttctttggggtttgaatgttaaagattataattctttataaatgtgtatatatgtatatttttatgttttatcatcttatattcgttacgtacaaaaatatgttcatatatgtatattttgttatgtgaaaaatgattcatctgggttttgatttaatttttttttttggcttaaaaataaataaatgaaaatggttgtgttcgtacgaaaaatagccatggttgactgttaaataatggtttatatacatttttttttatgtatttatgagcttgattattggatctgttagtataatattttgctagtattatggcatttaatgctcttattatgtgtatctgttttttatttgctattttaatatattatattctcttgtagacagagcaaaatgaagtagggttttttttacttaattaagcaaaactctcttctctgttcttatccctaattttagctgtttcattgtttatttttgagctttaattttagttttgttgagatttcttctctctaatattccctaatttaaaaaaaaaat

SEQ ID NO: 323891 - DNA, 532 bp, Cannabis indica
aaaaataagcaaaggttgtgttaatgtgtgttatgaggtgggttgtactgcgcgcatgtgtatgtgtcttctgtacaccagcatttctgctcttcttcttctctctcatctctttatgttttctacattgctatactgcgccggtaatatttgctagcttacgccgataagtactatgcgccctttgtttcctgcaaatttgcatgcttcttttttcctcatctttctcatgcatagccgaaagctgaccatttgtatattatgaccttagccttctccgtcacttctcattggtcacaccttttaatctcagccgttcattttgcttttgtctattttacttaaataacaacacaaaactgatatttaaaagaaactatgtaactataatttatgattttaggctttgaaataatttcagcttttgtcaacaaggaaacaacaatgtgggagcttcaagtgttcagtaacatttatttttattttatttaataagatagaacagaaattagtattattattattattatta

SEQ ID NO: 323892 - DNA, 1398 bp, Cannabis indica
aaaggaagaataatagttgcttgccagctagtgtttactctgtgaatattagattttgctctagccaactaatacattgccatgttcaatcacagcagcaagtggggaatttttttgtgtcattagtatatgcctttaatgatgaaaagaagagagaggatttatggggtgagttagaggaattggcacaaagaatagatgagccatgaataataatgggggatttcaatgagattttgaatgctaatgagagagttggtaaaagagcccaaagcctaccatctcagagattccgagacagtatggagaaatgcaaactagctgatctgaaattttcatgttcatttttcacctggaactataaacaaaagccagaagagaggattttgtctaagattgactgagcaatggtcaacatgcaatggttaaatagctttccatgttctgaagccatttttctgcctgagatggcctttgatcatagtcctatcttggtaactatatacgaggataaaagctatgggaaaaagccatttaggtattacaatatgtggaagatggctccagattatgacaaaatggtgacacagtcttggaaggaagaaactagaggttcaaaaatgtttagcattgtgcacaagctgagaagattgaaggtagtactgaagcagattaacaggacagggttttctgaaatacaaaagacagagatgatgacaaaggcaatgctggcaaaggtacatgggaaattaagtcaagatctaaggaatgaagaattgatgcaacaggaacagattgtaaggaagaaatatgcagaaatcagcaaggctttggctagcttcatggctcaaaaaactaaaatcagttgggctaagtttggggatgacaattcccaccttttccatgattctttgaaattgagaagactccaaaatagatctactcgattaaagatgagtatggaaactggtgtgataccccagataaagtccaatctgctttccttgagtattatcagaggctattgggatcgaaggcaccagaaagaaggaaggtttttcaatctgtagtagatcttgggcctaagttacagagtgtcataacagctactattagcagagtacacatcagaggaagtggaattagttatcttctctatagataaggataaagcacctggtccagatggttatgggagtgctttcttacaggatattgggacttagtgaaacctaatttagtagaagctgttatttcgtttttaaattctggaaagattttgaaagagattaacactactactatcacactaattcccaagacttcttgccctaaaagtgtggtggatttcaggccaatatcatgttgtaatgtggtgtataaagtggcaaccaaggt

SEQ ID NO: 323893 - DNA, 555 bp, Cannabis indica
acaagcattgttttgagcttattcatatagacatttggggatcttttcataccatatcacatgaaggatacatgtattttcttaccactgttgatgattgttctagatacacttggatccatttgcttaaaaataaatctgaagccaaaactgtcatccctaccttcatacaccttgtcaaaaatcagtacaatgctaagattaaggggtttaggtctgataatgctaaagagcttcaattcatagagttattcaaatcccttggcataatacactaccattcttgtgtccaaaggcctcaaagaaactttgtgattgagaggaaacatcaacatttactcaatgttgctagagccctcttatttcagtcgtatatcccattagtctactggagagaatgtgttagcactgctgcctatcttatcaataggataccaacttccaatctcaaagacaaatcccattttcaaatattaaaaggaaaacccccttcctatgtgttgctttatttttaaacactacgcaagtatacgcaatcaagtagtaaatctcaca

SEQ ID NO: 323894 - DNA, 1142 bp, Cannabis indica
agtagtaattaatccaattccctgtggttcgacctcacttgcgtgagctactacttgactgcgtatacttgcgtagtaattaataattttcgcaacaagacttgaggcccagtaggctaccatcatattgtcgtagacggagttactgaatagccatctcaatatgaggcaatcctttttagaaagttagaaagatttgaaagagactcttttggctaagatgaccattttgatggcattgttgaagccgaaggagggggaaccacaacccacccaagcagtatatgaccaagcaagttgtcgacctgtggagagtgataatgaagatgtgttcctaaaaaattaggaactagatgataatgtggcattgtctactctaatggaagcaattatcatggccattggtgatacacaaccacaaaacgatgttctactcctgactggacccccaaaagatgtaccatttttaaaaaagagaaaattgccttgctacttgaaggactacattggggaaaagaagaagaggcaagttcttccagagaaagttgatctaaaaagaccacatgattgtagattgctacgtgcactcaagaggtggttgattggggatattccaaatgtctgtcctaagaatctgcacactgacgtgggcgatgtcaagttctttacgaagttgttgatgatggggaattagttggacgaggacgtaagtatttagttatggtactctttaataatattttattatttttttattaattccgttactttttttgacatttcactacattatcgcgacattattgccacataaaatgccttccatattatgattgctttttgtttaatgttatctttttattgatatgttcgcgacattttgcatctttttggcaacatatgctatcctcaaaattgttttttaagcttgtgtttagtatagtactttcactatatgttgcgatattttgcgatctaagttgcgataacatgcaacttgatttgcgacatctagcgatttagattgcgataaatgggtgatttggaggttatgggagttgttaaaagccatctcaatagcaaaaaatattttactattaatgctgaaaaaaatagtaactagttactagttacaaaatttt

SEQ ID NO: 323895 - DNA, 758 bp, Cannabis indica
taataatataattcctcaattaactcataattatctagttagggttttgctaatccttttcttaatcccgggtattacaggtagtgtctggccaggttgttgattccatggctggctagcctactcaggtagtagtgtgctagccttttggaggccaggttgatgctacagtctaggacaattcgatcctcccgacactcagtttgctttgcctccggtatgattgtcatagagcttttatgcactcctttcaatagctctttagcttctttcttggtaacacatcatagaggtggtattgggatacaacatctatgcgttacgttgtccaggattggacacccagcagttatcccccttatacttactttctggcaaggtttttatttagaggtatggtgcaattggtgtcatccatattggatggttgtccagcatgtctgtttcttctgaaatagggattcttagttcttttaaagaactgagcgggtgccaagtttgcctcagctgccaaggcattgctggctagtcaagcgagtgcatcggctattgcatcttctttggggacttagctgacttaacaagtcttgaatctagcttaaataggccatcatctttttgcctttgagttgtgtatatgttggaaattattttaccaggatctagaattactaacaagtatgttgattaacatcctaatatgaattctaaaacaatgaaaataaacatatataatgttagaaaaccttacagtgggt

SEQ ID NO: 323896 - DNA, 1495 bp, Cannabis indica
aacacgtaggtctatgccacatagacataaataggcatgtgagtataacacgcgagtctgtgtcatacagacaaaaattaaatggcattattatttatgtgatgtgttaattatgattattaataattatactttcttgttgggcttggctcacgggtgctctactgtgcaggaaagggtaaattgatttctaatcagccattagtgtaggagctggatgatgaatgtacatgttcgggccacactagaccaagcgggttggggtctaccagtgttggaacttttgtaactctgttttgccgcttaggtcgggtaagggaaaagacttgtaatattttgtaaaacaatttttgggatcccaaaacatgtaacttttgtttgtgaggttaaaattattacaagtttatttttattccgtttttgtttaaagtttaatttccacgctcattttattagtaatcccatttaggggattagggtttcttaatcatcttgggtagcgtgcctaaatgttagggcgttacaccaagtgttctcaagtgttagctgattggggaagagagagtattggcaactttaagtcaagaatttcttagtttaaaaaaagaatttgtcactcaagagtattgggtcggcgtgatgcataatcggtaaagagatatcaggttactcagaaggagatattttggagacagagatcataacaggtatggctaaaggaaggggatcacaactgtaaatattttcatgctgctgccaaaacaagaaagtgcaacaaccagattaactctcttcgtgatgattcaggcaccgtggttggatgggacaatggtcttcaagatgtaatggttggctatttttagcaactttttaccccctctagtactaattggaactaggtgatagattgtattccaacaactattaccctgcttcagaactcgttaatattggctcctgttgaggagagtgaagtcaaaaaagccttgttccaaatgcaccctgacaatgttgggattttatgccctaaataaaacccatctcaatctaatctgatttgttatcaatataagattagaagtcatttatgtttacttgtagttttcatgtttatggtttaatatatacaaaatctgttaagtctagaacatatagtcattcataattacagtgatatgaacacagtttaatgtgattgtgactatatgcttcaaaagacaatgtccctgattcatcagggcactggatttacactgatgtgataataggcgatgaagtgtacttacactttgaataagtgttatgttctttccagaacattgggaaagtatgctagttttggatgtatggagtatacattggactgggaccgatattgatcttggtaatgatattataatcttaccgatgtatctttctaagtcaatatcactggttgatcttagatcaaaagatcttcatcctgacatgcttaggttcaatctcaggagtgtta

SEQ ID NO: 323897 - DNA, 1941 bp, Cannabis indica
ataccaaatatttccttgacagtcaagtaacggttggttggaaaaaataaaaatataaaaaataggaatgtgaatgagaatgcaaatttgaatagaaatggaatggaataaaatttaaaatgcataaaaaattgataaaaaaaattattaaattttttcaaatcttgcattgaaatagtctttccttctatttccaaatagaatagtcattctactaaaataatagaaatgtcattctatcggaatggtattccaagggttttaaatgcaaccaagcaaaagaatagaatgaaaattatttcctttctattccattctatttcattacctccaaccaaacgccaccttatttctttgattaatttttaatgcaacgtgagcttttggagagagaactttcaacattgtgtttaggattttgttgtgcgcgaaagcaataaatagtgaaaaataacgatcgataaatatatatatatatcaaagcggtaaataataaaacacatagaattgcgtagtttggcaattcgcctactccacgggagacaactaatattattaacctaagtaggaaatatacataataccaatacaaattttctactaataatatctcacaggtgtttccctaagtgttttccaaactcactaaagtgtttcctaaaattgggttgtctgtagttttgactttttggaaaataacatccccttcatcaatgatttcacgaacaaaatataaatgaacattgatgtgcttagtgcaatcatgatggacttgttctttgccaaacaaatgacactctgactgtcacaaaaaatctccacgttcttctgaataatacccaaatccttggtcaatctgagaagccagatagcttctttgaatgcttctatcacaaccatatattctgcctctatagtagacaaagctattgttgactgtaaagttgatctctggcaaactggtcgacctgccattgttaacacataaccagtagttgatcgacgcttatctagatctctagcgtattcagaatcaatatattcgataagatgattaccatcaatcttgtttctctcaaacttcaaaccaatatctacagtacgatagatatactgtagaatccacttcactacttgttagtgacctttatcgagattgtacatgtaacgactcatcatactaacaacatgtgaaatatcaagtctagtacatatgcatacatcagggcaccaatagcatttgtatatggaatattcttcattttcttcttctcatcgacagtgctaggtgacatctttgcacttaacttaaaatgaggtgcaagtgcatccatgttaaacctttgcagtactttctttagatattgagtttgtgttaaacagactgtgtttacaactctgtttcttttgatctccatcctaagaatcttcttaacttctctaaaatctttcatttcaaattctgcacttaactgagtctttagcctgataatctccaccttgctcttagatgaaattaacatatcatcaacatataagagcaaataaatgaaagtaccatcttagagtttctaaaagtgtacacagtggttgtattggctgcgggtgtacttctactctctgatgaagctatcaaaatgcttgtaccactgtcttggtgactgcttcaaaccatacagtgacttacttaacttgcaaacccgattctctcgaccttgaactttgtaaccaattggctgagacatataaatctcttcatctaaagtaccaacaaaagctatcttgacattgagttgagctaactcgagattaaattatgctaccaaagccaacaaaattcaaatagatgaatgattaacaataggtgatgtaacgccccgatttcccgagacgtcacactagctaatccgtttaaaatcatttaagataaagacaataaaa

SEQ ID NO: 323898 - DNA, 1246 bp, Cannabis indica
ctcgcggtactatggcaaaacacatcggaatctgtttctgcctttcaaaacatttatcataacaaaatctcttatacgcacataattagaataaccaagttacaaagtttactctatctcttttgatctctatagaacttaaagtctcacataatatatatatttatatatatatatatatctatatttgaaaataaaaaacctgctctatcatctactacaaaaagcataaacatcccgataaagatgtcaatcacataacgatatgtgaaaagtttctatagcagcgacatctaattagaactgaaaaaaatcttgtgaaaactgaaatctattaaggaatttgttcaattctctattcaattcatattccccatatcccaactcaagagttcatatatataacctaaaagcgacaaaatgaaatagtttatgttcaagaagtaaacaagattaatggggaccatatggttaaatatccattcaacattcatagaggatgagttaatatcatgtttgaactagagaatatggtccattaagactaaaatatgacaaaaccaaatttaataccataaatttcataaacataacatgattttgaaatattggcactgcacttgacacttatataaacaaagaaattattttttcccttggaataggaactgcccagtttttaattactcaaaataaccatttgaataacaagaatcaaaaggtattatactattgttttcaagtttctacattatacgtgactcaatcccaaaccaaaggcaaatttcgcaagagcttttagacgtgcaaattttgcaagagctttcagcattaattgaagtactcatttattttattgtgctaattaaatctttaattatttaaattgaagcatttaatcaaacatttaataaatattaaaagttaattgtggtgaatcctcaccttcaaaacaggctgttataacagtaacaatgtccaagaaacacaattcagaactaaaaccaatcacaaaactaaaacttaaatttaattgaaaatagacaaagaaaacttagcttgatataatggatgaatgatggatctttattgaataggaatagtcagtagttcacaatagaatgagcccaagattataactcaacacagtaagtaatacaaagaaatgcctcacattaagggaaatcacttcatgagtgatactccctttacatccctccacacactcactatgatcttggactct

SEQ ID NO: 323899 - DNA, 807 bp, Cannabis indica
actcacattaacgctatttaactcttgtcgtcgtcaatgctactgtctctgtcgacaccaacggtgatggtggtggtggtggtcatccaactttagttttttcccaataagaagacaaatcattgttcttcctttgcaataactactgcaaaaaagacttatatgtaaacaaaatcagttaatatgaatgatgttaagatagttgttatgcttgtggcaattaattaattctagatttattatatattaatttgatcaaccaagtgatattgttttgtttgtagccttcttattgttgtattgtgaagtttgctaaggaattagatttatagatgaaaatcataactaaaacaatatgcatatacatagttgagctataacaattgttgtaagcaataaatatgtaagcaatatagatttttttttttttacaataattattgcaaagaaagaagattggtttttgtttcttcattgggaaaggaataaacttcaagctgtttgaatgactattatactaccagacagaggagttctttgatgtaagcgaaacaataaaaatttaattaatattaaaaataattaaaaaaaatttgaaaataaaaatcctaatataatatatttaagggataatttaaaaaaaattaataaaataacggtacatacggaattttaatattttatgtatttttttagtattttatttactataaatacggtttttggttgtatttttattgttgtattcttgttatattgttgtttgattttttgttattttgttatatttttctttattgttgtttt

SEQ ID NO: 323900 - DNA, 1524 bp, Cannabis indica
taaaaactgcctctaaagggggttttcgtagtagtgtaaccttctgattcgaaccgcttcagatcgaagaagacctaacaaataaaataggaaagtataacaaagacccttcgggtgagttattcggatatttatgtaagggcattccaagagacgtcgcaaaagggtattctaatgtggtgatcctctgaaactaaaccctgcaatgttaggaccttcttccctaccgtcagatcataagagtgcccacaccactaaggggaacataccctttatctgacaactctaacacctacactacgcaaaggcaacccacacttgccacctgtcaacatcaggtgtgttgtctgtgttttcgacaagggacacgtggactcaagataactatttaaagcccattcgtgggaccttaacaacaagaattgggctaagcccaatatcaacctggccttctaagaagataattactcagacaactcttcgccaaggctattccgtgtccaaaaggaccctagctatgtgtaaccagaagaaccctctggtgtgtacatggaagacaactggtgtttcatgtttactatttcgtgtagaataaggaaatcattttcctaagatgtcgggcagagaataaatatcaagctagaataaaaaactatataattaaagatcaagtaattaatattgcatttattagcaacaatcatgggacacagtataaatagttgtaacattgataaacatgccaagttagtatacagtcactacctcatgtgatgggcttacctaataagcccaaagtgatgaacaatttgtaaactccctattactgggaaaaggtaacttaatatgacctattactctataaatacgcattgaattcttcatgcaaaaggttggaattttttagctcacaagcttgagaagagaatagagtgttcatattcattataatcccttagacttttgtagcccctcaatcggtttcaataaatttctttcttcttgaatctgaggatcaagatcatcatccttcttctcgccttcctcaatcatgtttgccattagctggtgaccgacctttctattctgcaactctatgtgatagcattcgccagccagtatttggtcaccttgcaccactcccacaccaatcggtgtctgaaacttcagcgataactgcttaattgaactaattgcccctagtccaattaacactcgtcgacccagcaatatgttgtaggatgatggcaagtcaacaacaagaaagtcttgcatgatagtggtagataaatgtgcttttcccatggttaatgggagcttgattattccttcaatgacgacactgtcgcctgtaaatccagatagatttaccatgcaaggttttaatttggctttcaagtcccattttcttcagtgtatccttataaaggatgctcactaaacttttgttgtccactagcaccctttttatccttttgttggtgaaccaatggatcgacgcgaggatacctcacgtgttttgca

SEQ ID NO: 323901 - DNA, 649 bp, Cannabis indica
acatctttgcaccgcatatcaaatcagcacacacaaccatcttgtgatacatgaatatatatagaaattgataaataattcggacataaaatataccagagatagggggctcgggagagagaaagagagagggaaaccagagatagggggctcgagagaaagaagagagaaagagttatgggttttgaaggccggagaccatcgccagcgaaggtggtgttgaggtttggggcgaagaacggctcgcgagagagagagggggaaaccagagataggtgcgatagggtttgagtattgtggtctgaatgtcttgatgagagaaggggtttttatttcattaacctcatacccgacggtttcgaactgagggtcaaagtatgggccactgtttaaaaccgtggccaatactttgcgcaatggttctaaaccgtcggtaatagtaaattaactttttttctaattttttctccgcacttataaaccgtcgcgtattttatacgagtattaaaaactgtcgcctataatatactataagcgacggtttttaacactcagataatttttttagcgacggttcccaaaaaaaacgtttttggaaccgtcgcgaatttcgccttttgtagtagtgatgtacattcaggggtggata

SEQ ID NO: 323902 - DNA, 532 bp, Cannabis indica
acccgaccaggcacagtatccctatgatggactagttacctggtgatttggagaagggaaaatatactcgacaccgcccaagtatccatccttctgcaaactcctcatcttagcttgggttactatagatggaggagacacccaccgagcccctaaggcaccttaccttctttgaggaactgcctcgacatattccttagtgacgtagtcatcacccttaaccaagacgtcaccgacctcggacactggttccctgcttcattataaccaccaaagcccaatggctgagcaactctctcctcctcgacttcagagcgactgtcaggacagacctcgccctcgtcctccatctcttagacttcaacaaccccttcactatcctcctccttagctgcaggtcgggcttgttcagcgctcggcatcgtggcaagtcaagccacgtgagaatcaatcgcagcaatttttcacatcatttgttttgtgcgggccatcatcctacccctagatgatgtttggttagtatgcctagcaa

SEQ ID NO: 323903 - DNA, 574 bp, Cannabis indica
ttttttgccgaaaaatatttttttttaactgatggaataacctcagcccatataatgtaaaagtgcgaaatttttcttcttaaaaattttaaacataaaaaatcaaattttcttaatattatctatttatgggtaatatctattaaaagtgtgaatgtttacattataattatagtagatattttatgagtttttcaaaaaatttcaataatatatttacattgttaaaaataaagttcttaataattcaatacggttttataaaataaaatagacacgctactcacaatttggattctatattcgacatgatagattattttaattattttaatttttaataaaacagacaaaatgtgtactcaccatgtcgaaaaatgctttttgaaacaagtatttcccatttctatagcctaagaaaatggacaattgtcccgttgccaatgctggtgttatagctagtactatagctataacatttaggtggtgtttggttagaggtaatgaaatggaaatgaaactattttcatttcattcttttatttggttgcatttaaagtattggaatatcatt

SEQ ID NO: 323904 - DNA, 1198 bp, Cannabis indica
aactaatttcagtaaattaaaacgttcaacacaaaactatgcaattaatcaaattaatcaagtaaatacaaatagtatgacaagcaaatatagagagaaaataatcaagcttgtaaagtaaaaaatttaagggtaagaaattataaactttcgatttttacaaggttcgatagaacaaagccacctacgtccttagtcttcaaagctatggatgtacctttgaattacactatcgagccaagttaacgggcttaactaacttttacaatcaagaattttttaccaaggtgtttctaaacctcttacaatactttttcaccgccaatgactatcaacctctttctcaaaatgttgtagtgccaatctcactttaaccgagttgtttataattcaaaaatgtgtattagaattacaagtaaactcactctagaagtatgatgatacaatgaagaacttagagtgattagcaagcacaaataaatacaaatttgggcgcaaagtgtgtgaaaagtattttattagattttaaacttgagagctcttaaaatcacttgaatatgtttggtatgtagaataaatactcagccaacattttattctgagtgaaaaatgagcttatatagtgtaggaacaaaaactagccgtttatagccattagcacgattttcaaaaaagaatactgggaaaaacggtctaccgttttgtgaaaaaaaagtctaccatttaaaaatggagaccgaaaatagggtagtggcaaaaagccacttttttgacactgaaatgcgcataactttctactcgtttattctatttcagacatttaagttttgttctcttagttaaatgatatgtgatcttaaaaatcaatttagaaattttagatatcatttttgggaaataacttgtcacacaagttagtgagccaaaatttgtacttagaacttttttaagtgtagacttgaaaatcattgtacaagactaagaaatataaataaaccttcatggagtcttgtcttgagttccttgagtcttgaaatccacttcgggtcactttcgagaattttggtaaaattattattttatccttggagttaattttgtcttaaacagattacttatctttaattgtgctacaaaatcaacaactcattagtgacaaataataatcaaatatttgttaatcattaaaacaaggaga

SEQ ID NO: 323905 - DNA, 968 bp, Cannabis indica
aacgcttaatattgaagaaaagggtcactgtagaattcagcctccatgtatatgtatatctcggaataaaatttattcgaatttgtgatgttgtataggaccattagtatcagtaacttttttcccatcttcttgttgatctgtgtttcacatattattattaaaatggttaaatactgctgatagagcttgaatggtgttaaagttggcttgtttttaaataccaaccgaatatattcattctaactatgcaaacatttttactttcattttatataagtttgcggtggtgattgtttattcataaaattccaacaaatcttatttcaactttcctgtcttgtgatgctgctacatctgtttgagcatgttgttgatttagttgataaaaaatatgtgtttgtgacttaagtgcagctgaatgaatcataaaatgtacaacttgattttaatgatttggtaaatatttttttttattgttttatttactgtatgtgacaaaacagagaatacaatacgccaaaacaaaatcagatgtaattgctaaggctgatggtacttttgttccacgggaaaaacgaaagaggcatgaagaaaagggtgaggaattccaccttctctctatcttgtgtttgtggttccgctattgtgcttggatctctctgtttgcttaactcatagtctgccatagaacctcaccatcaaggcaatcatttccatgtatgtatataaaaatttacaatcactttagttagttacagatatctcttttgagaagtgaaatgtttatcattgtattttacattagaatctgactgcctatcacttacacaagaaaatatatacccatcaaggcaattatttccatgcatgtatataaaaatttacaatcactttagttagttacagatatctcttttgggaagtgaaatgtttatcattgtatttacaccagagtctgactgcct

SEQ ID NO: 323906 - DNA, 357 bp, Cannabis indica
ttatattgattatatcaatgaacaaatagaaaaattatgtaaatataatcctatattgtcagagagtgtaatttcatatttatagcggagtaataatagaattaataaaaaaggttattttattgacgagttcaatagtagtctagagtttattggagctttgaaatatataacctctataccacattgtgcatgggaagtgtattggattaatttatagggtttgtaaaaatacatttatatatacatatgatatatatatatatatgatacacataagatatagttgatagagaattgagtgacacaattctaaaactctaaaccttagccgtaatctcagctctctctctctct

SEQ ID NO: 323907 - DNA, 1529 bp, Cannabis indica
aaaagaccacccccgaaagatgcttaatctgtcacattttgttgttgcttgtatcacttacatggaggaattagttatccagtattagtttcatgaaaacatattggtgtttgattgctatttattggtgtactccccaaaatttttatgtttctggtttataatattattggttagtaatgaaagcaacttctcttaaggataagtgtggtggcaactttgagtgtagaaagtaataagtgaatattcaaagatttggaagaatgtaatcagcctttgggaaaaaaattagtattgtgtagccattatgtatttctcctttaccttttgtttcacaatgaacttctttattctctttacatatttgtaacaatagaaccaattcttttcttttgatgataataatactaatttcacttaaatgccaagttaaaaaaaaatagaacttctctaagtataaatattatgaagttctaaattaatttaaaaaattaggttttttgttcttaaatttcttcggtcaggcctgctgtcttttctaggcataggtgcggtttgatctggattatgttttgctattgtgattcaattatgttactgcaattagttttgtctctctgacatgattttgagtgttttagtattgtttgtgtggtatgattttgttttattttgttttgttgttggtttttctctgtttttcgatggctcgccatcgagtcccttttagtggttggaaataacagttttctgttactgaaaggggttgttagtagtgcagttactaaccttgcacaataattgagtgcttaaggtacgaggttgaatgaacctactacaacagttatcattattgtgtcttctgagcggtagatgaaactaaatatagatgttcttaaggttaattgtaatgctacaatctttttaatctgattttatttttagtttttttggccaaatgatctaagaattaggttattgattatttggctcgtttttctaattttaattctggtcgagtctccaacaagagagatgtcccgattgaattgtagactattattttaggtgattgtcattaataaaattgcatgattaataaaaaaaaactacttgaataccaattattttttatttgtcaacaataattttaaaaattttgtctaatcaatatatttgtaccattaaaataaatgatgtctacattacacctataaatatacaaggacttcgatctactttataaaaaattcatttttttttttgtaattctaatgtaggggctagtatgcaacataactgttttgtatttgttttcggtaaagagaataaggggctagttctggtttctttggtctaatgaggtctcttgagtacaggtcttcgaacatgtgagaatttttttcgtctctgttgtatgcagctggtggtttgcttcttgcgactactgcgattgtgaaaatggagaaggtgttgttgttgaagcagttaaggcttaataattcttaaaagtatttccaaagagccct

SEQ ID NO: 323908 - DNA, 1832 bp, Cannabis indica
aaaaaaatcaaataatctatcaacttaaattaatttatataaataaatttaatttaagagtaattattacaaaaattaatactaaataactaatgaaaaattaaattcttaaaataacttttcaaatttatacatataatatataaataaaattagagactaatgtttgaaaaaaaaaaatataaacttaatttgtatactacattaagcattataaaataaattttaaacaatgtagaacttttgtttaccattacatgtgaagaaaattataagtgatatccataatatatattttttataaaaaatgaagctctctcaaaattaaaaaaaaattccctatcatcactctaacatttagcttagatatatagataagtaatatgaatagatagatatatgtatataaatatagatagatttgtaatggtattaatatttttaagtttctcttttgtaatcatacgtcgaactctttagctaacaatctttctaaacttgtcttgtctttggatattgcaagagtgtggtgccgggtttaccgggtgttctttgataattggtggtgaaacccctttatattttaattttataggcttagccccttaatttttttttttagtagaaaaacccccttaattccatttttttttttacaaatttgagtcgccagtaaaatctctttataaataccaactggattgtcactgtgtatacgtgatatttattggtttcaaaattttactgttacgtatacacgagtgtacaatcccaattaccctttgacagtaaaatttaactgacatcttagatttgtaaataaaagtgaagttaagggtgttaagtatatgaaaattaaaatataaagagtaatttataaataaatataatataaaatttattatttcaaataattattgtaaaattattaactaaaattaaaaaattatgaaaataacctatcaacttaaaattaatttataaataagtttaatttagaagtagttatggcaaaaattactactaaataattaatgaaaattaaaattttaaaataacttttaaatttatacatataatatataaataaaatttgagactaatatttgaaaaaaaaaaaaaagctttatttatatactacattaagcactataaaataatttttaaacaatatgagatttttgtttatcattacatgtgaaaaaaataagtgatgtacataatatatatatttataaaaaataaaattctcttaaaattagaaaaatagattaagaatactatagaatttcacatcataactctaacatttagctttatataaatatgtagatagatagatagatttgtaatcgtgttaatgtttctaagattttcttttataattgttctgcgaactctttagctaataatctttctaaacttgccttgtctttggatgtgacaagagtgtggtggccaggtttatcaggtgttctttgataattggtggtgaaacttctttatgtttaaattttatacgctttacccttaatctttttttggtgaaaaaactcccttaactttatttattattattttttttttttgcaaatttgagtcaccagtgaaatctcaccgttaactaccaactgaattactactgtgtatacatgtgtatacatgacatatttttattggctttgaagttttactgtcacgtgtacgcatgtgtacatagtgacaatcccaattaatatttgacagtaaaattaactggcatcttaaatttataaaataaaaataaaataaaaaaggttaagtgtaataaaaattaaaatataaaaggtaat

SEQ ID NO: 323909 - DNA, 478 bp, Cannabis indica
tatcactcttgaagtgatttccctcaatttgaggcatttctttgtaattacttaatgtgttgagttgtaatcttgagctcattctattgtgtactactgactattcctattcaataaattagatccttcatttattcattatcaagctaatttttctttgtatattttcaatgaagttcaagttttggttttgtgattaattttagttttaaattgtgtttcttaaacattgttactgctgtaataattacatgttttgagggcgagaattcacgatacttctaaaagcttgttttgtagtattgagtattaattctgaaacttacacattgttattttttccttctcttcaatatattttcatacttttttaattttaccttaattattaatttttcaaaataagaatatttatttaactaaattatcaataatattgtatagtataatacattattaaaaaaaactaaaaaaataa

SEQ ID NO: 323910 - DNA, 858 bp, Cannabis indica
tgtgaattgatgattggaatacactgtttttatgttattggagtgtactggaaagtttaagcaggttcggaggagctcaggattggtttcaggatgtaaaaccagaattaccccaaaactaccaaaactagtcgataagttttatagggtattggtaaaccggtcaaccggttggcttgcagggggaattctagggtttttgcctcgaatctaattttgtcttggggtgttttccagaacctagtttagggtatcctagtgatgttttagctactttagaattagtggggagttagattgttcgattacaaaattagggtttgtttctgaaattttatataagttttttatcaagctttgttgtcgtgacataggacccaggatcatccagcatagttccactcaggtcggcccgcacacttaatattggattgaggtaaaaaaaaagctttatgcactgctgggcatgttagacaagaaacaattataatcgttggtgccttgattatgatcgaggtaatgattgttattgttgtgactcgattatgatcgagggatagatacggtcattaccgttatgggtaattacttaattgaaactacagaaaggttttttacttatcgtttgttttatcgggcaacgataatgacatatgtagctcgtggatagcgagttgtaagggtgatttatgaggcatcaagattggtacgtcttataaaatgtattactgtttatgcaatgcttgattatgctttagattaatgaatttgtgtaatatgccatgttgtgattatttgtattgagcgttgtttgaatattaatagcttttcttgctgagtctctgtgactcacgggtg

SEQ ID NO: 323911 - DNA, 509 bp, Cannabis indica
gtagggattagatcaaactaattcttattatgaaccatacatgtatatatgtatatgtagttaatgatatttttttttatttttttatttatcgaaaattctgttaaataatgtgatgaagaaaaaaaatctatatagttatgatattttagtttaattcatattgttagctacataataattagtattaagaaaaaaaaaatattaaaaatcgagaaaaagaatattactttaaagtgtttttagacgatcatgttatcacctcatatctcttctttatatatagaaaaatacatctcacaaaaagacattttgtcaattaatgaattaattaatttatatgaaccaataaaattgtgtcacgtgtacactgtgtacacgtagacattccaccatggcagttaacagccaaaaatgaatggaaagggctaagtgctaacagaacttgggtttatgaggttttaccaccaaaattttagaattgggggttagttgcaagaacctggcca

SEQ ID NO: 323912 - DNA, 920 bp, Cannabis indica
ttttatttcttaattaatattttggactctgatcctaattgaatcttgggacctagaatcgtacccagactctagtcctggacctaacttcacgattcagacctgaacctagagctggacccagactcgggactcgggactcgaacctcgcgacctcgactcaaatctcggacccaaatccgtactcagatcccgaactcagacccaaacctagactcaaacctgggacctaacctagaccccgaatccaaacccactcctagaccccggacgcgaggaagacatgcacatgcaaatttattttataataagttaatttcaaaatcaaattcccaataaaaataaaaataacaaaatataacaaaagtaaaataaaaaataaatacatgctttggtcactacacattagaacaacatacttcttctcactattattggttttgaatattcgaaagaagattgcagtttgttcataagtcattagatcacacttgcagttttctcatcaccaagtaattggggattaacccacattggggtctggattcgagtccgtgtccaagtttgggttatgacctgggtttaggttcgagtcaagtaggagttcagagttcgggtccaggtcgggtaggggtccagagtttgaggttaggatcttggttcgtgtttgggtttggggtcggggtccgaagtccggctctgagcccagatcggtcggggtcggggtctgggtccgtacctagggtccgggtccgtacctatagggtccgggtccaggtccaggtcggccagagtcagggtcgggtcggggtctaagcgcgtacttggcgttcggggtctggctccgagtccaggtccgggtatgtgaacaaaactataaaatataatgtgttagacaaataaaaattatttttgaaaac

SEQ ID NO: 323913 - DNA, 1470 bp, Cannabis indica
aacttacccatgtgatcaaactagccatctatcacattttccgttgtcgccgagcaaaaattacaaaaatacataattcacatataagtcaaataataccaccgaagtttaataaaatctccggaattaagaaattataattctaatgcacatttctaataatggggcccacaaataattaaattcataaataattataaaaatatcagattttagtgctaattgcctttactaatctaaattactaaagcggtcattacagagtactccccttttggttgtattgatacctagagataatactattcatgatcactataggtgggatctaatatagctctctatcaggatacaaaacatggatcaagtaggcagatctctaatgtgagagatgaatagccttagaggcttgtgttagaggaagagagaaagaacccttggggtgtgtcgcagagagagagaatgagagactaggtttctgcttagagtaatttggaggctaagggttaggcttagtgagttaagttttctagcttatagttaagacctttatatagaaagcctaaaaccctaatttacaacaaaacccttagatatatacatattaaattgattaaatacaaaagactaaactaccccctgaaagtaaatattttccatcaatttgttgggctaataagggcccaatttgtaggtagcttgctatccatgttttgggttgtacatagagtcctatcaggttaatcctagctgcccaaagacctacaagagaggtctagctgaccatggtggcaatcctagacagccatggtcctactaggtcgatcttggtcgaccatgatcctgctaggacctggcaggtcatgtacctaccaggatcctataggtactatggctttaccaagaggaggccagccttttgatctggaggccaaccttttgcaagttgaggacagctttgtacatcgtttacttgtagaggtcagattcgtttggtcgaacggaagctcccttggttcggaagtcactttttagtcggctagcttatgcacaaatcctggccggcctataggctcaccttgaccggcctataggcttctcttagtcggttagggatgtagttacaaccccccttgagagctcgcttcactttttttggttgctgctcgacggttttgccgtatcttgtatagagaccctgtcttgctactggcaaggctgtattccacttgtactcattctttggcttacgtggacatggcacatcaattggacaaaatttgggacaataataccaaaacaaaattgctagaaatttcaattctaaagtcaaaagaagaagatttaaaattcatgaacttatttttaaaggggtttttccaacctctcaagaacctagagtgggggttgttaggttataattagcctatgtttcgggtctttaaagttagcattatctcgtctattggt

SEQ ID NO: 323914 - DNA, 982 bp, Cannabis indica
cccaccctctggccggccctgggcacattttaacatctctcttattactattaaaaaaaaagttaaaagacatcacttaagttgtcatattattattaatagagtaaagtattagtcttttctacataatttattataataatttttatgaagtaactttaattattcacaagacgtcatttcacgataatattaggcactactaataattaattctcttattgtgagtctaataccattaagaggtgacatcatataattacaaagtaaatattaaaacatatttaattcgatattaaattatattaataataatataatattttaatttattgatatgttatttatattattttcttgactttttttgaataatattaaaagttatacttaagttacaaaaaataaaaagaatttttataataaaaattcactttatttatattgtagttctttttttgttcttgtagatattatcttttctgcacttaccaaaagatgacctatatatactcactacagtaatcaccctaatatggtgatgcagctaacttttgttgtcaaattacattgtgacttaacttctaactaatttaggagaactataacatgcaataatgagcttcatatcatttgcaatttgtagttctaataatttgattaatttagaccgtttacaagtttttttgttcggctacagttttaaaattttcagtaacagttcaaccaatctgtataattctttatttatattttttagatggaatgtggatatttgtgactttatgtaaaatatttatattgacttaatatattttgagattatttttattgttaataatgaattataaagttattaaagttaaaaaaaaaatagtaaaaaaataaaacaaattacttaaaaaaaaaattaagaagtaactaatgaaatacaaactaatggtttaaactaattaaccaattacgttcttaagtgaattga

SEQ ID NO: 323915 - DNA, 1138 bp, Cannabis indica
agggttataactcaaaaaattttgagttgcagaaattaggcagaatcaagcgaccgattgttttggaagtgcctataattttggtgaggcctaatatgttggtaactgttgtctgtacgcaaacacgctgctgacagtgacaggtacacatgtgccgtcagtttagagagagaatgtatgtcggtttatcttgattttttacctgacgtagcatacgagttattacatgtggcaagataaagcatcacttttaataaacgtgatcggtacatacaatgagtagacataagaatcacacacttaaagacaactggtggtcggcaaaaaggaaatgatcaacattgtccttgcatgacacatccttgcttgatgaaaacctaaatttaggagaagtaatcacagcttccactaggctcatgaaacgaaccctggtcgatgactgacgagagcatatacgatacaaatctggtaaattagctcctaatccctaaggattcggtattcattccctccacattatttgttatgatctttaactaatgatttattcttaatttattgtcatttgttataattgatatgaaaaacttataaatataggtccttcacacaaagtgaggacacaaaaaaattcacatagcacaaacaccactaaaatctctatacaattctttttacaccaggagtgaccctaagtaactatagaccttaggaatgaaaaaatcattgggccctcattgaagaaatatataatattttcaaaaattagtaaaaaaaatatttatattttaaaaagatttttttagggggccttaggcaaagtgggttctagacataggcctagcccgtcttagtccagggctactcctgttctaaacttggaaagctcatttgaatcttgttcatattactctaggtatgaatcttgttcatattattctaggtatgaactaagaaatttatagaaaagttaagacaattagactattaccattataattgatatagaacctctataaattctattcttattatattacattctttgttcttttattaattataaaatctgtaacaccccgatttcccgagatgtcacataggatagtccgtataaaacaatttaataagataaaga

SEQ ID NO: 323916 - DNA, 1130 bp, Cannabis indica
attaacttttttatttttggatatttttttgaactgatctctatttttaaaaacttttctattatttttttcatcatattgtttttttttcttgtaatggaacacttttttttctataatcgaatgtgtagaaacttaaatttagagtagtagaacaacaaatttcaattatggcttccatctcaaatttattgttctacgtacacttcaaatttaagttttttatacattataaccaaaagatcttgaaaacaaaaatgctaaaattaaacaaaacataacactaaattatcaaatttcatcgcaaactatcgcaaaactatcattaattatatcatttttgtattgaaagattcaaatttttatggcattactaacaagattattatttttggctaaaaatctaaaaattaaaaattatgacattatcatggttatgtattttgcttaagtaacatcctaatttatatgggtgtgggttcattgtccttgatttatctaagtgttctattaattaatgtcaataaaattagatgacagcattcggattaggtagtgtcggtgaggggcagcagtcaaagagattctttcacaaataaattgatcctattccaaatgtaaccattttatcttcttttacgatttttgttttccccactcttttctctttgttcatctcaaaaggccaaatgactatatttgtttatttggtcacaatatattttaatatagttttttttaaaattattattatatgtgtgtgaaaaatatttggaaaaaccctccaaaataatctcataaaatgaaaaaaatattgactaattttattgaatactttacagtccacctcttaaaaaaaatagatatatcgatgcaacctcatttttaatttacaatatgatagtatatattataattatttgagataatttgtaaagtttttaaaaaaattaaaataacttacaggattcaaatattttatttcacactattatttttttcttaattttatacgactgtgaaatacattatttaaactaggggtgttcatcaaaccgctcaaactgcctgcaccgcaccacaccgcaaaaaaaatacggtttgaagttctttgcagtgcggtcgtggtt

SEQ ID NO: 323917 - DNA, 464 bp, Cannabis indica
agtatatatcaaagttcggagaaaaaatttactaattaaccttttttatatcttaaattatttaaaatttaataaattacttactataattacaatttcaacctttatataaaaaatgaaatgctaggttgtccagataggcaaatagagaaaaactaaggcggcaaaccaattttgaccaacttaaagacaaaaatgatataatataattttttttttgaaacatataatataatattttaggatttataaactaattttgaactagtattttcgtccattattgaccggacattattagacgttatattttgtaataaaatatacttttaatttttaaaaaatttataacatatatacccattttaatattgagtattaaaatatgatttataattcatccattgtatttttgttatatttgaaaatattttgactacaggtgatattagaattctaatttt

SEQ ID NO: 323918 - DNA, 514 bp, Cannabis indica
tactttaatttaattttttttttcttttatactgtacacaccccaaaatacatacgaagcctccatctcaacacttatggaccgaactaccagagcaacaccaaaaccgctagaaaataactatttccagttagaacgtaagtatttaaaatttcaactctgaaacaataacatgaaaaaattactaaaacaactgtaaaactgcaatacaaaataactaaataaaattaaaaaaaaaacctatacatcaataactcttttgccagtgcgaactatcataacatcacgagaggaagccttcacattggaaaatttccccttacaataaatacattaaaaaaaacaattcagatgaaccaaaaataatcattaaggcataaaaatcaagtatataatactaaacaccgaattacatatacaaaagaacaatacatatatttaacaaaatcagggagtgatgaacaaaatcaaaaattgatatctgagactgaacatgcacaagaaaaaaaaaact

SEQ ID NO: 323919 - DNA, 517 bp, Cannabis indica
aatctgaccataatttaaaaattgaattaatcaattttcaaatttaaacctcaaaatatcaaaaattaataataatgtattaaaaaataaatattattaatttagaatattgatatttaggtttaaatgataatttaattagatgttcgcgtttgaaagttgaaaaatccgaaatttggaaaaaaatcccacttagatcgggttgggtgaggtggcggcccagaaggatgcacctgcagccaaacaggggctgctagtagccgtttacgctcgcccagagagggatttgcagaatccttggccgagaaaactcagcaggtgcagggtgaccctcgggcggacaacagggtcctggccgtgcgagcgagttcagacaaaaagttttctaaagcccatgtgcctatggatccttcttgtccaaagggtctgtgcgtgcgattgagcatgggcatcccgaaatttaaaaattcataactccttcaatttttatcggaatcgagttccgtaaaaaaataaa

SEQ ID NO: 323920 - DNA, 1098 bp, Cannabis indica
aatacatacctttcttggccagcagtgtcccaaatttgagccttgatgagtttattatcagaaactctaatatttctgtaagcaaattcaactccaatggttggtttagagtctaatctaaattcatttttggaaaatcttgaaagaagatttgattttccaactgctgagtctccaatcaaaactgccttgaaaagataatcacaatcttcatcaaatgaatcatccatgaatattaatattatttcaatcccccaaaaaagaaaggaaaagaaaagtttttgaagattttggattttgatgattttttacatgtgaattgtgaaggcatatgagatattagatatagttgttttgtgatgatgttgttgtacaaagctagcaaaagtaggaaacccctcttttggaaattaaaaaaataaatttctttttttaattgacttattttatttaagggtccaattaatgttgtgacatgtggcatttgtttggggaacttgttatgtggctttgattgattggttgtttggtaattgaaataaaggagtgatctttatctaatgagaattgttaaaaggcacttgtagtgcttaatacatttttcggtatcatactgttattagtgtaattaagtatcgggttctatataatataaaaaaataacttttagagaatattgttaatcaatcgtgaggtaccatctataaaatgtattgtgcactattagtattcaaaagtattattatttggtatcagtagtgtccaataatttttataggtgacactttatgattgattagcgatatctctaaaagttattttattaaattatataaaacttaatacttaattacaccaataataatataacgataatactttctaacatttctaccaataggagaaaagttggtttcatatggttccgtatgtttggttgctttgaataagggttttaggattaggagtgataattattgttaatgataccaaaagcattccactaattaatatcattttttttttagatgtgacacaaggtgttccacattatgggtgaaaaaccgtgtttttgcaaatgtcagttgtatataagaa

SEQ ID NO: 323921 - DNA, 1024 bp, Cannabis indica
aaactagctagtaatatgattcaatgtggtatgactcttgtgtagaggcagggggtccgtaaatacgcattggtattgtcattgaatgagtcaactcttgcctcattgttggtagattgttgacggttcgggcaccgacaataatcatgggtggatgagcgaaaaatttgacaatgtctggagtttcttgggattttctccccatttggtccttcccttgtatttcccgtacccttggttctcacaacttcaggttcttgaataatgttggagttgttacgatatcttcccaattgtggtgtctcaccttccgaattgtagctcaactcaaattcttccttgaacatttgtgttagtcattcaatctcttcctttgcatgtttatacgaagtttctgattttgctgcatagaaagtcatgttataagttagtgaagagggggatccaaacatagccatctcatacatgtgttgttgttgtggtgctggctggttaaaatgtaggtggagatttgtcttcgcggtttttctccatcgcttaatgagaagagtattaaaaattcttctaatgtttaatcttttcattgtagcccataaatatctacaagggtatccctgactttcatataacatgcagctacactgtagtgctcgttggctttcagactaatgaacttggtactgtacttctagatgttgaaactttccaatattaaatatctgccactctccttcatccacctaacgtaagttggaacaatggggggagaggaaaaatgtggttggcctgtcccttaatctcaatggggggagtggccgattgtaagttggaactcggtgaaaaaactaacggacaccttttatgttatacgccataaagtaacttctagcgtagcctccaacaattgacatggctgtgtcattagtgttggaatatgttttaccaggatctagatttactaataagtatgtttcattaacatcctaacatgaatttctaaaacaataaaattaaacacatataa

SEQ ID NO: 323922 - DNA, 687 bp, Cannabis indica
ttttttaaaaaaaaattgaatatatttttaaagttaaaaaaatatatattttaaagaaactatttaagagcgattaatagaatgttggtatttgagtttagtatatgaagtttgttactacttgtaaagtttatggtttgtgaatcaaatttagtagttaactattaaaatacaaaactaatctaacattttttttagactaatagaatgttggtattttgacatgtactaaattatgttctctgaacttttaatatcattaaaatcttatcacagctagtgaatagtatattatcaagatagaatataaataccttaagaaattcacacacaatatcaatgctggattcctaaagtaaataccattcttatttttttatatatatataaattacaattgtatagtaacttggattagatccaaaaatataaattccagagtaaaaattaattatgacaaaaaagtacgcgatcattacctacctacccaaaaatcggtgaagaaaataaacagacaaaccaaagtagagttttctaatcaaaattaaacaattatactttgtgcttaaatcagtgtcttcttaagtgggctatattttaacttttaaatttcaatcatactctaatatgaaaatgaaataattacataaggcatcattttttgtaaaatatttatatttttatatt

SEQ ID NO: 323923 - DNA, 699 bp, Cannabis indica
attcctggcctgccaccgagacccaatggaagagtaggtataatctctagaggaccccatatcggagggactactcgaaaggagtgttgctcaagctatttcagagcttaccgacttcattctctatttttagaactctgaattcaattggccagacttccagttttatggtgtgacagccctaatattgttttattgacagctaacccagtactacatgctacaacaaagcatatcgagttagatttgtactttgtttgtgaaaagatctcatagcaattggttcgtgttaatcatgtgcctgctttagaccagattgctgatggttttaccaaggctatctccagttctcgatttgctttgtctcgtcacaaacttggtcttatgtatgcaccaattctaagtctggggagagtgtgaaggagattagtttgttagtctgttaaagtgagttagaatggtagttattggtcgttagttgttagtttgttatacaactgtgaattctattttgtaatagcttgtatatataccattgtgtctctgttctaatgaatatgaggctattctttcagtcctatctttctcttcttctttttcttccttctttctctttctttcaccatggttagatgcaagaaaagtgttatcggcataaatttaccctcccgccgagaaggacttgtctatagagaactc

SEQ ID NO: 323924 - DNA, 1323 bp, Cannabis indica
ttatattaaaattgttaaaaattgagctcagggtcctatttttaccgttttagaaaatacagggtctattttgttagttaacaaaacagatggtccaaacagtaacttttgtaaaatacacgatccaaaatagtatttaccataatatatatagcaattggtggcgaagcccatttttcgtttttatttttagacaatttaccttgttcttttaagagttaactgtttaaaaatgaaaacaaaaaggaatttcactgataattatcctaatatatattattaattgtacaatgatatatatttgtgggtgcttttacaatacaccctataaaaatatgtgcaccactggtgcaacccctaactgttttgacatctagaagaatttcttacttcaatttttttatagtcgtatacgttatagttatttgagacatcttgcaaaattttgacaaattcaaaataatttaccatatagaatttaatattcaaaccgtctattttacacttgtataaaataaaatagttacgtgtgtaacataatgtttgaaccctatttcaaaatgttaatttttttaaattttttaaaattttgcaggatgccttaaataactataatgtacgtgaccatgagaaaaaaattgactaaaaaattatttcagataccaaaatagatagagatgtgcattttttttaaaggggtgcatcgtagaactgtctatcataattatttagtattgtaaaaagaaaacaagtatattattgagtgcttctacaatgcacacctctaaaaagatgcaccgatgtactccttatttgtttcggcattcaaaaaaattatctagtctaattttttttccataaccctgtacgttatagttatttaaaatattatacaaaattctaaaaaattcagaataatttataatatagaaagtagagtttaaacaatctattttatatgtagggctgtaaaaaaaatgattcaatccaataacaaaccgaccgatccaatgtaaaccgttcactaaaaattagatatccaatcataataaaattgaattggatgatatttttaaaaatctaaaattggatcgatatattcttggatgacatataaatccaatagaccaaaccaagtgattcaatctaacaatcgtcaaatactatttgatattaaaatagaaaatatatattataaatttataatattaaatatattatattttaaaaactaaaataaagaaaaaaaacaaaaataaagctgaccaatcaaaatatattatattttaatacatatataaaaaacatttaaaaaaaacaaaa

SEQ ID NO: 323925 - DNA, 716 bp, Cannabis indica
aaaatttaaattattcctaaaaaaatattttgaaattttttttatttacaaacacttatcttacaaaatcaaatcaaaattgttgaaatccaacaaatgatttaagcgaattttttgaataaaaaatcaagattatttatatttataaattcatattttaaaaataattaaaaatttagcaaaaatataaacttattttagaaaaaagttataaattaaactagaaaaagtgttatgtttacttaaacaaatttagaatgttagagaaaataaaatagactcaaagttgttcttgtaatatttaattttcacaaaaattgaatttttaatgtattttcttatatctaaatggattttttaataataaataaataattttttaaattgcttaattagttttaacttggataagatatcataaatttatcgtaatatctatctaaaataatatcacctagttgatcttagatcaaatgatctcaatcctgagatggttagattctagttcagttgtattatttatgttcttcaatttgttcgttaaagtcgaccaattgattcttctcgtgacatacaaattaaggacatggtagttcagttgagtgagagcgctaatcatagatacaaaatctataacttctataaataaatagaagtgaaatgataattttcttcgagcttggcttaatagagataaatggcagagtactcatttc

SEQ ID NO: 323926 - DNA, 1995 bp, Cannabis indica
attacaagtttattttcagtctgtttaatataaaagtttaaattctgcgctattttaattagtaatcccagttaggggattagggctttataagtatttttgggtagcgtgcctaattatttagggcgttacaggcaagttggactaagcttagcaaacacaagaatgaaggagggttgggttttagagacttaagagattataacttagcaatgcttggcaaacaagcatggagattgataactaataatgactcaatagtcccaagggtgtacaaagcaagatattatccccatgaatctttcttctctacctctcttggatgtaatccaagatttatttggaaaagcctttttgaaacaaaatcattgattaaagctggagcggtcattcccataggaaatgggttaaacacaagcatcattgaagatccgtggctgcctgacttaaacaatctgaaggttctctcaacacatcccgctttagttggccagaaagtcgcaagtctgatgtgtattgatgaacttaagtgggatactgaaatcattgaggacatgtttgatgacagggataaagttttgattttgggcatccctcttagtactgccaggagtgaagattgttggagttggctgtttgaaaactaaggcatttactcagttaaaagtgcatacagatttctgcaacaatctaagactaatggccatcattgctctgatgtttggaaagtgttttggaaacttgaggctccccctaaagttcttcatttcggatggaaggctatcacgggctgcctcccaacaaaagtccaactccaatccaagcatgttcccattgaaaatctccgccctttctgcaataatgctgccgagtctatcattcatgtgcttgtcagctgcccctttgcaatttcttgctggaacagatcaagccttagtttttctgtcagtacacatgacacttttagcacccggtttgaagtagaaactacaggaaaaagtgaaggcctatggaaggagatatttatgattgcttgggctatatggaacgcaagaaacaagctcatatgggataaaaaaattatgctagctgctgaagtggttttgttcgcaagatctacccttaatcaatggagttttgctcatcaaagacgaatggagcctctgctgctgttcaatgaacatggagccgaggttgagcattgggtttcctgcaaatgatacgattaaggtaaacgtggacggagcaacttttgaagctacaatttctttgggtttggcttcattgtgagaaggaatgatggttctctggttgaagcagtctcgctgggaaggcaagcaaggcactaagaagatcctaagctggataacaggcaaaggttggcgaaatgtcacacttgaatccgattgtttggtagcttcaagctatacatagctcggcttcccttccttcggcttttggattgctggtttttgaatgtcaacaacttctggctgatttaaataatgttaagttttattttgtcaaacgttctgctaacaaggttgcgcattaccttacgaggagctcttgtttttcgtcagttcgtgtttattttgactacaactcccctcctgagcttgtagagattgttgatttccattactaaaaaaaaaaaaaaattataaattattttatagcatctacacattacttccatgataatttaatactcttttgatactcgtatcataattggttttgtatcatactttataatagcatatatattatacatatgtatccataataatatttttaatccaacaaaagtatcttttcttggtcattaagtgtcaactcatagaaatacattacgatatattattggtccacgtattaaataaactattaaataaacaaaaaaaaaaaatatgtcaccatgtatttttgaactgatacttaacgtgcttaattaacattaggggcgagcataaaatccagaaaatcgaaaaa

SEQ ID NO: 323927 - DNA, 1895 bp, Cannabis indica
aattaaattaaattcatagtttacccttctcgggtcaaaattacaaaaatgcccctagctcaccaactacgtcttaacatgtcatatatcaaattaattcactttttataaattatatattaatataattccataataatacacatttgattagttaggatttgctactctattttcttaatcttagggcattacaggtttgatacctcccagtattgcggccaaccttccttcttcagtcagccccttcacttttgttgcttcagtcatgaacttactaatgtaagctgttaaaggttcttatggtattttttcacttctaccaggtcttctaaatgagagggaagctgaagagaggaggaaatgtgtgcatggaattcagatgagaaagaaatccatgaactggacttccctagaggtagtttaaaatactattgttgggtgccctctactaatgtattttgcaccgtacattacctctcacctgttgcaagtccatttgcatctcaaagtatttcaactgaaataaaggatcttcttcgcctgtatacatcttctatactggcattttgaacttaaggggcaggtcaagagcattaatttcgggtgagaagggtgatcctcttgcccgaccaagttcaagatctatgagttttgggccagttaagctttgtacaatgcttttaagctaatctatttatgctttgcataagtggatgaacttggccagcctattgaccgacctgtgccacattacaatctattcgaactagacctgggacatagttgtttggctggacgacaggtggaacattttgcccatccaggcccctttcgtggttcaaatcatttttgaggccgtgtacgatctcgagttaatcaaacaccaatctgccaaggggcctttgattctgaacaacttggctaagaggtttgcctgatacctctatcagactatggttgttcagctaatttcttcctcataaggggcgatctggtaagattttcccgtctattgtttggcccacaatttaaacttgtggccttggattggatagttgaccgatataattttgtgtggtatgatcaattagatactctttcgacccattctgagatcccaaggggatactagaataagtaattggttgctgaatggtgacttgatatgccttttttgtaacgccctacaattaggcacgttacccaaggtgattaagaaccctaatcccctaaacgggataactatacaaaaaagcgtgggaactttaatctttaaacaataatagaattataataaaaacttgtaataactttaactttacaaccaaaattacatgtttcgagaccctaaaaatatttcacaaaatattacaagttcttccactagccgtcctaggtagcaaaatagagttacaaaagttcatcactggtagacccacacccgcttggtctagtgtggccggaacatttacatacatcgcccagctcccgtacacatagccgatcagagacagatttaccctttcctgcacagtagagcacccgtgatccaagctcaaaaagacaatataaaatatcaataatcatacttaacttatcacgtaaatattaattccattacaccttttgtctgtatgacacagacctgcgtgttacggtcacatgcctaattacgtttatgtggcatagacctacatgttacactcacacgtctatgtacaataagtccttagtacagttcatctcggttctagttaccgagtccaacccgattatgccttgaacgcataacccttaaccttaatatgtatgtacaacacataattaatggtgccactgcactatttatctatttgctatagacctacgtgttacgctcacatgcctattta

SEQ ID NO: 323928 - DNA, 830 bp, Cannabis indica
aaataactcaaaccgattacaaagaaaatagaaagaaatcagttcctaaaatattaaacataaattaaaaataaaactagttccacaacaaaatacctcatagcacataatatctcataaaaccgattataatttttttaaaaaaaatgggatcaattccaaaaatattaaggcataaatatgaaaagaaccagttagataaaaaaacaaaaatacttgtgaaaagattcgatcttgtatgctcgtttcacaaggtaacaaaaaagctacacggatctgaagcgtatggatatttaattctaagtgggagactctgtatttctctgagtatcacctgtaaaaggggtacatagatttgggaagaaagggaatatgagcattagatttatcagtccttttgagatactgaagtgagtaggctaggtagcatattgattagctataccacctgtgttgtctagggtgcataatgtattatatctctatgttgaggaagtacgtttcagatctgacacatattttgagctacgatgacattgagctccaaatagacttatgaagaataacatgtttaggttttagatcgaaaagagaaagtactccgaaataagacaattttgctggttaacgtgttatggatgaagatcaaagttgagaaagcgacttaggagtttgagtcacaaatgcgaaaacagtatcccaaattatttaggtaaattttgaggaccagatttatataaggaatggatggttgtaatattcccataaacctaattgtgaatacttagggtttaatatatattatgatcctactatttatttcaacataa

SEQ ID NO: 323929 - DNA, 848 bp, Cannabis indica
tctcaaataacttaatgaaaattcaaatcattcagtagacatattgaatggactaaaattattctaaactgctaagattaacccgaataaattgatttataatatacaacataaattatatttattaggtaaattattttaaatttaaaatataaatttaatagtatctaattgaaaatatagagtttataattaataacttttattgtatttctatattattaaagttaaaatttaaaatttacactatattattacttattttctatttttctaatgaaaaatttcatccaactaaactaacttaatttcaacaatgacaggagcatcaattaagacattggagctcaaaaaaaatataatcatcatttaaacgagaagctcttacaatttgatgagctactcgattagaattattctattttttagataaatatttattttatgttaaaaaattttatattaatttagactataacatttttaaatttgaaatataaatattatatttttatttttattaatctaattatttaaatattaaaaactaataatagtaattataaaaaaaaaatgcactttatattctatgaacaaattgcgcttaataacgaattttttaaagttgttgaaccaaaaaaccataaaaagcaaaaaattgataaagatcaataaatatatctatgacacttgcaacttggtcatattggttatgacagatttgagattacatagacttaccaagggtgatacattgagataatattgttgttgcccctgaattcgcccaaaatacgtggaccagtcgaatagggacacgtggatcagataacttgtaaatatttgat

SEQ ID NO: 323930 - DNA, 1018 bp, Cannabis indica
cgtccatgccccccgaactcggacgtaacgtacctatgatctatcaaagtcttcgagaggcgaccagtctctgcagcgatctggaaagaaaaaaagttaagtatgagagattaagtgccacatggtagagcacaagcgaaaaggagaagccaataacaaagacttaccgcggtcatggcagcgctgatatcctgaacttgataaatggcgtttgtggaagcgcaggctgcgtatcttttggccgagagttgggtcaggtgggaaacgaattggctggtcagtttggaggcaaagggagcaagggcagggccgacaaagcggttgaaccagtccgtcagagggtccatgttcaggtctcaagcattcttgaaggcctcgtcgcgcaaagaattttgttgagcctcccgtaagaccttattcaaggcttccacctcggcattccccctgctgtattcatccatggcgtaattgtgtttggcaacttgaagcttctgcctctcctcattagcagggactggagtaaggatgatgccggggggtacaatgtattcctcttcctcaggcggaatccccaaatctgagctgacggctggagtgtcctttcttctaggcttcttggaacactcagcctccaccatttttcccttgcacttccgatccagaagagccacgatctcgccttcctcctcctcctcggcctctccctcctcgtcgattaagacaattgtgcctaaaggggcactggaagatgacctccccggggtcaccatctgggcagcgctgggggaagggaagtgtttgggctgtagttttcggcaagagtcaccaagaggtcttccattgatatggctgctttaaaaagaaataaacaaagtgtcacttttgataattaaaagggaccgggcactcatttgaaggatgggcccggagggtgaaaaactgtctttttaaacttgtcccccttcttaggatagatacaagttcataaaaatacaaaatttcagccgggctaggtgaa

SEQ ID NO: 323931 - DNA, 857 bp, Cannabis indica
catatacataattataaatttataatataaatatattacttaatttattatctactcccttgaatattatattatttattccttttgtcagcattatatacatttttatatatatattaaaaaatacaagatgcaattttaattaaatgggtatatatttttattaaaaaaaaatgggtatatatttacataacatttagtaataattttccaaataaaatccatttattaattttgtataatatatttatatgtcgtttaattacatcattaatttcttttaacaaagtcaatatatatgtcttatatgcttggttcttatacatatatcgtgtatatcaaagctatgaaaatgatctaataactaccaaattaatataatatatgtatacatatatgtccatattatatataattatcaaatcacaattaatatatttctcctataaaatattatatttatagaaaataatattcaaataactcttactaataagttaattcaaatgggtagttgtgtgatattaattaatttagatcatgataactcccttcaacagaagatttatgcatatatataaataaaaataataatctcaatgtatatttttatagtataaatatatagagaaaataaatatcgtatttgtcgttactatttaatattgcatatgaagagatccataaattgttacattgtgctatatatgagaaatttataaaaatactaaaatttaggttaacttttacaaaaatactgttatacggaaatcttttcaaaaatattgtgttttgtagaacaactaaaaaatactagtagaacaacattgaaaacttaacacaatatactgcagtat

SEQ ID NO: 323932 - DNA, 1234 bp, Cannabis indica
caataatacaataattagtgggttttgggttggacattcacatattagacctaaataaatataaaaatttgtatttttataatgtgtggtgcggtgcagtttatactgcatattaacaatttaaaactgcaaaccgcaccgcatcgcacgatttatgaaaaatttaaactgcgaccacaccgcgaagaatttcaaactgcattttttacggtgtggtgtgttgcgggcggtttgagcgatgtgagcggtttaatgaacacccgtactttcaggaaaaaaccacaagcagagcatgcaaaaatccactatggaaaatgagagtgtacaagggagggcttttttttgccgtacatgtgattaaaaatggtatttcataaggtttacagtgttccaactatatttgtaatcttgtaaggcccttcctaattgggtcttaactttcatgctctttcctccttagtgttttggaacactcgttgtagtatctattctctttccttgaattgttagaccctgatgttcttgttgaagtgttgggccaccttttgttagtatgatgctactcttataagggtttattctctctttttgtctaacaaatgaagttatgtgttcatgctttattaatttaaatcatcgatcaagtgtttgtatctgatcgccggtattttgatttttgttgggatgaccgcttcagtccatatgtcaatgcaagtggggtctctctagtttaggtctttgttgttgtttagtaagaccacagtacccctagtaactcatctgcacatctccttttgattcttcttgtcctttttcttgaaggtatcttggagttgagaatgatagttgtatcccccaccatgcacaaaagttctggaagtcttggcttatgagctgtgaactgttgttcgtaactatctcatatggaattcttaacctgcatattatatttttccagatgaagtttgttacctctcgatctctaacttgtgtcctcagcttctacctatttggtgaagtagtgagttaagcaagcatgaatactctctgccctggagaaattggcattttgcctacaatgtccatctcccatctcatatatggacaaggtgtaagtgatgagtggagcttctctagaggtagatgagatatttaagcaaacctttggtacttgttgttggaaatattttaccaggatctagatttactatcaagtatgtttcattaacatcct

SEQ ID NO: 323933 - DNA, 1302 bp, Cannabis indica
ttatttgtaatgtgggaatggaacgcttgaaaaatggtatcttctagaagtgtcaatgatggatcccattaacttcccaaggaataaagtacttgttggcgtgctcatcaacccttcgcatagatgaggtgttggaatcatctaaccactgatggcgaacctggctaaaatagaagtacccagaccgatgttgctgcaaagtggactccaaatcaaaatagtcttcaacatcataaggagtaggttgaggccaacatagctctttataaggaacaaacatcgctaaaatgtacgtaataccttccagggtgattatgtcggacacatctagaaataagcgacaatatcaaaaaagtatgaatgaagaggaggtatagctccctgatcaatgtagcattttgaccacgccatccagttgagagccaacctatgagctagttgatctggggaaggcatcttacattagataacccctactagcccagcagtctgcatcctctcaaaaactatcctttgagagagacgaaatcggggaaatccacctatcgccttccagactttcatcaagaattttaggctcaagaaattggtccaagacatgatccaatctgagtaccaaaggctcactgagcctgttcagcagattgccatcactatcatagtgacataagggacaattggacaggatggcgcaaggcttgcatctcttcctcctaacaggaacaacttcttcacgattatactcagcctcgggactttcattctcaggccagttttgggactaatgttggcacaaggcaagccaaccctttctacaaccgtggtgtgaccccgtaaaactattttggccatgtgagggtcatgcaggttcgccctactgcttctctatttcgtatcaatcataactacaaggaaatcaaagagacctgcacagttgtcacctccccaaacaaacagctgacattgtcttcatggaagaaataaggggaggtgagcaacctgacaaagctacaaatttattcaagtcaatgacactcaatgacatcttctagaagaaacaaagggtacaaggtcgaccaacaaccaagtatcgtcgtaggtacaattactatgacacatagtaagtcctaagttgtataattaaccataatgtagttattatctagccttatctagagtttctaatagaaactacacatgcctctaaggccaccgttatatatgcctctaaagccgccacatgaccctaactgtgattgaaagagtgagaaactggctacccgcttggagccttggccttgg

SEQ ID NO: 323934 - DNA, 625 bp, Cannabis indica
ttaatgtgtggctgctaggtcttcgggggggaattaggggtaaaatgagaaccgtcgactatactatacccgatagttttaaaatatcgggtataagggcccctaaaaatttgtgttttttgttaaaaccatcgcctatttcgttaactagtgttttaaaccatcgagaatactcaatttttcccgacgactttaaacagttacttaattttttttagcgacagcccctgaaaaaatttatttttaggaccgtcgtgaattatgccttttgtaatagtgtatactcaatcttattacttagactaatacttgagaaaatatttttaaaatttcaagtgcaagattgttggaacatagtgaaattttacaaaatgagaagtgtagtgtgtgagttgagtcccacatgggataggaacacttcattagaagtgtatataatgtgcaaatttggaataggttgaccaccaagaggtacccaattttgtgcgcatgggtgaggactcacacatcagaccactatacacgcgcacaccgttgttgtttgtccgaccgtgctgagttaacctggcaggcaagtgtggtgtcactttatttttttggagaaaattttatttaataaattatt

SEQ ID NO: 323935 - DNA, 2265 bp, Cannabis indica
tctttttcacaaacagaaccggagctccccagggcaatacactgggtcggataaaccctaaataaagttccctgaagttgtatttttagctccctgagttctgctggagccattctatagggtgccttcgaaacaggttcaactccaggtgccaaatcaatcacaaaatctatttctcgttgtcacggtaatcccggtaactccttgggaaatacgtcaagaaatttcttaacaaccctgactaactcaggcccaaatgttttagatctgctggagtcaataacaaccgctaaaaatcctacacatccaatgtgtaataaatctttagcccttaagactgaaataatcaggatccgagatccctaaacagatccaacattgacaaatggatcttcaccctctggctgaaaagttatcattttctgcttacaatcaatgctggtcgaatacttggataggaattccattccaagtatgatatcaaattctgctaatttcaactctactatgtcaacactcaactccctatcttcaaccctaactggcatagacttaattcgcctattggagataactaactccccgctaggcaatagggttccaaaccctctttcaataaaatcacaaggcctacccaactgattaattacccatgatgccacatatgagtgtgtagctcccggatcaaataatacggtataataggagttgttgacaagaagctaacctgtcaccacagaaggactggctgcagcatcaacttgagtgatggcgaacacccgagcaggtacaggttttgcctctggcttctgctcttctttctttatttgagggcaatctttctttaaatgctccaccatgccgcactgaaagaatgtcttccagttgcactctcccggatgatgtttcttacaacgtgggtactcagggtaagaataaaccttgcgtccacctctgccttggttaccccaaaactgcttgctttttcctgaaccacgagatgccgagttagcctttcttttctgatcagtggtggaatcaccaccatccctaccaacatgtggagtcactcggggctcttaaagaaacttaaccgcacttcggctcgtagagccttctcaaccatcccctcatatgatgttgcctcatttgtagtaatcaccaggtcgtgtctaatttttacatttagacttgctagatatttctccttcttgctggagtctgtaggcacaatacttgaagctaacttggccaaagaatcaaattttgtcccgtattcagttactaacatacccttactctacaccaattcagtaaattctttctgcttagcactgcggactgccttgttataatacttggagttgaataaatctcgaaactcttcccaggttataatagtgacgtctcgggagagggacactaactcccaccacacgagcgcatcttcctagaactaaaaagtagcacaagtcacccgatcatttcaaacaacccccatgaaattaaaaattccttctatcactgtgagccactgctcaaccttcattacattcggacctcccaagaacactagaggtgcttgcttgcgaaacctctcttacaacggctccatatggttgccacaggttgttttgctggcaccgcaggaactaaaacaggccgagcttgaggtggaggcactatagaaggaccctgctgccttagtctcaaaatttcttcatcttgttggcggatacgatcttgcatctctacgaatatttactcacgacctggaggagattgaggtgggttcacaggtcgaccattaccctgacctgaccgcctccagtcttgaccccattaccctgactcctcgtattttgttgggcatccatttaataggacttagcctacgaacccataagccaggcaggtgagatagcgatcacaaaaattaataccgctcttatggattttaaggcaatgcactaaaacaaataactataaactaatatgcttcctaacatgctttaataaacacatacaatactaaacaagtacaggcttattgaatcgtgagccgagcttttctctgatgatgattgtacatgtcttggcaatctttggtagacaaacttggcggctctgatgccgaaattataacgccctaatactaaggcacgctacagtgatttttttcaatcgaagtgctatctttgctaatcaaagtaattttcttgaaaattatgtcaaattaaaattttagaattaactatgaaactt

SEQ ID NO: 323936 - DNA, 840 bp, Cannabis indica
ttacgaagctcatgcgcttcgtatgggttatgacatacagtaactctcacccggagaaaattccgccaaagttccataatttttttttcatcagattcaacaaacctgcctatgtaattagccacatctctagccaccatagcagttccaaacctagaccgtagatcatgtagctgaacccaaaaattaacctccttcaactcaattagcctagggttttcccctagcttcaatcatgaaaaaccagtaggaacttgttgaacgtccacaggcttcgatcgatcacactctgaatgtcaatttcatggtagaactggaattaaaatcgattagtatccgattcttttacaaacatccccttcccaggttgccataacgaagccaatatatgttgcataacatcaaaatcaatagatctctcctgtacaaaaaccttcctacaaggcaccaccaatcatcataatctgtttcatttaaatttactagtattatacgctagtacagcattcgactttttctctagccatatattcgatccatcattttcatccatcattccctaattactacttgaggccataatggaaacaacacacgcacaatacgaacaaatttgaactttccaggcagaaaacaataagccaagacaccaaacaaaagtatacacaaccatgtcagaagacaagacaatttctccttttcatactttgcaaacagagtgagataatcatatttaatttaactaaattagtaacatgcaaagcatgttttgcttaaagttgttattacctaattataaatttaaataataataaaaaaaaaattaaatctaatataatt

SEQ ID NO: 323937 - DNA, 698 bp, Cannabis indica
ctctctctctctctctctcccaacccccacctacctccgagaaacccaaccggcgttcaacctccataaacccagacattctcgaactcaacctccattccctcgcgtcctctcgccacaagcaacctccaagaaccccaccacgttgaacccatcgaagttcgttcgaatcctgtcgaaccaaccaccacgaaacccaggcatcctcaatcgacacccaccaccgtcctgttacgttctcattcaaaccaccaccaaaccgagtaaaaaaaggtaccattttcttataaaagattttaaattgttcaattttgctagattttgtggattgcttgattacttgtgatttatcattgttcttgtggattctgtgacttgtttctggtgaaattatatttgtacagagttatcgatggttttatcgatggtatatcgatatgatatcgatctatttccccttgtttgtgtgaacggtttcaatggtatttccctttgttgttgatgaaatgtcgatatgatatcgatagaatatcgacaataaataagaatgggcagttcactgtttaacgcccaaaatgtgacttccactagcggtggttgtagtatagatcgggcggtcgattccacagggaggtgattatagacaaaatcgttaggagaaaaataaaaataaaaaacaaaaggttaataataagtga

SEQ ID NO: 323938 - DNA, 1342 bp, Cannabis indica
atagaaatatgtagtattagttacttctaaatgttcttttaataaattcaaaacagagtttgtaccgacgaaactggaagaaaattaaagttttacaaacattaggtacttatgccggcaaaaataaacattaaatttataccgcttacaaatttaaaacattgagtacttatgctgctatttgcccttaataataactattgaagttaaccattaaaatataagtatatgctaatactaatatttatattacactactaataataagcaactcatttgattcaatttcaaaaataaattaagcactcatttttatttttcatagattacaatcacacataacattaatttaattacatttaggttgaatttatacaaatatagtcttaatttctaagaagaatcagtttgttaatatgagtgacctaagacaaatttctcattgtaatgtgctatataaggtggtctctaaggtgttatccaaccgccttaagattattcttccgtgtattatgttggacattcaaagttcatttataaaaagatggactcatctcaaataatataatggtcatatttgaggttatgaattatttgaagaggaaaaggaaaggaaggaaagactatggttttggaaatggatatgagtaaaacttatgacgagatagagtggggttaccttcgagcggttcttgaacgaatgggttttgatggttgttggattaatttgttgatgcaatgtgtgaattcagtctcttataccattgttcattgtggtagggagatgggtcctagtattccagtgtggggcattcggcaaggcaatccagagtcttaagtatttatcttgtgcgcagaagggctattgatgattttaatgagatatgaagccagtggtagattaagaggttgaaaggtagcacctggagccccagtggtttcccatatgttctttgcaaacaatagttacatttattatcaagcctctgaggtggaagaagctaatgtgatgcatttgctacatatttatgaggtagcctttaggacaaaaaataaagctaaataagtcatacgttgttttatagctccaatacgagggataatattgtgatagactttgtacttcgttttgggaatttctaaagtagatgacaattcaacatagttcgggattcgcccaatactatgtgtaggaagaagacaaccatattgggtctacttaaaagaaaagattaggaagcgtatacaaggatgggatggtagattgtctttttgagtaaagaaaatagatcttattgaagatagttgcttaatcaattcctaactatgcaatgagtgtctt

SEQ ID NO: 323939 - DNA, 844 bp, Cannabis indica
caaacaaaaattcaatataacgacaaattaacttcatattttttaaatttaaaagttatgagatgatattctaaaaaaaaatgaaattacaaaattttcatagatttctaaaaagaaaaacctaatatggtaactaaatgatatgtcttaaacttatatgactatgctattttgctaataagaatgataatttttaatactttatagtttataatgactcattagtttctttaatataatttcaaaagtaaaatatagtaacattgggtcgggcttgagctaaggcagactaagcttgcgcctaaggtccacccaacccaagggcctaaaaaattattttctatttaaaatcataatattttaagaactagctaattgaaatcatgtaaccaatacacgatataatattatttaaaaatgacttttattaatgaaaaagtaattattatttagtatttttttcatgtatcataagcaactaaaatgttacttttaaaaatctcatcaaattgaaagcaaaaaaatctaaaaagtataaattttctattttaattaggtgttcttgtttcactctaatgtagataactaaatatttcttttttatatttaaaattgtaaatatttaaataccctaatggtatttcaaatatagtaattttattattattattatttaaaatttatgtttaactagatcagtacgatcataatttcatttattacctgattaatctaaaatacaatataaatcttaattatttactattgggcttatcgggatattacaaagatttagatcaatctagtattgatcatcattttgatatgaattaggtctttatag

SEQ ID NO: 323940 - DNA, 505 bp, Cannabis indica
gaaatgtggaaaagaacaggtttttggcactcaaagcttgggacaaaatatgtcaaccaaaggtttcgggggggactgggcttacgaaagtgtgaagagatgaatcaagctttactctcaaagttggcgtggaatcttgctaatcaggaagatcgtccctgggttaaatgcttacttgctaaatactgcaaacatgaaagcttttggagtgttaacccaaggagtagtgactcttttcaatggagatgcatcctggactctagacaaacaatccttaaaggttctatctcaattgcagcttcaggcaactcgataaatttctggcaccaaccatggattccatggctggaataccatgaattcacaaccctgatgcatgccttaagaagtagaggatacaccattaaaaccttgggagacatttctattgaaaatgcgtggaatgaggaagttattttgcagatctttggcattgaaatggggaatcgtatcatcaatatcccca

SEQ ID NO: 323941 - DNA, 876 bp, Cannabis indica
tttcaacaatcctttcagattgttactagtccacggggccacgcccagagataagattcacagtgaataatgggaatcaagactatcacattttgggtcggaatgatcgctagattaataaaaggaagatgaggcgctgcattgacatggacttcgaaatatcagtatttattaacttcaatctctcaaacatcctcaagtcagacttcctaaaccacgagaccaagtcttcgtaggaaaatagctcatccaaaggagcattctctacggagtctaactcgctttccttgccatcacatttgacctcacgagcaagaaacttgaagtcttcacccatctcctagacttcagcgtttggaatagctcatggatgaataaaacttccctgagtagatactgtggactcgcttcctcatatctctgtggtgactggtccttctaactcttaaacaatgagatttatctcaccagtggacaacgagccttcttgatcccttgtcacaggaacttcgtccttcgatagagatgtggggatgaaactatcgcttttttgagattcatctgcgaaagccccatctctagacacgtacatttggctgtcgaagaaatcgctcatttaaaagatagaagatctttttagtgtggtgcaagtgcaatttaaaataagaagtgtcctcacccgaacaccaaactattaagttcaacaaaagctacaaaactaatgtttgaacctcaaaaagtggttgggtgtatctcagtatcttaagggtcatgcaactacatgaacattaggtcactaagcagcaccccaccactttaaaattcaattagttctaatcgcaacttaatatataaaaatatgtatgcatataaaag

SEQ ID NO: 323942 - DNA, 1003 bp, Cannabis indica
tttttttttttttgaaaagtcttatatatttgttatagttgttatattgtgaattttatttttcacaaaaatacatagtgttgtttttgaaaaaaaaaaaaaaattctattttaatgttgttgatacataaaataacatgatttattttttctaataatataaagtattatttttctgttattttagaatactattattttgacattatagctataaaaaaacaatactatataaaaatatcaaaatgtaaaacaaaatattcacttttaaatgtattgtgtaaatttcactgacttatacaatataaatttgtatcgatggagaaaagtagtcaaaatatgtagtgattatttccacaatattgatgataattatatttccatcaaaaaaaaaattattgagaatgaactagacatgcaatatttaaaataaagatatttgtcattattggaaaatcaagaaattatagtaattgtttgttcaaaaagaaaaaaaaaatactataggaggagagactcgattctcaaattttgtagattatcattaggtcatttttgactacttcttctttattattattatttctaagtgagtctttgtttaatgatatggtaatctatgcatctagaaaatagctagagggtttaaattgagaaatcttatccggtcactttaaagtaggattattataagaggtgatatattattattaggataatttaatattttttaatttaataaataatataaaaaatcgttaactactcacaatacattactacatcaatatgatgttgagtattttagatgtctaataataatactcatttaaattaaaagctcatatctattatatataaaatagtggttatataacagaattaaagtttatgcaaaattattgggtgactttttttttaaataaaaaaataacaaattatataagagaaagcatagttagtacattaataataaatttgttcatattgtttattttttatt

SEQ ID NO: 323943 - DNA, 1434 bp, Cannabis indica
tgagggattacataagaccccttaaatatatatctccaaagatgtcaaacatttttatttttattatttttcttggagtaatgggctcgtttggaacgtcgtattaggttgtattgtattgtattatattaaattggattatgtatcatatttttatataatactatgttaaactttaatttatactaaaacattatatatttaagtgtccataaaagttaataccacacatagttttacataaaaatattgcataaaatacaattcaatataatacaatagaatacaatacgacctaatacaatgttccaaacgagcccatagtatactatttcaccaaattgatatgaaattttcataccgtttactattaatatgtgttggcaaattatatccaaatattacacactaatgtgacagttttagaacacaaagattccaatttaaataattgtgattaatttttaaaaatattattacattactacgtgtaaaatattcaagtgtaatataatttgtgaattcacatattcattattcaattttttatttatttatttgtgatcttgagctaagaaaggcgaggcttgagcttaaagttcacccaactcaaaactccaaaaaaaaaattcttttcaaatatatacaaatatttttttaaaataccatatatttttaaaataaaagacaacaattaatttttataatataataatggatttagtttgtttttatagaatataataaaatccttggtttatccaaaattttagggtattaagacttatccattgttaactccacgtaatttcgtcttatccttcacaacttttggagagttaagataggtattcacacattatatagtcattgtatttttattcttaattaatctctttccaaatttatgtacatagtagaactatggtttttttttaaaactctttatctgtttcagatttttttttaaacaaaataatttatttttagctaattgtaaatttttaaaaaaatttaaatcgtttacagtgataaaaataagatttaaacaataacttagcacacgtatacaaaaaaaacaatcgaacgtgaaattattatataaattttattttcagcattgtaaactattttaaatttactaaaaatttacaggtagtattaaataactatagcatacacaatcatgaaaaatagactaaaaaaccctcagtgatgtcaaaacaaataaaaaatctactaaaacatctatttaaaaaaaaaatgcggcataaatatctaagtttaacttctaattgcaaataaatacctaagtttattttttggcagtaataatacctaagttataattttagagcttttgtaggtactcagctattaaatgtaaattgttacgtggcaatccctgatcggtcaaagtcattaaatttttat

SEQ ID NO: 323944 - DNA, 1021 bp, Cannabis indica
atatttcaatattcagattcagtagaagtgatatcttattattcagatgtgcatccagattcaagggtctgaatcttaaaaaaaataaatgcacccttagtgggacaagatttatagataattagaatatcagagttatgcaggatatttggttgtgaccattttacctcttagcagattacttaaaagtgaaataaggatattattgtcttttctatctaagcttattttagaaaccattagtgaatttattagaagatgggtttttatttatatgctgaaatggattattttaattaatgtaggataagataaacataactaaaattaagtcattttctctctactaatttctcaccttcggccctagaagaaatcatgagcaattttacaattcaacaagaactttagcttgcaattcaaaaggttattagaatcaagatcaaaataagtcctaagttatactcttctctttgaaatttgtaagaaaagtttgggctttatgtgtgttttagtaaatttagttctgtgtgtatgtgaattagaaattgttttggggttggtttgaaattgtttgtagctatttttaaaaaagaaatagaaaatgtagtttgagttgggtgagttcgagttaagaactcaaacttagctcaacatggtagattttaattctaaggtttattgatgcatttaagctttgaaatatgtttagaacatgattatagggtgttctgaaaagtttgagtaagtttggggtagaaatgaggaagataaaatcgagttggtgaaatctgcacatcgtttctgaagaaacagttaaccattaattcaggcagaccctgggtaaacaattgcctatttggggatcctgttactcgtttggggtgatttttgggtaccctaatttttatgttttctcgatatgtaaggtattgtcacgctatttattgataaaaaagttcagattatgagttcaagtctcgaaagtttttttaacgagacacttaccagttttacgtta

SEQ ID NO: 323945 - DNA, 1236 bp, Cannabis indica
atgattaattaccgtagttttattactttaattcgatttatcaattcatttaattaatttcaagaattaattgataaactttaaacattgttgggttagtttgcaatgtttctttattttttgttaaccggtctgcaaatcaaaccgcacattatgtttgtagaaaattttgatggtttgctgatcgtatattttacaggagacttaatcccatctaatttattgtctatttttattgagtgattgccctacttaataaaaataattgttaaaaaaaaacactatatttcaatagaagtatttttttttttttttttttatagatattacattttattcgtttttattattatattattcttcctcctattttcattcaatcaacaaaatagaacataatcaaacaaataatattgctataagtttataacactagtaatccccaacattatctagaagtgattattacaattagttagcaaaattttataaaaattattatattaatttatataagacctgataattaattatactaataataatataatatcattaaagatattaggtattactgtaccttttaacatttctcttaaagaaagtatccaaaaattaatttcttagatgatattctaaaagcggcagtttttaaagtattgtttggtacataataaataaatacgtaaaggtacaaatgctgcctactgtcctctaaaatataagagtattgatactaggtatccgtagtactgctcaacactttttataggtggtactttacgattagtttacaatattttctaaaaattattttctaaaattatatgagactctatacttaattacactaatattgagtctcacataatttattataataacttttatgaaatgtcactaatcaatcctaaatactacctctaaatgctcaatatattataattgataaaagaaaaagaaagacagaaaaaagaataattagagaatatgaaacaaactaattgataattgatagtggggttaaccatgattcactacaagaaatgtcacttttgccagcacatttttgtgctagcaaaagttaatattgcgctggtaaaatagaatttacttgtgatgtgttggcaaaaagggattggcaaattaatgttggtattagaacttttgctagcataaaatgaaaagcgttggcaaagttaggttttagccactgcaaatgtacgctggtaaaac

SEQ ID NO: 323946 - DNA, 1052 bp, Cannabis indica
ccccccccccaatcagattgaacagatagtataggtgtattaaattccttttcaacttgagttctaaagttaatgaaggttggaagagcttcaaacttagcttttaaaagaaagacccaagtatatcgagaaaaggcatctataaagtgaacataatatctataaccagaggaagacagcatgggggagggaccccaaggatctgtgtgtatcaactgaaatggctgagtgtacacagtttcagattgtggaaatggaaatctgtgaatttttcccaaacagcaagcattgcaaaaatcagtgacaactttatttctatttggtatattacatttgctcattacagttgttacaaccttggcagaggggtgagctaacctcttatgccacaaagaaaaaggattacaattggaatcagaaaaaggagggacactagtattataaaggctatgcataacagtgggtggaaaatgatctgcagattttgacagatgcatttgggaagggtcaatgacatagagaccatgtttgagttgtccctcaagcagagtctccttcgaaacctgatctttgacataacaccgattaggaaagaattcaaaaaaggcattattatcgtgtgcaaactgagaaacagatatcagattttttgtgagatagggaacatgtaacatattatttaaaatgaattgtttggagtgataaggagagtgaaagagagaattaccaatgttttgaattggaaggccagcaccatcacccatattcacttgttccgaaccagtatagggctgtttctgagtgaaattggcaggatttggagtgcaatgtgtagtagcaccagaatcgggataccaggcttcatcagactcagtagcagtagtagcaacattaacggatggattgttcacattggcagctcctacaccaggaaaatccatgttgaacctttgttacgaattttatgtttattacgcaagtatacgcaatcaagtagtatctcacgcaagtgaggtcaaaccacagggaattggattaagtactactaaact

SEQ ID NO: 323947 - DNA, 801 bp, Cannabis indica
tctctctctctctctctctctctctctctctctctctctctctctctctctctcttccgtttttgtttttgtcaatctgctatcttatttattttccattcatataaatacaaaccttgttacgtttccaagaaaacaaagtcctatattgtatcgccgctctttgtttttcttttggttttgtatgcaaatactctggtctggtgtatgcagttccatttttcctcgatggtgttctaaggtttctttctaaattttagaacaatatatttctgggcagtgtctttggaatcattggttttggaattggactgcctcttggtctctttattgggctcttcttctttatttactccaagcccaagaaagttgaggtaatgtatataaatgtgtatatgtatatgtcatatgtcttcttaaaggagttcatataagtcatgaatatgtttgaaatggtaaactggttactttaccttttagtctttcaacatttatatctaaagttctacttttttcttaaggaacttagtattaaaaatttgttaaaggaaatggattggtatgagtagtattcaatattctgaccctcttataaaaattttctgttataattttgtgctcttgagaaacccttcctgtaataattctgtatcatgtgttctttataaggaattattctctatgagcatttcctctcttgttcacaccatctagagttgaattttgaatgcttagtcttattcttttttgtaaataagaaaaaggtattcatagatagtattgttgaatacttgaatacta

SEQ ID NO: 323948 - DNA, 504 bp, Cannabis indica
tatatacatatatattaattcacagccaaaaagaagaatttgtttaaataatgtatagtataatagtatttatagcattttttgtttgtcgtacgtcatatatttaagatatatattccacttataatattaattacatttaattttttttttttttgtatttattagtcaatcatctacatcgttaattagtaaataatgtaattttttttgcctctttaatttgtagttattctaatatttagtattattattcttttgtacagcagaattatgtagttataagaaacttaaaattattagagttagtttcaactgctagtgtgtagaaataaattatcatatatatataataaataaactattctttttattgtcaattaatttttcagataaaactctatctactttatctcaaattttaagaaaagtagctagatcgatgataacatgaataatatataatgaatttagatctttatatatttatataatatttttttt

SEQ ID NO: 323949 - DNA, 611 bp, Cannabis indica
atattcttttatttttaagtatattctgttaaaccaagaaataccgttagatagacacttttaatatataaagatatatatctctttccctcacaattcaatacttcatattttttccacccaattttttatgttattaaagtaatcaattagtaaaatttcttgaaagaagttggtgactctcactgctttcttaaaataatatgatattaaatctttctaataatctaaacaaagtggtggacttaagtggtagagcgttaattttttttttctgtggttcattaagtggagaaaatagaataattagagtgcatgtactaatacatgcctttttagaactaaagggatggaaattagattgaaatgacagtttcctttaaatggttgttttttattttttattattatttttttaaaaagcatacattgaaaaataaattacaaaaaaaattctatatgagatactcagttataaccaaataaattaccacacttgattaaaaatcaaaagctaattaggaacaccgtatatatattagagtattgttattagacattagtagtgcttaacatttttcagatatgtcgctttgtgattgactaacgat

SEQ ID NO: 323950 - DNA, 876 bp, Cannabis indica
taaatttttggtttaattaataaatttttttaattttttaagcatataaaatcaaaattcccatttaaaatataacacgtattaatagatttgagagggtccccaacattattcataatgcatgtggttaagagataatatattaatttagttgagagagaatccaagatatataattatattaatttatatatataatttgtattataattattagaccatgtaattaattaataattatagttgggaataaaattgaaagtgggggacaaagattggggaaaggaaagggacacgaggatgatagtacggacgtggtacccattatataatgtccattcatgctactaaaaaagatgttggaattctattccctatttatcacaacttggtaaaaagattttttagaattttaattattattcctatagaatcatttctatatattataatttatatcaaataaaacctaaatatttttgcttaaatatatggggaggaactcttttattttattgttattcataaagatcttgtgacacaatattacataatagcaactatattatttatttatttattttcaaaatggcaactaaattattataaagatattgtattttttttttttgttctttttaagtgcattctccaaaaggtgcaccaatataaaaattaaggttcaaacatataccactaacataaatagattgttttaactttatttttaatgtactaattttttaaattttttttaaacatttataagatgtctgaaataactacgatttatattatttgttagagagtcttacattactaaagtgtgaaaaaaagtagtagtacagtagaacctctatttaagaatactctatt

SEQ ID NO: 323951 - DNA, 889 bp, Cannabis indica
taagtgttctaacagtcaacatgactcgtcatcacctttttatacgcagcgaggttggtgcctcgctatgcattattgatgtcatccttatgattgtgtcttctaacgcgaaatgatttctcgtcaatgcgtgaatcaatagttcgtacatccttgtctcgcttaagactatacagtcaacgagttatagatatgttctattaactcttaatttaatgagttattccattttaatatgttttgatataattaccattatattcgttgacacgtgtcatcctctgaagtgccagtcgaatttcgtgtataacagatatatatattttaacaactgactttgtagaaatatatgtgtataataaataaattaatcaataattataatattttttttttgaaatgaaactttattaaacaacaccaacaaacttacaaagaattggagaggtcagccttacaaactatagctaaccaatccggaaaagaattgtaaaaagaatgggttaatttgttttcgaggcttctcttagctaagctatgagcacctacattatgaactctttttacatgaatgaactttgtacaagaagaaaaaccagggtgtctcttaatttgatttacaatcggctgagcagtaccaagaaagctgtcatttgttgagatatcatctaccaattgcttgcagtccgatctgatctcataagtgttgtgcatggtcttcggcctatcctgcagagcagcaacaacagcttttgctttagcaactattacagggcagcaaatagggagaaatttcatgtcagcagaaacaatgttgcctgaccaatcacgccaaatatagcccagccccacccctgcttggttcggttggatggctgcatcacagtga

SEQ ID NO: 323952 - DNA, 778 bp, Cannabis indica
gtctgattgaaacattcatctgatgcaatcttttgccaaccacccagcaaccttcgtctgatacaacattcggccgaccacccagcaatcttcgtctgattaaacctttgcctgatgcaactatcgcgcaaccaccctgctaccatcgtctgattgtgtaagtgatagtgtatattttggtaattaaaattacataaaaagtataaatattatccacaccttatggatgtatttttgtaaataaaatgtcaatttgtatttttcatgtaataattccttatgaaattatatgaaatacatatttaaaataatggaataactcttataatagataggaaataattgtaataaaataagatcactcgtcaatatatatagaacaataatatcatctacagttatgtagtcatcaaatagttagatttaataagtctaaaagtaccaaaataatacttcctcatccctaactattcatagatatttaaatgatatagaccatccattaataattagatacacattcaatctttaaaaggagagttaatcaataattaaataggactaagctaatcacattgttcttcatcaacgattctctctcatccacaaatatcaaactgtgtccttagaagggaaatagacatgggtgatcttataaagcttaataggaaaacaactaataatatcaaaggacaaggagttaataaaaatgcttgtatggttagctttcaaaaaaaaaacctctcaccatcatcgtcatgtatatatatatatatat

SEQ ID NO: 323953 - DNA, 1945 bp, Cannabis indica
agataacctgacgaaaaatataaatcgaaaaatctgacgaaaatataacccacccaatctttatattaggcaggttgaaaataataccgacccacttaatcaacctaactaacccaattaagaggatttatatatcatataattaatatgatgatttaaaaaatatcaagttgaaactaatatgtttcttttatagtgtttgatttgaaatttgaattcaatctatatatatttatttcattgttataattaacaaaatataataattgaatgtaaaaaaatattagtggttggtttagacaagttaacccaaccaaactaatcaatttcattggacatgttactattttcttttttctcaattggacaaaattacttaaaattttgtaaactgacatttatattaggttaaataaaaatgtagcaaaaacaattcagacagatccacatacacccctactaatatctataaaagaatacctctaattaaccgtaacgcaacatgtttaaaaaatattaatacctaatagcaatactcataaaaataaaagagtttagaattttttttctctctttggcaaaagtattgttacaaatctttataattttacatctttatcttttacatatacatttacatatattaaatatggttatctaaaaaatttatggttgaacgatttttttattattaaagttaacaattaaaattaacattattagagaatctattgctaaatataaattattttgtaaaaaatttactctaatagtgcgatgggctttgcttatccgattatgattatgtttcgaccatctgtctaatttttcacaataattaagattcatgaagtcagagaagtcaaattcacaacttcgcatttttcattcatgacatagaaaactcactcgaaaatgaaaagtttcgagtctctcatttcgcagaacagcaacatctccaaaaattagtatctagctttgccagagtacataaacaggctagtgatgtcgaaatatcacttagacaccttaaagtacgtcccttggacatttttactagggttgtccaacaaaatttacaaaccgcccaaatatgagtgacaataactctaagaaaaaaggacagaagacaacaaacattatctattagatttgaaaaataagataagtctgtatgtgaagaggccaaagcagaaaaaactcgtaaagcatccgtttctacttgtgctattatttgttgttaaaaagctcaattaagactatgaaaaagtgtttttgcttctattttatcacttctaaaatagccttgaactggtttggataatgtagcaactacctcccctttgtaatttcgaaacactgctcctatacccaatactttgtctgtagtgttgacaactgcatctacattcattttaagataattgacattcgacagcttccacggtatcccattcaatgaatttgtggtatgacctgcagtagtatatgttaaatattgttgctggttttgcagatcaggccgtgtgtaacactgttgggaaagacctgcaattgatgggtgttgctggtgtagtgcagcaggagctggagcacgattcaagagtagcataggttgttgttttcctatgcaactttgcttagttgaacgatatttatctagataggttatagcttgagttgtaagagcagaagcatcacaatttgttccaccatgaagcacactatttttgtcattccatatgctccacataaggtatattaaaagctcaaaatcaggcttatccatagttgttggctgttgctttgtgaattagataatatccattaaacataccatgagcatggacgactcttatggggtgcaagctgggctattgcacagggccccaaaaaataaagagcccccaaaaaaataaggagcttaatatatattttttttaat

SEQ ID NO: 323954 - DNA, 561 bp, Cannabis indica
tttttaaaaaaataccatatttagtgtaataagtttttatgccatatatatcaaaacttatctttattttcccatatttttgtaaatagcccacaatacaaactatctcaagcccacataggctaagggcttcaacaatacaaattatctcaagcccacataggctaagggcttcaacaatacaaactatctcttagctcttaagttgccaaaattatctacatcatctaaaatataattttttattttatttctctaccacactatctttagcaatattttttttataaaattgctctaatgttaatcgacaccataaattgtcaccaaatcccacatatcattaaaaaaaatattgttattatttttaaagttgcaatattttcttaaaaaaaagcacaattgcttgacaaaaacaaccatgcttcaattattaccatagctccaaaaggtccaatggatcggtaactaggcccgaagtataggcgggctaagcatatacttaaggcccacttaatttaggggcccaaaattttttccctttttaaaattatatatttt

SEQ ID NO: 323955 - DNA, 391 bp, Cannabis indica
taaaataatttccaacaggtcttccctgaccttgagacataagtgtcgagaacccatcaagaacccatcgaaaaaaatacaaacacatacatagtactctgaacaatgagatctcgcgatttcagcaaaatttatatattaaaaaaaccacatagatctaacgataatatactatattttttataattatttaacaaaatattttaaaaaatacttacccattaatgcaccatgagagggaggtagaggaggggcggcagttgggttgatgagagaaggttgggcggcccagtatccccatcggctgtaggcggcggagctaagggaggaaggcttttttttgaaaaaaaaaataaaagagaggccgctgatgctagagagagagagagag

SEQ ID NO: 323956 - DNA, 2064 bp, Cannabis indica
tgatacttagtatctttcagatggggctgagttgtggtctaaaccaagttatgaaaaacttaaaagtgaatattgatgccgcattgtttgacgatgagggaagccatggttttgatgggattattcgggatcaaaagggtcaggttgtggctgggccttccagcatatactgttctggtttgtcaagtcatagttagcatccacaaactcttttaactccaattctccttttgcattctaataggtcagaccataattctaagtgccatttacgtatcctaataaccatttgagggccttttagtgttcaatgcccatattggacatgaatcggcttaggattcttaaagcgtgagctatgtccagtctagtggtcaccatcgcatacattaaacatcctaagaccatagcatagggtacatccttcatttcttcttctccttcgaattgttcaaaaattgttccttcgacaaaatgaactgtccccctaaaaaaacagatgtactctttgtatcttccatgtttaacttttgaataactttattgatgtacccaaactgcttcaagccgaaagtcccctccttccagttccttgaaacttcaataccaagtatcttttgaactagtttaagctctttcatctcaaattttcttttaagcttgactttgatatttttgatcattgatttccttgcccatgatgagtataacatccacatagagcaatagaaacacagttgtagattgctccatgttcttaaaatataagcaatgaccatatgctgatcgtttgaacccaatttgttgtatacaagtatcaaatcatttattccattatcttggagactatttcaaatcatatagggacttgttaagcttgcaaattaactcaactcctttcccttcaacctgaaacccaagtggttgtttcaagtagatctcttcactcatgaatccatttagaaaggtagttttgacatcaagttgttcaacttcaaactccatttgagatgccaaagacaacatcaatcttatcatattgtactttaccacaggtgagaagattttagtgtagtctatttcttccacctgagtaaagcctttaaccaccaacctggctttaaactacactagttcattttcattgattcactctttcaccttaagaatccattttcactccacaatcttttgttctctgactttggtacaactacccaagtcttgttctccaagagttaatccatctcctcatccatggcctaaagccatttaacctaaaatgcctcttcgtagctttagggctctttaattttagtttgttgtattgctgccaatgcaaatgctattaagtatgcttccgtgaaccttgtcggagggtgaatatctcatctagttctatcttgtgtcaattgataaccttccagacctatctatccaagccctttcgaaacctctatttggttttcgttatcttctagctcagcattagctttcatttgcatactgtcttccggttctataaaagcttttgtctgtgaaccttcttctcgatgtttcgttccataatctatttccatgtgtgaaatgttcttttttttctattttttctacatcacatgaaaacacactacctttctcggatctcaagtaaggatattccaattcattaaaaataacatttctagcaatcacaatctttggtctacccttcttggaaatgtaaattatatactccttgttacctaaagcataacctagaaaagttcccttaacatatctaggttccaacttatcaatagattgatgtacatatgttgtacacccaaaagctcttaaatgcattaggtttggggttttgttgtactgcatttcataaggggttttaagcctataactcagtttgtgcttctgtttatatggtaggttgtagttgttagaccttccccccaaaattgttttctaatatgaaactgaacaataagcatctacctttattcaacaaggttcacttcatccttttaacaatgccattttgctctggggtcttcactacggttctat

SEQ ID NO: 323957 - DNA, 553 bp, Cannabis indica
tctaccaactccatttgtacatttgagccaatattgttaaaagcatgtctagaaaatagttgccaacaatcatcatcagacatagtttgaagatccagcacacataagtaatagtgtaggctattaggataaagtgtataaccttgttctttttgagttctcaacacatgagtaagaataactgagagaaaaattagtttcctttttatgtctatagatttcgaaatttcagtgcagaatgtgatgttctgatttctcaaattaagcttctatttatagtagttaaatctctttaattaaattattatttaattgtttaaataaatattggagaggatatcacatgggcttgtttaaatttaagaaaaaaacagtatacagtatataaaataggtagtaaaaaaataaatttaggcgtataacagtaaaattgtaaaaaaatgagaaaatagtaccgggtgtaaatttctcaaaaatttatgggataagttgaggaatacctttttttttttgtatccattaataaaaaatatcctcatattatattttatta

SEQ ID NO: 323958 - DNA, 1590 bp, Cannabis indica
tactcatgtgttgagaattaatcaagaataaattatatactttatcttaatagccacactattccttgtgtgtggtggaacgattgaaaagactacggtgtgagtttttaatcaactaaaaggataaatatacgagaagttttgagaataccataataatcatccagaggtatatatttttatcttttattttatgtttaaatttaatgtatacacatctggagatccattgggctacggtacaattataatcagataatatgaaatttttccgctacataccttatttagtactattaaaactaacaattggtatcagagcagtttcatgaatgtgtatacattaaatgttaagtgggttttttgaatttatatatatgatatgtatgtaaatggatggttatattattatgaatgtatgaaaggtgatgaatcactaattatatagtataatttggtataggtttcatttttattttttttctagaaaataatgttagtcattatggggcataggaatttttttatgtaattttaattttatgaaaattaatttatatgtaaaatatatacttatgtaatttacattgcatgtgagctcgattcttaaacttgaaatccagccatgcacgacaaaatcatatgcacgagagctcgggttcatggaggaaccctggccatgcacgatggccccaccatcttgggtaccgtgcacaagtaaggaagctcatgcattcattacatgcaaaagggacatgagtccctagccatgcatgaatgcatgaaccagttgggacacccttgctggagcgggctttgcttccatcttctattcttctttttttagttgtagaaaactcttttgtaatgtctaggcataccacattgaaaacatcctcgccctttacacttgtccagatgatgctttttataattgggacattccgggtatgtgtattgagttttagaaccaccctgacaattgccatgaccttagttccctcagaacctattattctgactcaaaccaccaaatgcagatggtgtctttctcttctgatcaatagttgagtcactattacccctaccataataaaaggtaggaggagcagtggctccaccaacaacctgtgtccctcaggactcctgaatacactcaactgcgcctttagctcttagtgcttttcccaccatattagcataggtggtattatcatctattgtaatcatcaggtcgtgtttgatcttgggattcaacccatccaaatacttttctttcttgctgaaataagttggcacaattaccgaggccaacctagccaacctatcgaactgagtagtatattctgtaatgaatatattctctttttgagtcagctgagtgaattcttttcattttgtactatggaatatctcgttgtagtatttcgtattaagtagttattgaagctcttcccatgtaatagcagtgacataccaagtaagagccaccatatcctaccactctctttttggatgggtaagagccaccatatcccatgtaatagtagtgacatcccaagtaagagccaccatatcccatcactcaaa

SEQ ID NO: 323959 - DNA, 815 bp, Cannabis indica
tctcatcaatcactagtgctatagcctatagttcatttcaaatatctataaagatgaagaattaagaagatatatatatatataggagagaaagaaagtctttatacatcgctctcatagtcattaatgtcacatatatattatccctgtttgtagttggtcccattacatatatttcttcatcaccttcctagataaggcttacaaaataccaaaaactacttgtgttgtaggccaatgagtgtctcagagtagaccaatgaaaattgaagagatgagctggggtttttgaaggcttgggagcaatgggtttttggaatctctcatgaatgccccattatatacacatgtatgagattcattttcttttataatcttttctttttggtcttttcagataaatacaaaaggattcagtgcaagctgctcaaaattaattcaattttttttttaattttagttatataagtgtgtctcacatttcttacccatatatcactaatgatatcagtacttagaatataaatacacacaaaaatttccacgcagtgttatcagatttttttagctaattatatttatcaaaactgagagctactgttttaaaaagcgcagacaataggtgtaatatttgagtacatgtattatatatatatttaagggtagatatcattactttataataaaactaaaattaaacactctacagtatttaaaaatttaaaaataaatttaagattgattaggtattttacaatttagatcttgaatggcttacataaattcaaattttacttttttacaaaaaaaaaaaa

SEQ ID NO: 323960 - DNA, 943 bp, Cannabis indica
actaattataaattatcattcttcaattgcgactaaaatgtctgtagctaaaagtattagtcacaaaaattaaaatttatcgtgactaaatgtatttttaatcacaatacttgttgtgactaatactaaattagtgacaacatgtatctaaatactatgtttagtcacaagtaactttttgttgtgactaaaaatcacatttagtcacattaatattgtgactaaaaaaaattatcactaaatataactattttttgtagtgtctccatatctctctccaatcaacgtaatggagactaccttgaactaattcttatattataatggctttgaaaagaaaggaaagaaaaaaaggtcaaaagaataaacaaacgtagatttgagtggacacctaaatgggaatacaaataaaattccacaaaacaaatattcaatatacaagaacaaataaaatgaaaatttaatgctaagaaaacgacaaaccgtatgataaaataacctattcaaacaaaagtagatcatcaatgaaatgagagcagcaattatatggaaatggatagagaactccaatgaacgtttgatgtttatgttgttgtggacggttgtgcacagagagaaaacagagagaggcggagcccttttcgtgtttgaagaagaagaaataaaacccatggaaattctctttcttgatgcgtactgttgcaacgactttcgaatcatcgcgatcgttgattgttctattcttgtgtgagaagaaatcgaccacggcggtagtggcccgactctcatcaaaagaaggcgttggcatcgttagggagagctaaaagctcgacgctagagaacatagatatctatatttatactagtaaacatctcgctcttcgctgtgtatataaaatattttaaattatatataaaaaataaattgtgtattttgattaat

SEQ ID NO: 323961 - DNA, 589 bp, Cannabis indica
ctactaaaaaaataaaaaaaaaaaaataaaaaaaaaaaaaaaaaaccaaatcaatctataataattgtgaagcacaagtacacttatcctattttcgtaaccgttcatactttgttcattttttccccaaaagattacaagatatggctgcacatataaatataatatacatgcaaaaagaaaagaaaagtttaatctcctttattttatttctaccctttataataatctttaatttgaagttactttctttagggtaggctagctattagagcacacatgcatgttctccaccaatggagtgttttcccatttgggtgtgcattataatcgagcttgactataatgtttaccaaataagattatatatccaccaataatatatatttaatatatatatatatataataaatattacggaaaaaacttagtgacaatttatttaggtataatatacatattttgtgactaaatattacttttagttacaacaaaaagttacttatgattaaaatatagtatttaaatacaagttgtcactaatttagttctagtcaagaattatgactaaaaacatatttagttacaa

SEQ ID NO: 323962 - DNA, 1124 bp, Cannabis indica
aaatattaccattaaatatcaacggaaagattattgtacgcacatgtgtatatataacagtaaaatctcgaaactaatatagtagtaattctgttgttatttaacattaatatttaattaaaaccttaaattcgcaaaaaaaaataaacttaagcagattttgtcacaatgtcaacaaaaaaaaaaaaattaaaacataaaaaaaatttgccacaaatttttctttaaattacgagatttgataattatatcacactaataataatataagatggtaattttttagctattctttaacacaaatgtatatgaaagtgcattgttatacacttatttatttatttgtatatgttgatatacattagtgaaattaaagtaaaatttcaattgttattacaacaacaactcatgtcagaaaccctttgccctagacatgcaccacctttagaatagcctttgctaatacaatcactattgcagctgtttgaacatggacccaagcaaattactggcaagtttattgcttccgctggccctgttcattgtaattaaattaatatataataaactcaattgttaaaaaaatatatagatagatatataggaattaggtaattaccagctgaggctaaaagcaatgcaatgcagagaaaacccataagagtgatacctttagaagaaaccatctctattaatttctcttgcttgatatgatatgatatgatatgatatgatattatttgttcttatatatatctttatgaaataatcaataaataaaaaagttgacctttttttcttaatgcagattttggattttgtttctatatatctatattatttttttttcttattattatggtaacgtggatctgacttttaaagacatgtatcctatatcataatcctagctatacacccagtgatgaaagttaaattttgatcagatctcttttcattgaattttttttttttttgggaagaaatctctcttcattcattaaattggattttttttttagaaaaaatgaaattagattttttcatatataaacatatataacatatttgaatggattgagctatatatagcatttgagtattcaatggttaaaaatgtaatc

SEQ ID NO: 323963 - DNA, 1480 bp, Cannabis indica
ctctctcgagtcttctctatgatcgttcaagaatagagacaaaggacccttggttcttcagatttgtcctctcttgcatcctcagttcgcccatcttcttccactcctaatcctaaatcaaagaaaccaaggccctcctgcactaattgtggtaaaccaggacattatgtggacaaatgctattttctccatggatttccaccatgttatggtgacaaaaagaagttttaaaaaggcaaggctactgccaacaaaactactacgagttccaaaccagaaaacaccagcagtaccactcaaggtgacctttcttctcaatgtcagcaacttatctccttactcagccaacaattgagccaaggaccaactagggatgaccccaatcatgttcttacggcttccaacatggttggtaagcgttttttacttcaaaacttgtcatggataattgatagtggagccacacattacataagctccaccaagtcttgtttttccaactttactaatgatatttttccatttaaagtgcttcttcctaatggcactaacatccctgtccatggaataggtactgttaaaattaacaagcacttaaccattcataaagtgctatatgtacctacattcaacataaacttgttttctattcctactttccttcacaacaccactaacatggtgtctttcaaccataatttatgtattttgcaggctcattctccgagtgtgttgattgggacagctagaagacttgggaaactctatgtcattctccaagattcatttccactagctagttctactagttctttgtaccaataacggagaccattggcaaaaacgccttggccattcctcaatgtacatttctcaaaatttcaataaaaagcatgaatttggttctaataactccaagaatcacttgtgtcatatttgtcatcttgcaaaacaaaaaaggttaccctttatatccaataacaactttgttgacaacatattcgatcttattcacatggatatttggggaccatttaacgtaataagtattgaaggttataaatactttcttacaattgtcgatgacaaatcccgattcacatggacattcatgcttaaaaacaaatccgatgtacataatataatacctatgttgtataatatggcatgcacgcaatactcaaaacctatcaaagccattagatcggacaatgccaaataattaaatatgcaaggcttttatgcctctaaaggcattattcattaccattcatgcgttgaaagaccccaacaaaactcagttgtggaaagaaaacatcaacatattctaaacattactagagctttatgcttccaatctcatttaccactcccttattggtcttatctcattcacactgctacctacttaatgaatagaatgttggaattattttacgaggatctagatttactaccatgtatgttatttaatatccta

SEQ ID NO: 323964 - DNA, 801 bp, Cannabis indica
agaggttgtggagaaagaagctgcgatgatcgccaaagttccaaatgaagacaatccttctgatatgataaccaaggtagtgccaaatagtaagtttgagcattgcctgaagctggttagagttagctgagccttgaggggctgaggagacaatagcatttaaaataatgattaatcaagcaactttaacttgaaaccaaggtggatattttttggttgtggttataatttttgtgatccatgatggaagttgttaatctggggtgtagataccagaagcttagtgttgatctgaaaagccttgtgcagaaggtcttgtagaatctggaaggtctttccaaataagattgtaccacgtatggaatgtctctctcggataacttgttattaatttggaggtacactcctgaatagcttactatcaatcttgaaggtccatatggtaatgaagctatgtacgtatctagaaggcttgtgtgtttataaagcttctagcttgttcgtactgaaagcgtgtttttcaagatgatgtgtattatttttgctggtgatgagttggatcatttaaggcgctgtaaatgtgccattatgatttgggagataattttagcaacaatgcaaatctataaataactttaaatctttgtaacctatgtgtgaatcaggcaagatttgcttgagtgaaaatcgtgatagtgtaaggttgagaaagagagtctaaactagagagagaaacttctcctcgtaatctctgagagtttgtgaggattcttgtaaccttgtaaatactgatatcaataa

SEQ ID NO: 323965 - DNA, 897 bp, Cannabis indica
ataagacagcctggcagaggtcatttccagctgaatcccaatttttttggaaaaaggtggggttcaagccgtcaggaccgggggctttgtctccagcaagttggaaaagggcagctttgacttcggctaaagtgaagggggaagaaagaaaagcatgctgttggggagaaaggtgtttaggaagacccgtcatagcaaaggccatcgcctcagtattagagccttgggaagtgaaaagattagaatagaaattaacaaaagaggtcgtgatgtcattaagagtggtgatttgggaattgtcatccaaggtgagagttttaatgaagttggttcgttttctggaagtggctcgattgtggaaataacgggtattcttatcaccagccttgagccaatttgctctagatcgctgcttccaaaaaatttcttctttgagcaaaatattgtccaaggtacgttggagatcattcgcttctttagcagccgaatgggaaatggttgggccagccagaaggagttcaatattagattggagtcgtttgatgttgcgagaaaattggtttttgtcacgaccccaagaggagagagaattagagcaattttgctgcttggaaaggaaagaaataatagggttggtggagctggcaacggtggacacatgattaaaatatacaatatttagtaatatttttagtttgtggcaataattatagtaattttaatgatacataactacaaagtaaataacggtgcacttggagttaatatattaaaaaattatatcatacattatttttttaacctttttcttaaaaaaaaagattgtaatttaagttgcttccataatttttatcaaaatacacaaaaaaatattttaaaatataaatatatataaaa

SEQ ID NO: 323966 - DNA, 1027 bp, Cannabis indica
agagtcataagctgctcacttggggggcaactatacccgtacaaagcatagataaataagaagctaaaaaaaaacacaacattttccatgtgcaattattcaaacttgagggaaaatattcatttcaaaagataacaaaccacgggaaacttgggattaaaggataccctgtcaactagttgtcataaaacaaaatgtagtattaccaagtttcaaggttgcttggtcggtcacattgcattgaaaaattgcccatgggccaaaataaaataaataaaaaaaaagaaacacttcacacggttagagtccttggctctttatatgggtcaactatatcttcaatcgccgaggtgtctgtgcttttatcggttggagctttcagattggttgcctcagattctttcttgtctttttcggctgcacaaaaactaagatatgcctccttgtttgcattgaggtaatcaatgtttgcatctggtttggccttccaaaattcatagaagacctccaaggcgaccatatccaagttgttcacctcagagagaaattgattttgttattgatttggcacctggagcagaaccgatttctaaggccccctacagaatggctctagtagaacttaaagaagtgaaaattcaactccaggggagctacggtactatttgttaagaagaaagatgggtctttgcgaatgtccattgactatcaggaattgaataagttaacagtcaagaataaatatcctttacctaggattgaagatctttttgatcaactttaggggaagacggtcttttcaaagattgatctccaattgagctattatcagttgagaatccgagaggaggacatcccaaagacggctttctgcactaggtatggacattatgaatttctagttatgtctttttgactaaccaatgatcccgcagctttaatggatctgatgaatagggcatttaaggatatcctcgatatttgtgttattgtatttatcgatgacatccttgtgtactctcaatca

SEQ ID NO: 323967 - DNA, 1251 bp, Cannabis indica
aatgtgagttccagctaaaacgtttattcacctcacctatattttccagtttcgatttttttttttaatctccaattcgacatcaacccacaaaaaaaagatgaactcataaaaaacgaaattaactacaaaaaacgacaatcatatagagttcaagaaaaacgaacattaaatataaaaaaacgaggtaaaaatagttgttttataacgacacaaatttaagaaacgacataaaaaacgacataaagatagctggtttaagaaaacgacacaaatctgaaaaaacggcataaacaacaaaaaacgacatcaaaagagtttaagaaaaacgacactgattttgaaaaacgacgtaaaatagttgtttaagaaaacgacacaaatataagaaacgacataaacaataaaaaacgacataaagatagcttttaagaaaaggacagaaatctgagaaaacgacataaacaacaaaaaacgacagcaaaagaataagaaaaacgacataaaaatagttgtgtaagaaaacgacacaaatttaagaaacgacataaactatcaaaaaacgacataaagatagctgttgaggaaaacgacacatgaaaaacgacataaacaacaaaaaacgacatcaaaagagttaaaaaaaacgacataaaaatagttgtttgagaaaacgacacaaatttaagaaacgacataatctaattaaaaaacgacataaagatagatgtttaagaaaacgacagaaatctgaaaaaacgacatcaaaactagccctaaagaaaacgacactaattttgaaaaacaacattaactttaaaaacgacataaaaatatattatttgtttaagaaaacgacacaaatttgaaaaacgacattatccataaaaaaacgacataaaaaatagctgtttaacgacactaattttcaaaacgacatgaactattataaaaaacgacataaaactgtagctctttaaacgacacaaattttaaaaacgacattaactacaaaaaacgacattaactacaaaaaacgacatcaaaacaatagctctctaagaaaacgacacaaattaaaaaacgacattattgaggaaaacgaccaaatcataaaaacgacaataactacaaaaacgataataaatgtaaacaacgacatgtattacaaaacagctgctcttttaagaaaacgatacagaacataatcgcaatatatattttttttctaatgatgtctaaaacaacagt

SEQ ID NO: 323968 - DNA, 2130 bp, Cannabis indica
atgatctgtttgatcaattgcagggaaagaccgtcttctctaagatcaatcttcgaactagttatcaccaattgagaattcgagaggaggatgttaccaagacaccttttcatacctggtaggacactatgaattcctcgtgatgtctttcgaattaacaaatgctccggcagtatttgtggatttaatgaacggagtgtttaaggactttttagatgattttgtaattgtcttcatcgatgacattctaatcttttcggatttagaagaggcacataagaaatatcttcggatggcactgcaacgtctccacgagcataagttatatgctaaattcaagaaatgtaaattttggcggccttaagcaagcttcttagggcatgtggtgaataaagatatgtatcttggtagatccggtaaagattgaagcggttcgggattggcctcaacccaagtctgcaactgaagttagaagtttcttaggattaccaagatactgcagaaggttcgttgaagggtttgctaagatttctacacccttaacagagttaactcgaaagaactgtaagtttatttggactgacaagtgcgaaagtagtttctaagaattcaagtagaggttaattactgcaccagtgctaacactgcagtcaatgatgagaaattcgtgatttactaatgcttctaaacaaggtttaggttgcgttttgatgcagtctggaaaagttattgcctatgcacctaggtaatcaaaagaatttgaacagcggtaccccacacacgatttggaattggcagctatagtttttgctttgaaagtttggtgccattacctgtatggcgaaaagtgcaaaatctatacggatcacaaaagcctcaaatactttttcactcagaatgatttgaatatgaggcagcaacgatggttataactggttaagaactatgacagtgagattctctaccaccttggaaaagaaaatatggtagcgaatgctctaagtcaaaaaggtctggggcaagtttatgaattgaagaagatctcaccaaaattggctaaggatatgactagagcaaagattgagtttgtagttggaaaactagccaatattacgttacagtctgatttgttagaaagaatcaagacagcctaacaaagtgatccaaaattacaagagtataaagaaaatcttgaagccagggcagcaaaagacttcttaatttcatcagatggattattatgatataagggcaaggtttgtgtgccagctaacgaaggtatcagacatgagattctagatgagtctcataccacaccatattccttacatccagggacaactaagatgtatcaggatgtgaaatcattgtattggtggacaggtatgaaaagtgtcatggtggagtatgtgtcaaaatgcctaacttgtcagcaggtcaaggtagagcatcagagaccagcaggtttacttcaatctctgaagattcttgagtgaaaataggaagaaataactatggactttgtggttgcattaccaagaacagtagggttctatgattctatatctaggtaattgtggattgatatataaatttagctcactttttaccagtgtggactatgtatatggtggatcagtacgctcatctatatgtcaaggagatagttagacttcatggtgctccaaagttgatcgtttccgatcgagatccaaagtttacatccaagttctgggagagtttgcaacgagcaatgggtaccaaattaaattttagtacaacttttcatcctcagatcgatggtcagtcgaagagaactattcagatacttgaggatatgttatgggcgtgttttctagactttgaaggctcctggaataagtaccttcctctaatcgaattttcgtataataatatttatcagagtgccattggtatggcaccgtaccaaatgctttatgggagaaaatatcgttcatccattcaatgggatgaagccagtgaacggaggtatcttggacctaatccagtgaaaagaatgagtgaggccattgaaaagattcgagttcgtattcttgcctcacagagtagacagaaaagttacaatgatccgaagcgtagagatattga

SEQ ID NO: 323969 - DNA, 2085 bp, Cannabis indica
cttgggactcacacaggtgatcgaaagatcattgtggatttgtcaaataaaacctttaaagatgaattcttttggacgaccgctctctccccaattggcacaaccactttccacataatacgtaagtgattatttgcacaagacttggttacattagtccatgtcttttattcaggtttacttgattgtaattttgcttttcttttggcaactgtctcgaaaagagctgcccctactcctgaaatgggcaagggacacagactcctattgggtctcccatacggtcttaggtcatctgagttcctcttgagcgaggtcaacttgaggtctgtgggtctccttactaacaaggagtttacttgcaattataaatatccaatgtattcttcttggcagtaggctcctgtcccagccgatgaagaagctcaggatcgcacggcttgggcacaatacctccagaatactgtcccttagaaagccgaagaaggagcatcccgaggtaatcaatgtggtttgtcacccacagtgattagcgctaagcgtaacactctagttttatttcgagatagccgctataacttttatacttggaatcccctcctcgtagatcgcattacacataggtttaatagttggtatcccaggttccacgttcaaattagctatactgagttgtactataggatagccgagcagtacgggaccatgatggataaggcaagtcacttagacgcgagctgagatttagaagtaatttatccctgtgatatattcaggatcacgggttgtagggattttagtggatattatagtccttatacctcgtcttctagtgattatggtaaattcattagccaggaaattatgccacaatctccccttttacttgtttttcaataaatgctaacacttaagcctcataggtttctttttgtcttaagaatgcatccacatcctccataattttattgaaaccatttaaagcaattatatatgcttcttcatattctgctgactttgttgatacttgtgtttgccttctatacaagtttttataacgcaatcccaatctagccttaggatcctcataattgatagacttcaatgtgtctactttaataccaacctttgcatgtttggtccacctttgtaaaacatatctattaggtatttttgaaatattctttgtataaagaactttcaaagcatgtgcaatcaacaaaaaaatattcaatcgtatactcaattgactttccatgaggagtgacttggtattttgtcaatattatcgtttcatcacaaatatacaaagcacaatcataagctttgcataccttaacttgaaacaatttgaatatcgttggtgttgtatatctttgctgcatgtttcagtatttcagtaggaaatgacaatgacaagttactatgagatgtcctaaaatcagcttgtagctctttataacgacgatcatttataagcctatcaaaatgttgaaaaaatcatagtagatcatgcttacagctaacataattttttataacattattcatactttcagaccttttgagtagttgtcacctctgcacaaaaagtctctctaccgtataccaaagcccatttttcttttacagcaaacatgcgcctcaatcaatcattatcttcaaagttatacttctagagcatctcattccaagcttgtaagaatgcttcttcatcttcataatcatatgtgcatctactaaaatctttagagaactctcaaaatttttcaaaaacgctactcaaatgttttacagcattttgatataaatgtcatatacatagacgatgatgcgtttctgaacatttaacagccaatgcttttgccattgccgcatcttaattcgtaagaataatttttggtttttttcagacattgtattagaaaatgtatcaaacaaccacatgaatgattcagcagattcatcataaagtagtgcaactccaaaaatagtagtttgcttatgatgattcacccaaagaaacatggcaaaaggttgaccttctttatttttcttgtaggtagtgtcaaatgaaacaacatc

SEQ ID NO: 323970 - DNA, 977 bp, Cannabis indica
taataaatatttcttattcacaactttctatatatataatttaatagcacatttcaatttttttattgacaccaaatagtaagatatataatatttttattgaccaaatttttacaaactatgtttagaaaaatactaatggtaaaattaaaaataaaatatagatataagcctataaggttatgttaattaatgagaagttagcacatataaaaaaattttagtttactaaattcaatcttattattccccaaatctataattaatctcattttattactcctcgaatttgtaaattaccgaaacgcatgcatattttactaattaatatgtatcaaagttataaatatgaatgtttcaaaagtataaataatcatttctaaccttgctgaaatttttatcttcctgtgcgctttaccgaaaactaaaattaatcggttattacaattatttttatattgcagtaatttcaaattgaaataataatataaaatatataattaattgtatataatatagtatatatatagtgcaaactccaaagtgaattattaataataataataattataatcttatatgaaggcttgctcccttataagtgatcctaattatattatgctaagatttttatttttatttttatttttggtgtgtgttagaactagcagacaacaacattccagatcttaactccataattataaataacccattgtttactttattctttgtgtcattggttgcttaagaattacagtttttttttccttctcttactttaatttccttttaatattctctgcctttcatgataaatgtactaatgagaacaagaaatccagatccaaaggtagaaaaagaaaaaaaagaaaataataaatcccatcaccacaagcccttgtaagaagaattattctttatttttttaatatattatatatgtaatactatgtttaatttttttttttcttttt

SEQ ID NO: 323971 - DNA, 776 bp, Cannabis indica
gtgtcaccatttatgcgatgccacgttagagtgcaaaaattgggataacaactagtatcatggatgtgtcccttgagttttcatcagttaaagggccaaaaactgaaggtaccacgggcgtggcacacatgcgacacctttaatgcatttgttgataacacgtgcgtgtagggggcacatctcttagaaaaacttgtaatgatggtaggtcaattgaaatgacctctctttaatgcatacggtactcgaggcgggcaatgatgaaaaatgaacgccatgagtaagttttaaatgccatcttttccacttcccgtccatcagatcaaagtgtgctttttggagagaagatttgggccattcatttcaaatttcatggacttggccaaagtataaatagactcttcaaaaccactttcttctttcttaccacattagacttttaaaacctccattttcaaacattagactagagctttttattctagaaaaacctttaaccttccatctctggtgaatgcaagaagtttatgactacttaattcagtatttctttaatctccattcagccttccttccaaacacagagttgttagaccttaaattgatccatcccatgtctatcaaggactttgacactcaggccagccttgaccgcgtaatcaactggtttcaccactcttggaaatatttccacgacaacctctcattccccactcaaataccaagtaagtatcctgacgctttgttaaatatttgctattttgtatctaggatag

SEQ ID NO: 323972 - DNA, 1179 bp, Cannabis indica
acaacaataaaaacttaacactattttagaaaaaaaaaacacagtaattttaaaaaaatattgccccacactacaaaagtaaaaatattaaaaattttagtatatggtgtaattattccaatcaatcaaagtagttgcaagcaataattaatattatacacaatacattaatgtcatactctatattataaattttctaattaataattagtaaatgggatgcacgttgagaatagtggccttccactttccacaattcccttctactctagtctaatctagtctaatctatatatatatatgtatgcataattttggttcctctcaaaaaatcacttagacaaactaataatagctgtgaaagtcataattatggtatctgtagtagcgttatggatagtcgcagcatcagttataatgggtcaagtttggggagaccaaaccatacaagaaatacgtgtaactgggaaagtgctatgccaagactgtaatcgtccctggagcgaatgggttaaaggtgccaagccaattaaaggtacttatttatttatacaaacatttattttattttctcaatataaaaaagaaaatgattgttcattaatgatggtttttctttttgttttgtgtattgttaaattaggtgggattgtatcgataacatgtatggatgagagaagaagagtagtgcattattccagcgattcgacagatgagttgggtggatttgagttgaacataaattcagaagtttgtgagaataagaagctgaacccaaagctttgtagggctcgattggtgtcctcaccagactatgattgtaacattatgactaattttgggaatggacacacaggtgtgactctctcatggcccacttctactttccaaaactctcttggatacacacttgaaccattctacttcaccacccaaacatgtcaaaaaccacaacaagaggaacaagatagtgtctatcatgataataataacaatgaccattactagtacccaacttattttgtagtttttccttcctccaactggttcataaccattataataatatttggtattggattttttttttcttgaaaaattattattgtggaaaaggtaaatactattttgaacatgtaattttttattctaaaaattattaattggacattttatttt

SEQ ID NO: 323973 - DNA, 839 bp, Cannabis indica
aaagagttatgcagattcgaagcgcagaagtgtaaaattttaggtaggagatcatgtattcttacgaatgtcttcaattaagttttcatttcaaaaccaattgcttatgagatgcgtagattataaatcttatatattcaatattctttccacacaattgattcttttgattttactttttagatggatgtttagatttttttttgtagctcgttttggctcattatctttaaattctttttgacttttggacttttggtgctaatttttagatcaaatctttggagatttttatttttattctgataatatatattaaaattataagatacataaaattttatttcaaaattgaaatttatgatgaaaaaaataactcatcaaacttatatattttttctcacaaatagacaatataacgtgtaagatattatatataatattaattatataaaaaaaaaaagtttgtgaaaacaaaagatggaaccgatatatttgactgcttcaaaagaggggatatcaaaattcttggccactccgcgtggtaaagtctataaacctaagaacctatttaatttattatggcgttgcccaataattaactttattatttcccttcatttcacgtaacaatatttatatatattattattattatgatcatcatcattaattttcttataattattctcgatgatgacgtcattccatcctcatccttagtttgtctctaattaggaataataaaaaaacgagcaatttgcggcgaaacccccttatgttttgatttttatacacttaacccccttatctttatttttggtggcaaaaccccctta

SEQ ID NO: 323974 - DNA, 860 bp, Cannabis indica
taaattatccaaccactagtgtctgcaggacaagagttttatcgagttgccattttagctttaattggtccaatttgtgcaagatgatgctaaaatatcaaatccaagtttatatgatttgacaaagttattagtctaaccctttcacctatacatgtcaattgttcgatgggtgagatttgaacattttactagagttagcatcactaattgtactaacattctccaatatcactatttctcatttatgagccttactaatgaggaaactatattgtttgtactcacaaatggcaaccaattgctcatctttaactggagaattaattgtaatattccttcaattagaatactagaggaccaaaaacggttcgaaaatcagttaattagcttctttcttaagtgttttgcaataacttttctgttaagtcagttggtctttttctgttgtaatcaagttgtattcttccctctataaataaagatcattgccaatcatatttaagttgagcaattcttttgcttccatctctctctctctctttcaaagtttttcattttaatctaactttgcaaaactagagttcctcacatgctatcagagccatgtttgattctagagttgattcaccggagcaagaacgagtgcagcagcaatagaataagcaagaacgaacaatcttcttgtattctaacatcccccttaagttacacatgccaaaatcatgtgttaacttgtccttgaagtgaaaaaaaggagtgcagctaatgatttgtaagatgtcagcaagctgatgtgaagtttcaacatatctagcattattcagttcttgagctagaactttatctctctctctctc

SEQ ID NO: 323975 - DNA, 723 bp, Cannabis indica
actataaggtttctcatactttatatgtgtttattacatatcattttagaagttcatatttaggatgttaaacaacatacttgtgagtagatctaagatcctggcaaaataattccaacatattcatcatgaattgtgccttttgcgatgctgagcgagccactgatctagatgatcgttgctccacttctggtttcaccatcgatctatgtgataatcttgttgcttggcagtgcaaaaagcaacacaccatctctcgatcaagtactgaagttgagtattcatgtcttgcaagcacagtggttgagataacatggattcactccttattcttggaacttcatatcaagcttcctaagcctccataatttggtgtgataatcttagcactgttcttctcacatcaaacccgattcttcacgcacgaactgtacatagaataagatcttactttgtgtgagaaaagattctacaacaacttgttcaagtcaaacatctcccagctctcaatccactagctgatggacttacaaaggcaatctccactccatggtttcctctgttttgatctaagcctacaattgaagacatctcagctgctacagatgctaaccttgatcaggagtcgtgttaggatattaagttagttagttagttgcaatatttgttaggacaactatcctgtcactactacaaaaactccctttagaggcggtttttaag

SEQ ID NO: 323976 - DNA, 1638 bp, Cannabis indica
taataaaccaatataaaaaaataccacaattatacaaaatcaaaaaccaattcatcaaaaatctatacaaaaaatctctttttctcattaaaaaacaaaaatctatacagaatcaacaaacaaaatgagtaaacattaataaaaaaaattatatatcatttgaactaaataataaaccttagaacaataaaagaaatggacacaaacaacatacaatttaaatcaaaactaaaatctctaaatctatatataaaaaaaaactacaaatgaattgcccaatatcaaaccctaaaaaccttaaatcggaggtgcaaaagggatggtcgttgttcgtcgaggcctgtgaatggccaccggtgactactctatctgtatgttgagacctctgctctactcgtcgcttgggaatttaggtgtgtcgagcaccgtgatgtggtccatttggaccatcgtcgttcacctagtaatgtcgctgatcaatagtagagggaacgagagatgggaaagaggttaagggcttcggtgtttactgggacagagcttgaagattgtagatggccagaacatggctggaagaggtaaagagagatggtcggaggttgagggctctaacaccgcaccaaactggggagagagagatagagatcgttagagatgtataaatggaattttagggtttctattctaacatatcccttttatacctctttttagtgttttctaatttcttttaataaataaatttagaaagagaaatagggtatataatagcctatgtaaatgggttcaatgggaatttaggttttcttttaattatttttttaagtttttttattatgtttttagtgattcggatagtgtgactctacactttcagagttgcgcagtggacatcactatatatttatatttttaaaaaatatagataaataattaaacttttagtgacacttcacaatttttagtgacccacattgtgccctaaataaaactttatttcaatgtaatcttttatatttatttatcaataaagaaacaaatatatttcattacttatttaatgtgttatttggttcatgtgatcacttatttgatttatgaattcatccaaatccttatcacattgatattcttgtgcattgtgttttcaacacgtacagtggaaagtaatcaagaatgtgtgattaaatgcattcctatgatttatcagtacacagggtttaactgatagaataatctacaatgtagtttacttgtatcttggataagtgttatgttctttttagggcattggttaaagtaattgttgaccgaggttttcggcaaccaataaaataatattagattagagaactgtaagaaaattagagaaggatttttaacggggtggggcgttaatgagccttagtccacgagtctgtgttatttatggatgtattaaatacagagaatgttcttggtgagtatttactcttcttgcacttatgcaacccaagatttttcgaccccatttaatgagctttgagggggtatttatagtgtttttggtggggtgatccccacaattattgtacatgtgtatctgtcaatatccataaagatggatattcccaatgaatataccatgagtaatgcatg

SEQ ID NO: 323977 - DNA, 1655 bp, Cannabis indica
cccaatagttttgaccgtccgtctagtttttcacaaatacaatgatttatgaattcacaaaaattgaatctacaactttgcatttctcatttccaacacacccaaaaatgaagagttttgagtctctcatttctacaaaataacatctccaagaactactgaccagctttgccagaacatataaatggactgagtggtaaaaaaaatttcacttaggcatcttaaaggacatcccttagatgtttctacacttacccaacatctaggttgacatcagatgtcaacttgggtgctgggatgtcaacctaggcgctagatgtcaacatgggcactaggacctaaactgactttagtaaaacaaccataactaactcaatttttatctgattgatgtgattcaacttgatttttgaagctattctaaagctaccgtggaaaaagttcaccccaagggagttatgaaaataagcttcaagtaaactgcagtaggacctgccgggcaccaaatattggccttcatcgccaaaagctaatttaactgttagaccatcatcaacgatggaaaacaacttatttgtattttcttcctatttttgtgggcctccttcacctataacaagagagctcccttagcttatttttcacatttagaaaactacccacaaggtcagagcttctctctagacattctctctctagagtttagagtttctgatacttaatctattgttgtaattaccatctcatgagaaataaaatctcaaagtagatgtagccttattactatggagatatagggagtgaactactatatattggttgtgtttgttttacaatacttatctactttgtcattctcactaatctagcgagcaggtgtggcttagaaatctagtaatacatctaagtcaatagtttaacactagctggaccccagggtgattgaagtatgaacaaaacatcattagtatcaatactagttttgaagggttcaaagatgataaattcatcttggtgactcaagctaaccaagttttctacattcatgatcccaaaaataaatcttactggaaagtaatccaagaaattcatcatcaaaatgtgtgggatattccatcaattgaagaatatttggaggatacttagatgttatgcatggtacaacttcatcttatttctaattatttattgatcttggtctattagtagaaatcaactttcaacgtataggggctccaattgagtttgtggatatagataataatccactcgagcaggaggacatggatgaagtggaagagtaagaaatggatgaggtagagaaggaagacatggaagaagtaatggacgaagacaaagaagaagcagaggaggaagatgtatgtgacaatcagcacaaccctaaatttgataatttaaaagaaacttataatgatgatgattattatagtgatgaataagtggtaatttattatatatattgttaattggtattttaatacattgtggatattaatatcattataatgcttggttgtattttcctttattacattgatttaatttctcattcttttagtcatatttttgtataaataggggttccccccattagaataaataattgagaaatttttattcagtttctctttctc

SEQ ID NO: 323978 - DNA, 780 bp, Cannabis indica
aaggaaatgggagcccaatagatgaaagtacacaatgattcccagcttgtggcaaatcaaatttctagtgagtaccagacaaagggttaaaaaatggctatatatgtcatgatgtcgcaggaactgttgcaagggttcaaaagttacaacgtctgataggttcagagagaataaaattcgttcgtggacatgttagccaaacttgcaacggaccctaagatcatccaacacggagtagtcctaatttgtcacttgtagaaaccaagaattgaggtccatggggtaaatataatagttgaaaagtctcactcttggatggcagccatttataatttcctaaattcaaaagagcttcccgcgaataaggttgcttctaggaaggtttagtatcaagctccccgttacatgatcattgatgggaagctttatcgttgaggactatcaatgccatacttgaggtgtatcgctggagtagaaatgagcatcgtgatccatgagattcatggtagattttgcggagaccatacatccaaacctagtttatccaaaaaaaatcctttgctaggggtacttttggcccacaatgaagaatgattgcatagagtatataccaaagtgtgggcaatgccagagatataataaagttccacgttcaccacccatagagattgttgggttttatgccctaaataaaactccatttcaatgtaatctctattattcaatatcaataaagaaacaaagtatttttcattcatttatgtgttatttggttcatgt

SEQ ID NO: 323979 - DNA, 1308 bp, Cannabis indica
catatattgtagtaacatgcaatatgaggttgtgaaccatattattcagctttcaggtttcacaaagcagggcatgccttttacctacttggggattcctatgtgtgggaaaaagatatctaggaaggaatgtgatttgttagctgagcgaatgactgctagaattaaaagctggagttccaggaatctctcttttgctgcgagaatcacgctgatcaattctattttaactgttatacagatttattggagtcaaatgatgattttgcctaaaaaaagtactgagatcaattgaagccatttgcagggtttttttgtggaaagcacaagctcttttccaaggtggaggctcagtaacttggaataatgtgtgtcaatcaaaggccttgggtggattaggaatcaagaatagtgaactttggaaccaagctgtcatttgtaagtacatatgggcaatttcaaacaacaaagaaagcttatggcttcggtgggttcatagtgtgtatatcaagaatcaaaattggtgggactactcttcttcagtacatgcaagctggtattggatgaagatggttgccctcaaagatcgaatcaaaaccctcactgatcctactatattccagacacaaaaatacacgattgctgcaggttacaaactgtttctgcctcctttggaccgactgaactggagtagagaagtctggtcaaggctcaacactccaaagcatagtgtaatcacttggatggctatgtttaatagactgaaaactcaggatagactcattcggtttggtattcaggtcccaggttgttgctgtctatgtaatgcagatcctgaaagtagccagcacttgttttttgattgtaaaattgcaggtgactacttacttgagttaaagaattggttggaatggcatgctcaaaccaacagcctccctcagctgattcgttggattggtagagctaaaatgtccaaatttaaaaagggagtgctagctgctcctacaacgattggtatacaatatttggaaagctaggaatacttctatttggcaaaagattgtggttaacccaactacaattgttgaagaaacaaaatggtctaccaagactcggattgagtatttcatgcctcagaaaatcagtggcaatgataaggaatggttctttgcattataatacaatacaaaatgtaattatttgtatagattgatcatgatgtacatagttcttggccctcttagggtgcgaataggatgtaaaaattttgtttgtgcaatacaactcattgatttatcaaaaaaaaaa

SEQ ID NO: 323980 - DNA, 926 bp, Cannabis indica
agaaaaaaaaaaagagaaaataaataaatatgtttggagagactttattaatatcattataaaataattagtaagaaatttaaaaagtaactaataaaatttaatattttattagcatttaaagattatattttttatttagagaagactaaaaaatccacaaaaataattaactaacatacaaaagtattaaaatattaaaatttatttaaataaatattttaaataaaaaggtatagagttggtaatgataactaataaaaatatcattttaaagaattaattttagaccatgtttaatttatactcttcaattttttttaatatactattaaaagtatattttagtatacataaaatgaagaaagaataatataataattagtcaaacgatataatttgacaaataaaagattaaaccaaaaccaacttaaagataaaaaaatattagaaattgagaaatttttgcggagaatagagatctcaacaaaataatgacaaatctattgtgaaacgatataggataataaaagactaaactaaaactaaaatagaaataaaaaagattagaaattaaaaaatcttcaccgagaatagagatctcgaaaaaaaattgacaaatttgtaaaaaaaacttatcatttaatttgtgaaagaaatattgtcaaacggtatatgataataaaatattaaactaatataacgatttataaaaataattaataaaattgaataaaaataatcacaatttaattataaactaaaaaaaattgaaaatatagtacctgaacttcttgtagaataatagtagtgtagtagtgatagaatcgtgcatgttggataaatgaaattaattttatgcaacaaatttataagagattatatatagatattgtttttaaaaaatactaaccaaacatgacttg

SEQ ID NO: 323981 - DNA, 1070 bp, Cannabis indica
agtaagtgcgacttttcttttatagaaaaggaaagttttgctccagttttctcctcaaaaaatctaatcaatcaaaatggaaaactcacacaagatcagaatatcacaactagttagatagaaaagaattgagtaaccaaacttactatttcttaccttattttccataaataggaaagctagacaacttttcttccaaaaatagattgcttaatataaaagtcacatataaaatatgaaaactaatattaacaccagccgaatttaaacaataaataataaaatatatttgtcacattaaagatgctaaaaatagaattaacaaaaattatagaggttcgacccctttcagtggcaatagcctactctcctttttgttgtattacttttatgaaagtatatcaagatcacaagttccggccaagtaaatttatcaatatctctcaaaaatgttactaatatttcatagtgttctctctattcttagcgccaaataaaaatccctaaatagtgaattggccttcactatttataggggagaatgaatacataaataacccaaaaaaataagagataaataaagaagggtttgaatgtgaatcccgtaattttctctatctattagatcaaattctatgaaaatatgaataataattccatcaaatcataatatagtttcacctattaaatcatattataatataatttttatattaatacataattaacttagttaaggttgataatcttgttcttaaaccttaggaaaggatattacatttagtctcacaatttcatgggtaggataaaaaaaaagtacatcatttctcatcccaatcccaacaactaaaactcaattctggagttacacaccacaaaattgaggtgaagaacttcataattagcctaaaatcaataagcaattaagcatacagcactcaatattttttttttgggaatccaaacatatggttttttttcattttttttttttaaattttaatttgttgttaagaaaaaattaacttttttaatttgttatacttttttttttttacttttttacgttt

SEQ ID NO: 323982 - DNA, 2009 bp, Cannabis indica
caatgtttacttgctggataggaattggtggagtaccacccaccaacttactctagttggtactggaagagactagtcattgttaaatatgctttcaaatttaaggcagatctctcatattttgtagcattaaggtatatcattaaaattggctatgatttactatttgatcaaccacttgcagtaagtttgagtaaagtagtttgtgatagatcgagcattccgaatcatagaatggtgctttggttggaaatgttagagagacttcaaactagatatctgtttcgaaattttgagcctctggtggatcaaacatgtcttgttatgtgagctgataatgagagcataggcctccattcactgtcattgtaacagtggttgtttgcaaaaagttaagcattggacggtttaaaatcgacttctttggacctaattcaattaattcaatatatagacaaagcaaagaaattgagtgctattcaaaagaacatcatgtaagtctaccacgttcggagagtctaaaatgatgtgtattagaataaaaaattatggcatattactaacactgtacagaaaatagaaagcaaaatacaagttagaatgtaatgccaaaataggcaaaagtcatcgaatggttcaccaagatatgtaaaaaatagatgtagttagggctgttcacggattggtttggtcccgattttcataatttttaaaccaaatcaataaaacagttttttgatattagaaaccaaaccagaccaataaatttttcaaaccaaaccaaaccaaatcattaagaacggtttggtttggtttgaaaccacggtttaagatgaagttataattattcatatttttttaaatcattgtactatttttactaaatttttaattttatttttcaaaatatatatttaacatgataagtaatagatgtataacatataaataatgatataaaaatattctcaaaaaatccaacataacataaaaatttaaaattcatgcaataaaaaacttgacacacaaaaaacttcaaaattatacatatagtcatgtataaaatatatataaattaattatttattataaacggtccggtccggtttaaccgttaactatttattacgaaccgtaagcgaaccattacaccgtaacggtccggatcgaccaaaccaccaaaattattaccattataatcattttcgtgaaatcaacgaaaaaataaatatagtagtagcatatttatgaaataaattcaaattattaccaactttaagcaaaacatatatattcttcacccattgacttataccatatatattgttgatttgattggatgtgtttttctttactgaactaaattttgtcaggacatgtacatgtggctgttgagaaaaatgatatacattgtcaaaaaaatttgaccctcagctacggtttagggtttggaatttggcttgtctccacattgatacgtggtttttttttgacgcggtgatccagatcacacatgattaacaaagcagcaatccacaatcggcggcggcacctcctcgaaccaggatagctcattgtctaaccgaagagcatgttttgccaaaccatgtgctgcagaattcatattccgagccacatgggacaaaactgctcccgggagtttagacaataaagctatgacatcctcaaaaagcacacccagctcgttgaaaaaaacctttcctttgtttatagctgtgactagagacagagaatcggaaaaaacctctttaatttggattccgcatgaaagagcccaattaagtccaaacaaaagtgccaaggtctccgcttgtaaaacagagatacttcctgaagacataacaaaccagaaaacaccacaatgaaaattatgagtcaaagttaaaggcaaactaccacaagagacgcaaccccaaaacgataaaatcaacaatgctaagaaagaataaaaggaaaaaactagccaaagggataaccctttggctagt

SEQ ID NO: 323983 - DNA, 633 bp, Cannabis indica
taccgctgtgaatttttttttttgaaaaaaaaatattttaacatatgttttcgagcatgaagattaactaagaaattatagcaggggattgacggtagcacttctctttttatatttaagattaaggacaatcttagtctaaatatcataatattattagtgtaattatgtataagtttaatttaataatattgctaactatttaataaagcaatatagatagatagtgtaatgatttggtttgatcaatttcataatatagatatacaaatacactcatcatagatgtagtgaatagtgataatagtgatagaggtagagtgggttttaagctatatgaaacttaccaaagcaactttgtcggaaaagagtataatgccattccttccttaattaaacctttcctttccttttgtgctttcatatcttaatacccttacatttactcattcttcatcttcatcttcatcttcatcctaaactatcctaaataaccatttatttaggtcatgtttactattttcaaaaactaagtgctacttatttatttttttttaaaaaaaaataactaaaaaaaactaattttcataataattttcacatatactgattcactcaattatggtaatttag

SEQ ID NO: 323984 - DNA, 874 bp, Cannabis indica
ttttatttttcaaaaattattttttttttaaaaaaattttattttcgttttgtgattaaaaatttaaaaaataaaattgttaccaaacgacacctaaattagacgtctcaattctaaaaggggctatttagggaaaaaatggaaaatttatataaatatgacattaaatataatatttcttaaccaaacaaataaaaatcattaaaaacaaaatcaatttccttttctaatgtaataatattaaatttaattctaatttctcagtgtatattgactgatctttactattatttgtcgaattttgaattgttctaaattttaatgaagataattttttttttgttatatgtctattctataaaatgtggttatgtaacacaattcttggtgtaacagtgttttttagttttttacgttaactttaacacaatatcccaattacttaacataatattctttaatattttataatattattatatatatttaaaaataaaaattatatagatattttatataaaaaaatttaattttattatacatatctttaaaaataaaaatgacatcaatatataatcgcatctatacataaaatatatatttaaatcttaatttcaccacaaatcttttgttttaaaaaatattaaaggatatatatttctaataatttgtacacttttattataactacattctcctaactacaaattaagaatgtatctatcactatcattatttttttaaaaatattatgttttagaacattaatatataaaatgtattttgaaagtaattaattctctaatcaaactcaaattttgtcaaaatattttctaatataatccttatataatgaagagatcaatataatgtt

SEQ ID NO: 323985 - DNA, 714 bp, Cannabis indica
tcgatttcactctatggaatacagggaccaagtgctgaatggagggtacatatttttcaatcgtcgtcctgttatcatgaagccctgggatgctaacacgaatttaagaaaggaagatgtaaaaactcttcccatatggatccaattagagggacttgaaatcaaatactgggggcagaggtctctcttcaaaatagtggggatgattggcaaaccagtaatggtggactcggttactcgagacagagatagattgaactacccaagagttttggtggaagttctcatgaaccaagagtttcctagtatgctagaattcgaggatgagcatggtagtatggtttctgtgggcgttaaatatgaatggaagccagatttatgtgctaattgttctggtttggggcacctggctacagaatgtaagaagaaaaatggagccaaacgggaatgggttgttaaagaagataaaaggaaagagaagcccaaggttgatgatgagggttttcaagcagtttcgaaagggaagaaggtgcaagaacaaaaaactgtcgtgaaggagactagcacttcaaatggtttccaagtattggatggggtaaatgatgatatggaagttatggatatacagtgggctaatgacgagcaaataggctatacaagagaggggggaggaccctctcttggcaatggataagtttcttgtatggaatgttc

SEQ ID NO: 323986 - DNA, 770 bp, Cannabis indica
taatacagttagtttggattagttaaaacatgttgtaatccataacaaaattctgttattctattttcattatatgtcaactgaattcttgcatatataaaagaaagtctcagctcatattgagagtttgagcaattttttctacaccttcaattgcaatctctcttttctttttctttgtttttctttgcaaattcaaaggtttttgtaggaaattattcctaatataccctacacacagcaaaaggatataatcaaaagccaaggtcactttggacctttcttacccagtcaaaccctttgtttgacccctgattgcaactccccaaacgacagcctctctctattaattgctacaggtcgtttaatatacccaagaaaccctagaatatatatatcctttatttctcttttaaacacactcagccaccatttaaccctagcagagacagcccctcttcttcatcttcttcaatgttcatctcttaagaacacaaagaccaactgccttctaaacccagaaatcaaaatacaacctaccccagattaagctaaacccctttaacccgagctaccttcttcgttgttcttctttgaagaacacgaagaacaacccttttataaacccagaaaataaatcccttacacagattcaaaacccagaaatatacacacataaaatagttaaatgttgtgataaatccaacacgcaagtatacgtatcgttttaacaagtaatactcaggtaagtgagatcgttcccacgagga

SEQ ID NO: 323987 - DNA, 1688 bp, Cannabis indica
taaataactcatagatttaaatattttcatctcatcaactatatattactatactaatcaaatgagaagatatatcgttttatttagttacgataaatactattttggctctgtgttttgtaaaagttacagattagacgctctattttgttaaatgacaaaatgaattctgtattttccaaaatagtaaaaatagtaccatgaactgattttttgtcaaaataaaatttaataataatctgatctaaatgtattataacaaaactgtttacattttaaaaaagtgactaattagatcatctgttttgttaaatgacacaatggacaatgtatttttcaaaattatacaaataggaccttgaattgatttttaatcaaaataaaacttaataataatctgatctaaagatgttatgataaaactggttacattttttgtatctgtaatatacttgttgaaaattgagcttggtatcctatttttactattttaaaaaatataaggtctattttatcatttaataaaatacagagtctaattagtgacttttgtaaaatacagagttcaaaataatatttaccctattatgtaagtacttagagttttttttttctatatatatataataattactaaattaaaatatgttaaatttaatatttaccctatgatatatttcagtgatatgtttgacaccactaatattctctaagatttcttttaagttcattattgtgaccatgggcaaactcacatagagataagtccaactatccccttaaagaagaaaaattgaaaaaagcaaaacatattttttaattaaaattggcaattaatgataaaaaaatttgtaatacccaactgacaactaattggagttagactttaaaatttataaaaccatataacaaaaaaatatacgtatagagtttacaagtcgggatcccgattaaacccgtttgaaaaaatacaaaatacatatacttctttttttacccaagtcacaaagtattaacaaaaagctaaattccaaaatgcagtatgatcgaactctccaggttgcactgttgtagtatgtacaatcatcgccaagctaaaagcttattgttcttctacttttgcttttcccttacctatatatagtatcacactgatgagtcaacagactcagtaagatatacatatattatatatatcaagaaacgatgatttagacttaggccctcctgtgcctaagtacaaggatcgccaaatgattaagaacgttcttaatggaagtacgacctctgtaccacatgcactgaagtaccaactccgtactagtgttggtagggccatattgtacttccaagagctactgagtgttgtaccacatgcactttgtactcacttgtacttgtgttggtaacaccgtaacttacccctaaacattttacattgtaccaacactctcaatattatatttaacctagggttggtagtgtaaaacagtataaacatcatgcattcacatacatacacacatacatatacataatttatgttaatcttacgtcacttccagattaaagcgtgtcgatcgacttgaatggaaaattcacgagctaaatgaaggtcctaagtcacattacacaattgggtaaataacttgaataaaccctttccgaaaccctaaacttacaaccaa

SEQ ID NO: 323988 - DNA, 887 bp, Cannabis indica
aaacaataatgcatgttatgtctacttctcttctctgctctttctatctattttttcctttttttttttttttttttaaattttttgcttccactccacactactcttttttctaatttgcttcacatggcttacaaaaaaaaacactacactacatgcatgtagttttcagttttcactacaatttataaaaaatttagtgtatatttaggggaatgttatggtacaagtgttactcttggggatgttttattttttaggcacattgagaaattataatattataattttttttatataatactgtacattgtagttataataaatatttatgtaattttttaatatttgtgatatcaaaatgttgcacgtgtaatttttttttatacaagtgtaattaataatttttttaaaaaaaatagcatggtaaataataacagagcccaaccaaaaaaaaaaaaaagagtattaataataaaaaatgtaattttaattgagaaaaatataatttttaatggtataaaaataaaaatatgtaagagtaaaaataagaaatataaatattatgatgataaaaataaaaaatataaattttatagagataaaataaaaaatctataatatataaatataaattattaactttttaatgacaaaatgtgaaatatttattaagagttagtcctacattgttaatgtgtggaaataaattgtgatatataagatgaaagggctactcctcccattgtcaattggttttgggatggaacctcatttaccttatcctcaaattctaacatggtatcagagtcacttgtgatccgttgtgagccaaaattgccaccggtccaaacagatacttccgctgtctcccctttaacctccat

SEQ ID NO: 323989 - DNA, 519 bp, Cannabis indica
acgatggggattcaaggcaaacaagtaggtggacgccgtcggcggtgggtgggtttatgtcgactgacgcattagtggtggcagggagggggtttgtgggacttgtgggaggtattcttgatggtgaaggagtggtttgggtctcttgggttgtggatattatgggtgactttaatgtcaatgtgacagaacttcttgctatcagaatggggttgatttatgcttataggtttggtttcaacatctctaataaccaaagtaattctacagtggttttgcatttcataatcctagttcgaacatagttattaattctatttttttatattaatttttttagtggctgttgttggtatggtggttcttatgatgctattttgcgctcaatgaatggtattgctcatacactgactaattctattactaatatagaagagtgtcttttaacccatacttatcctcctttgattttttttttttgaatgaaaataatctttattagacagaaacatccgctaa

SEQ ID NO: 323990 - DNA, 766 bp, Cannabis indica
cacacacacacacacacaccaacgaggccgataccccaagatctccttctctcgtctctctcttgattttcccttgaagccccaaagacgaaagccatatccaccaccaaaggcggccatccaccactgagaaacctcattcggagcgacatataaccaccaagaaacccccatttgagcgatactttctctcactcttctctctatctgttcgctccaccaccgaccattccaaaccacagtcgtcgtcctccttgtggccactggtgcccaccacctcctataggtatatatttaattatttattaaaattaatttatatatattttatatatacatacatatttttttatttaatacataattttaaatttaatttttagattaattgtttaatttgttttagatttaggtattaataaaaatatttagtttagtttaattttttagttttagatttaggtattataaaaaatattttgtttgattaattgtttagctatgaattttaggtgataaaaatattatttggtttagattatttgtgcaggtattagtttttataaaaaaaaaatatttagttatacatttatacctatttatttaattaatagatatatttagtttagattatattaaatatttaggtattaaaaaaaaataagtttttatcaattatttagctattagttttatttccctttaagtttttatttagtcgttttggatttttttttttgtttagattatttatttttatttaaat

SEQ ID NO: 323991 - DNA, 894 bp, Cannabis indica
tttaaaatgtaaaaataaaaattttccaataaaaatttagaatacaacttttttatgtcttaaaaatagaaaatgttttacatatatagttattgtatgggggtatattcaatgatgagtgggtaagaatattaattaatttattagaagttacatagtttaattagtaattaagtatgtcttgatggattactatataatttttttccttaagatcatgatagagcactaagtttaacaacttttaattattttttttttattatgtatgtttgtattctaactttgatttaagaataaataataaaaataaaataaaataaaaggccaaagaattagtattttggcgttttgcttttgccttttgacagggatattttacaaaaataaagaatcaattgagagatattttgatattgtattattatatttaaagtaatgttatattattttgtatagtccttttcaaatggaaaacaaaatgggcaagaaaacaaaatgaaagtaggatgtatattgaatacaaatttaacagctaaaattgattaggatttatcttatcatttaaatttatgtatatattgcttaaaaaaaatatgtaaatagtatttaataattataccacttttcttgttataagtagggatttttaaagaaaaaaaatagtatgaggaaaaattataattaaaaaatttatataacaatatatattataattacaattagtattttgaaaaataatatttagtgtactaattttttagtttattttgaggctaatttggatttttgtgtacatgtattaaattatgctttttgaattttttagatcgttaaaaattgtccgaattattgagattgttgaatttaaaattttttatctaattttattaa

SEQ ID NO: 323992 - DNA, 689 bp, Cannabis indica
ttgagtatgttttctgttactagccatagctgctatggagttccccaatagtatataggatgaattaggtcgacaaccactttcctgagcccattaattttaagtggcccacaaataacccagagttacaaaaactctactgtgacttattgggaccagactatacaaatatgtataaagcccaaccctccctaatagctaacccaccaaacgtttctgagatgataactcacttattggggtcttaaaaagaaaagcccgtacttgttaccaaccaataccagacaaactaaataactcaccttttgagaatgagtccaagatatttgaatccttcaatctctttgaacacgaaacctccgaacctacagtgcagaaactggatgatgacaagggagaagattgttggaaattatttatcactaaggggtttcgaaatactaaggaagaagagagagagagtggcggccaaaggtagagagagaggctcaggtttttctgaatgaaaattatagcattccactagggttaggtttgaattatttggcattaaaataatgaaaatatcagaggtaaaactcctataaaagtggccggccatggcttattggatttgggcctcactttttgcaattttgcagttttatcacttttgtatctgattttctcaaaaacaccaattttctaat

SEQ ID NO: 323993 - DNA, 1005 bp, Cannabis indica
tcttgggagaattcttcccaagaattaaatcttcctagggctaacttgaattaccattgttggtctatttcagctagagttgccgaaaagatttggcatcgcacatctccaaatacttgttggagatctgtttggatctcgaaatatttcaggtgtactaggggatcttctttccctatgtacatctttcacaccggcatcttgaacttgggaaagggcaaggcatttatgtatgtcgtgaatggtgatccccttgacctgtctagctcaaggtctaaaggttttggaccagctaggcccttgatcatgttcctcatttggtccaactgtgcttgcatagaaggatttgctattgctggggcttggtagattggcctttctagattgagctgtagccttggattggacagagcctcgccggccataacctaggagaggataaattcaaggtgggccaaccctgagtctagcagctgtccatggccagctagcccggtgctgggtagggcctagccacccactcctccttgactggttggtggagattgttcgttgacataggatagattacaccaattattggagttttgtggatctaaatgcctgaagtgattgtgttcactccttgaattgttgttgtcttgggtgtttccacctgttcccaggcctcgccaattaaagattgggggcgttgtagtgcaagagattcctggctggccccctaagccaatggctacaaggatctggttgttctcgccagtaggccttcgtggaaaggcctatcctcctttgagtaagggaaggtctatccgggttcctgaagaacctagttggtcagcttgctgatagacccaccctgatctatcaactagtcttccttggagttgatctctaatgagatcctggtctcttccaatgtttttctaattgaactaccttatcaagtcactggcttctctgttgcagcgatccagctctgcctagtgagatcgaaggatgtactct

SEQ ID NO: 323994 - DNA, 899 bp, Cannabis indica
gttttacagttgttttgctatgattatttatttgacgttcgatttcactgctttttctcaatctcaccggaattaatggttgttttctgatcattctagtgttcctgtggtggttttttccgtgagtgtggaaaatagatgcctcaactttttttggtgtttacagtataaaagaaaaaaaaaaaaggccaagacattatatgtgtggcagtatttttgtaaagattaagtcaaaaatcaatattttgtaagtttcccaatatatttggctaaaatagctctattccaatcagaccctccttgaaacaaaacccccataagtctttgtgagacaaacaagtttagggtgcgtttggaaagccataatgtaattgaatttgtgtgtaatttgaggtaattacacaatttggcatgtttgtgtgaccatgtaattacactgaaactgtgtaattggaagtaattgaggggttccaattacactccaattctcatggccccccatgagaattgaatgtaattacactgtataattactaaaaactttccatattaaacattagctactaaataatattattttcccatgtaattactaactattttaccaaacaagatattaggaattcatatgtaattactgttgaaatttattttaccaggatcttagatctactccgaagtatgttgtttaacaccctaaatatgaactttctaaaacgataattaaacacatataaagttaagaaaaccttacattgatggcagcggaataatgtctccttccactcagatctctaacccttgcatcctttctgtcgcagagtattatcaagatctgagcccgaatgtcattctctttgtgtgtgatccttcacagtcttccaatctatgattgaggt

SEQ ID NO: 323995 - DNA, 897 bp, Cannabis indica
aaatcacatttagttacaaaaaatttatgttatgattaaaaaattatcactagtaacttttttgtagtgcatgattttgtttttattctagtagttattataagttacaattactgggttggctaggtttattagccatagcaatatgtcattaccaattattgtttttttttgtcatatagttgaaaatgatatatttataaaagtagtaaaatatcatcctaagatatttaaagcaaatgtatacagtgtgacacaattagtctttaattggtaatttattgggccatgtcattaattgtagaagcctaatcaccaatctttttatcaaaaagaataagcgaacttggtactcctttacaaggaaaaatgtaaaattattaaattatatctataatcacaattatataatattcttaagaacattattattaagtctcagtagtgcttaacatcttttaaatgtgtcaccttacaattagctaacgatattctctaaaagttattacattaaactatataaaaatcgacacttagttagaccaataacgatattaacacgtaaaagagtgctaaatatcactagtacattttagtatttctctatttttaaaaatacctatttcatagttgtagcattaattattatattttaaataatataaaatgttagaaaattaatataaatttatatttttataagtattaaatataatttaaaatatcgatcctttaatatatatatatatacacataaagtacttaatgtgtctcatttcattacaaaatatgttctaattattaaaaagataaattatctttttaccctgtacttatgacactatactattatgccctttaatctattctagcttgttataaatagtccttgtataa

SEQ ID NO: 323996 - DNA, 1484 bp, Cannabis indica
gtgatgttgtagtacttgttgccattgattggcgctgttgtgttgatgggatatagctagatatgtggtctagttaatattgtcatattataataatgaagtgtatatttatacatatatgggcttaaaccactatacataattgtaaagtacaattttttttctgaagaaaaaaacctaaataaataaataatgggtttttatattttttttttttttgtatagtttttctttttccaaaaaaaattactttatagaaaaattgaagaataagttagaaaaatataagaaaatcaagtaagggtaactaagtacctttatggtaaccagagtttaactagttaatatgagggtgacttatgttgttttttattttttttaaaacttttttctaaaaaatttgtataaatacttttttgagaaaaattataattttgcaaatttatactttaaaaattataaaaatgaaaattcttttttaaaactaaaaaaacttgtttagtctaactttatttaagaaaatatataaagaaatttaaaaactatgatttttttagttttaaaatgagtttatttattttttaaaatttaaaatcaattaacgattctcatgtaggcatgtcaaaaagatccatttagttagagcacattagagctacgatccgatggatcatttactgatctgaaacattcagatactaattagatatcaaatcagatccgctccaccctgcctaattttttccaaatcggatatgatccgatccgatttcaatatactaagaaaaaacacttaatgcaagactcggatcccagacctacactatatccgcgcgggatccaaaatcagactcgagaccagacccaagcccgagatttgagcttgaaccaggaccttgacctgaacccaagacatgacctagactcgaacctaggttccaggacacagacccgaactcgagactagacccgaactcggacactcggacctagacccaaacctaaactcacgaccagatttgggtccctaacttgggaccaggacccaggaccgaacccaaattccaagacccgaacccgaacttgggactcgacccaaacccgaactcagccttggatctagacccgaacttgaacctaagactcgggacccaaacctggaccaagactcgagactcaatccggacccaaaccttactcgagactcagacttaggactcggacctagacctgggagtcaaatcgagaccgaagacacaaacccgaacacagtcccgggacccggaccaaaaacccggagcaaggaccagacccgtacccagactcgaacacgagacttgggaccaggacccggacccgaacccaacgacccaacgagttggaccggacccgggacccaaacccgagacctgaacttgggaccagactcgaacccaaagccagaacccggaccagacccggacctaaactcaaaccctgaccag

SEQ ID NO: 323997 - DNA, 534 bp, Cannabis indica
acttgggaggtcaatttgatcaagccaagtccgccatgattctggcgccactatgaagaactcgattaacgtctagctgtgcgacgataaaggcagcgctaattgggaggcaacccaagtgttctttatgatttagttgaactctttttgttttagtgttattttctttttctgttctgtctagttttgtttagaaaactggtaaaacaatttttagtattctttttcattatgtactggatagaaaaaaataattgggattcgcccagtggccgcggccagatgtagagccgccgcggccatttaagcattacagagagggtgatttttcacacttatctggccgcggcaaggggacatgccgccgcggccatttaagagatacaaaaagaggtgttttttcacggattttggccgcggcgaggctatatgtggccgcggcgaagatggtcagacgggataaaagggggccaacacattacacaatttcaaatacattctcattcaaatccctaaccaccaccttcgaaaata

SEQ ID NO: 323998 - DNA, 1263 bp, Cannabis indica
aaatatatgtaaagttagatcactacaccaactattaaaaactgatataaataaaaatgacacaatataaatatacacaaacatatactatgaaatgtatatatataataaatgagaaatgtgatgtcatctaaatatatatgttatataatggactgcaatagcccatagtctaaaaaaaatatggtcgagatctttcacataaaattaggagagttggcgagttaccattaatcgaagagaaatagagatgcttggtctttttcaaatggcagaagggaagggagcagatcagaggagattaattttattttctggtttttggaaaaaaactttaaaaacggagaaaacgtcatttttccgttttcaattttacaagccaaaatccgaatatggatttggatttggttttcaaaaacttgctaccaatcaaatattactatgggcaaaaataataagaaatgtgaacaatctttcaagcaaggatggcgatttctagaactctcaagaggcatgtttctcttcctccgtccggtacccaaattgggtttctggtccaccctccacggtggtgtgatggcaatcaggttcggattcctctttctttctctcatcatttctctgctcagagcattaattgtgaaattaatgcttctgatggttattatctctcaaagatcccttctgctgaaactattcatggtattaaatgcaaatttctcttcccacaagaccttaagcctcttttgtcaaccccttatttatcaataaccctcatttattcccaccatcaaatcaattatctgcctgaagatacgttttctctaatagaagaggcggcgaggaggagaaatggtgatgatgaagcctgggggagtgcgatgacctgcaaaactactcaagaggctaatgctagggatcaaccaagagtcttcttgaaaggtctgatttttttcatctataaatctcgttttcgttttcatttttttcttacttctgtttgtttttcttctctgtctgggttaaaaaacttcttcatgctcaatatgaattccctaagttcttctactattccccctctaatgctcactcctgatgagaacatggtctataccatgactgaaattcaagatgacacctcccctgatattagtcttcttcttaaactctgcactgttaagcactttaatcgagcctccctgattaaaactctagccccaatctggacctctcaatgccgttttcctgttactatttctgaac

SEQ ID NO: 323999 - DNA, 677 bp, Cannabis indica
aaaaaactatttaaaaaaaatttgaagtgactttttttttgttttaattctcaattaaaaaattaaaaagtgaaaatagttttacataatattattattattattttgtgaagaatggattcacagtcattttgataatataaagagcaagattttacaaaaacgacacaaaattcaacaatcaataaatgactgagggttcctttaagctagttactaattttgtccaaacactataccaatgtcacattatatatataacattcctaattagtagtgacctttaaaaattctcttaataattaaataagagaaataaaaaatgtattaataaaagaaccattaattataaaatacaatcaataacaatttattactttcaaaatggaaatattgaaaaacagaacatgcatgcatgcacatgtgcacagtgcaaccctaattttaatgtcaaattcagtcttttcagttaagataccaagcaaaacattcttgttcctcttattggactctcccaacttctagagaccctttctcgaaaaataggagcatatttccacattctaaaatatttgaacgcagtggcagacttaggattaaattttagggtgggcttagtaatacatttaatataaaggtaaatggcggcaaacccccaatactttcgttttggtttc

SEQ ID NO: 324000 - DNA, 1604 bp, Cannabis indica
aacagttactagtacggtttcactgatgctcgcttattcggtgacaagtttaatttttgagagttcgttgattagtagagtggacatcgtcggtgaaggagacaatttaatcttagtaacttttttcttctattcttttccttactttaatgactaagtttagtttttttgatacttcttttattaaggtttttttaaaagcctttgagaatattgtctttagatcaaatacttcaaaaaaacgtggtccaggactaagaataacattgataattggcatcagccacaataaaaggttcctactacaagtaaataaacatggccaccaaatagttttaacattagtagacaaagtaaatttagttaaaatgtgagctataccaacaaaataatgtcattgagcacgaactttttattagttaatgtactacttttttattagttaattagaagaataaaaaaaaagtaattaataagtttaaacatcacactttggtaattaatatttttttattagttaaatactgtaaagaacaatagtcaaagtgtgaagcttgtcacttaggagttgcccctctgcgcatggtggtaaaggataaggacgaagaacgaaaaggaggaacgagaagttgaggaagaagaagaagatcgaagagggagagggacaaagatcaaggagagagggctgtgaaaaaatcattttaagtgttgttttcattaatttttgttttaattttggtctaacatatatacacaaaaaatcttatttttaatccaaacaaaatttgtgacaaaaagtaaaaaaattgtgactaattataaatcatgattcttacattgtgactaaaaggtccgttgctaaaagtattagtcacaaaaattacaatttgttgtgactaaatatatttttagtcacaatacttgttgtgactaaaattaaattagtgacaacttgtgattaaatactatgttttaacattttattgtgactaaaagtcacatttagtcacaaaaaatttaagttgtgactaaaaaattgtcactaaaataacagtttttgtagtatatatatcttttttaataaaattgttatatatatatatttttataattgaagttagttatcatttgattttttaaattttattttatttttattaaaattaataaacaataaattttttttaaaaaaaaattgagttggaccaatcacaaatattttacatgtgtcatatctcactcaacaatctcacaaaactaaaggaaagaaactaacaaaattactcttttggtaactttatgtaacttttccactaaaaaattcactagatccttgttgatgacaactattaatcaatgggtacatatgcaacaaagatcccatacatattgttaaattcttttcaaaatatataatttcattgctttaattttttttaagggaaatttgaatttgtatacttacatttaattaaaatttatcttcaaaactcataataccccatatttaaaatatatgaccatttttctattatgcccaaaataccctctttatttccttcaccccccccccctatcacctcttctctctttccctctctctt

SEQ ID NO: 324001 - DNA, 1707 bp, Cannabis indica
cattttcaagatgaatgtagagctctgaagccaagaatgccagaagcaaaagtaaagaaagaggcgaatcaaatgttgcagaagatggatacgaatttgcagatgtgttagttgtgaccagcaaggatcttgatgaagaatggatactagactgttggaacttattttaccaggatctagatttactaagatgtatgttaattataattctataatctaacatcctaaatatgaatttcttaaaataatgaaataaacacataaaagattaagaaatccttacattgatggcaacagaatataataactatttccattcagatctctagcccttaattcctgtctatagcagagcattatcaagatatgattgtaacctaaataggtatccatataatcttacgatctcatgaccagttgtggcatccactagctggttgatccttgaaagtgggaaacaatcttttggacatgccttattgaggttagtgaaatcgatgcaaactcgccacttgttgtttggcttgggtaccaatacgacattggaaacccaaatagggtagaatgcctcgatgatgaagttatatgcgcgtttacttttcaatttcatctttcaatgcttgtgctggctctttattcagtagcctctgtttttattgtacttgacgggagtttgaatctatattaagggcatgagaaattactgatggatcgattcccaccatgtcttcatgcaaccaagcaaaaatgttgaggttttccataaaaatttgatcaaatcggattttaattctagtgctaaactttgaccaattttgagttgtttggttagcatggaggggtcgatctccgcttcttctaattcttccaccgttccaaagctatttgcaggaccccaaagtgaggatctatgtctatctcctcaccttgggtagacccccaatgcctttggctgggctcactgtttgagctcttagtgggcaagtcttcctttttttttgctttggacagagcaatgttgtaacattgtggggaaaaactgtggttttcagatctactcgtttttttttgtttatgtctctcaatccctaagtctaatttttcttttgttgtatatgtgttattatgttcttatttctgtgtgtgtttgatttttggttctgtttgtgtgattgatctgtaagattgagtgaggttggaaccatagggtttcttttattgagagagacaaaggcttgagtttgagtctcgaactttttgagtgtttactcagaccctacctagggtttgtttcttgtgaggattcacttattgggctagacttggcctattggacataatggttttaaatttttgcatttctaagttgtggacacatgactaaattttagaagaataccataatatttttttgtgtattaatttttgtatcttgagtgttaggagctgcagattctaacaaaaacctcttgatatgttgttactcttagctttgaattgtggggctaacttccaaagagcgaagaacacacaatctgtaggtagttgattaaggctcaaatttgtacattttaaatctttatttatgcatattaaattattataaattaaatatttcatattattaatggtaaatttagtttagttggaaatatttaatttattttaattttgtgttatttttcagatttgagttagtaaaatatt

SEQ ID NO: 324002 - DNA, 1806 bp, Cannabis indica
aaacaagtcttaattaatcaaaagaacaaccagaaacaatacactagttcactagctaagaaaatattaaaaatataagcaaaaacaaaactctttcaaaaagggttgttactaagaactctttttaaagacaacactcaaatactaaactaagtataatgatcatcataaaatcactaaacaaataacccaaaacaaaaacctaacttctaatcccttagtaggggtttggtttggttggattatgtagaaacttagagaaatattacgagagaaagaagagcttctcttttttcgtttgcttctcctaagtcctacctaactaccacaaaattagtgaaggagaagcttacaacaaaccatcattgctatgcttacgtattattatataatatataatgactaccacaagataaattttaccattttctcacttggcatattggatcttcttcattcatgaaactataaatgaattttttcacatagtatccacattgcttcccgtttggctattgtggatatatcggagttatccactcgatgggacgatcattgcaccgggttgagcttttactaagcaggttgagtgacctacacaaaaattaaagttagcatataaaatatcagacacacttatatattgtgttggttatagaacttacatgttaacaatgtatttcaaatcttctggtatatatctattgctggaatcaaagtacgctaccgtatgcgtacttggttgcatgagtacaacgtaccatctaatgatacaagccactacacaaagaatcatatatgattagccaattgttataaattatgtagagttataaattatgaaactattaattttaaatttacttactaactgttgtagggtgcaataacccatttaactagattattaatttcagccatacatttgcgcagtgctcgagaacgggcattataatccctggcatcagtggcgatggccccaagatttaaaaatacatatagcctgtttaatccattaatgtctaacaaccattccttcaaaaatctaataaaaacacataattactaacaagttctcaaaataaattttcaagtttaataagagttgaatatcatacttgcacctgattgcaataggttggactcctaaaaattccatttgatagaattccttgatgtcaattgtttgatgccataccgaatcattttcaactccaaataaatcttagctgatctcaaagtggattgttgtcgattttggccacatactgaacaacttataaaaagtattgtttatcgaagtcctttttggtgcaacgtagcgaccttgtttactcaacaaagtgaagtgcttaatttacaatgcacctatcggttgtatactgcaggctatcaactactatcaagtaataaccatcaaaataaattaagctagacgaaaagaaaatatttaatgcaaagacaaaatttctaatacaataccacaagaattctattgttgtagtcacataagaattgaaagggggaggttgtgatcatgatgcatgattggggttattggaatatattttaccaggacctagatttactaacaagtatgtttttaacatcctaaataggaactttgaaaacgatgaaaattaaacacatatatagtatgagaaaccttacattggttccagcggaattaaatgactccttccactgagatctctaactcttgtatcctttctgtagcagagtatgatcaagatctgagcccgaaactccttcagttatttggattcttcacagtcttacacacta

SEQ ID NO: 324003 - DNA, 799 bp, Cannabis indica
tttttagtctcatatcaaaaataatttgctaatgtcattgctaaatacgcaaaatatcgccaaatatcgcaaatcattgctaaacttcatccctaacctcatatttgttctattattacaaatacatcgttaaatatcacaaaatattccaaaaaactggtaaactagaagaaagaaatgtaaaaaatgagagaggccatgagagaagacgatagtgaggctttgcgaccagggttctgggtctatgtttagttcaatcatgaaacacaaagttcttacataggattcttacattactaatccctagtaagtccaaacatgatgtttaaacttagttagagatacaattttagtacttatgtcaactaggttttcttcagtaggaacttttaaaatatgaaatttttcttgcgtctttgtccctataatgaaatggtactagatttaattaggtttagttcggtcatgaaacaccaggttcttacataggctcttcattaaatggactaaagttgaactattaaatacaatcacctcgaaaaagttcttagactttgtggcgaaagatattatttctagatttagctttcctatgaagattgtctcgaataatggaacgtagtttgacaatgatctattaaacaacttcaatgaaataaataagatcattacaagtttttcctcaatgatgcaaccataaggaaatgggcaagcaaaattggtgaataaattgtctaaatgagtctaataagttgatattttatcttataaatataactaatttatgtatttatattct

SEQ ID NO: 324004 - DNA, 1288 bp, Cannabis indica
ttttttttatcttttttttattaacttaaaaactttttattttaattttttttcatcaataacccacttcatataatataaaaaatgagaaatttttctaattaaataaattaattaaacataaaaattcaaaattttctaatactatccattcatagctaatactataaattaataattaatatattattaatatgtaccctctattatatatactatataccttttctataatattctattactaaaaggcatatatctataaaaaaaaaattagattaatttgcggcataaatacttaagtttaattccaagttgcaaataaatacctaagtttaatttttggcggtaataatacctaagttataattctggaacttttgtaggtacgtggctgttaattattaagtaaaaggcaattcttaattggtccaagttattaatttttatttttttaaaaaaaaaaattaattaaaatataccaattaaaaaatgacacgtggataataacatagtattttaatggttaggtacctacaaagttccaaaaatataacttaagtatttttaccgccaaaaattaaacttagatatttatttacaactgagagttaaacttaagtatttatacagcaaattactcaaaaaaattattccattattaaatcaaattatatcatattccatgcattatggtaagtgatgacgtggatttaatagcaaccacctatatgtataattactccatgaaagaataattggctagagtttttataaaggtgtgcatggtgattaatattggagtattatttggtcgatcaagttgatatcataattttaagaagtaataatatagtaggtctttataatgggtgataatgatatatatatatatgggataatttcacaaatacgcaaaaataataaaaaattataaaaatacgattttatagaattttacatatttttacgaattttttgattttatttacaaaaaatacggtctttttttattgtattcatgctaatttgttgttgattttttgttatatgtatgttattttttgttattgttttgatgttatttagatgttatttttatattacttttatgtatattctttttttttgttatttttacgggaaactgtaaaaatgtaaaaaaaaattcattaaacgtaaaaaagtaatttttttacaaaaaataatatcttatgtaattgtccttgtccctatatattatatagtgaaaaacggtgtttttgcaaatgtcagttgtatataagaa

SEQ ID NO: 324005 - DNA, 694 bp, Cannabis indica
tataacgataaaattttattgtatattacatcttaattaatgttatgtaatgtgaattatttggttttattattattagttttgtgaattatattatattaaaaccaatagcatttatgagattaattgtatgtgattcttgaatttttatatggattgatatgtgttatttattttaacaattaaaggacattttcacacacatacacatgaaaatcatgaaaacatgcatataccttattcataataataataataataataataataataataattaactatataattagaattttatttttttactataatttattaatatttgatattatcatcctaatatatacaaagaactaatcacatatatgtaccataaaattacagatatggcaatgtgttattcttctactaccaattattcgatcaatattatttgtaaattttgggcggttggacattgtacaaaaggcgatgaatgtgaatatagacatgcatggggatcaaatggatttatggaattagcttctttaccaaattctcctaaggtatataattaatttttttccatcaaataaataaaattaattaataatatatctgtaaatcaatatgaaatttatttaattaaatatattatatattaatatatataattttttttataatatagataaagaggcaaacacaaatt

SEQ ID NO: 324006 - DNA, 2223 bp, Cannabis indica
atggtgttggttcgtgttgaatcgtcgaagtgaaagagagggttttgagttgatagcgcagttggaaatttgaaataaaaaattagttttttagatattaattaacgggtatccgagacagtttaaaattgttggagatacccattaaactggtttttcaattttaaaattttgattttttataccatttgaaattgtaaatgactgtttaaaactattggggacacctaattattactgaaggttttaaacaatcacattttcaatagcaatagttttaaaaaaaaattgaatttcaaaccgacaagaatcgtacattttgcagtagtgtgatcctaactacaatgtggtgtctaaaaatggggtgacattgaattggttgctgctatcactctataaaaggtccctctcttgtatttgtaaagttatttcagaagataataaaatcattacaaagtattttattctgtccttcttctcctcttcatttgtttttcactcatatgatatcagcagaaattcaagattctccttcaatggctacacccaccacccgttctcaggacggcattcccccgcccacttccgagaataatcaaacggagtctaatcctgacacaacttctacaccaccactcatggatacttcagttgttgctcgacgaaatgccaacccaagatctcagacccagaacgaaccagacacgattgcaccattgaattcatcccccgctcctgttgctgatgttcccattcaaactcgatgctccttagccgatcgattggctcacgaagatgtttccagcccgttctttcttagcaccgcagatcaccctggtctggttttagtttccaccgtgctcaatggcgccaattatcaatcttggaaacggggaataatgatggctctcacggcaaagaacaaatccacattcattgacgactaccttcctcgcccagccaccggtaacattctcctctcttcttggattcattgcaataacatggtcatgtcttggcttatcaattccgtttcttctaagatagcacaaagcattatgtacattgatcttgctaccgatatgtggcatgattttcaagaaacattcaatgagggaaatggtcctcgaatctttcagcttcaaacacaattaacacatcttcaacaaggtgatcaatccgtcacctcttatttcaccaagctcaaaactatttgggatgagctaaaagaattccaacccaacactacatgcacttgtggtgcaatgaaattgtttttggaatattacaatcaaaactaggttcttcagtttcttactggtttaaacgagtcctatgcatctgttcgggctcagattctccttaatgaacccatccctaacctctctagcgtgtttgaaatgattgttcaagaagagaggcaacgcactcttggttcttcaacaattccttcactagctacctctgcccgtgcacctttgaacaatcccccccaaaatccaagaagcgaagagcctcttgcaccaattgtggcaaaccgggtcattatgtagataaatgctattttcttcatggctttcctcccgactatggtgataaaaagaaacaagaaaaggaaaaacctaatgcaaaccacaccagcaccaactcgaatgtggttcctactctcacaacaaatagggacttaactacccaatgccaacgcctcatttctcttctcagccaagaattgagccaagctacatctcgagaggacaccaacaacctctctgctgcctcaaacatggctggtaagtcctcttcttctcgtgcatttacatggattattgatagtggggaaacacatcacatgtgtactacccgaagctgttttcacactttttccaacattttttttcctcaaactgttgtacttcctactggtgcgaacatccctgtaaaaggcatgggaacagtccgattaaaccagcacatcactcttcaaaatgtgttatttgttccaacatttcacattaatctcttttctcttattgccttcattgaaaatagcctcaatacattattttttcaatgattcttgttctatacaggctccttcttcgaacattgtgattgggaaagctaaacggcttgggaaactctatgcaattcaacaagagctcaaccccataatacagcctagttgttgtctttctttacacaataatgtagatcaatggcact

SEQ ID NO: 324007 - DNA, 1606 bp, Cannabis indica
agttttaatttaataataaatttttttaattttttaagtatagaaaatcaaaattccattctaataagagcacctatagaaataacaaaagattattagtaaaacaatgtctatgtgttcactcattattggttgatgttgatttaactttgaaaaacattgaatatgcagcaagtgtatttttgtgtactgtacactaatacttatctgttcttgttacgaaaacttcccactcgaaaagggaaaaacagaacaagaatatctgaacataactcaatacttttgtctgtttcacaaagcaataaaaagtatttttagtggtatgtaggtgcagccaatgaaaagtgggtctaacctgaaggtaggggaaataaaccgtttgaggaggaggagcaatgacattgacattgtgggcatgatgaacctgaacctggagctgttgccttctccttcaagcgcaaataccatagtggccttatactgtacccaaccaaacaaacaccaaataagaacaagattgccctcaaaactgaacgactgctaactcttcctttgtctgctgaatgagccattttcttgttctttgtttgttacccaaaacagaagaaaggacaaaaccaacccactttgggtttatatgggcgaaactcaaataaaaaagaaaaagacccttgattagtagaggttattcgagatttgggtgggtcatcgtcatccatttaagctttcactttaatacttttctagaactgcgtgtgtaattataacaagagaattgaacagttgtcataaatattcggtgagaaatatgagaaagagggaatcaatggaggtcttttttacttgagatggaaggatcttttatggatgtgaaagagagctaatggttttttctgtaaagataaatatgaacctgaaaaagtattagaaaagagacttatatgggtttagtcggcagtagtgagactgaagtagacgacttttgctgtgtgtttataatcattgtgttggttttatattattttggttcgaaagtaatcattctgttgtttcatactaaataatggtgtgttttatttcaaaaaataaataatggtgtttttagaccatttctaatcctaaaaatttatacatcatctaaaaatataatattttatttcatctttttttcacattatttttggcacatttacttctaaaaatactccaatgtatagtactttttaaaaatgttataattataatctcatacattattatttagagaagtgctatggaaactctcttttatacttcttaattgaatgacatctgtaactttccaaattatgtttaaaaataattataagtatgcccccatttaatttttattaataataattaaaatgagacatcttatttacctttttttattttttaaaattaataattaatttatttatttttactggtaattaaaatgtgtgattctatttacttgtttgtttatttttcagacaataaaaaaacttaattaaattatatatattttttatattttgttttttaatagataatattgttggaaattattttaccaggatcttaaatctactcacaagtatgt

SEQ ID NO: 324008 - DNA, 771 bp, Cannabis indica
gggtccttatgtattttggaactctgtacagtagcccagcttgcacacctatagagccaaccatgtatatatacatccttagcaaagtaatttatacattctcttatattataaatatataaatatatataaaaatatattaattggtaaaataacatatacattctttttatatatatatatatgatattatattctcacacattattaatgtacagaacgtctctctaacaatctcatattaatattcaacaagtaatactgctcttgaaatattctaataatgcttgaaaaaggacagacattccatccggactcgagacttttgcactacccatagagaagagcttttgtctaattttctcatgtcctgggactaaaaccaaatgagcatgttcacccggggtaaggcagtttgaaattagaaaatccagactctccaaaaggccttgggccgggctagtaaaaaaatgatgagtcaagatgcaaaatggccctaaatctaacaataaagttaataaatgtccctttttaaaaataattaacaaaatgtccattctgttaaaagtttgataatgaaattacaattataaccttgaataattaagtatttagtatagttattttgcacaatagtatatcgtttttatgtgcaataatatattaaaaaaaactgaaaggtaatatatatatttttttgaaataactgaaaggtagtatattagtttaagattgtagtatattattttaatgtgctatggtatataatga

SEQ ID NO: 324009 - DNA, 942 bp, Cannabis indica
taaacatgtatcgagctacttaatcaaaagcttagtttaatcattctcattaaagaaggaaaaagagtgacaaaactaagagaaaattagtgtattcatcatagaaaatgatggctgtgaaatttaatctagcaataatattttgttctttattattggagattacttttgcaaccaatccttccattttcaatgtcaaggcacaacccaatagtgacattagtcaagtaagtacatattttttatatatataaacacatggacatctttatttttatctcaacttttatatatagttgagacattatttttatctttatcgattttctatatgattatgtgcattgtaattataagtgacattttcacttgtttccgaaacatttaaaataaaataatccacggtcaaaattaattgcatgctggctcgctttttttatatgcacttgcaattattttattttgtaattttattttttatattgtaaattattcaaaatttattaaaaatgaatgaaatacctattacaattatataaatataaattatcattttaaaaaattaggtttatagtttctcccgatgtctaaacgtaaatatccttaacgatagagacaaaagtgattacatatcctacaatattatgccctagctagaatttgtaatgttgtatttatctcatcaatatgaatatgaaagtgatgaaactctttatttcaacaatattgattcaaaattaattaattttatatgtaggctctctctaatgcttggaaacaagcatgtacatctactaccccatctgaattagtaattccaaagggaacattcaaattaaaaagagttacattagatggaccttgtaaggctccaatcaagattaatcttcaagccacattgcaagccccaagtgaccccaatggtttcaaagatggagatgg

SEQ ID NO: 324010 - DNA, 866 bp, Cannabis indica
ataattttaagtgtgaatttcaaatacgtaattatttgttcagtatagttaaaactaagatgaatcttgtactttaaatggtagctttttttctctctctttttaagtgctagcttaattattttattgttgatttagttgaaaacgacctccacgtaagatttatttttcttgatcatgaatggttagagaatattaacatcaatatcaaaagttaaataacatcatttgtcattaagaaaaaatagaatatttaaattagaaaccgtctcttcttgccaagaaagcaatccatttaaattgaaattactccttctttaatagtagaaatcaaaagcgcatggtttcacttacaatattgccagagagataacattaaagaaattgaaatcttgttgctcagaataactaaatgtagaattatcatccatatttttggggagtagacttggtgcattgaatcagagagattgcctcaatgtagaattattatccatgttaggcttagaattaagttatttatttatatatttatatatatatatatatattagttttgttaattaattagttatactgtagatatttttgagtgattcattaattgttgtattgtagaatttttttttttttttgaaaaattttaggtgtagccgtaggttagatttttttttaaaattattttcaattaatttttaattgatatgacagatatattttttaaaaataaataaataaatagatttataggtttaaattgatttataaaataaaatataattaaaaattaaatagatgagtgaattaaggagagaataaataagactataattagagagattttagaccgccacgtcaccgcctca

SEQ ID NO: 324011 - DNA, 1069 bp, Cannabis indica
atgtaattatcccttaatattattaggctttattttatataacatttttttaactttttatcttttttaaatttttggattagtctagtaatttttatataagttgctatgtgagtttttgttgcggtttaaattgttctgttggttgctatgtgagtttctatgtgaatttttgtaaaaatgtaaaaaaaaattattttgaagtgtaaaaataaaaatactccttaatattattaggcttaatttttttctctaagaatatttgagtatgagaagctacgaagccataacaccatactagaatttttataattggattaatactatgagtttgattgaaatttatcaaaaaaaaaaatacagtgggtcggtcctttaaacaattatacaacccacaaacaaaaaattaaaaaaatacctctttttctaaagctttagccgcacgaaatagaaaaattaccaacgaaagcaaccatcgttcaacccatcaagacaaccgaaaggaaacccaagtatgagggataccaccattaatttcggtgacctcaccggagaagaagataggaatcaattgaaacaaatgttgattcatattaatgaaagaaacaaacaacctcacgcacacaaccttcgatcgaccaatccaacaacccaacacaactgaaacaatacccaacaagaaagaaaatcaccattaatttcggtgacttcacctgtgagaaaacaaccaaaatcaatcaaaatatgggctgttttcgaattcatgaaaaaaaaaagtctaaaaaaactactacgaatctaaaattcaactagaaatctagtttaatttacataaaactaatgtcctaacttcaattttcagatccatgaaatgcagatctaaaaaaattaaactggagttcttaaacaatccaacttaagtataacccaaaaaaattacatcaatattatagttaaatgtttatcccaatgcatttttattatttactagatttctaatagtgaatttgttcatattaaatcacgaataaacatgtagatagagttacgtatgtggaaacactattct

SEQ ID NO: 324012 - DNA, 1182 bp, Cannabis indica
acacgacccgcgaacacgaattgccactcctaattctccatagttagaggatgttgttatttagtaattttagtgtttttcgtcatttttggaataatttagattttggacggaaattgagttttatgagtaaaaagtaatggatttggtatttttttatgctaggtgatgttagcttgtggatggattaacgcgccaaaacgacattttcctagagtttcaaaagtccatgaagagcgaaaacccgtgggttgtcgctgtagtgaaggctgaagcgaacataaaaagaaaaaaaaataaaagtgtggaatcaagccctgtcgtcgcggccacgagttggctcgccgcgacgaggaccctgtggctgcaagcgagaaaccctgtggccgcggcgagcagtcaaaatttgggctgagcgatttttttatctttttttagaggggagttatcttttttaagtgagatattttctagtactataaataggatattttaggctacgaattttagaaccctagagctaccaaattgagatagaaacttagagagagagcaaggaagagacagagattacggcttcaaagtgttcttcatcatagttcttttcttctccttaaacacttactatttagcgtgtcactcatcagtttgttgaataatgtgatttaggggcctataaatcgtcgagcagctattccactccggttggccgacacacctgaatttgaaagtgaggtaattcgactagaagacatcagggtggttcaagaagttttagatgtatttcttgatgaacttctgagtttaccaccgcagcaagaaatagattttattatcgatttatcacctggagcagaaccagtttctaaggcaccttataaaatggctctggtagatcttaaagaattgaagattcagctttaagggatgcttgatctagggttttcacgacctagtgtgtcaccctggggagctcccatgttgtttgttaagaagaaagacagatccctacgcatgtgcattgactattgggaattaactaaactaactattaagaataaatatcctttacctaggatcgacgatctgttcgactagcttcaggggaagaccatattctctaagattgatctctgatcgagctatcatcagttgagaatctgagaggaggacattccaaag

SEQ ID NO: 324013 - DNA, 934 bp, Cannabis indica
atgagtggaccctaggcataagactagcccgcagtcaacaacccttctacatgcagtttcgttggccttgcatagggattgggcttcacctatttttctctctcattgttaagttttaatcaatagtattatttgcaggtcgccctttaattggcgtgagagaagtatttttttgctttggtttctacctttgattctctgcacaacgcttcagttatgtggatacctaggaccttgaacttggctgtccataaccttgttgcttggggagtttctacaaatttttgtagtttcctttctttaaggaaagtagaaccttttgtttctacaaacaaacttagttgtggctctttttttgcctacttaatgtatggttttgagaaaaaaacaataagtttagaatttgatttgatttttttttaaaattcaaattgagagagtttctctattctatcaattacataactaaaattcaactttatttaattcaccttaaatttttactctacactatatattaaattatttattttttctttatattatttaaatattatattttaaatttacataagaatttaagtacaacaaaataaacaacataaatatttttactgccaaaaaatttaagtactatagaataaactgcataaatatttagaggggtgctaattacaacctcttattacaatttttagtcaacttctacgtctgaaatcatatgccggaatattttctttcaatttttttttatgatgatattcattataattacagtattatctttgtaaatttttaaaaaaattctgaatagtttacaatgccgaaaacagagtacttaatatttcaactaatcacgcgcatttgaaaattttcaaacgcattttcggcactgtaaactattcgaaaatgtttaaaaatttacagagatgat

SEQ ID NO: 324014 - DNA, 669 bp, Cannabis indica
atttttaaaatttatatctaatccgatccaattacgaatggatatcagaatccattagatcagttaggattgaatcagtaaattgtaattgaatcggatgactttccgcacaccactacacgtgatagtctattccttaacaaagttgtttacttttatatttttttcacgggtctggtttatgaaaaatttgaaacaaaataaaaataacaataactgttcgaacgataaagtagtaaataataatattagcaagatttataagagccaaggaaacttaacaatataaagtgtcatccacctgcttttctgtatgatggccaaaagtatgaagatccaagaaaatattgattctctatgtatatgaagtgttgagctgatcttatcgccttaacataagctgtatggatacttttatccactttcaaattctttcctcccataaggttctataaaataaataataataataataaaaaaatgaacaattcaatgctgagatagctccgagcgatgattagaaaccaaacaatcaactcgtggctactggctgttgccgtacaatataaacaagggaaaatttggaaaaatattgaaaatttgggtaaactttttacaaaaaatactgtcacacagaaaaatctgtttttcaaaaaatactgtgttttt

SEQ ID NO: 324015 - DNA, 994 bp, Cannabis indica
cctgggacatcaccacaattacttgggaagaatttcaagagctgtttaattgaaaatactacaacaaagcagtctgtagtgcaaagagaaaggagttcacatagctgactcaaaaatagaatatgtcgattacataatgcacaacacaatttgatagattggctaggttggctgcaggaattgtgccagctgattttagcaagaaacaaaaatatatggatgggttgaatcccaagattaaacatgacttgatgatcacaatggctgatgcgactacctatgatgatatggtagggaaggcactgcgggctgaaggtgcagtggagtgtactaatgagccccgagggacttctagtgttttgtggggccactgctcctcttacctttggttatggaggggtggtagtgactcaacctcagatcaaaaaagaaaggatccattttcatctggtggctcaagccagaataagaggtttagggagaaacaaggctgaggcaactaatagggtgggtttaagaaccagtacacctatctagaatgccctaattgtaagaagcatcatttggacaagtgtagaggccaaggatgtttccaatgcagagtaactagacattacaaaagagactacccacagctaaagaaagaagagcaaaagaccaaaacaaaacccgctccaataagggtgtttgctcttactcagttgaatgttgaggccagtccttaagttgttccaagtcagctatcggttaacaactcttactattctattttatttgactttgtggccatttattcgtatgtggcagccagagtagttgataagtttggtagaccgtatgattggtatgaaacggggtttggaaccctattgcctggaggaaaattagttatctccaaaaggtgggttaggtctatgccgattagaattgaagatagggagttgagtgttgacctagtggaattaggtttagcagattttgatattatacttgg

SEQ ID NO: 324016 - DNA, 561 bp, Cannabis indica
caatcacctaatatatatatataaaggataatattaggaagttttgataatttttaattttaataaatgttgatttatttaagaagaagaaaggaaaagaaaatgaggggcccacagaaattggaaattggaggtgggtaacggagccatgtgcgctcatatggtggttggccttttgtagtcccacgatcgaactccttttttcacctccaaaaactccatttttgaaaacgacttcacaagcctcatctattcctcttattatattttatatactttaaacattctaatatatatttttatttgtttatatattataaaaataattatgaaatgggttcctaaaaaagtattgatatgagtatttagataattgtgatattgatattattattattggttagtataatttttaaaaaaattattatcttatatgagatttttttttttttttttagaatggtaaatcaaactttattagataaccaaatccgttaccaaaacaggtaacaaagtagttggaatagaatccaaactgaaattacaatcaggatagcatac

SEQ ID NO: 324017 - DNA, 1390 bp, Cannabis indica
aatatttatctaacgatattctttcgtatttataaccagggctaaaacccatatacaaaattaaaagcaatctatatatgcatataacatgtggaaaccatgtacttttttttttcttttcttttctctatatctatttaatacaattaatcatcatagttccttaaaggaagcacaatatatattaaagaggttttattgattagttacattaaataggttgtgattagtcatttgatttaaacaattgaaattaattaaaataattaataaaatacctaacctaactttatttagtttattaaatttgttttctaattataaaatattaattaaaaataaattttaattataattactaattagttactaattaaagttctattaataattaatttttgttagttaaattattaagatatatgtaggaaaacttcctaatagttataacatgttatacatatgactcgaattaataaaaaataaaagataataatcccacatgttaataattttaattttacaaatattttacttaagtactcgcacatgttaatatattattggatttgggtcactaactacataatttattctatgattatcctagaacaagtctaagaagaatcaagattcgcaaatagaaacctaacaaattaagcatgcaaatgtataaaagaaataaaaaatttaatcactggtttgaagttgtttattttgctcggatgttgctggcaagagttttctgaaattcttcgaagaatttgaaagaggaaattttttttgctctggtttttcaaaaataaaaatgactaaaatgattaattagggttttcaatcctatatatagagttcaaaaagaagaagtaatcattttaaaatttaaatgtctcgaaattctccccaaaagtgtacgttatgtactcattgctggcagaataacagtcttcatgcgcagacattaagtctcgatttgaggcaaaactgtcaatcaacattaatgagccaaaattgaaaagacccttagcaagagtcacatcggtttgtcaatcgacgtctaggacacgcgtcacccgtctggataagactccagatcgagtgaagtccacgtgcgaccagtaaggtcccgcgtagatttgaggaggaaatgttatccagttttttgcatattgactgggcaagaggactgagtgacacgtgtttcacatttctgatacttggacggaagtaaatgtccctaacagcctgcacataattcatcagcatctataattatcgattacccgagtagagttgtaaagaagacgtttgaccaggtagaagtctattatgccaaagcaatttacaaaagataactacttcaaaatgatcttattttacccagagtcca

SEQ ID NO: 324018 - DNA, 864 bp, Cannabis indica
aatattgaaattttcaaacttgtttgtactcttaggaagaacctgaaaataggtataacaaaaaaaattcaataacgaaaaattctaacaactaattatgtaatttcaaaaaaaaaatgttaatagaaacattatctaagcttcctaaaaaaaccaaaaaccaactactaaaaaaaaatattaaaacaccctgaacaacagaaaaacaacatataaataactatctataaacatgaaaatattagaaaaagtgttaaccgtaaaataaatttcaacaacctaaaacaactgaaaaatcaaattaaaacaactttgtaaaataaaaaccaatataacactaaaaggacaatcaaaaaacaagaaaaaattcttaagaaacacaaaaccttcctacaaccaaaaatgagaacaaaaacaacagaaactctaaaaacacatttaaaactaaaaaaataactaataaaaaaacccaaaataaaaaacaataacaatgtatagtttggttcaataggtcaaaaacaagttaataacagaaacataacaaaaagaaaaactaaaaaacaacataaagcaaaatgcctaaacaaatgcacacaaaaatgtgaaaatactttaaaaccatgaatacaaacagataaaacataaaaaaatagaaaaaacgattgatcaaaaatttcaacttaaaaaggaaaaaatgcgaaagaatatacaaaccttgagtttaactttaggctttgattccaaatgaggaacttcatcctcgaagtcagaaatggagagaacctaaaacattatggagaaaaaaaaattaaaacacaaaacagaaaccaaaaaactaaacaataagaaaaaaaaaactaaaaa

SEQ ID NO: 324019 - DNA, 628 bp, Cannabis indica
ctaaggctttgctagcaccaagttgaagttataaggcaaacttagtctggtcacactaagttttaggggtgtgagtgaagtcaataattatattctgttagagtttgttatcatattgtatatagttatatgttaattagacctgttaacatcaaatgtatttatactgagctagtgttgattcattcaatgtatttatacaatgaacagatttatttccatctttgattacactctctaagctctaataaatgttagtaaatcaaatcacaaatattaaatcaaattatgcattttattttaaaaaaaaaaaaaaaaacatatatttagatatacggataaatttagttcacacaacatatacaaatacaattggacttgtcaatagtttggatagtgggtgaaagttttaataagaaaaaaaaatgcaaagacattatttagtatagtagtgctaataattaatacagtttggtctcgtttggaatgccgtattaggttgtattgtattgtattgtattatattgaattgtattttatacaatatttttatgtaaaattatacgtggcattaacttttatagacacctaaatatataatattttagtataaattaaagtttaatat

SEQ ID NO: 324020 - DNA, 1542 bp, Cannabis indica
acttacaaacttaaaactttgtgtacttatgccactatttaccctttagataatcatatatctaaatataatgtttaaagggccactaattttgttttgttttttaaagcattagattataatatatttaatagcatttcttctctctctagtggacctccttaatggctcttgttcttgagggtgttgaatttgttcttcaagaacaataacctcatcctgatttgggagttgttcaacattgtcttgttgaggttctaattcatttcttgatcaatgacaagcctgagcattgtctaaaataatagtaggagcatatggccaagcctctggttttgtctaaaccaatccagggagaggacatctaccagtatctgaccgtcttcaaaaacatagttagtgaagccctggtccgggaggaagaaaaaatccagcaccctatctattacgttagtaagaggatgataggggcaaaaatttggtatcccttaataaagaaactggctttctatctgctgatagcttcccaaaagttgttaccctatttccaagtacactcactcaaggccttgaccaaccatccattatgacaagttttgctaaagccagaagcttttgggagaatgctcaaatgggccatggagctcagtcaattcaacaaccagtatgtcccacgtgtctcaattaagggacaagccctagcaaattttatcatagagtgtaatgaaactgaagcaactgctcatgaacctgaagtgatggtgcccacctagaaaatatatgttgatgtggcctaaaatgagaatggatacgaagcaggaatagtgatggtgtcacctaaaggcttgaggcttcaaacttttacagtttaaaattcacgcctctaacaatgagacagaatatgaagccttgctggcaggactgagattgtcaaaggttgtaagggctcaaaaaataaagatttttagtggctctcagttgattgttaaccaagtacttggagaatactaaactcgcggagaaaagatgacctcctatgtcgttgctgcaagagaattgctctaggagttcaagggttataaaatcgagcagattttgagagaacagaatgcccacacggactgcctcgcaaaattagcttcagacaaaaaagtagaaagtaggagtgttcgcggtgcaggtggtgtggtttttgaccattttctcaaaccaacccgcacatgcggtttttctagttttccaaaccacacccgcactgcaaaactaaaaaatcgcagaaattgcaccgcaaaaaatggtgcggtgcagcgcggttttacagtttttgcagtttggactatcaccgataattaaactatcacaaatacaacaaatcttgagcaacacttgtcaaaaatactataaggcttgaaaataaatatgaaaaaaaattaagtttcaacaatacaataattattgggctttgggttgaacatttacatattggacctaaataaatataaaaattggtattttataatgtgtggtgcggtttgaaccgca

SEQ ID NO: 324021 - DNA, 1157 bp, Cannabis indica
tttttttgtaataattgatctctagaattaattaagtaataattaataataatatcaataaatgacaagaagctttttacgtgattttgaagttctcttcatagtccatgaatccaacttattctgggtcggtaaatagtatatagaatacaattaattgttttacagaatgaataatagatataatactctctctttcccccaaaatgaccgtcctttgttccctgggttctgtcctatttataggagtctaggatgatagttattcccttgggatcttatcacttgtaaaacgttcatgaaacatggacatgaacgtggacattccccacgtttcatatttacatcacatgagataattataaataatcattgtaattgttcttcatctttatctatagatggttatcctgcctatgcttcatattcctcgcaattcaatcaaaacaaatcatcatgagccagcgtctaagtttatgtttgtaacaccctactagtttcggtgtgttgttatgattttatactaactgagcaatctgtttctaatcaacgggtttgttggaaaatatgtttaattaaaacactacataattaaactttaaattaaaataaataaactttgcataaactgggatcccgatgtttaaaaagttacagccataatactaaatatcagttacaaaagatgtcgcctagtgactaatcaaaatacaacctactttcccaaagattatacgctccaggtctaactgcccctatatgtacaatcttcatctgctcgatctcacagctgctcggtcttagctttgcccttacctacacatgtaaacaataactgtgagtcgacagacgcagtaagaaaagcataatcataacataaacttaaactaaattacaactaggtgcccatacacccaatcataaccctatcccgcgtcccacgcgtactgagtctacaacgttcgtacgacagtactattgacctttatatcaacctatactcggtactctagtcgtaccgatgtgatagcgtcaatcagtacttatgctaaacatacattcatcgctattgaatataactctatgtatactgataccgctattttaatgtaatgtaacatgcatttataaacatgcatgctaaacagggtgcgttt

SEQ ID NO: 324022 - DNA, 1087 bp, Cannabis indica
aaaaaaacgataaaaaaatctcacctgcatgggattatttatcccaccctgctggatgggataaataatcccagacagatgaggttaactggattagttatccagacttctaacatgcccaaacaaaacaaattagcttgtctaatccaatccagtcctgcgtaccaaacgggccctttagggtttgggtctgctaatgttatcccgaatattagtcggatgatgtagtaggttcttttcggtgacacatatctccacattgagatcaggacaaacaaaaatgtctcaaggatcgaccgctcaaggtgtatacagggtcaatcgaagtaaaagacggactaagtataattagttgcataacatcaacatgaataggcatggtgggatgaaaatagtacgagacgcatacgagccgaccggggaaaaaacgcgtgacataaataaattcaataaagcttcccatttatgtgcaataattgaaacccaactagttttttaatattttaggaagaagagttgatttccgaaattagtagggtgacaactttagggaattgaagtctattttaaatatcctctataaatagtagatcaatgttactctaagaggatctgaaattatttgtttgagagcctatatgctgctcattttcttgtaaagctttcgagagagaataattctttttgcttctccacttacaagttaaatacaataataaggagagtaagctattaccaaaagaatgggtgttagacctctataacatatggtgttcttgattttattgtatattatttatatctttcttaaattttatagacttcttgtcgctttaaggattcagtttcgttgaccaaaagcgaggtcaacattgtgatgctttcattgagagctgagaactcaagaacacaatctgattggtttattcaataaagagcacaaatagttgtacaaactcgaagaactcaagccacagaccctgtagatccgatggaaattgatctaaatgcccagaatcctgctaatccaagaaaccctcacgtggttgatccgagtacccaaaacactgttggaattaattttacc

SEQ ID NO: 324023 - DNA, 1017 bp, Cannabis indica
gtgggcctgtttgttgtcggtgaagcaagcaaacgtctcatctcgttcattcgaggttaggaatgggagcctatgaatccatggagtaactagactccatgaattggatatgtagtttaggtaatgccaaggttgattcgccaaacagaaggaagagggtgctaaaagccccaacccctagtttaattattatatatatttttttagaaaaataataggtcgtacatatatttatataatttttattagataatttatcatatttggttattttgttaatttttctaaaaataggacacttttattaatttctaaatttaaggtcattttacatcaagtcctatagagattgagtatctatatgtatctattgaatcaaggtcctctattaaaaattggtgtcccatactatattaaaccaattaagcttttccacatcaactaatctaatttatttatattaaatatgttaactaattttgttgactcaactataggtttaattttttataaataaaaatttagttgacatgtcaaatttaattagtttaacacattatagaatactactttttaacaggagtgtatttgcatgtgtattgtattatttgtagatatatctattctatataaaatgtggctatataaccgaattctaggtttatgagaaattactgggtgacgacttttttttttaaataaaaaaaaataaaaaaaaataacaaattattagatgttgtggtcggcatctacgtagttagttaaacctaaatataattaatacaattaataataaatttattcatattgtttattttttttattaaaaattattttcaaaatttgatatctagaattagttaaatgttaaatattattttaaattaaatttgaatgttttgatagtttaacgagatgaacattttcattaattccgaaaataaatttagaacgaataataattttttttaattactattaccaagtataatagtaatttttgtttttatttaaatc

SEQ ID NO: 324024 - DNA, 637 bp, Cannabis indica
gagttgtgggcttgagcttgggtttaggtaacttcttgctgagtttatgtaagatttattgggaatttcttgctgaattctttgattgaaagtatgaatatgatgatgatgatgataggttgcatgttcttagatgttgtggtaattttgatgaattaagtgagaaatttcatggtttgattgggattcatgtttgtgagcttggattgtgactctaggttatttttctaacttgaaatttatgttattttgatatatgattgctggaaattagttgtgtttgaaggatttatagctcaagttcttgagcttgtgtatagctagtttaaggcatgaattcttgtgttttgtacaagctgtaagtgtgagtttattgttgggatttagtgtttgaaacatggattttaactccttgctgtttgctagcaaccttacttgttaattttgaagtttggttgtgaatttgaagtgaaaagattggagttcttgctgagttttcgtgttctggctgctggaatctgggtttggaacccagacgccgcgacatgctctggagcatgccgtggcccgcccctcttggtggaacctgggttttgtcccaggtgccgcggcatggtttgggcatgccgcggcccgc

SEQ ID NO: 324025 - DNA, 629 bp, Cannabis indica
tgattaaaaaaagtgttaccaaacgacaccttagttttatggttttgagctagtttctcattttctctaccgtggtagagtcaagtcttacggactgacttcttatattgaatttaggactaatcctgaaagtacaatcatgtatctatttttagaaagatttttatgcttatgaatcttttctattttaatacaggagctgcaaaactcgaagactataacttcaattggtgatctgaacagtgctcataaagaaacagtcatggatagccctattgtgagtgtaattttttcttcatcttataactctcattattatatggtagataatttaaccttagaaaatatacaagctatgaaattctaagcgtatcaaataaaattaatgacatgtacttttcatttataagaggattcacgcagagaaaagctgtagagtcatcgttatggcttattattggattatttttttcttttttttttgtttcatatacttatggaatccacaacttgtcttatctttcattactcaactagtaactaatcaccttcttttttttgagtgtagcgtaatggtattttacaatcatatattagcttaatagcttaaaggccctgggctcgaaccc

SEQ ID NO: 324026 - DNA, 1427 bp, Cannabis indica
atggccgtcaccaaagctaacgaatctgaataaactgcatgaatttgaagaccacacacatgagcccaattaagaccaaccaagggctaacgtttcagcttgtaacactgaaattccacctgaaacaacatcagaccacaaaattgtaattagaacattaccaatctgattaaacacttaaatccaaaaaaattaactacgtcccctatgatttactttaactagccaaagggagaccctttggctagtagtaacttaacttatgtattttacttcgtaatcaccttagctttgttattccttcctagacctaattattcttatttgatatctagaaattacaagatctttataattcacccatacctgaacgatcaacatttcttttggaattataacactaataaaattcgtaacaaaataatatttaaaatacctaatatgactaacctttgagtggtttacttaacgcagcgtgaactctattatcttctgagaataccaccgcacctaatccaactatactcgtggtgctcaatacagctgcatccaccataagtttagagtataacctctgttcttgagcacttgtagaacttccagctgacgcttccctatttcttccattagtttgggaactttttttgggaccctcctttattgaaagaatcgactcgtaataatgtaataagaccaattttgacccatttcaaaaaaataaaatgaaaaataagaccagttttgaaactacattctcgtacgtgcgagtccattcacatgcaccaatttcgccatgaccaaactcagcttgctatctttgatattttttagatcatatattttttttaatttttaattaattttttattttgtaacattgttacacatcagcagtatcagttcaaaaataacattacgttagctgaattaatattggaccatatatttaatagaagtctggtaaacataaataattccaagttaaattttaaatgggtggtagatgcaaatttgtacacgattatatagaattaatatatgcatatacgtacatatattacataattaattttgtagatttatgtgactaatcatgcatgcatgcataatataataagttttaatttaactgtgtcaacatcaaatcatcacaagaaaaggttctaacagtgtactagctagctagtaatacatcacactactacatgtggaggaatcaatagtacggatatacgtgcatgttattaataatttacaagggaattgggttttgagagagacgaagagagagaggttgggtccgctggtcggaccactggtaggttttttttttttttttagttttgagagagacaaagagagagaaggggctggggttggggtttttttcgggttccgtgggttgagcgtcggtgaccgtttggggt

SEQ ID NO: 324027 - DNA, 715 bp, Cannabis indica
aaaataatttaaaataatatttatccaataaattaattaaattatttttaacaactcatagtgatttttatatgcttaatgtatgaatgtatatattatatttacctgcataagagtctcttcaccactatggttcttatctccttgtcttgtattcctcgtttgctatccatctaataatttataattaatattctcaaacacaaagaaaagtttcaagatatatgtgtacattgattaatgcaatcttttcataaattatatatatttatataaaattgagtaaattaattaactaattaatgtttcttgattgtagttagtgtttctctaataactcaccaaccctcatgtcacaattaattaagtttattatttaactattgcacgtgaaaagtgtataatgttgataattttatcaaaatcaagaatagtttgtcctattatatttttaatcaattgcatttgagtacttagatccatattggttaaaatataatagcattttaatttctaaaacataattagtttattaatttaatctcctttgacatattatagcactattggaatattggataatatatctatcaattataatcaaatccacaacaaattctagtattttaccactgtaggttcttatcatcaatatccccatttaattaatacataaaagagcatgtttggtatgttgtattgtatagtatttgtg

SEQ ID NO: 324028 - DNA, 629 bp, Cannabis indica
atgaaatttttccatgaaaatatttatttggattccttgtgaaaaatgaagcaacttttatttttaccgaactcaatttcgataaaaattgacaaagttatgaggttttgaaaatttcaggtttaagaggtgtcgagtgggtgctcgtgtgcaccaggcactcggacaaggagtagttgtgcgcgcgcggaatgggggacaatcccctgtctgaagccgtgtctcggctggcattcagacacaacacgcctaggaccctccgtgtccccttgtgctaaagctgctggcgccgaggattgccgcacaagacaccctgcatctccttccagcgtgcacggacagggcaatttgcagcctctcaagggctgcacgtgtagccctcttggcagccacccgaattttgtgggatttttcccaaatttcgtatgtttgcaatttttaaaccccaatttcaaaataaaatattattttaatatatttaaacttaaatatcaattttaaattaataatatttaatttttaatagattattattaattttatgatatttggaggtttaaatttaaaaattgattattttattttaaattatggtcaaactttaaaattttattaatttctttaatatt

SEQ ID NO: 324029 - DNA, 1106 bp, Cannabis indica
gggaacaccactgtttgataaaaaattatttccattatgttcataatattatatacttgctggcactttggatgctggtctcttcttcaaaccagccaaagtatttgatcttcaaggttttgctggtgcagactgggttgggtgtcatgatgacaagagatcaacatctggttattgcatctttctgggaggaaatttaatcagttggtgttccaaaaagcaaattattattgcccgatcaagtaccgagtcagagtatcgagctttgaccctgacaacctctaaactcatatggattcaatctattctcactgaattaagcataatcacctctcattatccaatcttgtggtgtgaaaaatcttggtgcaggctcattagcctctaatccagtctttcgcccgcacaaagcatgttgaagttgacattcattttgtccaagacagaatccttactcaacaactgatgtttgatatgttgcctctgaatgttaacttacaaatcttttaacaaagccacttccaactaccacttttcagttcttgtatgacaatttaacacttggtctagactagtgtcacttgaggggggatcttagactaattgaattagagagttaattaaagttagttaaatgattagttagaattttgttaattggtctgttagtctattataaattattgttgacctgtaattgtaattaattggcatataaatagattggctaagccgaacgtgcaaggttgagcttcatttccaccattaaccttcttcaccattttatttctctcagttgacttttctctttctatttttctaatagaactctaaaattttgagcacgatatttaattcacacaagtgtaaattttaaaaattttaatctaattcaatttgcacaagtgcaaatattcgcactttgtaaattggataaaaccgatttgattggattaagtattttatagggaaatttaatagtatactaatttttgtttatttttttttactaaaaatatgccagacggtatttttttacttattttactgtgttttttttataagtttcatactgcagtatactgtgttaagttttcactgatgtt

SEQ ID NO: 324030 - DNA, 1307 bp, Cannabis indica
gactgattggcaaagttttgtttaaatgcagttgctactaaggctgctaggaaggctttaaggtggaacaagtatatcgtacagaaagtagatattatggctaaacaactaggagttttctagttttatgctgaggtggttgagtttacccttactgttgagggtgcaaggattagatcacatggaaatcatatgaagagagattcataaaagtaaagatccaatgttggatcaagtaaagggagttaaccctaatgcgggcccttccattgtgacaggtcagctttttgatgctagtactttattgactgtattgattgattctggtgtgatgcctctttatatctcaagtagcataattgaaaaaaaattgagtagacctagtgttatgcttttaggaggttttggtattttactgcctactagagagttggttatctccagaaagtgggtttggaagtaagggagctttcagttgatatgacagaattatttggaagactttgatgttattttgggtatggattgtcttgcaaaatgtaacataaccattgattgtaaaggaaggatggtaacttttcaaccatagggtgagaacccataagtatttgtgggtaaagtgcaaggatcttagattcccttaatctcagcgttgaaggcaaaagatttattatgtgaggtgtgtatcagtttcctagcaagtataatggatactacaaaggaatcactagtgggaccggaacatgttccagtagtttgagaattttagatgtctttacaaggaagctaccagggccaccccagaagtgggaaatcgattttgaaattgatttaatacaaggggcggagcctgtatcaaaagctccttataggatagcactgtagagctgaaactgtagttataagggatgttggatcaaaaaagtcactagattgagtacctcaccttagggtgcgctggttttgtttgtgaaggagaagattaatactttatgagtgtgtattgaccactaggagtcaaaaaaataacagtggagaatgagtattcgttgtcaaggatagatgttatgttgatagattttaggaaagggtcgtcttttctagggtcggtctttgatctggttattactagttggagattcaagaggaacatatttccaaaacagtttttcgtatctgatgacttcataattgtcttcattaatgctattttgatttctttcgactaaaaacaaagaggcatatgagaggtacctttggatggggttgctgtaacaccctaactaacataggcgtattacgtgatt

SEQ ID NO: 324031 - DNA, 564 bp, Cannabis indica
aatacaaaatatacaaaactttcttaattttggttaattgttgaactgcttgccttgccatacatgcagttttttaagattaagaaagaacttcctacttcttaggatgtttgaaaatttattttgacaattataataatcattttaatttatttaaaaataataataatattcacacttttaaaataattttttttaaaaaaaaaaaaatctccataatagtaaccaaaaatttaaaaaaaaaaaattaatttttttatttatttacgttataggaaaatataattttaaccaaataagacctatgatcagctaataattttttttttcttaacgaatttttaatcatttttacgtacagtaagctttattttttacaaaaatgcagataagcagattgttgtttttatgttgttgtatttttacgttattttcatgttttttacttgtagattttacgttaatagtttgtgtatttatgttgtttttgtgtaatttttatgttgttttcattaaaattgtaactaaataaataaaaaattataaaattatgaaaattaattt

SEQ ID NO: 324032 - DNA, 538 bp, Cannabis indica
ttcaattggattggatgatgcccacccctaccgtctaccatgctaagtatgattttgagtgccaatgaagtgattaaaatgtattagtgaataattacttggtattagtgaccttagcggttgtgtgatcgtaggactagtggtggtcgctgtggcagtgacagtggtggtggtactagtggtcataagacaactagtctgaccataaacgtgttcattatcttcgataatattgctattatcaaaaattaattattaattaaaattctgatttactaattcattaaactaatacaaatagttttgctagaacatttttgttacttactccaccgtattttttgaaaaaataaataaattatggtttgaatttcggaacaatattttcaatatatataccttagttttatttttgtatttatatggtatatatctttatatattaaaagtgtctatctaacggcatttattggtttaaaataatatacttaaaaataaaaaaatattctgttaaatttaacgtttgatctcccgttaa

SEQ ID NO: 324033 - DNA, 698 bp, Cannabis indica
gttgaccaagagttgactgagttgatcgggtcaacccgttgactctgccaactcaaccccgcaaatccgtaagcttgaaacccgtgaacccaaaattcggtcaacccactcgatgttcagccctacctgccacgatcttagctcattctttgggcccattctctttggatttggattagtaatttagtgcaacccaataaaattgagccctttactttatatatttttacaaaaaaaaaaactttttttaagaaaaatgataacaatttcattgatgagaaggttaaaccttaaatacccaaaggctcaaataccatacatgcaatattcttaacggtgcaatatacgcaccctcaatcatgttgcataaaagcttcttggattcaaccttactcacatgaatggataactaaatcagtgacatgaaccaattgtgataaagaaactaacaccatactatcaaagatagatgatcgacactccacacaaagaggtggacaaactaagtccataacaatgagactcttatcgaaaacataaaaaaaacaaagaaacaacaaaataaaataaaaacacaacaaaaacatgacccaaatctcaaaagctgccacgcccttgaatcttgaaacactatcatattgatggaccacttctttgtgacccctgttaaataaattaacaattaacccaagatctat

SEQ ID NO: 324034 - DNA, 538 bp, Cannabis indica
agccatcaaagatgtaatcaaacaaggaacataggtagacaatcaagaaagaacctctaaaagtgatctatatgttagatgatatgggtgtatttagaatccttagatcaacattaactcaaaaattagtatctgagatggtggtaactcttggtgtggaagaattatttgatatgggtgtcttttgacccatttgcactaagatggtccaaaaaactgaaacgttaggtttggatgtcaacttgggcactggatgaaaccctaggtgtctaggctaacttccaaggtgctggttcgtgtatgtttagctcccatggcaaggatttggttattccaggtctttatggtgttcaataataaaggatagtgaattggaaactgttggaaatattttaccaggatctagatttactaccatgtatgttcgttaacatcctaatatgaattttaaaataatgaaataaacacataaagtttaggaaacattacattgggtgtagtggaatataatgactccttcgttcagatctctagccct

SEQ ID NO: 324035 - DNA, 1537 bp, Cannabis indica
taaacatatatgtaatattagtaaaaatatttattttaatttttttaatttacaaataacataatatgttatttaattaaaattaatatatataatttatattttattaataaaagtatcatatatttattaaggggtgactcatttattaattaattttaatatattaaaaaaagtatgagacgattaacaatatactattatattacatatgaattgttaatttaatcatatattaatttgtgtattcttactattaatgttattgttatttaattaattaggtgatggaaaaggaattgtttaggttactaagggcaaaatgggaaaagaagtttgattcatttatatgggaaagagtggaagttgtgtgtggtgacattagtgatgaaaactacttattaggcatcaaaaattccaatttgagggaccaaatgttcaaagatgttgactttatagtcaactgtgctgcaacaactgatttctttgagaggtatacaacaaacaaaattatatgattttactgcaaattaccattatttaatgatatatataattcatgatttattatattagtctaatttcaacatttttgtatattgcacccttcactaaaacctaacttttatagtgataatttttcagtcccaattcttaaaattgtaattcagaaaaaactaattaattaagagttttttgtcttccaaaatttgatatgtgctaaattatgttcctgaatttttaagactgattaaaaattgccacctgaaatattgagattattagtttaaggactttaatttatccaaatttaataaagaaagtcgaacatggatagaagttcaggagatataatttgctatatgttaaagttcaaggagtatgatttagtagatatcgaagtttggagagcagacaatcacggaactagtaaaattaaatgaaaatagataaaagtccttaaatccaactatcttaatagttcaatgagaatttttaacggctaaaaaagtttataaaacatgatttgatacatgtagaggacaaaaatcataattagccttcaaaaaataaaatttagatacaaataccattgatagagcccgacctgcatattagtgatgtttagggtaaaaagttgattatatatttgtttttttattaaaaaaaacaaggaacaattttattgaaaatgtaataagggttatatatatattccacaaagaaaatgaaaagtactcatctagctaaataataagttgttcatctatctgaaaatcacaactaaccacgagagtaaaaattaagaacactcatagaaatctaaataacaaaaacttgtaaaaacttctaacagttatttaaaatcattaaagtaaaaactctcatgtgtaccaaaaaatcacggttaatttctaaacaaattggttaaagtattggaatggaatgatttttttcctcatcacttttatagaatgatactatattttatttaaaataaaaagaaatactatttaaatataagatgagaaaaaaa

SEQ ID NO: 324036 - DNA, 513 bp, Cannabis indica
tcaagtgaatcctcataaacatccaaaaactcaccaataaggttacccaatgctcttgcgagagcctttgatttgcttacaaaaggcaatcgataaatttgaacccagaatggtgtggataacaaatcgttcgttgagacattttgcaaagcacttggagtgtacatcacaataagatgattttgaaagtatcaggattctttgttcatcactctaaacttatcagcagcacaaccaaatgagactttgaataagtcttccccatatgcaaaaatcacaacaggaaaatgacccttccaatgtcctgacatttggtcgatgaaaatcagcttatggacataattttcagtgaggacacaggctataaacacatggttggaatgtggacataattttcaaatatcaagtttattcaaaatttaaatttatttaaaatttcaaataagataatataataaaatatcttgaattttaaaatttagatatatcattattatattctaagtcttataa

SEQ ID NO: 324037 - DNA, 584 bp, Cannabis indica
aaaatatttccaacagtgtctacttccatcatcgatctgactgaaacttgttctagttgtggaacttttaatgcatgtttctatagagaactctagaggagataactctgattacaatgggctgatcgtgatcaataaaagtcagtctggctcttctgaaggtggtgccaaaaagaaggcaagagtggagattaaggagaaggtcttacaattggtagcctcaagaaggcaagctttagaaacttagtcctggaaggggtctaatgcatttaatggaagaaggtcgcctaggcaaagcaccaaaatgtcaagggacaactaggatcctcctccaccaccctcaacatctaaggttattccaaccacttctacctagctatccagggaaataactaaatttcctccattgtctttggcacctttaaattttcctgtcaggcctttgtcgatgacagaaggggacaacacacgcatagaggccatcgatcaactctatcaaaagaggcatggcatcgagtacgaagagatgaagaaactaactagcagcaacgcctttagacgtaatgctgagtttgatgactatg

SEQ ID NO: 324038 - DNA, 1088 bp, Cannabis indica
caacctcgatatctattgaagaaattttaaagagcgcttatagtgcctaacacctttgtgaagtataataacgttattagtccattttaatattggaggcaccacttcataatagtactagataccttgatgtcctaacagtgctctatctattgattcattattttgtggtatcttgttctctagtttagggtttatgagcatggttggttattatttcattgtctttttattctagtgtaaataatgttatttctcacttattttatatataaattattggctagtaattattagtggagtcacttattcacttagaaggaaactcagtttactttgcacttattagaaacttgtttgcttgcgttacactattagttgaagttattattagaatttttacaatatttattattacaaacggcttagtaaacttatatattggttgattttgccctaaaaatattatcttttcgtgataaactatgttcaattgatctattaataataaatatttcttttcaatataaaaaacaaaatggatatatttttttaaaatttcattttttaaaaaagtatgtaacccaagatagattttatagttttcctaaatttgagtcatatgacatgtcatgatcatcttgcccaacctaataatgagagtatccatactcagccactaaactatatattacgaattgtcttaataacttatattataatgatgatcttcttctataaataccattaatttagctttataattatatatttttttttctggttaatatttaaccactcatttaaaatcccataaagagagaataagataattaaagaaattttgaaatatagattgccttttcttaacttctaataatgacaatagtaaaataataaaacacaatttatttatgggaatatatatccacttttgtaatgattttcttcccatttatttagattaactatataaaccatgtagtgtcacacataaattactgaaaaataatcattttcttttcttacttattattttttaaaaagtaaaataaaaatctttttaatttaacttcctagtatcacat

SEQ ID NO: 324039 - DNA, 1973 bp, Cannabis indica
gctaaatttttaatttaataagattagatttggatgtagattatgatatatttaaacaatttatgaaaaacttaaggtcaagatgcatgtggctgaccaagaatgcactaactttcgaacagataaaggggtatactattaccttgtcatgccctttgggcgcaagaatgcgggagcaacttactaacggttagtcaataggatattcaaaaatctgctgggaagaaacatagaggtttacgtggatgatatgttggtcaaatataaaattgttaagaaccattatgatgacctctgtgagtgctttaaggtggtaagaaagcacgaaatgaagcttagctccaagaattgctcttttggaattaagtcaagaaaaattctgggattcgtagcaagctagcaagaaatagaggccaacccagaaaagatacaaaccttgctagacttgccatcccccaagaaacataaggatgtgcaaagcttgacaggaaagattgcaaccttgagccgcttcatctccctgtctactgataaacgcatcccgttctttaatatattgaagaaaagtcaaaaatttaaatggaccgaggaatgcgaagaaccattcaaaaaattgaaaggacatacggccaagcctccaactctatccaaaccattcaaaaaattgaaaggacatacggccaagtcaactctacctttatttggctacctccaaaaatgcagttagctcaaccctagtccggtaggaaggaaaggtccaacattctgtctattacgttaagaaaaggatggtaggggctgaggtcaagtatcctttgatagaaccgggtacaatattttatacttttttgtattgttataaaatcgggtataatatttttcttttgagatagaatgttatatattagtttaataatgtcataatacaatagataatagacgatgtcgtaaatcccccatgatcatccatatatattatgagtccaccaaaagagcatactttaatctcatgagatgtgtcgcaaatcgataaacatgatagaattgtaatcctaagaaactagacataaaaatagaaatattttctatcaaacattgaaaattcaaaacattagctcgattagcttgcaaatcctttaatcatcataagagaattagtctcaatatagtgtattgaaatttgtaaatttcaaagccatcacagactaaacatgatagtcattatcactcctgatttaaaattaggtacaattcttgtttaattaatataatattttgttatattaatttttttaatgtagtgtaatacctatttacgaataacttaagacttttcggttcaaactcatgtcttctctatttcccacatctccttcaccactgatgtagcttcaatgacttagtcttaacaataaaaattttatatttattaatgtatacaattttatttttattttaagttcacataaattaaaaatagattttttttacttttacactttaaaattaggggtgttcaaaaattttaaactgcccaacctgaataaaccgtccaaactaaactgaataaactgacaaaaaaatacaatctgaaataatataatgataatccaaacctcttaatgaatatattgagtggtttacaaattattctaggccgcccaattaacttgaataaactgaattaaaccgatttatatatattttaataaaagtgtatataatatattacataaattacattcattaattaaactattttgtatttaaagtttgaagtttatagtgtttaacttgaaatttaaattttatagttaatactttttattgtatttgtatattgaaattaaaatttaaaatctacaccatatatttattactttttatttatttttatttttatgaatatttttttttaattattttatgttcactcaattatatttatgttggaagttattttaccaggaact

SEQ ID NO: 324040 - DNA, 954 bp, Cannabis indica
tagctaaattattatacagactcaaacatctattttattattcaccattagacaaatttcatgctttaatatttttaaaattaatattttattagtcaaaattattttagtaactatcaatgaataacccccattgaaaagtgttctgtatatatgtacatgtataaccagttagaataaagacaaccctttagaaaaaaactaaaaaaaaagtagtaccaatacacttaatttgtgtttttaatatcttaaaagacataccttatatatgtatatgagagtttatattatagttatatatgatatacatcttttaatgtttacaaaaatttgaaataccatataattaaaaaaattaaagtttaaatagcctattttacatatgtataaaattaaagaggcatacattcaacggactgtttaaatttttttttcggtacgtttcattattttaaatttctaaattttttccagcatatcttaattaactataaaatacacggttatatatatatattataactatctaaatcataaatataaaaaattataaaatcgtgcaacattacactcattttgggatttaatttcccaaaattcattatcttattataatgaatatttttagtgttgcccttaattttgtctaaaatacgtggaccaacacgactgtgacacgtggattgaaggagtaaggctttcagataattcgagtaagtcttcttaatgaaaaggatcagcaaggagcatgcctcccggagaaggtatgagagattcacatactaccggagagcaagactataacaaagtacgtccgggaggtatcaaatcctacttgaacagtcacctcgcatttaatgccgcatgggaggaggcgtatgggaactgccataagtattaaagtctgatggcgtaacccccctttctgcacctattacgctatgattaatgagc

SEQ ID NO: 324041 - DNA, 972 bp, Cannabis indica
gattggctttattacgaaattttataaatctgtcttaatattttagtcattaatcagatattgttgggaatatataaaaattataattttgtgttttataatatttttttaattattaatatttagagataaaaaactagtcttaaattagatgttagttagttaattgcaaaatttcataattattttataatctcaagctatatatatatatttgatttttattacatattaaaacggaatattttcaaattacatgtttagtttatttgatatgaattaaaataaaaatatatatgataatataattaagtttgataatatggcgagatatatatttttttaatttttttttattattattatagatcaaaaattattttcaacaataaagaaaatagaatgaagaatctcctattcgaaagatatattcatccaactatatataaatcttatttccctaaaatgtgaggagcttgattagtatacaagaaacatgagtaacaataactatataaaaaaaatatataaaacactcagattttctcattgtcccaatccctttatttgtgtactgaattttaatgtccctgatgacaactcttccatactacccaaaaatcacaaataatattatatgatatacatacaagaaatgaaattaacaaatattaataaaaaaaaattcaatatatatatttgatatatacaatattaaccagagttgtcatatagggagagtactttctagctagtccttatataatatcattaattattttctataaaatttaattaactaattaaatatgcttgcaaactgtatttattaatgtgtatatatatgtgtagctcatgcggccatacgaatcttggattccatttattatctaagaatatattagctaacataagatatgtgtatgatattgtctcagccatatggtccacacaaatatacaaatatattat

SEQ ID NO: 324042 - DNA, 2394 bp, Cannabis indica
ctccgaggagttcttatgctttactttgctgcctattcttctttcctatttagattgcattaaaatctccatgaatcaccaacgcttctttacttgctatgtctcttaagtccccccataaactccttctcccaatctcatcattaaaaccatagacaaatgtcacaaagcactttgttttcttgtctatagtttcaacaaagagatgtatgagttgactagtacactttatgatgttaacatcaaaactatttggattccaacttactattatccgaccacccttgtgccaagcaatattggaggtgaagcaccactttgaaaacatccttatatataaggctcccaaattccgagccttaactcttgtctcgaggatcccaacaagaccaaccttttgagagctaatcaattgcttgactagatttttttttgtttggctattgatccctcggacattccaacttaaaattttatccattattaagagacgggccctacccccccccccccctccatatgttatcatcttctaatatttgccctgcttttcctacttctttatctccctttttctcacctatttcatctccattattctcccccaaagcaagaaacttgttactagttgtagtagcagtaggttctttctcaggttttagatttccatccctttggaaccttttgaaagccatcggcatcaactttgttgctgtcatccttttcttttatcacaccctactgctgcccagtgaatttctttacccactgctgctattttttgggttctttccttctacattctgccgtcaagtgccccaaaccttcacaatgcgcacataccacaggtttccattcatacgaaatggtgactgatgtattgcagccattctcatcctcaaattctatcatctcgggcaagtcttgcttaatagcaacgtcaatcaagactcttggaaaactgagtttttctctattttttgtggcctcatcaaccataaccggcttcccaatttgtccaataatcttgaacaaagacctctctccccaatacttgagttctaggtcatctagatgaacccaaataggtaccatcctaatatcttcttttttcacattgatagagggctccaattctttcatgacaactggtcttcagttgaaaaagatataacctcccctgagcacatcatctctagattcaactgaataaatccgaatgatatagatgccatatgacagtaagccaactctctcaactttatcagtccacattctcctcaccaaaccctcaaacacagctaaccggggattcgctcttaaaacgtaacaaactattgatggtttctagaaatccacttcctcttgaatatcatcattcgtaatcttcaccttattacaccctgaatttgaaaataaattcctaacaacaattacagatctcagtataggaggattcgtagccataccttgcgaaagctttgcagaacactgctcagaggcttctatgaagtgggcgaaatccttcctgatgtcttcctgctgcataatcgatcgaagagaggacttcggtgataaagcctctggttccagcaatcctagtggaattccaataaatccatcaatcgagtcttcatcttcagcatccgagaactcaataggggcaactccaagaaccgcatccattgatttagtcttcctgacatctgaaacagaattcggacccttcttcttcaccagcatcgtcgaattccctttcccacgccctcttcctcttgtcttcgccatagctccagcacccactgccaggagtcgagagggagaataaagttatggtttcagcttatttattctaaaacattatttaaacattattattatattttatgtttttttaatttctttttaggttgttgttctcctatttgtaagttttttttttcttttctgttcacttaatatgttgatgtcgaattaatttgtattttgaaagttaggttgttatccagttatttttgttgttatttagttgtttttctttattattgcgttgcgaaaaaaagcctaacaggacaaaacctactacgtccaaacttgccacgtggggccactgacgatttgatgttgtaatcttatgcgcgtcaatcaactttgatgcttttaccccactcgcgtgtgagtctcacttgctcacatatccacatgtacggctcactttcttatccgcatctgggctttatttctaccgtaaaaaatttaaaagataatatttttgaaataagtaaaaagtataaatgtttattttttcttgtgatgatataaatgtttatttttagtagtattaatgccaaataaaaaaaatccctagttaaccctatttgcaataatatatct

SEQ ID NO: 324043 - DNA, 704 bp, Cannabis indica
ggtccccgtggctttgattatggtcttctctgccttctctaatagccaccgaatggtctcgccatctgacttcagccttaattctttggtcagctgaaatattcatgcagcacatgccggcggcattcgaatccttcaaccacggccctccacctttgtatgtcggtcctttgatttcctctttgcaaccacagccccagacgatgtcatcgcgataggtacaacagagagagataattcaaacaaaacccagataaaattatacaaatattactaataaacagtaatcacagcaatcaatgaaacaaagaaaaaggtcaagaagtatgaatcttcgtaataagcatacttttcaagcagatgtgaagggaaaaatacaagaagtttatacgacttggttttgaatctttctctgctacaatcaagaaaaaatttagaatgagaaattatcttctcttattttttttttatgaaagaattatcttctcttgctaatgatgataatataaaaataaggagaaaaagatgagagtgtaccaaaaaactaaggtgatgtttggttcattgtaacggtaatcgtaatgtaatgaataggtccattacattgtttgcttttcccttttaatttacaatgtaatgcttattacattgagtattgtaatgatgattacatactaaaaccaatgtaatccccattacattac

SEQ ID NO: 324044 - DNA, 517 bp, Cannabis indica
acttctgtttctttattgatgttgaatataatagattacattgaaatggagttttatttagggcataaaacccaacagtatgacattaatatatgtcaagaatggaaatccccttgacctatctagttcaaggtctgattgttttgggccaactaggccctttatcatatctctaattttttcctgttgtgcttgcacaaagggatctaatgttgtggacacttgtttgagtggcctttcttggctgcactagagcccttggtcggccaaagtctgaccaatcaagccttggatggccagccctttactaggtaactagccttggccaaccaaccctagtgtaggtaactagccttggctgggaaaccctaggctcaacaattggctatggctagccatccctaaactgggtagcgtctagctagttgttttccctttgttggctaaaccagcctacatgttaacagggacttgatcatacaaattggctaggtttggtttgttgggttttatgccc

SEQ ID NO: 324045 - DNA, 678 bp, Cannabis indica
gtaaaataatttccaacaaaattgtctatgaaatgaatgtagtacctatgtccttctttagatgctgcatgagatggtcctcacaagtgtgtgtggaccaattctaaaggttgagagcccttgactcagagatagaatatggtagtttatggcttttgccttttttgcatgcttcacagaactttagatttcttaggttgcttggaatatgtaagttagctagaatcttagctaagatttcaagagtaggatggccaagttttgagtgccctaaattcatataagatttttgagcaagaaatagtgcagaattatgagcaataggcaatgtgcaaacatcatttttgttaattggtaaatcagtacaagagggagagaatgtattaacaatactcttattacattgagatgaacaagaaatagaaggttgtacatattcttgattgtttgcatatgaaacagtacaatttgacagagtttgattgcttggtgactagatgacactcgagctgaaccttagaagggaaagaattgtgagacagcatgtagagaccattttaagcctccccttgggtagcattttccctgtgatttttgttgggttttatgccctaaataaaactcattacaatctgactagttatcaatttggaagtgaagtatgtttacatgtatgtt

SEQ ID NO: 324046 - DNA, 1483 bp, Cannabis indica
aaaataaataaataaatatttcaaattatacataatttagtaacacataacaatatatatcccaatggatgagcgcaaaaagaaatatttatcatcagtggcggactcaagattttagttaatcgggagaactctaggacgcattgctatgcttgaaagtcctaaagactaacaatcgcttttctttaggaattgtccatatccagttcatctttcagaaccatatcatatcacagacctgatgaaataacgaacattcaacgaaaaatgtcttcattcgaatttgtacttcaactgaagcccgagtctaacttttcaaacatagcaaggacagacatgccgcgatcgtctatagttaaagttaagagtgttagaatgattacataccccatcagtggccaaaacaacaaattgatcattgggagtgagtcttctataagagacatcaggaatagagataaggccataatctttgagacaaaaatcaccaaaggctctagccattgcaagaccaggacaatcatcctcaggcatccatattctacacacatctggttcttcatctgctgcaaatactctacctctgcaattctttattctttcagcctcacctattaatattaatttcattttcattgttattatttatttatcacccaaaaataataataataacaataataataattaataattaaaactcacttggaatatctggttttaagtctactgttagtggaactggtatgagttgatttttgtctcctcttgtcccaagaattgcacgcgagtcccccaagttggcaataatcaagttctcaccctaaaaatatttacagaacaaggtaacaaacttataaataatgttaaatgtgtcaagtattcatcaaaattattagtaaggccctacttttacttaattttcagtttagaagaatgacaatagattttagtttataatgaaaatgctcgaaatagcataaaaaaaaagtgcttaattcaaattattgtcatttggttgaaatatgtagttagatctttttatgttttaatttgtatataattaacttcttaatttattttttttaggcaatacttcattaattttcaaataaattcgagttatcggtttaattttaagcatttaatgtaaagagaaatgctaaaagatattagtggtgcttaacactttcctatatgtcaatatcgttattagtctaactaagtatcataacttttagagagtattattagctaatcgcaagacgacatatctagaggtgttaggtaccactggtacccagtagcaatgttcttttgtaaagcaccttctataagtcttatagtgtctcatgattattagcgatattctctaaaattatttttttaaattataaactcgataattaattacaccaataatcgtataacatttgtgttaggcactaataatatattttagcaattctcttaaaaaaaaaaa

SEQ ID NO: 324047 - DNA, 493 bp, Cannabis indica
atatattgtgtattgcattaagttttcattgttgttctacggttgttttttaattctcccactgttatttttagttgttcttgttttgtgttcaactgttgttttataaaaacacaatattcttaaaaaaaaaaatcaatatgaaagtatttttgtaaaagttaacccaaattaaaatatttttataggtttccttatatttaacaataattcttgattttttagtattattattctaaataaagattaattataatataacttaattttttagtattattctaaaaatgtataatttgaaaacggaaaatatcccaaataatgaataactatttatttaaagatatttgcttcaatttaaataataaattacttttatttaaaaataaatgctaccgattttatttcctaaacgattatatatatatatatatatatatttactagttttgtacattaaatatgtacaaaataattatattatatatgtata

SEQ ID NO: 324048 - DNA, 1285 bp, Cannabis indica
tgaatttgttttttttttttgccaatttgtttcaattaataaaacaatatatctttttcaaatttttaccaatcatcaaatctaaactattaaaatacaaattttaatttaataattataaataactatcaaacaaaaatacaatttaaatttatatttattagttagattcacaaagtgtcataattaaataatgaaccctaatttctcttttcttctcaaaatagcccaaccttagaaaagttctcaaataagacattgtctatttttaaaatttaattgattgcttaatccaattaattgagtcatcaagataatattatcctaattaatgtggggactatgagcctataaaatcaatctcctaataagttgatttgaaatttattaattcctgatgactccactatagacttagaattgcactattgcttacatagaacactttatatatccaatataaatacgctataaattatctattgtttcaatcaaactaatcaatgattctctatagacagtctacattagataggtataaaattattattctacccttcaatgcattttatcctttaaacactaagctccttataaatgatatttcagtaaactagtataattattgaaataattactccaccatttaactcgttttgctaagctcaatggaaatgatcattttacttctaaataattatagaaggtatgaattccatatctataattaaccccccccccccccgcccaaactcaattgcactaccgagagtttccaaaatgtatgtataggttagtcaaacggggaagctagtaataaacaagtttaaggactctaatactacagttggaaaaagcttaatcatctcaagattaagattaattgatctataatcaactaagtgatattgacttagaaaagatataatagtaagtttatgatatcttttcaactgtcaatatcatttcagtccaatgtaaaccctatacattcgatacaagcttactttgttaatgttctaaaaagacattccacttagccaagtgtaagtaaaccacatcgctaattattatattagtgtaaatctagtgcactaataaattatgggaccaaataatttgaagcatataatcatgattattttctatttttgtgacaataccataattgtgaataactatatgttcgaaatttagcaaaatttatatataaattaaataatcatgaaagtagcatgtgagccaagtcatatacaatagtaaaaaatgatctctgatcttttat

SEQ ID NO: 324049 - DNA, 1826 bp, Cannabis indica
taatctttcaactgcatatcgaaatattctccacccctatcagctcgctaatattttttaatattttttcctaattggttttgagccaaaacatgaaattctttaaacttctcaaatgtttaagatttttttatgcattaggtaaaaaatgagcatatctagagtaatccctcaactaaaaatgacaaaatattcattaccacccttggcttgtacattcaaaggtccacaaacatctgaataaaccatttctagtggttcagtcgaataatttctctttgtagagaaagtaaacttcatttttccttctaaacatggtttgtagacaggtaagtcaacaagtgtgatatttctcaattatgaacccatggttggtctacaaattctgtcatagccaatatcctaatattagaccaaaaatagagatcgaatgtccttcattaatgctcattgtttaagttaaagtttatttatattgcattattttactatatttattaaaattatcaatttagataactaaacataaattctaatttaatatttataaaattactaacttaggttgttttgaaagataaaacttatttttcatccttagtaaaaattttaattaaatattatgaaaattacataatttggtagatttaaaattaataacaaactttaattttcaactcaaattttattttctatattttaaaaatcaaatttatatgtatacatatttctgaatatatattctctaaaataaaattaaataatgtcttgaaaaatttacaaatgtatgctgatctaaaattgattaatttaattttttaattaaatcttgtgattttttttaaaaaaatccacttaacaaataattttctatttaattaattacttgaaaaaatacagaatagtttattcagcaattaattatctagaatttatttcataaactaagtataaagtttctaaattaattctttaaataatatattgaaaaactaattttaaatattttcagaattaattatactgttagtcaatttaaattaggttaaactaatataattattgtaacaagccaaatgagccttcacatttaggattgctagtgcagaggagggttgaattcaatatgttgtacccacttctatgaccccctaacatccacacaagacccaaaagaaaggaatttaacatttatttaaatttttattaattgattatgacatatgtgacatataatcatgaaataaacatgtaaacaaagaatatgataatgtcaagatatgatttctaatttttattgatagtaaataagactacattgaaatttgattttatttagggtataaaattttaacagtttcatcagcaacaaggcaaattcccaattgtctattactaaagcaaataagggagcattttgtgagagagaaggagaagctctgagcgttggggtttaggggagcggtgaacgcattggtgatgcctatttgtgtcgtcgacggtgagaaaagggctttaccagactaagtaatgacatacgcgagagacagaaaaaaaaaaaaaaaaaaagagagagagcgtggaggatacccttgtcaaaaattatgtatcaagtttagattttttattacttatttatttctttattccaatttttttaaaaaatatgttttaattttaatacatatgcacgacaaatttttttacttttagtcacactaaaacttgtaactaaagatatttttttttggctaattataaattatcattattatgttgtgactaaaaagtccgtgactaaaagtattagtcacaaaaactacaat

SEQ ID NO: 324050 - DNA, 967 bp, Cannabis indica
cacaacaggtgtatgatcaaaaagaccttcactaagaaacacagcttcagcattcttgaatctgtctaaccacgcctgattagctaagacccgatcaattttgagaaaatacaatctaatccctgctgcttattgctccaagtgaaaaaacttccactatattttacatcttccatttgacaaaaatttacacaactctgaaagtcagaaggagtaaaccgagccttatcaccaatcctttcctcttttgacaaaatttcattgaaattgcctagtacccatggctcacctgtattacatctttgcagctcttcccacaaaacagacctcccacttgcattgttaaaaccataaacaaaggacacaaagaaactagctcctttatctatcattgtaacaaacaaatgaactagctgactagagcagctaataatgttgactgtgaacttgtgaggattccaagctactataattcgacctcccttatgccacgcattattcgccttaaaacaccatccttgaaacatgtttaagtataaggctcccaacttggaagccttaactcttgtctcgagcaaaccaactagcccaattttttgatgagcaataaattgcttaaccaaaatttgtttattaaggctattgatcccccagacattccaactaagaattctatccattaaggataggaggatctccccctcctcgtgtactattccgtttgtcttctacttgttttgcccatgaaacttgatctttgacaccctctggctctaccaatacacaaaaggaattagaggtagatgcccctgcaccttcagctactagtttgactctccatcccttgacaaccggttgaaaagtctctggatcattatcctcaatcatctttttctgcttattatcattcttcacaacctgctcttgtttttgcccttcttttttcctacaatcacttgccttatgc

SEQ ID NO: 324051 - DNA, 536 bp, Cannabis indica
gtttatattttttttaataataaggtgtatttataattttatggggtgcaaatataactacccttttttaaataccgaaataaataacaaaattactaaaataaccttttaaaagagtagtataaaaattttccatatttttatataaaagttgtaagatttttttttctaacaaatataaaaaattaatattataaatatgaaaatacaaatagttaattctatttttagcacattttctaaaaaattacaaagagttggttatatcataaagagagttaggttcaaaccggacttaactttttcttcagtttcccagagtttaatagttgtgtcaaatatcttaaatatcgatctatacaagacacgtatatctagtagtggggtccacaaatggtctcaatcatcaatcaaaagtgtccacatggctcatataatgtatttaaggaatggtaatctgccacgtggtagtcttatgtttgagtatggattgtgacagtcagtagtcccgtgatccgtaaggggaaacaccgggt

SEQ ID NO: 324052 - DNA, 1295 bp, Cannabis indica
ataacttatttatattaattgttatcttaaatatacaactagttgtatgtatataaatatatattaattgcttatctcatatcttcattaataatccaagatgaactatgaaaattaaataccaatttaatattaattcatgtttatatatatagcttatatatatatataataagattatttattaattacgacattcgacaattaaaaaacagactactagtacaaaattgacacaacaaagtcaaatgcaaattatttacatatatatatatacacacacaaataataactacatgatcgatccatataataacatataatacaacaatttaaaggacaatcgtttatagattgttgggatcgaatcatttacttaattataatattttgtatatttaatttttttttaacaagtatatttaattatttagataagagactaatagtgatgaaaaatgaaaattataagtagaggaaaagggaaaagggaatgttggaatttagtaaaattttacgaaatctttagattaaaaatgaaatgtgtgagcgtattgagtctcaactggagtaaaagaaaacttttattagctaggggcatgtttgtttttattttcacatattttttctttttattctcaaaaaaatttgtatatttttcaataaaaatttattttaaataacactccaaaaaaaggtcctactaagattatataccacaataaaaatacaatttgttctgatgtactatttaattttgtaatgaccgcatgttaaagtatgaattagtaaaacaattagcattaattattgacatttttataagtatgcatgagtttattatattgtgggtcctattattagaaattggcactagagttataatttttcaatttcggaaattttattaaactctagaagtattaattgtgttatatatgagttatacaatttttaagatttttttatttggggacgacagaaaatttgataaatgaccattagaatcacatgggtaagtttataatttttttcttaatggaattaattttaatttctcctaatattcatttttttagaacccccaattttcatatttagttatctattataatgtgacagacagtattcttgtgatccataaggggaaataccgggtaagctgtgcaatcccacatcgcctagggaaggtcacgtgtgatgattttgagactgtataggtatgggactacacagttgaagatgacttaaatggatttgattggtaccacctatgtcaacaaggtgcatcttgt

SEQ ID NO: 324053 - DNA, 912 bp, Cannabis indica
atctgcaaaaaaaaaaaaataatcaaaaaaagttttttggtaaaaattaaatttgacttaaatattttttacactactacaaaaaggactttagatgaatttttttagggcatttaacgtcaattttggaaaaaattagtactgtggttgttcaaggagacgttgtaggtagtcttattaattaaagacataaggaaaacatgtgtcgtcagttattataaaataaccaacgacataagaatcttagtggaaattaaatactatgccgtcaattttttctaataactgacgttgtagtccattatgtcgttggttattaaaaaaaaattgacgccacattatctttgattttcatagaaaatctatttatattttcagttttaaaactaatatattttcacaaatttataatttttactaatttatttaaattaaatattaattttatataactaaaaaataaattaaacatatagttaaatgtatttattctaactaaatatattacacaaattttttaaaattagtctaagagttaaaaagttaatatatcgaattaaaaatagaaaaataatagagaaataaattacaagttaacataaaaaaaaataagaaaaaaaattcttatataattcagcatcattccaagcatttgtgaatcaccgtagcaagtgttctatgatccattgtcgctgaaaacggtaacaaatcaatttttacattgtatgtcttcttttctccaaacagtaaaaaaagtaaatatttatattagtatgtatattagattgtttgttaatttaatatataagataattaataattaaaatttatagattttcgatcggttaagcaactgttaggatttgcacgtgtgacgatatcactaatgtatttctgttaggttttatgccc

SEQ ID NO: 324054 - DNA, 1026 bp, Cannabis indica
aagtccaattcaatgtatttactatgggcatgtaagataggatttgcagttaagaggggtactgaaattatcacaccatataacaggtgatctaggaagttgaacataaaattttgtaaatagagaatgcatccaagtgatttcttagacaacttgagctaaactttgatattcatttttttgtgcttgattgagcgacaatgtgttgcctttggcacttccatgctacaagattagaaccaaagaaaattgaaaaacttgaggttgacctcctgtgatcaggatcacttgcccaatcagtatcacagaaggttgtgacattaagttctgtaggtttcttaagatatttttatgtttattacctgcttttatttttgtttggccatcgattgtgagtagttgagttaacttttaatgctgaaagagttagagttaatgaacacaatactggtacatgcttaaatcttttgattttaatattgtagtagtataaacattatcattaccttgcataattactttggaattggtgtttgaaatgtattcttgaaactaaattggcctagacatatgttaatttaattaaagaatcgaaaacataatgactttgactgaagcctatgacttaaattagaattctagattaataatgcacagtcttccacaacattagcatcaaatttgcatattaagaggatataataattctagctcattgtcatattctttattccttgttattttgttttcattccttgttattttatttctttttatttaggtcttaggcttgataaaatcattattatttgttttgttctaaatttttttagtatttgattgttacacaatttatttatgatcaatccttatggagacgatactctcttatcactttattacttatttgtcgattgtgtacacttgcacaatttatattttttatatttttacgcaacatatgtggggttcgtcagtggtgtgcgactctttcgatgagcagtatgggcttctctctctctctct

SEQ ID NO: 324055 - DNA, 619 bp, Cannabis indica
tttttaattgtatcactttcaaataacttaaaaaaaaaaactagcataaaatttagttacgtgcctcgcaagtaagttttgctagtataatatatatgtgccttttttggaagtcaattgcatagttgagactttgagatatatttttcaaatgcaccgtatgcttttattgagggacgaagttacttttagctctaaaggggaccataggccctcccaaaattttgaagagaaaaaattaatatagcaattttatgtaaaaaaaattattttttcaaaacattatgtaattggcctcccttaatttatttatttattttctgcgaatgttatattctctacctttgtccctgattttatttagatggttaactattctttttaatgatgaaaaagaaaaaatgtttgaatataatttgatttagaatttggaaactgatttgtgtgtgcacattattaatttggtaaatagcggcataaatatctaaagttttatatttgtaagcgacataaatctaatgtttatttttagcggcataagtactgtaattttctttcttccagtttcattagtgcagactctgttttaaatttattaaaagaacatttagaagtaatt

SEQ ID NO: 324056 - DNA, 1757 bp, Cannabis indica
gctcatcgacccagttgttggcagtaggagcttcctttttacctctccgagctcattcctcacattctgaaccttcttattggccatatccacctccctctttagggtgttggtggtggcaaggttctttgcagctgtggacttggctcgggagtaggcgtaggccatctttagattgacctacacaaaaaaagttaaaacctgcatgggtaaaaagataagatacaaacaaagaagaaaatatttacccgagctgcctccttcgagactccacccatcaccaactacaaggatagctcgttgtccaccccggacaactgatcactcaccttaagaagtgaccgatcaaggtagtactggagcatgtcctttccctttttggcctctaggctcagtaccacggtagttggtgaggttttggttgtaccagatccattcgagctcccacctttggaactcttagacttagatactttctaggccggagagtccataacatgcaccaccttagagaggtcaatcacttctctggccgacaccttctccttggacagaaccttgtcgcctcaggatcgtttgtgtgggggagtctggctcgaactatcaccaatccttttcttcagggattgaagcactttttgagacatgtctgcatataaacaagacaagaaagttaaagcaagtataatgcaaagcacgttatgaaataaataaatacaagttaaaaaaacccaatacatgggcaggagcattctccgaacaagtaaggatggagcctcattttctaaagagtcctcttgttcctactctatcagaacggcttttccttttccctccactgggactgatggttgaacaggtctaccaggttccgtaatcctgatagcacgctcaatttgtgcctggtcatttggaataaccttcttcccctttttgctcagtctctcttgctcgatcactctgccctagtttggctttgccttcttcttcttcacgggccttggcacaaaatcttttgggaagagtttgtacttgacataattggcctcaatagccaggagagtaatgtttcgagcatcgtccagcagttggagaattctttgtgccctctccctgagccccaatgtgaagagagtgtggcaatacgagggaattttctagaactgagtgtggacggtgtccattccttggaaaaaatagtactcatcaagaaaattccttatcttgctcaccttggagtccacggtgcccgtccgccacttttccttgatctgagaaaagtagaaataccccgacgtgctttgcttgggagttgatttcagatcaaagagcttgttggtgttgagcggggatggctcaccccatccttgtgaggcatagagggtgaacagggcaggtaggtgcttgatgctcttcggagtaaactgggtcggatagaggtggtagtaatctgcgattctcctaaagtacagaagcaagggcaacatagcaccctacttagtgtgagcgcccgaacaagtggagtgcccctcccttggactggtgccatctggtttggggagggaaggaagcattcgacattccttaagtaattgtgcttctgcaaattcgtcatctttgccttggttactatggatggaggagaaacccaccgagctcctagtgcgccttgtcttctctgaggaatggccttggtgtattcctcagtgacaaatgttgggttttatgccctaaaaaaaactctatttcaatgtaat

SEQ ID NO: 324057 - DNA, 1377 bp, Cannabis indica
tttttgtaatttttttttgttatttttgtgaatttgtgaaataatcccttaactaaaataatttttaaatgtgtttaattgattggtaaacatagatgttttgtcttctttattttcagcaacaatcccaagatctaacattcccatgatcaaaaaaataactttcttctcgttattgccttctttgcgtttcttacattagaactaacgggaaaaaaatattattttcccacaaaaaaattatatacacttttatacaattatattacaatatgtattacgagcagtagtgttttatcctaggtgtggtattttggcggttctccatcgtgcaatagagctttgatacagtggttcgactaggctgttttctcttggggaggacaaggttggtagtttgcttgcacaattttgaacagcttgcaactcaaccaatcgagaatataataatttttaagaaatattaagaatattgctaaccaattacaatgtgccatctctaggtgttaggcaccactagtgcccactggtgctagcatctccaatagaggttgttcattggcgtggtcttgctatatatgtaatgtggttcaatttttaagactaatttatgtgaagtgttactcaatatagataatgaccacatgatttttttttttttctcttttttttaattagaaaaaattatgttttatcaaaaaaagttattaatttaatgtgatgtgaaaccttagttggtaacttttagagttataaattattggagtattttaaaaaaaaaaaaaaaagtaacaaattttatgtagatgtgaaagaaaataaataaaaaaaaaaaaaataatgtgtattttgttaagtatctctaagaatattccaaaaagaaaagaaaaaaagaagtaagtagggtagagaatggccaatcaatgagatttgaccctatcattattattgtaatctctatcacagccgatccgatcctaaaacttgcttcgttccaacgagtcttccccgaaacaacgctcacaaacctcgtccctaatcaaccgaaacaccacaactgataatcacttttctcagaccaattaagacgaattaatcacaacaaactgcttcttacaatcttaactcaactagggttctttaattttaagagacatggctcataatggccttctggttccagcagaagcaagaataagccccccaatcccattggaccgtctttgatggtactgttaaagcttttcccactttctccagatgctctaatggtagacattaattctgccatatctaatcttgaattttcacgagccacggctctgttggagtcacgctccaccaccaccacccatcactcttcttcttcttctcctt

SEQ ID NO: 324058 - DNA, 832 bp, Cannabis indica
ttaaacaacatacttgtgagtagatttaagatcctggtaaaataaattccaacaggccacagatctcgagatcatcgaacacagagtagtccatgttggccatctgaagaagtccaacatcaaagtctagggggtgaatgccatagtagataataacaactcttggatggcgcttatttacaagttcttgagcacgggaaaactccctgcaaacagagtcggtcaagaaagatttagtatcaggtcccacgctatgtgatcacggatgggaagttgtaccataggggttgtcaatgtcgtacctgagatgcattgctggaaaaaaaattagcgcagtggtccacgaggtctacaaaggcttttgcggagatcacacttctgggcctagcctttccaagaaaatccttcggcagggatacttttggcccactatgaagaaggattgcatggaatatgtgaggaagtgtgaacagtgccaaagataggccaaagtctcgcacgcaccacctaccgagatcacattgatgagcatcccatggcctttcgcagtctaggaaattgatttagtagggtccctccccatgggtaatgtaatatcccgataagcctaattgtaaataataagggtttatatttatattataggttaatcatgtaataagtgggactatgatcctactaatctatttcaacataaaatttaaattttgctataagtgagcaaataagcataatttgtaaattaaggatatttatatagcctgtgtgaatataatatgagctatatgttgaataaaaatatttttcaggtttggcgaccttgaagacccga

SEQ ID NO: 324059 - DNA, 589 bp, Cannabis indica
gtaccttttgctcatcaaacaactgatattttgacaagtcttgttcaactctatgtttgaaaatatgattgacaagcttggattgtttaatgtatactatctagcttgagggaagtgttggtctggtcaagtgtatgtaggcaattagatttttttttttttttattaatagcgatccgttaaaataatagtcttcaacctaatcacgacattcccccgcccccacaaatgaaccacgtttagaattagaattggaaaaatgagtcaactaatcggctacctaattccgagattatttgtcaaaataaatttaaaagaatcagatgaaagagatagtagcatcatagttaaccttaagaacacatatattcaatctcctccattgttcgaaagacacaacagtataaactgttgcaaacaggttcattcaacccattcacttgagtgctcaatcattgtgcaaggtacgtaactgcatcattaacaactccttcaaccacagagaacttattatttctaatcactaacagtgatttgatagtgagccatcgaagaacaaagaaggcgaaccaacaacgaaataaaacaa

SEQ ID NO: 324060 - DNA, 1133 bp, Cannabis indica
tttggttataagtgaagttttggcccagttctgcatataagaaaacagagagattaagaatagtgactggttggataacgtcaaaagtcttggtgccaaattttatcgaaaactatagatgcataggacatgattagaagcattatctttagagttgttaaagcatatcttcgaacccttattttagaacagaaacaatcacaaaaatataccaagtgtcaaattgaagtaacaaacctcgtgcataataaaattgattgtgcagagcacttctgaccactgcatgcgtatgcatcctggtcacatacccaggcgacataatcctcctatactcaggtaccaacaataaagaggagtgaatattaaccttattactatagcagcatgttttaaggtagtaaagtgatagtagaatacctcttgcacatcaggacccaagattttccagtcaaatcctgcatcttctaacttgacacgacccttcaaatcagcagctaatttatccgccactctagagctaccggtaaagagggtcattcgtggattagcctgttaagcaatacaagtaaaagacaatcttttatgggcaacatcatttctaaacatacagtattaagtgataaattgtggtcaacatctttgagcaattcttgtttatcaaaaatgtgaacaaagcttaataacacatttggagccatttcaacgcaagtacacattaaagataaaatggaaagaatacagcttcatatcaactattacaaacaagaagaaagaaccaaacaactacctgaggcatcactatctttcaacctacatgattatcctagacactattgcagctacttataaaagtcacatgcatttgaaggaagaggtcaggataatgtaacagaaaaatatgaagctaaagtttgatgagaggaaaggaatatgacaaagtccaacttccatacgagatcagtccttcactggacttgtcgcgggcaaatcccaggaagagaacaagcaaggacaataaagtaaaaaagggattcaagacatcagtggatgtacaaatatttttgaccaggaaccggacctatcacaagaatatttttttagttgggacgatagctctgaaaagacagatttcc

SEQ ID NO: 324061 - DNA, 2075 bp, Cannabis indica
tatcatgatctgatcccttaagctgcaacatttctggacttgacatactcagctagtgaaaaatgtgtagcaagtttagacagagtctaaaattagtttgtggaacatactttgtcaacatatgtgctgggttctccttagtactaatcttcttagcatgaacttctttccttgcaatgacctctttaatgaaatgtagcttgatgtctatatgttttgatctttcatggtacatagggttcttcattaagtgtatggcactctgattatcacaatgtactgtgatatcttttgatttgaaaccaagttcctctgagaaacctttcagccaaattacctccttaatggcttcaattgcagccatgaattctgcatttgtggtagacaaagccaccaccttttgtaaattgacttccagcttatgcatctaccaaatactgtgaatgcataccctgttatggaccttttagtttctatacttccagcataatttgaatcaacaaacctgaaattttagtgtcaaacactgcattgtttttgtacaacaatcctactcttgctgtccctattagatacctcaaaatccactttattgcatctcagtgcaccttccctagatcagaaataaatctactaaccatactcaaagcataggccagatctagccttgtgcaaaccatacaatacatcaaactcccaacacaggaagcataagggccaatgtccatgtagatattttcctcttcattgtttggtgcttactcgagttattttgaaatgtgaggcaagtggtgtagaatctgtcttggcttcactcatgcagaatttgtttataattctgaatgtacccttcttgtgatagaaaatcaagcttggtctctgtcttttgatgtcaattcccagtattcttctagcttcatccaaattcttaatttcacattctgatatgagttgatcctttagcatgttgatggcttttctatcctttccaatgattagtatatcatcaacatagaacagtgaccagataggtgtgccattaaagtatacacagggatcatactcactccttgtgtaccctgtttgcagcatgaattcatggaaccttaagttccattgtgttggtgcctacttaaggccatgaagtgatttttgaagcagacacacttgatcagtccccttgcttttatagccatcaggctcttccatatagatcttttcttcaagtttttcatgcaagaatacagtctttacatccatctggtccatttcaaggtcaaacattgctacctttgctatcacgattctaatagaagtctgttttacaaatagagagaaaaaatcattgtagtcaataccttatctctgattgaaccctttagctaccaatcttgctttgtacctcacttcttcacgtgtcagccctttttatgtttgaaaatccatttgcagcctatgatcctttgtccccttggtttaggtactcttatccaggttttgtttttctcaagagatcccatttcatcatcaatggctctcagccatttctttttgtctttgccagcaactgtttctgcaaaagaggtgggctcaccactttcaatttctttagctgcagcaagtgcaaatgcagtgcagttagcaaatcccaacctatcaggggatctcacatctcttctaactctgtctctgactagtttatagtcttgtacctctgatggcatctgttcttactcttcatctgaactgtgatcactgtgtgctgttggtgtatccacctcatctacaatttctacttcctccttgtgagcttgtatctcaacactttgtttcccccgactactacagtattggtagttttcattgccatttcatgttctttgaacaccgcatcccttctaataatacatttcttgtatccatcttctaagcaccaaagtttataccccttaacaccatcaagatatcccaaaaataaacatttgatagctctaggttctagtttatcttgtctaataagaccataggatgtacatccaaaaactttaaaaaggtcatagcttggcacttctcct

SEQ ID NO: 324062 - DNA, 1073 bp, Cannabis indica
ggttcgaatggtagataaaaggaaaagttttttttgggtaaagtaggagatagtgtggcagcctaaggcgataggtggtcttagatttcaggatttccaacttttaaatcaagttttagtggctaaacaagtgtggaggcaactactgaacctagatttgctaccttcaagaattttgaaacataaattattttacaagatgctctaattataaagctactaaaaatgatggtttgtctcacctttggtcaagtttgatttggaggttggaactgcttaagagtggtcgtcggccattagagatggaatgtaagtattggacgttcaaagatctatgtatcttttaagcctatgatgagtaggttttatgatgaatgtcgggtgagtaaacttattcttccatctggtacgttggatgttgggaagctttaacaagtttttatgcccatggatgttaagataattctatatatttcattagcaagacgggtagtgggagatagttagcgttggcttatgagtccatatttatcttataaatatgaccaattaatgtattaatattcttaaattgattctttaaattattgattagtgtgattttaatttattaggctattttaaagactattcatgcatttagagtcttttggatggattttagtatattttggtgaaaatagtagaagtcggcgagctcggttttacaaggtagaacttaattacaaatttggacgatcttaaaagcagaattggacttagagctcaacatgaaagttttagatctcgttcttagattttcagaacatcttaaatcgtctaattccaagcaatatcaggagagtaatggtgaaaatactatcagttattgcagtaaaaaatttatgaaaaaaaaaaaagataaaaagatagcttttcaagtcgagttgcaaatttttttaaaatcttttttgtatcttttaggtaattttgttagcctatataaacatattagagcactcccaacagcttctttactttattcttcaaaatatatcattaaaactctactttctttattttacatcaaactt

SEQ ID NO: 324063 - DNA, 739 bp, Cannabis indica
agatttcaagggccttatagaccttgtgcagttaaaaacttactactttcatggtactaacgggtatgtttttggaagttgataacttgcagagctatttcttaataaggagcctatatctcctactgatctcgaggtaaaaaaaattattaaataacaaaacaaaaatgttgccagatatttgtatcacatggttgtaataaactttcttagaaatatttattttggctttcttttcttttctcttctaggaagcaattcgcatggcaaccataacatagaaatccttaccaatatttatgggaagtgcatccaaatccaaggtacttccatatttgcagtatcaatccttcacaaacttagttattattaataattaaaaccattaacaactacatctaataattattaattaattaaaattagaattagatcaagattaataaatcaaatcttcatgatcatcagaagaagaatcagtttgtacataaatggtttaaactttgacttaaactaggcaatctccacgaggagtaggagtactaattatcttcatcgcttaaagtagtagcgatcattgactcatttaaagtttaacaaacttatattcaattgaattttcaggttgtgttgattaattgcggcctttcatccttatgggtttgaaatataatcatcttccctgctttgatctctccttttgttcgccagttgaatttctttctgtctccattatttt

SEQ ID NO: 324064 - DNA, 981 bp, Cannabis indica
aaatgtataattttaaaaagggataaaaattttttgagctcctgagctaggtgggccctaagcacagaccaaactcgcctatgctcagggccggctgcttgctatagccttcacactatatcaatgtggcctaactctataattaattagtaattttctagattatttattaaatacgaatgtaatgcactaatagcatggtacttgacatcttaagattcctcttagcatttgtcatattaatatcatattgacttgatttaccatgatttgtgctcgaatttcgtcttcggacaaaagtggggttccatcagaatctttaagcgatacgagaacatcaagcaaatcgtttggggtcctcctactaatactagggtcgccctctctccattctcgaattctatccttgattattgggtcatgaagcttcttcatcactttcacagctttaccaacaattctttgatggccatctaagtccaaccatctcagccacggaagaaagtctgacacagaaaaggcatcaatgtgtaaaagcataacaatcacagcctcaacatgctcttcttcttctctgcctggccctccatcctcctttccttccccaaaatatcttttaccaaacatcatttttctcattacgcctcctatgtattgttgcgcggcaattctcacatttactacttctccttctcctttagcggacgagtggttataaacgaagcgaaccagattatgagcttcttgagttctcttgggtagaagccaagcaagtgtagagcggttgagtacattagacacaaggaccctcctcattttcttccattggtcactccatggtgcaaatgcagtctctttgtaatcacgagagattaaacgagtgacacctgtgagaggtcttgaagcgaacactttgtcgtgtttcttcaagaactctctggcaatctctggagaggtgacagagatgacatgagtacttgt

SEQ ID NO: 324065 - DNA, 762 bp, Cannabis indica
ttataattatttttatatgattgtgtgtaactattattaaaaaaatatataaaaataattaaaactataaaatacacatatattttagtatttagctcattaattataataaaaatataaaaatatggaacaagaatttgagcccgtataaaaaaataggttagtctatttaaaaacgggtcaactcgaataaaacacgatacaaatacaagagcacgacatgaaaatactggacttgcgggccatgcggtctatcctataaaattattgcacgacacaacactttttttcaaagcaccacacgacacgacctatatatttacccctatggtttgcactatatattttttagctctgtcctttaaccaagttcttcttgagcaatttcagcaaaaaaaagaaaaaaaaaatggaaagttcttctttagcaagttctttttcctttggtgtctcatcacaagtatataaaaaaatatatgatacaaattaaaataagatattatctttaaaaaaaataataattataaatgattattttatttggtcaattatatatactttatactccaacccttcctccacaaggggtattatatccccactaccatcatcacaagtaacactacatatacctaatattttatttctaaactaatacatatcatcattgaaaatatatgaccactttatctaaaacccaaaaatacccctctcaaattttccatactttttttttagttgcaaaaaacataaaaaaaaaaa

SEQ ID NO: 324066 - DNA, 1913 bp, Cannabis indica
aaaatgcaaactacaaccacactaatttcaaactatatttttttatgcagtgtggtgcgatgtaggcggtttttacaatgtaaacggtttgatgaataatcctaatatatataaacatttccgaagtagtatattaattattctcaaattttaaagaattgtgtaaaaattgaccttttaagtgagttaaatggtaagctaaattagctcatagctatttcttaaactaaatgaagctcaacagcattgataacagtttttctactctatctatgaaaatacattataaaaaactctacttttaattattttaccttaatcttttacattataccatacatcaatttctctatttttctctacatcatttaaatattatatttttcatatattttataaaataaaatatagagtaatttacggcgtaaatagttaagtttaattctcaattgtagataaatatataagtttattttttaacggtaataatacccaagttatgtttctagaactatcataggtacctggtcgttaagtatgaagtcatatattggtatatttagatttatttttaaataaaaatacaaatttaatgacatagagcaatcaggaattgccacgttgcaatttacttgacacttaacagcctggtacttgcagaatttaaaaaaaaaaattaataatttaattattacaacaaaaaattaaacttaagtatatatttgtaactgagagtccaaattaatatttatatcgtaaattacaataaaatataataatattatatatatatatatatagaaaagttaaacaaatactaatataataattttaacttatctttgtatttagctaattaaacattattcattaaagtaaaaaataatataaaatacctaaggtttagtcttacttgttggaagcttactttgtcattttctttattaatttgaagattgtagtttttttagtttcatctattgggagtgctggtagtaatgctgtaaatacgggtcggacactttgacacaacatgtaaccggtacaagtccagaaggcacgagcatgattaagcacgaaaaaaataacaaacttgagcacgacacgacacgagactacaaagtggcatgatacaacaacgaaaaataatgtccctaagcacgacacgacacgagaagcacgaaagtcacgacatgtaagcatgaatagactactccgaaaaacacgacacatgacaagcccgagaagcacgacacgacgtattaaaaaacttataatttattattattaatactaataagatatgaattcatcaattataaataagttaaaataataataaaactaaaatctaatgttaaatattataattttataattaaaactattaaaacatgaaaactaagattatattaatttatttatagggtaaaatataaaaatttgagtatttataagtaaatactcaaattcaatgatgttaataatttttttgtatgattatctatcaaatattatctagaagttatatgtatataactaaaattttaaaatatatataatttagtaattgttaaaaaaatatgaaaaagtaaaatacaaatttaagtttgatataaaaacagactagcctgtttaagaaatataggtccacacaagcaatgtacgtcatgaatctgagcacgacaaaaaaatatcaggcctgcaggtcgtgccgggcctaccctttaaaaatatgcaatacatgacacgatccatatttttctgtggcacaacacgacacaacccgtttttttttttaaaaaaaaaaaataatgaatcgagtcagcacgacatgcacaaacttaattagaacactagctgggtagtgaggtaaacatattatatattattttcattttttctcttctctc

SEQ ID NO: 324067 - DNA, 1381 bp, Cannabis indica
tataacaattagaatagtaaaaaaaaaaaaaaaaaaatattagtagttggtttggataagttaaccagaccaaattgattaattttgttggacagattattattttatttttcttaattagacgagttgtacttagatttttgtaaccttatctttaggttgaataaaatgtaaataaaccaaccaaatctaccaacgtacaaccctacttaaaagtgttgtttctaataagtaactaattaattaagaatttatttaaaagaaaaaaaaactaattaatcaagaaccacatacaattttgtaattggttggtccacatgtggaagatttataaaaaagctttactcaaacttaaaaagtactcttcttcttaattaatgaaactttcaagcatgcaatagttagttggtactataattctaaatagtgtgctgaataaatatattattaagaggttaataacaaagacaaatttggaaaatgtgcatgtgtttaattgattcattccatttatatattcatgtatatacaaacttgatcgaaaatatattccatttaggcttcatcagttaataccataatcatttgaacaatccaactaaaagattttaactccaacaatttcaaacacgtggcatttctttttactctctctaattatatataatcacacatcatcatatatatatatatatatatatattaataaattagaaaaaaaataggagagaattttattttagtgtaggagtattaactttttgtttatggtatatagaaaaattataaatcaatttttatatgatgttatatatattatagtttactaaaaaatattttttttaattttttaaataatttacagtaaaaaaattagaattcaaacatttatttgtacatatatatatgttttactttacacacatgtaacatattgttttgaattttatttttgatattacaaagtattcaaaatttgtcaaaaagggacaaaatatctattacacctataatctataaaacattatacacacacaaaaaaaatggatgtaatttcttaaaatataaaaaaattaaatttgatgtctataatagaattttgtatatatagatgtaaatgatagcaaaactcaagatttgagttggtttcatttatagtttgttttgatttgtaaaaagaaggtgtaggttgaacatatatctaagctaaatttgtttttttttttttttttttgtacgaacaatatattgacttattcacccaaaaaaaaaatttaaatttaaatataaaaaataagaaatggtactatagtaggagctagcacaagcagtgacggacccagaatttttgatctgtgggagcttaattgttataaaaata

SEQ ID NO: 324068 - DNA, 657 bp, Cannabis indica
actttagatcatattattattaatttatttgacaaaattatcagtctattgtattattaaaaatacagtgtctattttgttatttaataaaatagagaatcaaattagtagcttttataaaacatagagtctaaattaatatttacctaaatttaatttaatttgacattcttatcaaatctaaatctcatatcaaataaaacactcatttgagcttctttactaaattttttgaaatactttttttaatacatataaaatataatattgtataattatataaatataaatatatatttttttgtatggaatgtataaattataattataatgtatatgtaggtggaatcaaattgacataggcaatacaaaatctcacacaaattaaaagttattaggcacaacaaaacgattattatagctataaaaataattttagaagaacattactttaaaaatatgattatatttgataataaaaaattactaatggttgagattttaatataattaaggtaatagttttatatttacacaaactattatttttcaattactcaaatatttatagggccaaaataaatatgggaattaccctatatactatttttttaacctttttttttttttcaaatttacggtttgagtttctaaagt

SEQ ID NO: 324069 - DNA, 920 bp, Cannabis indica
agaagcaattatcatctacatacactagaatagcctaagaaacattatcgatatgtttgataaacaaagtatcatcagaataagattgtttaaaactactagataaagatatttgctgagttttgcgtactactatttgaggcttgttttaagccatatatgcttttagttaatttgcatacaacatttaaaggaagtttactttttgattgaaagctgtggtgtttagttcaaccattttatgttttatcttttgctgatgtgcaccatctgttttgacaatttgtgcctgagtttattgtttcaataaacaaccaactttacataatatacatagatcttgtaaacacatatttagttatgttgtaaattcagtttattaataaagagagtgaaaaggagggatgtataagggaaccaagtgtagctgatcttggttccccattggtgaggttcattgtaatttcttctcatcatttcttcattgtattgaacacactcttgtactatttcaacatcaataaaggtctatgtttaagtactcttggtgtcaatttttctctttgatttgttccttaagttgctggttttataagcacaatttgtgatcaaactgtgttggtcatttttgtttcattttgattgatgcattgtttcttgattgggttcttgagaggattcattcagtacaagttgtatcagagctgagggagataaaagacatcaagaacctacttttgaagatcaagaattgcagccatgtcatttgcaagattcgaggtggacaagttcaatggtgaaatttattttggtttgtggagaattaaaatgaaggcacttcttgttcatcaagggatctctgaagctttgaatgcagatgacttgaacaacatcaacgatgagaaaaccaagaaggacac

SEQ ID NO: 324070 - DNA, 1284 bp, Cannabis indica
ttttactgtttcagtgattgtttatgtactaaattatgttccacaaactttaatatctatcaaattatgtacctcaaactttgatatgtactaaatcatgatccttgaattttcatccatgttagaatttattgaataaaattagacaaaagtccttaaatctaacaatctcaatagtttggagagaatttgtaatggccaaaaaagttcaagaggcacaatttactacatgtcaaagttcacgaggaaaaattactaattagccttttttattttttaattaataatattaagcttatttgtacttggtccttaaattatataagttttagcaagttagtcctaaattttatcttttgataaattagtccctaaattatataacttttggcaaatcggtcctcaaattttattttttgtcaaaaggtcccctaacttttattttcttagaaacataaagccatcactcttaaatgttgatattataatattttgctcatagtgcattcgatccgcactatgtgtggatttcatattttggatccaattaaattcgcataatagctcgaattcaatctgcaaaagtacggattggatcggctattttagactggttacttttcaatatgaaattatttactatttatgaaataatattttttttcacataactagcaaaaacataaaacaaattattgttattatttttttttttgaataaaagcgatacgtttcattaacaaataaaatcttccaagacaatagaacgcacttcagcaaaacaatcctccagctgaagcacacggcctgacgagaaataggagctcctagcaagactatgagttactctatatgcaggtcgttatgttgataaaataataaaaggttatgaacatcctagactaaaagaccaaactgagatggcaaggagatgctactttgaattgcttgaacacacaccaggctatcgatttctaaggtaacatgtcgccaagaatgtcttataacccagcttaaagcctctttgatgccaactatctctggaacttcaagttgaactcgtcctattttacccaaagtcatagcctctatcacttggccctgactattgtgagccacgcaggcaataccaaaccgaccctcttgctcaaacaatgctccatcaacattaaccttgatgtgatttaccaatggtatagtctaatgctcagtccatttttcaccatccaataggtgagaaagagaataatgttggattttatgccctgaataaaactcatttca

SEQ ID NO: 324071 - DNA, 727 bp, Cannabis indica
agaatttgattaatttgcttaatgataattattaatggcaaaagaaatgaagcattacgagtttcaacagagcattcatttattcaattttctagtgattaaatttgttttactctcttgttatatggtttaatttattttatattttaataatgatataagttattttgttgtcaattcaagaaaattataacttattaatgttaatattattaattaatgctaggtcacaaagaaaaaatctcacagataattaaatattttatgtaccattttctcacatttaaaaaacataacaagaaggcagaatatttgataggagactatttataaagtttgaatatttgttagtggaatttgaattatgctattgttattcaattttaaaacaagttcttcccaaaagttaataaaataaaagttaataaaataaataaaaaaattaaaaggcaagctaataatatataatagagagtagctatcttgaataaaaattattgttgttaaaatatgtaagactcgatattacaccatattatattgataacaatataacaacactaataatattagaggaaatgctttcttagcaattgaatcaactttaagtaatgcttcgtctttgttcctattgagttggagttgttttaactgtgttgtgtgctgtagtggtatgaatatctttactgacatctttttttatttgggtcaatcattcgaatctcac

SEQ ID NO: 324072 - DNA, 1461 bp, Cannabis indica
catgggaagttcttggaacatcaggtcatgttctattgtattacttgggttgggttgattttctctatccattgggacatccctcgcattcccaggttgttcttcctgagcatttgtgggattcccttagttatattcctacctcctggttttggagcctagaattcttcctcctggtcttcttacagttggatcaggttggttttgaggtactgttccctgtgcagccctagctaccgtggcttctcgctccaactcagcattttgtcaatttgattcagccaggcattgtcgaagttgcctattttctaattctaccagtgggacatatctggtaggatcataggcatcttcactccttctttctggaatttaatcaccaacagtattgaaaataccatcgttcctccctgaacgtggtgtttcagatatgttggttctctgagatcccataggttctttaccaggccaatgtgtagtttcctctggatgattaccttcttgtggagtgttattacccattgatacggatttgtaattatgtttataaggagggattttcaaagtttttatcaccaaggctctcaatgaaagccccaaactgttaacgcagatttttgttaaccaaatatatagccttttacagaataaatttactacaaaatttaataataataatgaacaatagatatttttacgtcgttttgtatttaaaatctacatactccacgagtctatattattacagatatttatttgaataaagagtataattctcaataataataaataatagaattttctctctattttgtagtccctttttttatggatgctgcccctatttatagatgtataggttggcagttatttttattgggattgattctcttacaactactgatgaaatgggaacattccccacgtttcatttatttgcacatgggataatatctaataactatttaactgctacttgtctttatcctttaaacggttatgttgtctaagaaggttatttctcgctgagtatgagttatccttcttatccatctttagaggaaaaaatgctaaaagtagacatgcttctgctcgcagcattctcatgttataatgatattagcgagatgactactacgtcgcgtagaaagcaagatggttgagtatagttattttcacgctgctcatgtatgtgggttgatgaggtgcaagcttttattcccaagtatgtgggtcaataagctacaggatctttgatgtctcatcttccacgttcttattatttactctgtttatcgcgaagcggacatcttgcctcgtcaattatatttgttaatagttatttattcttttctcacgtatgctcacatagtcggtgagtttgaatatttctatcaactaacaagtaattggaacgagttattttaaattgcttttaataatgtaatttaattattatat

SEQ ID NO: 324073 - DNA, 1560 bp, Cannabis indica
aatatttattgtggtaaatttgacacaatattatatcttgtgctaaatttggcacaacttttaacatgtaccaaatttaacacacttttttataatattattggagtataatttttcttaagtgtgctagaatatagcaatacaccatctttatggcactccattggagatgctctagactatcaaatgagtttgtattatatttaggtcactattataattatattttaatataaagattttttaaaaaaatataattattattgatcattattcaatattttattgaaaatatatgaatgtcattattttattttttattttttattgcttaaataattgcaatctagtaaatatagaagataaaattatgtaaaagtcaataaatcataatatttaatggcactataataaataaaaaaatgcagaatttattgtggatcgaatttaacacaatactatatcttgtgtaaaatttagtacaattttttagcatgtgccaaatttaaaatattttttaaaacagtattggagtagtatttttctttcagtgtgttaaaatatagcaataaattatttttttagtacttcattagagatttaaattttttagactatctttcgtgtatggtgtaaattttgtactaaatttttctcaaaaaataaattaatattatatttggtccaaattttactattgtcctctaatgcattaagagtaaataatttttttaatagaaagatgtatattaatgtcaacaaaacattaaatattattgaaattatataaaaattatatttaatatataaataaaaatataaaaatttatgaattacattaataagtggtaaaaaataaataaaaaagtaatatttattatggtgtaaaatttaatttatgctatatttgtgttaaatttggcaaacttttagcatatgttaaatttagatcatacatttagattacagtatacaccactattagaatttaattttataaacatgagctaaaaaagcatatacattatatttatagcactctattagaaaagtctccattgcataatagtaaaatttgattaaaaaattattaatattttatcaaaattaaaaaatatgtaaaataattatatataatctatcatttaatgttataattaaatatactaataaaataataacacaaaaataaataaaattgtagtctatttatggtgatgctaattttgttcttaacaaatgctgtgtcaaatttagcacaaaaatttatgtaccaaatttgcattactttttggcacacaatatactttttgtcaaataacttatattttaaatttacaacacttgattaacctatattcatgctcttatattactatttgtgtaatttaatgttgagtctcatttcttactgaaataatagttataaaaatgagaaatgttaaaaagtaccagtggtgcttaacaccctcctacgtgtcaatatcactattggtccaactaagtatcgggtcccatataatttaatataatagcttttagggagtatcactaaccaat

SEQ ID NO: 324074 - DNA, 1449 bp, Cannabis indica
  modified_base (60)..(60): a, c, t, g, unknown or other
atatgcatgcatgcacattccattttatgttatcttagtattgtgattttatatttttangttttcattatataattactaagtaatgtttatacatttaacaacatacatgtgaaatgtatatatagtgatgtaagtaatcatcaaaactttacttaaagagacaacacaacacaacaaaattaattaattgtttcgtgtataccttgttctctctaatagctaatatattatagtaactttactttttcaaacatcattttcgcactttatattttgtccacatcaacaaaaaaaaatttagctaattagcaatttttccctctaaactttgacatataccaaattacgttccctgaacttttttgaccgttaaaaattccccctgaactattgagattgttaaatttaaggacttttatctaatattttcattcaattttactgttttagtgattgtttatatactaaaccatgctccccagactttgatatctaccaaatcatgcccctcaaactatgatatgtactaaatcatgccccctgaacattcatccatgttagaattttttaattaaaattagataaaagtccttaaatctaacaatattaatagttcacggggaatttttaaaggccaaaaaatttaaggagcgtgatttagtacgtgtcaaagttcaaggaaaaaaattgctaattagccaaaaatttatagattcaacctcgtaataatggtaataatttacttcccttagttgtcttacttagagaacttcgagatcataaaggttcggctaagtgaattttttaacaatcttgaaaaagctttcaaatattttagtagcatagcagctctttggaaagtcaaataaaggatcccttcatagtaaaatgactccattatttataaggaaaatataatgtctcgaaaatataggagaagaatttaagaaactaaatattaaatccgacaattctctcaaatcaaataaaattagccccttaaaataagaattataattaaactataattgatgagatatttaaggaaaatatctccaaagctcttcaattatcgcgtccctttgcacggagaatggaactcagctaggaaaacctaattttcttggaaaagtacaaggcatggaacatgctcagataatacttgttgaagaactaaacttaatcggttcggctctaaatcgttctggacaaaaccctgaatgagtatactgttggaatttgttttactaggatctagatttactaccatgtatgttatttaatatcctaaatatgaatttcaaaaacaatgaaaataaacacatataaagtttcaaaaaaccttacattaggtgcagcggaacattaatgactccttccgctcagatctctacacattgtatcctgtctgtaccagagtatcaccaagatctgagcccgaatgtc

SEQ ID NO: 324075 - DNA, 883 bp, Cannabis indica
attcgaacatttttaaatgttttgtttatgtattaattttagtacaatataatataattaatgtttgtttatcttttaatgtaaattatgtttgtttttttcttaatattataatataattaattatttataattaattaatttattttttaaaaaaaaaattagtttcgccggcgcagcaaaacttaacattaaaaggttcgcgccatttctcaaattggcgtgaatagttttgccggtgcaactatagtgccaacgaaacttttcgcaccaatctgagaaatagtgcgaacctttttaccggcgcattaattattgcaccggcaaaaaaatatcaaagcaggttcagagcggataagggtatccttttacaccgacgtttaacttttgtcagtgcatttcacttatgcgccggtaaaaagtcctttaccgactaagatttgctgacatcttttgccggcatagtattgcaccggtaaagctttgccgacgcatttagtgtactttttccagcgcaaaaatgccccggcaaaaacagtttttcttgtagtgcgattgtatgtcactgctataagagtgggaatggtagttatttttgcaactggagtaaaagtctactcaaagtccataccatactgttgtgaaaatcctttagccactaatcgagccttgtaccgttcaatggacccattagacttgatcttgagtttatacacccaacgagaaccaatagcatgtttaccaaaagagaaaagtatcaaatcccaagtataagtcctttgcaaagcatagagtttctcattcatagcacgttgcgaaaggggttaataactacctctctataggacaaaggctcagaatgacaatgaataaatgccaaaaa

SEQ ID NO: 324076 - DNA, 770 bp, Cannabis indica
attagttaatttgaactactctgggttctcggtttatgtttgtaatgatgttcatattttttgaatttttctaaatgttatttttgttataggtgttatgaatgttctttgtaaattttatttttaataagagaaatgaatatataatttaacgtctattattttttggttattatgaaaaataaatataaatttgcattaaatttattttattaattagttatgaaaataataatatatggatgtataaatataggaagaacatggaaggaaaaaaaataataaatgaaaaaacaaattatttaaatgcaattattattgtaattagataataattcatatacaataaattaatttaaatagattttttaatctacataatatttttccaacggttataaacattcatttaaaaagatttttcccaacagttataaaccgccatttaaaataacttttcccaacagttataaattgtcatttaaagttccgcatttttatgacacccacatagccaacggttttaggaaccgtttggaaataggataaaagacacttataaatcgttgggaaaaggaaattttgtagttgttgcccctattttcgcccaaaatacgtggaccagtatgacgacgacatgtggatctaagaggcgcaactcttagatcaatcgactaagtctcttagcttcaggtaaaagctccacgtactcccggagaccagaggaacgccaagggacctccggggggaacatgacattatttgaacag

SEQ ID NO: 324077 - DNA, 735 bp, Cannabis indica
tttttatgtaaaaatttctaatagtaaagtttcacgtgctatttttaatagtatcaatgaaaattttattaaattaatctcatgtgaatttcttttaagagaaacttagctaatttttcaagtttagttcgaaggaactataaatatcagtcatttttggtttattataatgcaaactaaatttgttgatcttgaaatgtctgaatttaaaattctctttgaattttatgaaaacttgtacattgctaatgaatattttggcttagggaaaaaaattgattaatctattttagttaaaaaaattgctaattaatattttgtctagggtgtaaaactttatgaatatgttacccattttttcttgtaattaatcatatagttattaattaattattactaagaatcattaacacatggatcatcttttaattagcaaatatatataaatccctcacgatcaatgccattatgccactactaaattgatgatcacaactaagcatcactcacacaagcatatactactcatactaattaatgtcaccatgattgctaaattaaagaaataatgaatagttaatttgcataataacatgtaatatgtgggaaatttgattttctattcttaaaaaactaaattattttattcttaaaccaatacattttaaactaacaaaagtatgacacttttctcaaaaccccaaaaataccctcaaactctcacagcatctctct

SEQ ID NO: 324078 - DNA, 897 bp, Cannabis indica
tggggactatgtttcgattatgcaacaaaaaaaaaaacaaaaaaaaataaaaggcttaaaccagttttgaaagaacttaacaaatctggttttggagatgtcgatatcaagaacaatgtatgttggagcaaccttcgtgagattcaagaagatgtgcataattacccattgaaccttgctctaatagaaaaagaaactgaggctaggaagaactatatgcaggctcataaactttatcaatccttcttaaaagcaaaaaaaaaaaaattgattcgcttaaaatggtggtatgaattctaaacttattcatagaagtttaagaataagaagatcctaaaacactattttttccataactaatgaataaggagcatgggtagatgagccaacgactgttaaagaggcctttatttctttttatcaaaatttgtttagtgtaatagaatgaagcataggaggaaggttctgaattctgctattaaggagggtcctgttgtacctccctctcaagcttcattcctcaattggccttattctaaggaagaaatcaagaatgctcttttttcaattttggaggataaagccaaatcctgatggcttaagtagtggtttctttcaaaaaaaattgagagttggttgaaattgatttttcagaagcggtctaattagttcttcacttgagtgagcttttgaaggtagtaaatgctacaactattacccttatacctaaaagcaaatgtctgaatcatatgaatgattatagacccatctcttcctacaacatggtctgtaaaactatcactaaagctatttgcaatatgttaaggtatatttactactagaaaaataggttttagtgacccacattgagtatctctaaaactatttagtgacact

SEQ ID NO: 324079 - DNA, 936 bp, Cannabis indica
ataaaatattaaattacttaaaaaacttaaattattcttaaaaaaatattttcaaactttatttttgttgacctcgcttctactcaacgacagtgagtcaaaataaagcgaataaataaagtaaataatagaaagaaaaaatagtaaagtaaaaagaacaccgaattttaaagaggtttggtccattaagagtggtaatatagcctacttctcttatatttgtattgacttgagagaagacataaattgttcttcctctctaaagctcttacattggatctctgagttattttctctctgttatcataagttttgtccttaagacatgacatgcttacgtggacaggtatagtgccacctagtagtacaactcactaaaaagacgaccaagtcaacacataagttaacaaagaccctgacacttaaacgggtatcaagcaacaaactagctccatctctggagctggcctgccacccctggcttgccagcgttaggatagcaccctggccggtcaccctagccatcacaagggcctggccagccaaggagtgcactataggctttactggacagccttgcacgtggacaacaaatctgggttgcgaattgggcccccaaagcccaacaaaatggctaaataatatctagattcaagagcattttagtcttttatatttatataacaacctatgtaaatatttaagatttaaacttgcattctagaatttaagcctcctatataaaggccttaaccctagcctagaaacctaaatttcctctaagtcactaatgttgggaatattttaccaggatctagatttactaacaagtatgttgaattaacatcctaaatatgaattctctaaaacaatgaaataaacacataaggatttaagaaaactttacattgattggagcgaaataatatgactcct

SEQ ID NO: 324080 - DNA, 1193 bp, Cannabis indica
ttttttgtaattaaatgtgatttttagttacaacaaaacgttatttgtgactaaaatatagtatctagttataagttgtcactaatttaattttagtcacaacaaatattgtgattaacaacatattacaaattgtaatttgttgtgactaatacttttagccacagatcttttagtcacatcacaataatgataatttataattaggtacaaattttttatctttgatcacaaattttattgtgactaaaaataagattttttgtaatgatggtttacttttggaataataacgagaataattagtgtattagcaaaacatatttactttaaattctttttggaaagaaaaatggtataaaaagggagcataatgtcattttgtttggtgattatataaatgtaaagttgtaatggtgtttataatatagatgtattaccatatttttaaaacaaagaaagacattacaattgttaagaaattgcataatctcattaaagttgagttataattaaatattctgcagcctaccatatcatattagaaaaagaatttatttatttttttacatttttgttataagtgtgtgagtgtgtaatcattgggtggttagaatattcttctagggatttgtgatgaacaactataataatgtcattggctccttaccctctttcactgagttgtatatttttttttttgaaggcaaagaaacttttattagccaataaatttagctaccaaataaggtagcagatcagttgggacatccccaaaactaaaattacgatcaggatgtgagatggaagctcttgcaagattatgagctaccatattagatgaccgcttaacaaaataaattgagacatttttcaactcttgaagtaaacacttacagtctgaaataacaataccaaataacaatgagttggatattaattttcctataaataaagtatttctgactcatagttgaaatgagttgacaattattaaaacctacaagtcataatttctaatttggtatcagaactttaaagctaccctaaacggcgatttaagcaaattctgatgatcacaaaaacaatactcttgttgtaagcacaaactgtaaagactcagtttgaccgaattaaaagaagaaaaatatatataataaataaataataataatataatatatgcatatata

SEQ ID NO: 324081 - DNA, 683 bp, Cannabis indica
gtttgtaattgcaagtttatagtggagaaatctccttgggggagagctggagtaggactcaagatttgagatccgaaccaggataattgcttgtgttttctctctgtttttcttgttcaaattatattgtttataatcttgattttgtcatttaattattgttgattatctaaccattagactgatctgagtttgtgttgtatgattacaacaattactttaggtcaaacatacttaattttcgagattttatgtgatagactaccaaaaaaataagatacatattgttgatataggtagtacctaaaattctatttgacttttcctaataaacaatgtgaaattgcacatctaatctggtatttccctcacggaacacaagaatcccgaatgtcacaatatatacttgagagggatacatagagggtggcatacactgtatattttccccttcccttcgtacatccagaaaaataaattttcatatagtaagatacaagtgaggattcatgcatccactcccagatacttaggtagcgtttggttggaggtaatgaaatggaatggaatggaaaggaaacaattttcattccattcctttgtttggttgcattttaaagtattggaatggcattccaatggaatgctctttccaccattttggtggaatggctattccattt

SEQ ID NO: 324082 - DNA, 885 bp, Cannabis indica
ttacgcaccccttcttggcattgagaaaatagttttcttttctccccttgaagtagcggaatagttttaacaaatgtactccattctggatagataccatctgccaaataatatgccttattgtattgtttgtcattcaccgtgaactcgattctgggatcttgtccttccaatgacaatgaacaatgtagattcatttaacacattgaggtcattattcaatcctgaaacactaaaaaatgcatgccaaatccataaatcttgtgacactactgcctccagcatgattgttggtgtaacatgatcaccatgtgtgaattgacctttctatgtaactgggtaattttttccatttggagtgcatacaatcaatgcttcctaacattctggaaaaccacgaagctttcccatgtgaagtaagagatgaatgtcttcgccattcagtcgtcttaaatactcgctcccaagaatctcattcattccacaaataaagttgatcagacattcaatagcagtgttttcaccaattcaaataaatatactcattaacacaatcgacaggcactccatataccaatattcgcatagcagtagtacatttttgtagtggcaaaagacctcttttaccagcagtatcatgcctcatacgaaaatatgttgaatgattttctagagactgcactacgtgtaaaaaaatgtgtgtgcattctatcgtcttcaaaattgagcatctgtgcataccagtttaccaaaaaagtaattattaaataaacattgatgtctttcttcatgacctcttgactagggctgaacattttgagcgggtttgacccgaacccgagcaacccgcccgaacgcgaactggtgaacccgcaaaaaaaaatt

SEQ ID NO: 324083 - DNA, 630 bp, Cannabis indica
aaaattttaaatcttacttttaacattataaacatttcaattttcttaaaaaaattcctgatagttctaaataattatatgcaatcttaaaaaaaaaaaaaaaaaaaaaattctaagtgccaaataaaaaattatggagcccgtaattttaaagggtacaatggaatttaatgtccgttgttttacatagcattatgtaggctactagtacagtagcattattagattataattggtcttgtttttatgaaggtgcaaactcagcatgttttaatttatgttgtgtcctttgctagcctcatgcaaaggggcaacaaataaatatctctctactcttgaagtcctcctttaaagaaatgaattgaatggttttaaggccttttcatttcatttaatcagtacgactcagatgatggagacaatgtaaacatctagatcaataattatcgtccacagaatctgttttatttttttagtcatgtccttgtaactcatttaaaacttcctgtccatgggaggaccccaagtttgggtccattcatataaactaaacaaaaatgtttttttaataacaaagtagacaaaaatgtttttttttatttaagcgtgtatatattacaacaatgtttt

SEQ ID NO: 324084 - DNA, 1317 bp, Cannabis indica
tcactcacggttcaccctcaccagccaccataaccaccgccattcgaccgaactcagaaacctgaacccataacagtctcacccaaagccatcatcacccaaatcgcactcttgagcactcttacccttacgagcactcttgagtcggcgcaagacatcctccctctcctcagtggctttagccaactgcgcaagcatatcatcttgctcccctataaccacattaagtgccaacaagaattccacctcgtaatctccatgggttgcgagagcctccgccgcttgccttttagcatctttggccatgctaagttcattttttaactgccaaatgtgatccacatgggaggccaccaaagtagacaaacgatccctctctgccttggttgactccaagttgcccaaaagagtttggtagttggaggagaaactgaaagctccaccttgtgaaagcacttcttgagatgcaactgccatctacaaagggatggccaaacaagggaagaagttagaagtaaaaaaatatataataacactaacataatgacacggacataaaaaagagagatttgaaagaaacagtaattttttttagagagtgaaggttgtaaggtttttactttaagtattctcctattaagatcttgaaataacattttaaacctttgttaatttattgacaagttcttaccgtcaatagaagacaatcacataaatcttaagatcaaaagaggaactatatgttagtccataagggtggtattttaacactttaagactacactaaactagttttctagacttgcattaatgttataaagtctacttatgggatggtgattactctaggtggagaagtgatttttgagaaagtgtataaacctatatgaagtctctaactctaccagtgagattgaatgttaaagtggctcaaaaggctaatcaataattattcagcctatggaaagttctatacagttttttgcattattctagtcatggtttaactactagtgttacttccttataacatagatatagttttcaaatattagataatctagtaccctaagaggagtaaacatataaaaaagaatttcacaatatcaaggattttgtgactaaggagatgtaatggtggagaaaatttgtattgaatacaacctatcaaatcctataacaaagataatactacatactacacttaatttagacatcaaggtcttgagattaattaaaatgtgcttttagttttatatcagtggaactgggagtttgttgggattttatgccctaaataaaagctatttcaatata

SEQ ID NO: 324085 - DNA, 824 bp, Cannabis indica
tttatatatgtatatttgtgattcttcctaccaaaatatatatttatatatattttgtaattatagtttgatgaattccgacactaatttcataattggcattttattaaaaataatatgcggctgtacatggatagtataaagagctagagtagagattaagatatgatgttttattcttcataatgaaaataaaaaaaataatgatttattttatatatatatatattatatgtaataaatatagcaatattaaatttttttaaaaaaattttaacatgtactaaactatatcttttaagttttttagactgttaaaatttttttttgaactattaatcaaaatgttagatttaagaactatccaaccccatgcaattttactaactgatgcttaatgcaaacagaaatttatggagtacaatttagtacatattaaaatttaaaaaacacaatttagtgcatagagtaaaatttaatacaataacaactatcatgttaaacctcgattagtataattaaataaaagtctttgaacctcaatatattcttaataagtctagtgaaatatatatgcaccactcttaaaaatacatatgtatataattttatttttcttcattaacaaatatatagctcaagagagaaataataattacgtgatatgttgttattcactaacaatatattaattgctattatgtgatatgttgtcaaatctagaattaaatatttagtggtgttaccacttgagactagctcaagtggccataggtgggtgtgtgagtgttggaagtcctgggttcaagtcccaggtaaaacat

SEQ ID NO: 324086 - DNA, 670 bp, Cannabis indica
aattatatataaaaaataataattgtatatgtattcaataacttttaaaataattttttttatatatgtataatatattaacggtaaactaaagatttctcttttttattactatttataaaaaaataactaaatgtctaaatctaaacaaacctatcatatattattatatattgctataaattagcctaaaatatttgacctaaacctaaaaaaatatttctttttctttttttctcttagtcacactcctctttttcttcttcattttttttctttttaatatgcaaattctaaatcattatttatctcactcataaaattattgtttcatgatttgaataggcttaatgtctcagaagaaaaaagtcacaatattgtgatatagaaggttgaaggaaaaagtcacaatattatgatgtaaggttgaagatatggtgatagaataggtttattgcataaatcttctattcttacgactcttaccgtcaataagttatcgatagaagccttctaatatattaatgtattttttctatctttattttatactgtttcttcttttatttatatgcatatatatgttgggatatgattttgtcctgttattgtactttcacggattacatttgtcccgttattgtactttcacggattgtaatccgtgatg

SEQ ID NO: 324087 - DNA, 1490 bp, Cannabis indica
accacatcaggatgacacattcttgctagtttcctataggctgctttaatctcttgtccgtttgcaccaattgaaagcccaagaacatcgtacaacgacgtcgtactagccattttcactgtcgttttaccttttattttataatatttttttatatagatatagttaacttttggtttttggtcaaatattatatattatagagctgttctctttgggaggtgggagatcgagtatatatatgtatttatggatgtagcaatgttgagatattaagggtttttgatgagtatgagagtgagtggtcgatgcttgagttatatatatagacttttgaaaataaagtattttactagtgggtggaaaattttaaatcaaaaaaaaaaattaaacagataaaaaaaaagggttctttagtgacatttaatatggttgatattcattttggatctttaaagagcttatccataagatgatgtatatatgctgactcagctcactgtttatgtggataaggttaacctgttatttgttgtccataaatgcaggctatatggttatactatatccccaattctcatcgttaagtttttaatggactctcatttttacttttagtagtgataggtcatgaagacctaaggacttggttgataaagttttcttaaagaaacagtcaatacttctatcaatatactttttaataccaatacttgctttggtcataattcattcaaatacatattgatttacatgtgtcaaaatcttatgagagagtactttcaataaatccatatagattctaaaaggaccgtttcgatataacttctcctaagtaaaagcatgattatggtataatgacaaaactaataatggggttttgtttcatatttgacactaaagaaattggcttaaaatcaaggttcatattattgtgtttaagatcgaattggcgcaaaaatgcaaaatcctgggtcttttgtcatttcttcattccctttggataatacatgtggacatttttttcatattttttcaacgaatttttatgattgctaagaaaaagtgaaccacctggaaagaatgggttactggcactgttctatcagacggtttggtcagttttaaaggaggaagtaattcaaatccgcctaagtgtaattctaatgtaagctactttttaaaagtcaataatatccgagccgtcctaaaatataagcatctctttttagagatataaatttacactttattatttaatacaaaactgaaatgtaaaatgaacctaaatttaaaagctaaattagtaaatattttttaaaaagaaaaattaaataaaataaataaattaataaaaattataaaaatatatttattatatattattttttttttgaaaaatatataataattaaattaagttatataatttttttagtattgcatattattatattgtaacaaaaacgaataaatatattaaatcatta

SEQ ID NO: 324088 - DNA, 494 bp, Cannabis indica
tttttttttaaataaaaaagagaaaacttcattagataagatcatttagaagtacatctctaaaagcaaaactaatagaaagttcagaaaaaatacgatcaactggaaaataagaagctttagcaagataatgagccgccctatttgcagattgtttaacaaaaataattgagcaatgccttaaagtagataacaacctttgacaatctttgacaatagcaccgaaataagaattcaaaggatgaggattacgaatagagtgcaccaacacaagacaatatgtttttactacaacctttttccaattgttcctcttgatccaacttaaatcttccttcacacctattgcttcaacaagacccagttgaaaaataccaagccaacaactagaaatagcagttaaaagaagagaagtgctatttttggccacacaagcaaagctatgacagtcacgattataaaaaatagctgcgtcctgttggaaattattttac

SEQ ID NO: 324089 - DNA, 906 bp, Cannabis indica
caaagagttttatcgtggaataatttaaacaagattttatgtgttttacttgtatgcactcatgcatcacgtttacagtaattccttaatgatatttatttttcaagtataatcattatgtcattttatttatttttaaaaaatgtctattgtgctgaattctcttaatgctttactagcaattgaaaaattgaacgatgtatatttccttaaatagaaatctgatcagaatatgatgttggtttatgaaaatcacagaatatttccttactgattaatgtctctgtaagaactcatgcattgcacatgattgcgctaataaatgaggcagagacacatgggtctatcgtagacaagaggactcaagtgatcattattcttgagtcgctcactcattgcttcaaactgttcaccacttgtggtgatgaacaagctatagttcaacatgactcaatagttgaacgagttgactatgtttgaaaacctttaaaaggataagtccaaggaaggtgagtcaaacaagttgaagcaaagtctatccaaggaaggtgagtcaaacaagttgaagcaaagtctaactttccttcttattcggataagaaaatgaaatgggatggtaaggatagcagtagcaagcccaagccaaaaggcaagaaggcgcctaaagccatgaagaacaaagctagccctaagtccaaggacaagaaagacaaaaggcaagtgtttctattatggcgtgatggaacaatagtagaaaaaatgtaacaagaacttcgagcttaagaaaagtaaatttgatttatttattcttgaagttaatttatttgaagatgatcaatctttatggattgttgattcgggagccactaataatatttgttttttaatgtaaatacttgatttgtt

SEQ ID NO: 324090 - DNA, 923 bp, Cannabis indica
gctaaaaataacttatctatctatctatctatctatctatttctatatgtataaagctaaacactcatttattatcggtaagagattttaattgtcttaaataaagcacatatacggttcagattctaaattattggatcgggtttacttaattttacatctaacttctcatattttttaataatgttaaaatttgatgcaattttattatttagttatcatcaaataaaatacataatttatttcatatatataaattaaaaaaaaaaatttaaatctacgcagcggattgtttactagtttttcataatgccaaaaaaaaaaaaaactacaataaaactaaaagtgatgcgccgtctaaatgctcctatataatatattcacccttcacaatttcacttcacgtgatagtttcctagtccaactatgttgagccaaatattgaataattatatttgttaataaagtttaccttcactattccatcaaaaaagtttaccttcactgtaaaaaccttcactacatcttaagtcaaaagtagaattctcataaattagaatttagttagttggacaaaattaatttttaactatatattctaatcaacaaattgactttaatcttatactaacgatgtgattagcaaattatctataaaagcaattagatattataattcatgcagtaacaaatttacccagccaaaaaaaaaccagtaacgaattggtcaacaaaacaaatattgctttacatgataaaaaaataagggatcttttcaataatatacttaaaatataaattatttacaaaaataccttaataaatctcaattacataatatatacctgaaacgaaattaatcccaaattccgtttttttttattattttcttgggttttcaaaagtaacctttggttacttat

SEQ ID NO: 324091 - DNA, 518 bp, Cannabis indica
aaggtgaaccaaaacatacacaaattaaagaaaaatacttctgttattttattgatattgaataatctggattacattgaaaatagattttatttagggcataaaacccaacactttagcctttcttaacggaagccaaagtctgccacataatacataacatgattttcgcaggcatgtggtttttccgtgggtgaatgatcactggggttggatatgtcttcaaacctccttcctagaagagaaggatagcttgaaatctgtcacagacccagtgatttttcacaccctatggtctttgaacacaaaattatcgcttgaattttagtgcgactttagcctttcttcatgaaagccaaagttcggcacatacaattcaacatgattctcacaggcacgtggcttttttgtgtgtgaaagatcattggaggtttgatctgtcttcaacccactttcctggaagagaaggactgcttgatgtttgtcacacgcccagcgatgtttcacaccctttggtc

SEQ ID NO: 324092 - DNA, 1707 bp, Cannabis indica
aaaaattaattatgaccctaattttttgttgccattgggttttacaatctcttattttattttaataataaagattataaaaaaccgttatataactaattatacgacgtagacactttagtaccctataacaatgctcccaaagcaaggtcatgttgaaccatatgaataactaaacattattgaaaagcttgctaattttcttatatatatatattttatatgacaatctacatcgacttttaaatgttttcaaataatttacgatccatgttgtaaatagagtattcagttgcatgtgtgcttgtttatttttgaacatgtacaactgaatatttaaactttatttttcgatatcataaatcattttaaaatttttaaaaataggtgaaatgtatttagtataactacaatatatacagtcatataaaaaattaattataattcctttaagcgcttaaaatagaaacacgagaaaagtgataatttaaataccttattccatttaatttcccattgcatttgcaaagcatcaccaggaataggccatctctgcatatttccttggtcagtatttgctgcagtaatatgcaatgcaccattgccatgtttatcaacttttcgaaaaatactttcatttttggaaaattgttggagcaaaaatgtgtacaatttcacttgcttatattccaaagccaataacacaacattcttctcatcttcattcgagtcatatattgccactggaaatttttcaaggattcttttcaccatttctgtgataccatttcttgctgcaattaacatggctgtttctctctttttaactacttttttctttacatactttgggtcctccttctttttagctgtaattaagtgccaataatattaatttaataaaattaatatgtatacagtacaatatcactataaataaataaataaataaataaattgatatacttaattataagaaaacttacaaaaatactggaatttgagttaacttttacaaaaatactgtcacacgattttttttatgtttttataaaacaacagtggaacacaaaacagaacaattaaaacaacagtggaattactaaaaaacaaccggaaaacaacagtaaaaaattcacttttaaaaacagtgtttttgaaaaaaaattccgctccacaataaaaaaataaaaaagttaaaaattttaatatttggtgtagataatcctaattataccttcaagaaaggctgaatttaggtcttcatagtcattcttattagcatttattggtgcttgatacccattgtcttcaaatttataaatattattattatttaagagttcattcaatacttgaagagaccatgtatgcttctctttcagttttcttaaactgattatccatccatgacctgatttcaattcaaaaagtacataattattataacacataaaaataagaagttaataatatgtatattattattattattattattattactatataccattattattatatatattatacatgcatctcttctataacataggaaacaataaaatccaacatataacaagtactattgataaggacacaaattttagtactatcggtagagatatctatgtttgtagtatttcaaaaaattataatttatttagcaaaaacaataatcataatttaagttttttttttttt

SEQ ID NO: 324093 - DNA, 557 bp, Cannabis indica
gagactgagtcagtaaggactcttaaatacgtttctttaaattatccaggactttttttgtcctcgtggataatttgggcttgttgtacacttataatgtgatttattgcacatttgattgtttctttactaagattttggtacgtcatctccttgcacgttcttgtaagttggcagacttgttaatagttttcttacttataataattgtggagaggtgttgccaaaattttgacgaaaaagaagcaatcttaagagcataaattgtattatatgcatattacaaacctgaatggaataggttctctacccttttaataatagagtgagaaggtggattaggaaacttgcatattttgaactttgttttgaactttttctttttatattatgtaaaaatatgatgagtgataaagtttggatgactttaaacaaacggtctatagagtttcgtagggtgtgaacaagtttattggagttgttcgaatgcaaataaattatgatggacttactcgatgcccttgcatgagatgtctgaatgtgaacttcgacactcc

SEQ ID NO: 324094 - DNA, 850 bp, Cannabis indica
gctgggtttgcttaattcacttttggtaataatttccagcttagtctatttgtttcaggtcacctttttatatataaagcaagtgtctgttaagattacacaatcaattaattagaatcattacttcaataataacatcattaaataagaaaaacgtttagatattaaatatacgaacggttttgtctgttcgactattccttgattgcagcaatgtatgtaatttatcaatttgccccgtttgagcattcgtatcccacacgcgagctctcaagactttatggtgttgcactcgcataatagggcttaggactttgaatgtcagagaccacacttaatcgtactttttagacattccgtgttgacaattaagagccagcatgctgttaagaaatcatcaaaaacactagtcaattggacaacaacatatgtaaagaagtcatctttatttgtcacaggagagatgcattcgttcatcgcatatccaaatatgcgcgaccactactaacttttcttgatcctgtttattctttaatcatgtcaaccatgcgatcggaatattgtttaaattgcatcttcctacaagtaaaattattcgaggtcgattctatgagaactgtattattgacacgtcatcactttcctttaaggatgagtacacatgtcaacttagcatgagactggactcgtatttttaggcggtaaattcgtacaataacaaaaaccaattcattatatgtatttgattatgtgtgttcgaagaatgaaaagaatttatgccttttaatccaaatttttcttttgcaagatagaggaggatagttttttttttttttttttatttgtattc

SEQ ID NO: 324095 - DNA, 794 bp, Cannabis indica
aatcatgaaataattcatgtgaaccatgcaacataaaatttgatttctgatcttatattaattagtaaatgtgattatattgaaatgtatattatttagggcacaaaacccaacaatcttatcctaacgcaataagaaatttgagcaataaaataagtaaatattcataagagaactcatgagagcttttttttttcttttgataagtctcctatgtttgatgggaatatttctaaaaaaaagaaaagaatctacaaaattaaagaggaaacaaaaacacttaaataagagagaaagaccctcttcctcaattagatctaggtttctttttcttcaaccaggactgattgatgttctttgacgttaatatgtgatttaaaatttatggaggaagaatgttaattgtttgtgactttagttttatctttgtttgagtctggatacatttgatgttattgtttagatttagtattgttcatgttcttcaatggctgatgttcttaattctgatttatgataaattttttctctgttggtattaattaaaatcttttacagctttaaaatttagttaaattttttactagttatattttcaaacagcaagtaaattacatataatccttatatcttgaacatgtaacatagtttaagaaatacaaaaaaggaaaaaatttaacctgacgattaaattaattcaaaatgataattagaattgaattaggaatagtaatagtatatatataaaaccatacaaaaaattggaagttaattccatgaaaaggtatgaaaaa

SEQ ID NO: 324096 - DNA, 546 bp, Cannabis indica
ttggctgcaggaactacatcttttgtgcctgagattgagatgcacatgactatagtcgagcaaagccatggccaataccatgttctattgatcattgctgatggacaggttaaaaacttccattatctaatatttattttgtttggtgtgaaattcttcctgcattatagtactttacaaaaactttgtcctgccttaggtaacaagaagtgtggatacaagaaatgggaaacttagctcacaagagcagaagacaattgatgcgattgtcaaggcaagatgcaccattcataggctctttcaatgcaactgtcatattagcaaaccttgtggtttcatattgatatctattaatatgttttgttaatatatttgattcaaagtcaagcaagaagttgctgtggtgtagtggttatcacgttagtcttacacactaaaggtccccagttcgatcctgggcagcaacatcttttcaatattatttttatatcctaagaaactttttccatgtatgttttagggataaatttttctaaactaatcttg

SEQ ID NO: 324097 - DNA, 1256 bp, Cannabis indica
aaaaaaaaaaaaaatcatattattagaaaatagttaattgatttgtttgtgatatcactcactggatcaaggtgggctggtttcgtgggccattaccttgtactttgggccattttcagtttcagtttgatttgggccacgagtgtcactgtttgatctgaaccaaattttagcaattacgacactcctacgctaatactatttttggtaacgggaaattaacattaggggatatttcacaaatacaccaaaataataaaaaaaaaattacaaaaattcggttttacagaattttaaatatttttatgattttttttattttattcacagaaaatacagtatttttatgttgtacacttgttaatttgttgttgatattttgttatttgtatgttattttttattgttgttttgatgttattttcatgttacttttatgtagtttttttgttatttttcgtgttgtttttatgaaaaatagtaaaaatataaatggggcccgcacagtctgggacaggtgtcacgcatgggcactgttatagtagacaaagatatcagataggcatcgttagcaaaaagaatgtattcattttggtggtgcgtgcactaccatggtctaacatacgaaacaaaatttaatttggtgggaccaaacgtcagaggcgaccacgtcacccctcaaagacttccagaggcgcctcttggaattcccccttcgggtgcataccagtgctcattcagaggtcttcccttattatgtcttctaaaaggctagaagccttccaaatccaaaggagcctcgtcttcggaggcaaggcttctcagctttagatgggctcgggccgatcttccgtatagattaggccttcctatgtgggagggctttgacttaggccattcccgcttaatcatactctagagataccatgtatcaccctttcaaaacacagataacaattagagttttgccccctaaactataaatcgctacaaataacccaacgaattacattctgctcttttctttaaataactatctaatgtagtactgatgtgatattaatctagtcaaattcaatatttaagacaaaaaaaaaaatgggttactttctgtttacaccaaaagtagccctaatgacatggacatcaatgtttgacacacggcaaaaaagatgacatcttggagttgagtagtcttgagtcataacaagtcaacctgggagggctccctagccttgtgcctaggttgacttcga

SEQ ID NO: 324098 - DNA, 1138 bp, Cannabis indica
caaacaacgctgcatctatgtttgtattaatagaattggacaaatttataattttacaaatattaaatactttacctactaaaaattttattaagtctatattaattataaacttgaaattttgaatacattatttaataatgtttattgtagttatgatgcaattttgtacttttttttttaataagttagagtcatcaataattcaaatagtattttttggcgtttattttttgacgtgtggattttcttaatttcattcacaggattattgatccccttttaaatgagttgattgaattggttatagtgactttgtagaggatgtagttcagacggaataaaatggtccataaaaatgttaagctgactcttgtgcttattgtgcattggacttgtgttatctgggacgtttcacaacaaacaagcctcgacgacggctcccctgttgggaggcgactcacgtcctactggtgggatggtgtcttagataggccctttttagatggtcccaaaatggaaatctttcccacttgattctctcaaagtcaatacagatgctattatcagttctttggacaattgtaatggcttgggtatggtgattcttaatcacttgggtatagctgtagcttttgcaatttggcatgtggatggctactttattcctgaagttgctgaagttttgactattcgcaaggcgctggtctaatgcatttttcttgggtatagaaacattattattgagtctgattatttgaatattgtacttaaattgaagaacaatgtttctattattacttctttgggttaagttttagatgatattgttgaccttggtaataggctttaagttattaattttgtgaattgtaatagatcttgtaatggagttgcacatgctttggccaaacttactttgactgttttaaaaagtataatttgatagctaaggaatcctacttgtattcaaaacttattaatagcgaatgctatttttcgaataaatctctacccccacttttggagtgtctgttactctgggtgtttggtggttggaaatgttttcctcaaaaaaaaaaaaaaaaactacttatgtatgtataaatgtcatgtttaatttataattttaaaattt

SEQ ID NO: 324099 - DNA, 684 bp, Cannabis indica
tttttgtaatgtaaaatgtattggtttaaaaaaaaattaagtttaataagtatagaaaatcaaatttcccttttaaatttcactcatattaagaaaataactacaattttctattcattttttttaactcaattactttttgttttttacttgaagtctttaattcatattaggaaattatttgtaataataaagtaaatgctgcaatcaaattttttaaaaagaaaattataattatttttataatttgaaaagaattttgtaaaaaaataataataatttagaaataaaatcttacaagtgttgaaaaatcattgtaattaaaggtgggtaatagtccaaccctaatttagttttataagactagtatagtagttttaattttataaggtaaatatgattagttttgatttttgtaaaactaatattagttttgtttttgtaagatcaatatagtctaataaaaataaattaaataagatcttcactaatggagatgaacatagataaataataatttttacattagagaattgtgtgataatatttcaatcaaattttcatattttattaaatatttgatattaataataaaaaaaaaacttatttattttgtaagggttttattggtgggatgacatacctctaagtttgaggtttttcttttctaatattaaaatttta

SEQ ID NO: 324100 - DNA, 1163 bp, Cannabis indica
aaaactatggtatattaaacttttcaaagagtatactgccaaaaaaaaaacagtataaaagttaagttgagcgtgtaacagtataaacgaaagaaattgggaaaaaacagtaatgggtgtaaattttccttaaataaacttattcccactttcaaacttcattcactcaaacccaattttcaaaagcttctaactcctcccaactctcaaggagcaatcggctagggattcttaagaaccaaaccaaggtaacgaattttccttttcactctttttcattctcccttctcatccatttcaatactcttgaaagttataaaatccctaaaactctccattgtagtcgtgtcccttatttagtgaagaagagttttcaatcattctttaagacttttgggaattcaagcaacttttgaggtcatttctaattctttttggtcttttgataagttgtgattagttttggaacaaattgtatggatagaattgttgtcgatatagaaattatgattgaatttgtgttttcttgaatgtatttggctatgtgttgtgagaatggtatttggatagattttagatatattttgaattatattgatattggtgatatagaatttgagtaattagacttcaaatttgtaaatttgggaaagaattacaagtgagaaaaacatgtattttttgtcactgtgagtgctcagatacatgtaattatttcaaataccttatttgattactcgtgtcattgaattatctttatcttgattgaatacttggcatgtcaccatgtgggagttttcatggtcgagaatttcaaatgaaaaaataccattactaaaataacttgtcattgctctaagcatatagtcctttatgatgaactattaccacattatcactagtgttaatagtcatttttatgggcgcgcgccatcgtaccacgtaagtagaggttgtgtattgttgagcataagttttatatattttatatatttttaaacaagtttctaattttcttaagtaaataaatttatgtaaaccaattacattaggggtgttcataaaataaccgatccaatccaatccgcacaatccaatccaatccaatccgcaaagtgcggatatccgcactgtgcggattggattggattggaaaattcaaa

SEQ ID NO: 324101 - DNA, 907 bp, Cannabis indica
tgatgcctactagagatcatcggccactcttccattcagctgggtggtatccggcgcctgttgaggaagcgccctccgggaggtacttgcccctcgggcatattccctgctcctccctaaggtaatgggcctcctgctggagccaagtttaagtgcggtaacctgcttttaatccattcatacaagtgacctaacctgattaggttctcaatttcatctttcaggtttttgcactcgtttgtggtgtggccaatgtcattgtggtattcgcatcttttattgggatatctccgggagctatccttgttcacgggtggaggctttcggtaatgtgtattttgctgggtggcaaagtatacatgctcctgagtatctgtaagctccgtgtattatgtgtactggggggttatacccccttcgccgttgcttgtcctcagtccaggtactaccctttgcgaagctcctgccatactggtggctggtgcagattgggacagagtttaaatactcaacccagggggattgctcatgggtgccctaaaatgtgacaatgcgggagctaaagcgagactttaattgtatccaggggtagcggagaactgtattccgcttgcttggggagtggcaagagatggagctcctggaagttaagctcctggcacatatcccgacaccctggttgggtaatatcctctgtaagccactatttgggcttcttccaaattgatgtacttttggactctcttctgaaaaacctgaaggctagctgctccctcttgctgcagctcattccaaaaaggggttctcgtacagattccaccctaaagaagggccagttgttgtccgtcatccaccttcttggtcttcgaggcctcctctttgaatctttttatgaagttctttaggg

SEQ ID NO: 324102 - DNA, 1036 bp, Cannabis indica
atttaccaaatactcaactcaatatttttcagttttgctatagctgttttttctgatagtaaactggcccttaacctaaccctaggagcaaatatgaatatttatagatagtacactcatattgggcagctaatacacatagtcaaaccgatcaaatcccacaagaaaaatttcctaaattaattctgctatgattttctaattttgtagctacagaacagaatagtcaatttgaagggtatatatgtcaaagtcttttctttggtttaaatgtgtatcaattcgtccctatgaaaattagatcgtacattcaaactataataaatggtcagaattaatacacaaaaatcgactacaaaaaagaaaccacaagagatttgatttgaaaatattaaagataaaatatattgtcaaactttccaaatatataaaattttaaaacatgtataaataatatatatatagtcgaaattaattaataaattccaaacatttttatcacataaaatatacaaaaaaaaatataatttacaatttcccccattgatacattgatgattgattgacaaaatattttgaaagaaaacaagtgttagaaccaaaatacttgctatgaaaatttactaacacataaaacaaagatatgataactttttaaacgaaaaaagatcaactaaaccacaaacaaacaactcccattgaaaataaggtctagagttgaaaccaaaaataaaataaaaaatactactctttgtttttgtctatcaaaataatcaaaaataacaataacaattaaaacaagacattaaagtttaacaaaacataaatactaacaataaaaaaatataaaaatcactccatcagcaactctagccacttttaaaatatttcataatgttatttgtaactctcataattttagagtataagggttcgtttagtacaccgtattgtatattgtatagtattatattaaattatattttatgcaatatttttatgtaaaactatatgtggtattaacttttatggacac

SEQ ID NO: 324103 - DNA, 954 bp, Cannabis indica
ccaatatcatctcatgcatgttaaggattaattggtgggattggcccacctctaatctaatctaatatatgtcattcccacaaaatattggtggctgacactcacgacaacaacatcataaatattatatataaataaatatatattctggcgaatgtgtggtgtggtgatgatcataattaagtactgcctcactcactttggttaagttatctttaatttctattgtaacattaaatattttgcatatatgcaagtggccttaattccttggagaatggagatagaggagaggcactatgatctgatcaacacatgactactcttcattcctcttaattaagcctataagaacatatataggaattatatgatgattcctttatttatatacacacataatattactttcaaaatatctattaatatatacacattggatatttggatttggctcaaaagtgaaactattgaaatggtttgaagttaatacatggttgaatgatgattaacagatttcaaatttattatttgctttattaataaatgaagttacgcaacagttattaatttatgctccctcgttaattatatatggttggaaatgaattttttccatgaagctctttgaagagcataatgtatcagttcaaggtagtaggataaattttagagagcagacaaacctttggttggaaaaatagtaagtgaatatgtgagtatttttattcagtttgtagaaaaactttgagaaaaatactcgagagatataatttgtgtgcaaatttacattgtaatttgtatattttctacttcagtttaataatatcagttgcctcccgtggagtaggcgaattgtcgaaccatgtaattttgtatttttattttttttttgctttgatatatcatatcatgctatttattgctttcgcgcacaataaataagtattagag

SEQ ID NO: 324104 - DNA, 1292 bp, Cannabis indica
acaattagcccaatcgaattgataaaatgagacccttgccactttttaaggcattactagaattagaatttgaacttctagttctttttcaatatgacttgttcttcttatttagtggtatatatctttttctttacaattatatgttgagttgttattgtttttttttttcagcaatgaataaataatttcattgaaattaataatgtcgcataaatttaagcaagagaaaaaacatttcaaaaaaaagaagatatcatctatctaaacaagatttttatctaataaaaaagcataaacaccctttcaaagaaaagaaaaaaaaagcacgcacagtactaatctatttttagtattgaagttttaatcaatcattgatatgagataacgtgtataaatgtttatgatttttacaattaagttgtaaatgtacgattggttactaaacgaccaaaattataactaacacctaaaaaaattaaactaataatctttatcttccattgaacttgacaattggcatccactagttaatgagaagcacgatgtgattagccactttggagtttaacaaaagttactcaaaagtttttatttgataattagtgggttatactaaattacaacatggattaatgagcattaagcacaatttttgggctcaactgaatttgctccattttcattttaactaataatgagcattaattttgtcatggatagaagcgccattaaatttgaccaactcacaataaaagagccaccaaaatttccattttccagacaagatctacctcaagattgtgaattcatttcccattttcagaaaatataaaattaaaaagatttatagatagaaaagattcatattcaccgacactaagttaggagttgtattgagaaaatgatgagcccaagcccatacttagtgaagtaaggtgagtgagtcaaaggaacaaggctgcagtggccaataacactaccctccaaaacacaaaacaaacaaacacctaccaaatctttcggcatcctcccatttcgggtgtgggggcattattttcaacattattttcattttatgcatttattcaaataaaaaatagctttagttatatttttattatgaaaaaaaaaaatcaaaacaattggtgcaactcttaacgtaatcttttatgaatttgtgtacgtcaaatatttataagggctttttccataaatgtacaacaaaaataaaataattacaaaaaatgtgcaaaaaaaaaattattttaaaaatttatacattttgaaaa

SEQ ID NO: 324105 - DNA, 1448 bp, Cannabis indica
caaaaataatatatttagattaaaaaaattgaaataaatacatgattttatttttatagttttcttttttttatttgaactgggattagattaataatcaaaaatttaaaagataaacataaaactaaaattatgtagaaatctgtgattctaacagtacaaatcttttacctaaaatattcatagaaaaatgtattaacattcatttaacccaaataaataaaaaaaaaaacctgaataaaaatccaaaatgagcatgaacacatctgcaaaaaaaaattacacatctgtaaaaaaaaacacaaatatttcatcacaaacagagagccggcgtcaaccacaaagccatagtcactggcgaccaccgactcggaaccaagaactcaattccatcttcgaccaccagcccataaccacgaatgaagatcaaacagggagatccagagccagcacgtcaaccgcgaacccaacgtcgtcgtcgaccgctacatgcacagatcagagagagaaaaacaacaatacataaacaatggactgaatcacctgtttcgacggaggtggtagctgatcccaacttcatctccaccactagcgtcggcgtcagcttcgacaaagggaatcgaccaagagagtaagagaaacttagagagaaagaggtggatctgaaggtttttggggtagggatatcgatttggaccacctgccattggattttcttaggataaaagagacagcaagagggaagaaggtgaggaggcttaaatgaatagagagagagctgagtataatagctgatgagaggatttttaggagagagattaggtttaggaggttttgagaccccctgcctgcaaccggtggtagagcccaatcggatgatgtaaggctggatggtcggactgctggtggaggccaaggctgcgtatgaacttcagagagaatgagagggaggcggaagagaagagagatagaggaaaagtgattttgatttagggttttttttttctttcttcttatattcatttattatattttattatttatttataataatcaattaaattttgtttaattaatgaatcagaaacaaaatataagcaggtttttttttaaaaaaaaaaatatatacgaaactttttgcataattaatgaaaagatgtagctactttttttctaaaaaataaaatatatttaattattacacagaactttatttgttatttttttaaaaaaaaatagttatgatatagtgacacgctaggagtgtcggtaaacatttacccagtcacgcttggcacgtcactataagttaatatttttttaaaaaaaaattatagaaattgtatgatttaccctatagtgatgttgggttttatgccctaaataaaacttatttcaatataatgagatttacttattaatatagatcagaaataacatttaatgtt

SEQ ID NO: 324106 - DNA, 618 bp, Cannabis indica
gcataaaataggatgtgttacttataaatgatacaaatagtattaatttgttatctttttcccctaaagcctttgtttatcatgttagaaaaattaataatatacccaagatcaatttgtatataatatagaacacaataataatatataataattaagtatgtgtacctgattaatccataacaattacttcaatttgtttatcatgcaccaagatagtataatctagcaaaaaagactttagggtaagataatcatgaatatgcttgaaatggttaagttccaaatattgtttaaatcttgtaactcaaatcctaacttgtcttttatcaatgaaagtttcaaaaaaaaagaaaagaaaaaaaagactcagtatttgtaccgattgttaggtgtgtcaaaattctcatgctcgccctctttttaatttgttctctgcttcaacaattaaaaaaaaaaaataaaaaataaattaaatgaaggtaaaagaattaacatactgttattttttttagggtaaatactattttagaccctctgttttacaaaagttaccaattggactctgtgttttggtaaatgacaaatggacctttatttctaaatagtacaatagga

SEQ ID NO: 324107 - DNA, 1131 bp, Cannabis indica
ataatataagggtatttttgattaataaatagaaaaaaagtatttttcaacttatcttaaattataatttaaatattattaaagtcaaaaattaaatttaaacagttaaatttagttatttacactcaaaattactgaaaaataccaataaaacccataataaatcaattcttagttcttagtatataagacgaatgttttctcattaattaattaataaaaaatctcttcttctaagaaggaaatgagggaacgaaacataacaagttacgaaaatgatgaaaacaccacttaaaaaaaaaaataccgtgaaaacacattgcatgcatgagctaaaatatttattttcttcttgttcttctaattctttttcattattattattatgaataagtattgttagatatggtaagggaagtttaaaatgggatggagttaattaatttagatcaaagaaaaacatatataccttaaaggtgccaagggacttccatggccattcagtgaggattccaggcgtagaagccatattctttctctttcttctgatgatatttatatatatttatatatatttctctctaaatctaaactgaatttgtgaaatgtgtgctccaaatacttggtggaaggcctcttttatatataaatatatgtagctgcttcctgctagctgcaattaataattatatgccttaaattcaaatgcgacagattttttttgagaaataaatataaaattatactatatattattttttaattttttttccaagtataatttgggttgttctggtaatttttatgtgagttgctatgcggattttagttgcgacttaagttgctccgttagttgttatagatgttactgtttgaagtctagaaataaaaaacccctaagaaataataaatgtagatatttttttgcaataaaataattttgagttctcatacatatacctaactaagcttatacttttgtctttcatatagaaaaagaggggaaaaaaacaaaaaatattgggaagttttatttacacttcataaaatgataagaatatcatattattaaaaaaagataaacttaaataatttttaaaaattaatcttaatatatttttttttttttgt

SEQ ID NO: 324108 - DNA, 571 bp, Cannabis indica
aaaaataaaatcgtaagaacttagattcaaagtcgataataacatacctggagcagatgatcggtgtccgataatctttgacaagtttgaaatatcacacttattgtgactatcataaaaactaatgtatattggagactcattcatagtgaatacttagaaactattaaatctggctaaactcattgggtactcaaaaggaatgaagagttaatgatttacaattgtttgatttattaataaattaaggatttattttcatatatatatataaaatttgtgtcatattctttttttctttttttgtaaaaattcatgatttagggatttttacctgccgagtatggaactccagttgtacctcgtccatttctaacaatggcaatatttgtaatgaaagagctagcatagcaagagaattcagaatggtaccttcgtaatatatatattacaacttacaagagtcaattgatagtatagaaaaagtttttgttgtaacactactacaaaaatagtttttcccgatgtttttaaacagtcgtttaaagtgttcccgtcggtttctataact

SEQ ID NO: 324109 - DNA, 2856 bp, Cannabis indica
tggagaagacggttcaacggtcaagaaagattgggctaagaagctggatgaggcactatgggcttatagaacagcgttcaaaacaccaataggaatgtctccctatcggttggtctatggtaaggcttgtcatcttccagtcgaattagagcacaaggcgttctgggccatgaaaacattgaatatggacttggcagcagcaggagagaagaggctgttacaacttaatgaaatggatgagtttcgtaacgaggcttataaaaatgccaagatctataaagagaaaacaaaaagatggcatgatagaaacttaatcagaaaagagttccatcttgaccaacaggttctagtatacaattccaggttgaagctttttcctggaaaattgaaatcaaggtggtctggaccgttcgcagtagttcaagtattcccatatggcgcagtagaagttaaaggagagaaaccagagactttcaaggtcaatggtcaacgattgaagccctatttgggaggccgcatcgatgaagccaagaaagttattcaattggtgcctctgtgaggggggcactccagcattttaaactctttaatgctaatttttagaaataattacaatagttttattttagttcttagtaaactttagttttaaatttaattttaaatttagatttcaattttaaattttaaatttttagtttaaaaaaaaaatataaaaaaaatatataaagttatgtaaaaaccgtggaaatcgtgaaaactagtcaatttagttaatttctagtgtttaggaacaattatttagtctctaaccctgtaggtaagcgacatgtcgtatggtatgagaaggggaggacacgggccgcgacatgctccaccctggatttagcatgtcgtggcatgctaagcttaatcaggggtaaatcagcttcgtccccagaattttatttcaaaatttttcttcttttctagacgcgaaccagccacgaacagaacccccaaaaattgcgaattacaccagtttttctccattaaaatacaaatttctttcaccaatcttcatcattatcccccacaaagataacccaatcaccaatttcatcaaaaactacctacattactctaaaccaaccacaaatttcagaaaaaaacctacaccccaatattaattgtgttcatcatctttggggaatccttggtgcaacaaagcctttatccttcaagtaagtgttttctcttcatttaagttggtgttttaagagtaattgattgtggattgtgtgctattggattattgttgaatgtggagaaaaatattggctgttggattattgttggtgtgtcaattaagtttctgctataaaatactttgggaaagagagaaatacaaggaaggtgctgcccaaatttttttacactagaactaatatttttggctagttgattggtatggcaaccaaaagagtaaaaacccgagctaaccgcttcacgcaaggttcatcgtcacatacccctaatcttcaagatgatcaaaatcaacaactcacaaggtttgtgaataacctagaagctaaacggtatgagaaattaattaagagaagtataattcaggagaggggttttgaatatcaagatacaccttttgagcgggacctagggtatgaactcatcagaggagagattgcccgacgacaatggcagaaattttgtgttgcagagcatgtggggaaagctaatcagaatatagtgtgtgaattttttgcaaattacccatacaaaggggatgacaacactgtctatgttcggggagtgaatgtatcagtcactgtggaatctatcaacaactcctttagccttcctacactaagtgaggatcaagatgaaagaaggatagcactccatagagaggtcctcgttgatgatgcaattgccgaagagttagggcaagagggcattcgattccatgttgaagggaaccagaaccaaaagttcctttaccagtggaaactcaaccaagaagccagagcctggacatattttttcaactctagaatactgccgatgtcacacatttcatccttagactatgagcgctgcgtcatagtttatgctattatggctagaatgacattcggcattggctgggtcatctttagaaacatcaaccattttgctgagatgaagacaacagtgggtctggtgcacagtgctctaaccactgcgttgtgctcgcaacagggtatccctgagattgaaggagacgtcttagaagcgcccatgcagaccatctctcgccggatttactatgacttcccccttgcatcattagaaccgctagaagacgcacggaaacgccaaaagggtgatgctgatgtcgagtaggaggacgcagcaggcgctggcaccagtgcatcagtgccacctacgccccagcctgagccaccattggacacccactcccaggacactaatgatagactggatcacctcattaggcaaaatcattatctggtccagtctaaccagtatcttgttcaggcccaccaggctcaagctgcgtattacaatacatatcttcagcagcaacatcattttgctcaaagacaagtccaggagctgaattctgctttctcgatgtggacaatgaacccagatgatgccgaccatttctcgcagctcccaccgtggaacccataccagctaccaccacctttaccgccatactgatgtggcgctcaggtaagtttcttttcctttttctttaatgtcacattagggacaatgtgtgactttagtttggggggtggggactaaacttttttaacttttttcttagttttttggtttttttttttt

SEQ ID NO: 324110 - DNA, 1457 bp, Cannabis indica
aatcactaaggagtaagtccaattttcaaccgagtccctaatttatttttacaagacataataaggttgatttttcaaccttgaaaacgtttcgaatgatgcctaacatcttccaaatctagaggaggtgttagcatcgtagtactcaccatgagtgttacttctgatcgaagcaataaggttaatttttcaacctcaaagatgttcccaattatgctcgacatcttctgaattcagaagtagtgttagcatcgtaatattcactgtgactgatattagtcaaagtggtcaaatcactaaagatagagtctaatcatcaaacatgttgcttatttgtgatcgtataaagcaataaggttaatttttcaacctcaaaaaaattttgaatgatgcctgacatagacatgctaaattttgacaaagaacaatttcgaatcaataggatatttcttcatatatattatgggagacatagttactaaactctaaaaattatctctactcattatcaatagaaataaataagacaatctttttttttatatacaattaatatctcaataaattttgaacactattttttttttaaaaaaagtcaggtattacattcaaccttgaaaacgttctgaatgatcatcttcctgtaacgcccttatttattaaaacaaaatgccataaatgaactagcatcaaagtactaatgttgtctttatttaaaaataataattttcaaaatatgggtacccagttgaaatcaaagtgttactatttaagtaaatgcaatagaaatctaaaagacaacatccacaatatgttttataaatttaaaagtgactttcagcgaaagatgaccaagaccacacgcagtttcatgatctcacgagatacacctcatacacttcgatttagacaatacttccttcatgaaaaatatagctcttttcttaagctttaaaacgagataaggatgttttaaaatggatcgaaattgagagatatattgagtttttattaaagatacttttctaaaacaaaacataaaacgaaatatcctacccgagtaaagataccgattttcgacaagtaagaactccaaataagggaaaggtttaaaatatggattataaaattatctttctaacgataccaagatcactggaaaagaacaaatattgagagagatatcacacttttattgaggcgatatcgaaaggaaaactagaaaaactgtaattcgacaactagcataaaaacatgaattttggacaacaaaatatttagaattagggaaaactctcttcacaaaaaaatgtagatctttaaattatctttaaaactgtacttagatcactgaaaacagacatacgaaaagagagatatgatagttttataaaatactattttttcgaaaacgaaaattaaaaaaaaaaaaaaacaactacaaatttagattacat

SEQ ID NO: 324111 - DNA, 983 bp, Cannabis indica
ttgttcttctttatgatagtttattatataatatacaaatgctaattgagtaagatataagatacaagctcatgtcatctgacgcaaaagaatcaagagagaaaaaatatctttgcattaagtcattaaattctaagtcaacgatcttatggtttaatccctgtatcgcaataaataacattacacaatatagtatcaattattttgttttttttttttaagaagaaaaaaagaataaatagttatttgtcttggggattctaaataaatagtatttgagctattaacttggaagaatcacgtgctcacatgggacaataagaacaaacaaaaatacaattcatcatagcttaatatttttaatcttgtttttattaatgttttattacatatatatctcttaaattatatatacttgttgttgttattgttaattattatatttaacttaaattattttagagattttttatgcatacctctatttttttacattcccaccaccagctttcgataattttttaaacttatttacattttaaaatatatttatttatttatttatttttaagcttatttatatgttttaaaatttatacctaattataatcacaaatttttagttcatcaaaataaaaacttcaaataggaaaaattgtaaatgtaaataacttaatttaaattatgtagtacaatcaaaatcatgagtaatttaaaataatgtattttcagaaattattaaaaaaaaaactaaaaataattaaaaaaaaacatatattataaaataaaataaaaatagaatgagaagtaaagaagaaaagagaaagtaaaatgagaatttctcagttgtttatacaaaagcattgactaaaagaatgagaaattaaattaatatgtaataaaggaaaatacaatcaaacattaatggtgataattaatttggtgatttggacatccataaataatatttcataatactcccc

SEQ ID NO: 324112 - DNA, 2812 bp, Cannabis indica
aaatcacgtaatacgcctaaaggtgttagggtgtttcagtacagtagctcaaccttcttggaagagtttgaaacattttctgtacattttcaatgtgtgtgatttacttattctaccaaaggatagaaatgaatgggaagcttattctaatcaactacgaagctcacatcatcactagaaattaagtttattgcattcaactataacaacaaaacaacaacataaaaaatggatgcatttaaaaaataacatataaacaacatataagcaacttgtaaacaacgctatatcaacataatcattaaaaaaactataaataaattaactaattcataaaatcaaaatgaataaaaaataatagcataacaacaataggaaaagctcaacttaaagaagaaaaaaaagtacaattgaatgtcttctttcattaggctagtgaaaacttagcacttttggacatttcatcaaacacataacacgtgtatttttatatacatgcatatatatacacacaaaaaaaagatacaaactctcattataatatatttacagaataaagtttgcaaaaataatctacttttgaaaaaaataataatgtaaatgaataaaaatggacaataagttttttctaatcaactttgaagttcaccattactagaattaagtttctttgcgttcaacagcaacataaatagtgaaggcatttataaaataaaatataaacaacttataagcaacactaacacaacgctatatcaacataatcattaaaaatctatagataaaataactaaatcataaagtcaaaataaacaaaaataatgttagaactacgaaaagctcaacttaaggggaaaaaaaatacaattgaatatgtcgtctttctttaagctagtgaaaactcaattcttttgggcatttcatcaaacacatagtatgtgtatctttatatatatatacatatatatatacacattatgaaaaaaatctatacaccaatataatatatttacagaacaaagtttacaaccatcaattaatgtacacaagaaaaattgaaaagacatccaaaatcaatattatatttctgaaagttaaaccaaaaaaaaaaaaaaataacttacaaattaatagaagcaaatgataatggagatggacttagcacgaccattgggggttgaagaggaggtcaatcttattgacagcaggggacttggagatgagctttctacaattaaagatatggatgaaataaaagtaaaagaaaaaatgaatttcgtataattagtaaattaacaaaaacctaaaaaagtataaataaaaaaaataaattgtataaaaataaaaaatgacatataggcaattaaaaatgtaaataatttttcaaatttgttattttgtgtaaaattttctatttatttaccaatagcattataataatttatgataatattgacaccactaatactttttaatatttctcatatatatatatatataaaatacttctcaataggtattacccggggcaaaaaaaaatttaattataaatattaattttaaaactattaaatcattagattttgatccgatggccaataataaaaaaaaattaaatttttatgcttaatttaattatttaattaaaaatatcaaaaaaaatatattttcttacattatatcaaatatatatttataaaaaatattttcatttgatttaattatttcctgaccttattttataaaattaataaaaaaaaatataaattaaaactgcatgggtggcaactggcaagacaatttgtgacttaatcattctttttattatgttccaatatcatatatcttttcagaagaattattaaatagaagcatttgaagttatccaattatgtgtgcatattattggggtccttaagctttttttgatcgtattagcgattgatccttttgaattgcatggtgtttaaataattggttgtctagtagtgagctggtgggaataacccttttgaagcaacacaaatggctgtcaaaaggaatatatgttaggtaatttaataagaggaattaataccgtgtaaagcactcttcaagttttaagctatatttcttttgtgaaaggcatgtcatccttgtttaacatgttataatatactcaatctacatgtgcttcccacaactctaagaaaaacatacaattttttattttatttttttgctgggtggagtcttaagaattcagaagcttcgagctttttaagttgttaattattattgattgaaatttgatgtggcgcattttgttttaagtttgattttagtggttttgtggtataagtcaatttttgtaattattatttatcataaaagaatactaataatgataataattcttgaaaataataatgataataattcaagtaagtattattttatctttggctaaagtactagtcttacgtgattgtatttacaatattcaatgtgttttagagtcaaatattaagattaagaaagaaattaatgattcccagcatggatcagtcgatcttttattattttttttttcagtttagattataataaaagataagggcaattccaactcatactccaaaatgaagaattattttaatttggcgtgtgttgatagcgacaagattttgtcaactaataagatttatttatttaagataaaataaagaaataataacgagaaaatattattgggaaatttttatatatatacattatatacattaatattacagaaaaaacgttaaatgaaaacaatccattcatataccgt

SEQ ID NO: 324113 - DNA, 2145 bp, Cannabis indica
  modified_base (61)..(61): a, c, t, g, unknown or other
gttatatcactgaagataagtctacactgttattatactcaatttacattattttaaaatnttggctgcatcgagttccccgttgagttttcggcattcatcggtcttatcttttgcctccttctcagcaggtgcaagcttggcctcgaggttcttcttcaccttctcggcatcctttgttaggcgagtgttctctgacttggcatcgtgccattgtttggtcaaagtctcacgctgacctatcaagttctgaacctcaccttccaagtatttcagtttttccattccacgccgttggggaacgaaggagggaatgcgtaagtaagtctgaaaatgattagaaggaaaggtaaaaggataaagaaaaaagattttaccgagaggccatatgcaacactcctctcaagcatattctccaagtccccgttattgatcaaatcccattcatgggggaggaaagccttgaagtgacgccagcaatctgcgccaaattctccagtgtacttcgagccaaaactgttagcatcgataggaagagtctcgagggctcggctcgaagaggcagaagcttggtttgcattgggaaggggctctttggtacttagggagaccggaggaggaatcagatcttgggtttcagactcagggaccacgagattaacggactgagaagctcgctttttgttagctgtggtcttcctcaaccttttgaggggctgcacctcaacgtcagaaggagcctccaaggtggtcagtgtattctttcctttcttgtggatgaggccctcgaagttcatttctgcaagacaagatacattgttagcatttattgaaagacaagtgaaaaggagagattgggacgtaatttcctgcctaaggaatttaccataatcactagaagacgaggaaggatgactacatccctacaacccgtgatcttgaatatgtcgtagggattaattggttctaaattccagctcgcgtctaaatgactcgccctatcgatcatagtcccgtactgctcgactatcccgtagtacgactcagtacagctaatttggacatggaatcttggataccaactatcatacttatgtgtaatacgatctatgaggaggggatgccaagtataaaagttataatggctatctcgaaatgtaactagagtgttacactcagccataagcagtgtgggtgacaaaccacattgattacctcgggatgctccttcactagcttcccaaggggcagtattttgaaggtactgtgcccgagccatgcgatcttcagctttctcctcattagggacaggaacttgctgccaagaagaaaacctgggatatttgtaatcacaagtaaactccttgtcagttagaagaaagtcataggacctaagaccgtaagggagagttagcaacagcctgcgtcgctcgaccatctcaagagtaggagcatgtcttttcaagacagctgtcaaaaataaagcaaaattacaattagctaaactcgaataaaaggcatggattaataaacgaagtcttgtgcaaataatcacttacgaattgtacggaaagtggttgtgccaattggggagaatccagtcttccaaaagaaatcatacttaaaggaagttttgttgggcaaatccacaataatcttacgatcactagtgtgaatcccaagatagtagaaacccattgctgcattcttcctcgctggaacagccttgatggtgtagagatactctatttccacggagtggacactccctattcaagattttgtacagaaccctcaaacttgcaaggattctatttgaaatgggattcaattggaacagggcaagcccgaggtggtttaggaagtccttgaaataatctcgtagagggattattgctctaggcttaatgtgttcaaagctccagccgctaatcccagtcgagtcacttgtactggtcttgccattggtcccctcagaggtttcgagtgtaagtcgcactagtgggtaacaactaaactttcctgctactaccgatctaacccaataatctcgcttatactcaataccacaagtcttcaatgtatgacctacataacatgcgatggctcgcaccttcgaatctattaactctgccttgaaagaga

SEQ ID NO: 324114 - DNA, 968 bp, Cannabis indica
gctagaggagctatgtgaactattcgttttttggtttttttttgtttgtaagaaaaatacagaaacactactgaagagcaacaagagtaaacggaccgaatataaaatttaaaaactcggtgaaacaaatggtatagttagtattcaatctaaaaaaaaaaaaaaaacaaaaattatagttagtagttattaaaacaaattttgttaaatgtcttttagatagtagataatgttaactatcttttgtttttatgaaacaagaaaaaaaaaaagaaaaagaaatgaaaggtacaactcacaaactttgtaatgtttctaatccaactaagtggagccacatagtttcaagagttaaagattttcttaagttgtaaaaaaaagtacaattattttggataagatttattattattattttgaaaaaacatttaaattctccttaaattttgaaaagtagtattgtaaatgtaaatcctaaagtctttctagtcttattctattcatggtgggttgtccaatagatactttattttggttaattagtaggatgagattctattcattcattggacttttcatcactttattaataatgaaattagtttaatttttcattatttttaaattaattgaagaacttgaaggattatctgggatttattatataaacataaattgcttattcatttggaggcgagaacattttggtctctttagtccattttggcatttcatttatttatcttattagttcaacttgatccatttattttttccagcacgaggcaataacaattaattagtaataattaataaattactcaactaattaaaagccaataacaaataagaaattaacaatctaataatggtgtttgcaccattaatttgacgatttattccatctttggttaattttgttttataaggtgtaataattgtaatctatattagtttttttttttttt

SEQ ID NO: 324115 - DNA, 1208 bp, Cannabis indica
aagatgagaaatctcccataggcttaatgaaattaactttatactgaccctaaggcgatgataaattttcaaagcgctttatcgtgaaataatttaaacaagattttatgtgttttacttgtatgcgctcattcatctcgtttattgtaattccaaaatgatatttattactcatgcataatgcttatgttactttatttatttttcagtcatgtttattatgccaaattcccttactactttactagtacttgaaaaactaaatggtgataacttttataaatggaatccttaatcaatggttgctagtgcagttcactgtcgttcttcagtgcatgtgatcttagtttggattacggatgtagtgagacatcaaagtgaaggtactgtatatgtaatgaccgcttagtttatttctgagaattagtagataattagggtctaatttcaaaagtagacttttaattattatttttatgattttggagatatgtttgaattttaggagtgctaattatgatatatatgaattttatatttttcatattttcatttcgggtaatagtggaatgcgacggttggcctatagagtcacttagacaatgtttagtatcttggttttagcgagcattatagatagatattttgtttgtcactgttgtttggggttattaggtgtgaccaaaatacccataggtggcaatgttacttcaaagttaagaaagagggtaaattagtaatttgaccttaatttgccaaaataatccttaaggtttattttcattgagatgaataaaggaattgatccctttattacatttaagcatgaaattaggaaaagaaaatagaattccaactctttttctctccttctagggaaaattataagacttgaagatagcaactcaaggtaagctatctctgttctccttctttaaattttatagttttggaatagatttgaatattaatttgttaatgttcactactagaaaattgggttttagtgacacacattgagtaactctgaaagtgtatagtgacacttcaacgcgcgtcactgatgagggtgactggaaagaaagtttttagtgacactttacacgtcactataggcctatagtgtcagactaagaaggtaatagccacacacatgaagtgtcactatatcctattattcttttttttattattattttttattaata

SEQ ID NO: 324116 - DNA, 1154 bp, Cannabis indica
aaattttgtattggttaaagtttaagagtaaaatgctaattttttacattacaagaaataaaatctaacagaaggggtaaagatggaaattgtgaggttaatgtatggggaacgcaattcccgcgcccatccctgctacctatttatgccccccatccccgccccatccccgtctaataactagcgaacttggggtaggaaaataattatcaattatggagaacctagtgagtatccattaaggtaaaatagaaaaaaaaaatacaataatttaaaataattaaacaaacttttaaatttaaatcaaaccaatattctcacaaatatttattatactatatatatacattaaaaataaaataaaactatatatattggggtcagatatagtgcggatagtattatctccgcccttgccccgtctctacttcgggtattgaaattatcccccactactgtcccattaacggcgaagttggggatggtgcggtccgcgattatccattctcacggtataaatttctatttcaaagaaggggcataattatgtaactattatattttagggaaaattttaacaagacatatattttaagagggaagttcaagtagtgcccaaagttgagaggataaaaatactaattattctatataaaaagaataattattatttttaccttctaaactttttacactattaaattgtatactattatagtataaactctctcataatacccaatccaaatataatttttacagtaacataatttttttatcatattctatttaattttatcataaaacgagtaatgaaataacttgtacgtaggtgatacatttcacatttttctacttaataattaaaaaattaagaacaaactttcaattgcatataataatatctaagttatatttttataatttctgtaactacaagactattaagtatcaaattaatgataagtgtccctaattagtttacagcgataatgacttaaatatttatgccgaaaattattttaaaaatataaaattaaaagtataaattattataaagaaaaagttttaggaaaattctacaatgcacactcttaaaatggatatattgatgcacccctatttgttttagcatccgaaataattttttagtc

SEQ ID NO: 324117 - DNA, 2030 bp, Cannabis indica
tttttcattcataactggttttacattaaaatgactcaaaacaagaatcaacacacgattggacggatggcctaaacgcttatgccatttatctcttagggaaacaaacttggatatagcaacatgcttatcctttgatttggacacaacaccagtctaaggaaaagaagtaaaaccagcaaacttaggacccgaactagagtaggtggaaaagcttggttggtctgagagttgatacaatccatctctaagtctcccttggagaagcaccttctttgtgtccatgtccttcacaaaacaagattgagcaaaaaaattccacaaacacattattatcggttgtcaactttgaaatactcaataaattcttagtgatttttggaacatgtaaaacattgctaagaatcaaagaatgtctatctttaccattcaatcagctagtaccccacatgtgtaatgtcaagcttattaccatttcctacagttaaggtttcctcaccattatagtcagcctttcgattcatgttgttgacatctgctgtgacatgattactggcccccgaatccacataccaagcagtattttccaccatttctggagtagcaacaaaggctgaggctcctccaccactagtgttactagttgaggattcttgccagttgagtttgaaccagaacgatctgagcccatgtatgatttatcatacctattgtagcagtaagcagcactatgaccatatctcccacatacttggcatgtcggtttcgagttgttttggttcttgccacctcctctgcctctgaattgtctagagcctcttcctcctttctgttgagttgtgtttccacgatttctagatccaaactaacctgtgtgagcacctctatttcctgcaaagtgagaggatctggtggcagcaagattagcataagggttagttaaaccagtatttttcatcgcaccagaaagagtaattagccgatccaatttactgtcgaagcttagaagaatttcctgtagttcctgccaagatgtggagatccttgcttcaacttgaagtactatgggcagatattcgatatccaaactagatagcacatttgacaccagttgtttttcagggtagggatccccagcaagagtgagaacatcgacccactgtcatttttgacgaagataatctgccatggtcatagccccttttctgaatgtttgaatcttggttcaatactcatccattttgacacgagaatgagcaccaaaaagagtctcgagagcttaccataaacttgctgaagagtcacaacccatgacctctgtggctatgctttcggtcatggatccatacagtcaaccaataaggagttgatcatggacaatccatgttttgaactccgggttcacaacaactgagtagaaaccatccaatcggtgaccacgcacgatagcagaaaccatcatcttccacaaggtatagttattcctatctagtttcagcgtgaatgtttgagtcagcgtgctaccaacatgaggtcctggcatcgctgcagtaggagctgagggttgagcaacgacactggaagcacttcttccagctgatccatcttgttcaccttgagcagtaggggttgaagggtctatcatggagacgaagaagaaagaacaccaccggtgtacgaaaggctttgataccaacttagaaaatataacaaaaccagaaaacttgaaatgctcagctcaccaaataatagggctggccaattgtatttattacccaataattatagcagagaatcaattaacaatcattacacaatcaaaataccttttacacagaataaagaatattctaacggtacaaaaagaacaaagtttgttacaagaaatcaggaccaccaagtgtggtagttccacctaatattgctgagtgtaaagttcatttcttcacaaatacaactaagttgaacctaaccatatcaggattaagatccatagacctaagatcaaccattgatattgacttagaaag

SEQ ID NO: 324118 - DNA, 974 bp, Cannabis indica
aattttatataaaaacttctattgtaactagtgctgcaacttaatttacaataaaaaatcttattgaaactcctattgcaactagcgctgcaactactttagaaacccaaactgtatggaataattctcttaaaatataatattaaattacaatagtaatattatattttacaagagaattaaggatgacgaaacatttctcttaattaataaagtggaatgattactctctctctcttggttaaatctattccactttaaattcataaaactaaacagtattaaaaggacatgatagctaggcatctaaaagggggttcgaggatggtaaatttctgagttggtacaacctatttgtgtactgaattacttaactatgatttcagattgaataaattaacaagaatctcatacaaattcaagaccatgcttcatgcttttgacaatatgtcataaactttatcataattaacctttcacaatttaatccttattcattatcggtttccataattgtcacatattaaagtaacaacatatccctaccaagaaaaaaaaatggtaacaacatacccataatgcttcaataagaatgtatacatattagaatgattttttttatgtgtcattttcttgttttatctttcaatttaatgtattttctttatttaattttttattaattaaggtggcgtttagtgatacttttattttctaattttaaaaatagaaaaatgaaagtagatttttatttttaaaatacaaaaatgtgttctataactacttttgtttttaaattttaaaaataaaaaacaaaactgtgttcagtaactagttttgttttataattttaaaaacacaaaacaaaagtgtattctgtaactatttttatttttcaattttaaaaacaaaaatcataaatttaaattttctttttctttttttaaataaaaattatgaatattatttatttt

SEQ ID NO: 324119 - DNA, 529 bp, Cannabis indica
taatgctcgagttggaagagagatttattagagtttgaattatctttatatgtgatggggtcaccagaaatattgtatataatttatctgtggacgtggatatactataaatatatggggtccaatccaaattagggatcaaattttccaacccaaaatataagctaacaattaattaagatgattaattgatgaagtcatacattgttatatgtcacattccacagtccttggccataggataataattctacattgacttgacttgcataaaaaatcttctatatataatttttttgtgagttatatatattattcaactaatttaaatagaggatttttacttatatatgtaattaacaaactaatattacagatagcgattaaaaaaattaattatcttatgattgcaccttcttactgaaatttttcaaaaatttcagacaactacagtatgttctaattagtgtatatattacacccctattgaaccatatataagagcatctgaaaacaaaaaaaaaaaaga

SEQ ID NO: 324120 - DNA, 1291 bp, Cannabis indica
aaaaaaataataatgttgcttcgttggttttaattttctttacaattgtaaaataaaataatatttttaaaataaataacaaaattatttttttagaaaaattaattcaaaataagtgagacttgatattgagttgcactaacatcgatattataacatctttaatagtagcattcattaagatgctaaaaatctccacattatttaaaaatataatattttatttttatctctcttttacattatttttggtactcttatttctaaaaacactccaatagtatgataattttcaattagaatctattacaaaattaatatagtattataataaaagaaactcaaaaaatttaatttaccttttatttaaatatttaataattataaaaaataaaagtaataggaatatgttggttaatatatttttttattctattacattgtcacactaaactaaacacaatcattttgattacagtactcattccaataataaaccaaacattataatcaattattattacgattcttattccattacattactattatctttttaccccacaccaaacatttttcctctttgttaaaatataaaaatacaattatttatttttcttaaaaaaatgaaagtgtgttgtaaaaattgcatttatgtaaatttttattagcaaatatatatagtcgcatatcaggaattatactatgcgaccatagaacaaccattataatcacaaaataattataaatttacactgtacaatcatcatgatcatcgtatagaatagattaagtgaaattattttataaattttaatatttcatattattagttcgacaaatgaaataactatgtatagtcacacaaataattaaaaattatactgtgcgaccataaaacgatcattatattcacaaaacgaccatagatttatattgtgcaaccaaccatcatgatcttatagagtaaattaaataaggtatcttgcgaattttattatttcacgttattagttcgcaaatttcacgaaataaataagggtttttttttttttaacatttttatgaaaatccacgtatcaactcagatagataagagaacaacttaaatcgcaaccaaaatttacataaaaaccgatataaaaactatagagcaaccaaaaccttaattttttcaaaaaataattaaaataatagtatacaaagtaatttcctaataaataatgggtaatttacatggtatactaatttttgtcatttttttacaaaaatattgttaagcggtattttt

SEQ ID NO: 324121 - DNA, 493 bp, Cannabis indica
aaaattactttaaatacttttatccattttctccttaactcattgcatagtagctaactcataatataactaaaacataaggcagtgacataatggttttattctataggttaactcattatttaatttgttttatgttgaggaaaaatttaatgacaatgatagtgacgattacaaataaaatacaatgataacattagtttttaatgtaatgacaactataagtgagatatagtgatggcaatagtcaataaccttaaatagtggcaacaacaaataagatacggtgatgacaatgattctgaaattatatgatgagtttcatagatttatcatcaattatctatttagattttatatgaggattcttcaattttttatttttcttttaattataacctttaaaaatatgtcttttttactttcaatttaagataaaaattgtatgatgacttttcctacaaattcaatttatttttttaagtaaaataaa

SEQ ID NO: 324122 - DNA, 1538 bp, Cannabis indica
gtaatttttcccgtgataatgccaattccgataactttttcggcgccgacagcaactccagcgaatatcgtggcaccggcaacaaatccagtaattttttcgacgtcgacaacacacttcggtgccttttccgatagcagtgacaactccagcgatcaatgtagtttcatttgtttaattttttaaaaaaaatgaaagaaattttaatatcttttttaataattcaatcatatatatgttaagtttttattttaaatactatattctttcctattaagtttcattaccatatttatctaaactagctttatgttttctatatgaaattagcatttatgattttgtctatggaacaagtgaagaaaataagattgaaattctagtatgcaacttggtcacacctattataaataaaaaaggtaagttatttaattaatgtataattaatttatttatatacataactaaattatacgaactataataagtaataaatcacattttaatattacagtttgttaaaaaagctacttacaatgaggataggaatttgatacttttgcgacactagaagttagtgaaattgacacaatatttgtactaactatagcttttagacaaatacttattttgtgttttaaatttttattaatagtgttataccttaaattcggctgccatctcagtggagaacacgtgtcacgataagaggaatatagatcgatgcaatcgctttatatggaataactcattaattacgtgagtatcagagtatatttgtaacctgcagactgtaagatcttaggcaaggaatcaatatacaaactggtgcttagtatattagccagaaaccatatattgttgaatgcgaatagcgaggcatcaaggacactacaaataggaaggagaaagcgacatatatcaattgcgaaagctcttagtgtacaaactaagtgtaacagtcagatcggctcgagaccaagtaagcgaggtgcctgtcttgctatgggaagacttcctgtaacttcatctagttagcgccagtgaggctcacaaccctggcaagtcagaagctaacattcaaatgagctttgaagaactttttgtaaataagaatcgccgtcgacacaagacatgcctcgtcgacctcggaaagaaaaatggccccagctcgctattgaggtcactggaaccaagcttctattgagacaactccagatacaataattaaagacgtgtttaattcacgatcattttgacccagtaaaagcgggaaaatcacagctatatgattttcaaatcataaccgcatttacactacgtgatatgtaatcaaatctcatgattttaaggatgattgttgtaaacatataacagtcaactttgtaattaactgtcaactatgtaattataaatagtggcaagcaagatgaaaagagagatgaaaatactcatacaaaggaggccctgaaaaaacaatcagaaatctgaataagattgacttgtggactatgtagaattttaactgcaaaaccacg

SEQ ID NO: 324123 - DNA, 772 bp, Cannabis indica
tctaacataagggcccaaaaaatctttttttcctatgacccactttgtttcagggccggctctgattgaaaggttattaaagttcacataccagattcaaacctttctaaaaagaaaaagttaacaaaccaaatattgcattatataagcttactaatcaattttttttttttttgaattgaggataaaggtacatgcggtggatgtgagactaattttaataaatataatatattgattaaatatgtataacatattaataagtgagtatatgacaaattattataattttgtaatataaaaaaagttacaaatttgaaatgattcacatttaataaagttagtaattgtatatgagagccattttcttagaaaacattgtaaaacattgagaatttaatgggggtgtttttagtgccaaacctaacgttgatatctttatttaatgccctattttggctggtaacattcatggagatgtgtgatatcaaatataaattttaaacactatataaagaggattaaggtacttatttgaaaatgtacttttttttatcaataagcatttgctagaaaacacaatgtttgataattcttaaaatgatttcttagagagtttcccaagagaaataagcttttcgccaaaggtttaacactttgtttaagtcacggtaattatcactaaattacacttaaggttgtaaatgaatactttctttcatgttcttttttattagagaacattgtcccacatggattaaatgtaaaagta

SEQ ID NO: 324124 - DNA, 925 bp, Cannabis indica
aagcctatcaatgacgactttttcatcattgataatattattaataacgaaaaagtcgccattgatttaattgttttataaaaaactaatattataaataaaaaaaattatttttattaaatattaattttttcactaatcaatttttaataaatatttttttattataataatatataaaataattaaattaaaagtaaaacataacaccaaactaaatatgtttatatcacatatcaaatgtcaaatataacaaaatccttcaataaaaataatacttgctaaagtgaatattcataaaccataaataaaaattaaagtaatagttcatataactaagataaaaatactaaaagaaatttgttgttgcgtcgttatcatcatcatcattagcattcatcggaatctacggttgagaaacatctagcatctatgggtagtatggaggcatctgtgaacttgtcatcatctgagcagtctgttgcccatgtggtgtcgacatatgtgatgtctgctgtccatattgttgcccttgtggtgtcggcatcaactgaaaagtttgcggcatatgtgacatttgttgcgtcggcatcacttgtggcatccgagactgtgagacttgagacgtctgaggtgactgcgtcatcagctgcatcattactggtgggctatttggcgacggcaactgtgacatcatctgcatgaatgtctgaaacatctgaaattgttgaaattgatgagccatttgttcagggagttgttgaggctgctgtaatgactgctgtaatggttgttgtaacaactgctgaaatgaaagtggagcctgctgagactgttgatgctgaaaacccattggatgagaagatgaaccagatccatctctaggcatataaaagtgagatagttgtggacgcgttggttgcgt

SEQ ID NO: 324125 - DNA, 997 bp, Cannabis indica
gattaattgatatgtactgattagttttatattagtgcaagtgggagtttgttggttttatgccctaaataaaacttcatttcaatgtaatctctattattcaatattaataaagaaatagaagtatttttcactcatttgtgtgtcatttggttcatgttatcaattacgtgtctatttgatttataaattcatctaagtccttatcatatttatgttcttgtttattatgtcgtcagcacagtggaaagtaatcaagattgacattaatgtttttgtttatgttcttcctgaacataatatcagtgatccaactagtgatagcgatgatggatgggaagacgttgcaatcgagtttgtagctgacagtgaagactctatcgaaaaattggtgaagtttttttataacaatgaaatatttttatgtactatttgttgtgagaatattgatgatggtgaagaagttacacaacttccttgtaaacacccatatcatagagaatgtatcctgaagtggctaaatactagcaaatattgtctcatttgtaggtatgagatagtttatctacattatactttcagtgtttgttttttaaattcttctaattaaaaatgaactaattattatgtttgtttttaggtatatatatatcaagttttgtttttgtttttagaaagatttccctaattgaaatttaattatacatttatgcattgtttaaagctggggatcttgaaaattatcataactttgtttaaaggcttcattttatatttctcatataatattaaaaaataattttctcgaattcaatatttggtaggtagtacaattagatagtatttgtgccataatttaaagattgtaatatgtagatagagtagttcacatatcaaaagttgtaaaaaagaatatttatcattacttaaaaaaatttgacagcaaatacatatattaaggaaaaaataaacacagtttgtctaagaaatatattga

SEQ ID NO: 324126 - DNA, 751 bp, Cannabis indica
tatcggatattattgatgatgttaagagttatttgtctttatttcttaaaatttgtattagacatgttcctagaaattgtaatactaatactcacaatttggctaggaaaaccttagggctagataagaagttaatctagaatggtatcattcagcattgtaacttgtaattgtgctacttgccatgaaattataattttgttaaaaaaaaattctaagaaataagatgctatatatatatttaaattttaatatttattaaattttctagtcttgtcaaacgaatcataagttcctagctattgaaatatattttcctctcattattagttacataccaaagttttttttatgggagttatataccaaagttacatatgagatcattacacaaaatgtacggacaaatcaagtacagagtatgatacatagaatattgtaattgtaccttttcttgtatttttgtgggatatttaaattaaagtggtgatgatcttaatgaggatgcattattgacaaataaaaacaaaagaaaatttgccattatgttcgaaaatgtcatctatttcttgtgcaagacacttgtattattattcagtttgtctggataataattatattgttacaccatggcctatatatgtatctgcatgtgaattttgagtttcttccttccttgaaatttctttttaagcatatgaaaatacataataatactatatatattgggaaatttcaatttttgacccta

SEQ ID NO: 324127 - DNA, 816 bp, Cannabis indica
acttttctataatattcttttaactttagaatttttgagatatttactctaaaaacatcatggcaatttttagattaccttagtgaattacttatattcttgcaaattttaaatttgtatagaaaaaaaaaaaaattacaatttcagtaaaagaatgataaaactataattcacatgtgtaataaatttaaaaaaaaaaatacaaagtgtagttagtgggatttgaacctttaccctctaacatatttatcatctatcttaaccattatattaaacttactattatgtctacaaatatcatcttttaatgaaatatatgttttaactaattaaaatacatatacatttttttccggattttttttctcagggaaaactgtcccccttgctacaatgtgggtccgcccctgatcaatggtacaaaattgtgtaacaaacaaaactacaatccatcaataaaaactatatcctacgtagatactaaactaactcttcgaaaccaaactattgtcattcattacaacaatatacatcaacttatcaacaccactaacatcctacaaccaccgtatacattacttcactactcttttgaacataagaaaaccatttactgctacacacccacttattttataccaaaccaatacaaattaattaataaaccctcagtagtactaggctttaattttatcattattgagaattacattaaagctggcgtttggttggaggtaatgaaatggaatggaatggaaaagaaataattttcattccattcctttgtttagttgcattttaaagtattggaatggc

SEQ ID NO: 324128 - DNA, 1022 bp, Cannabis indica
taattatagactaaaataataaaaaagcccctacaaaattaaataaatctagtaaaaatgattataatatatgtacaaatatttttcaataataaaaagtccccacaaagaaaaatttctgggtccgtcactcaatacggattttaggggttttaccgctaaaatttaagttttgatagttatatgtaagtaaaatgaaaaattttaggaattttgcggcaattaacccaatatgaaaagatttatgtccaaataacctttttacaactaaatagtctggtgtcgtctaaacttgagtgtaaaagacaaaaatggatttgagcttaatcaagactgtgaaagttgaaaccatgctcaccatgtttgaggaaggaatcatataaattcttttttaacattattcaatcacaaatcacattagcatatataatcctctgtcacgtgagattgggtacctttttatttttttggtatcaagtaaagaacccccattttttatttattttttattaaaataaaaatattaaagaatcaagttcacctttctgtcatgtttaaacattacaaatcaaaactcatgtctaatgttttatgttttattctaaagtgcccctcactaactaaatattgtgtctgtctatctctccttaacaaattataagtacttaattaaatgaagaaacaaaacgtgacatggggttttgcttgaatcctttatgtctcaacactttcttttttttttttttttttttttttcgtttagttcgatggtgttgatagggttatgatggtgtggctcgatggcaagtgcaaattcgaggttaggaatgacgtctaaatagatttgaagatgtgtccgatataggttcgatataagaccaatggtcggtctgatacccaattagaatgtgatttaagtggttaggtccgatgttatatctgatggggtccgattattatttgttgaaatattgatcagatgtggtctgatatgggcccaatggtctccgatgtttgaccga

SEQ ID NO: 324129 - DNA, 885 bp, Cannabis indica
tcctgcctgttgccttctaggagtatgtcctcaatagacggttgttggacttggcttttatttcttcctctgtaggggtactactcatatgtaagccgataataagtctaaactcgatctgcctgaatctcatgtaatttttgtccacatgaaaccatatctcatcttccttcttattgtcaactttcatcttctgtaagagtaggccaatgccacagagaaaatcaactctccaacttcctagaagtatccaaaagggctagcctaatcttatttatcaacttcagctccttaaatttggccttgatatctctaaacctatttgaaccccgataggtaagacgttcagtgaaatgttgggaaactagaagtttaagtttacgagccatctacaaaaaatataagcaaacatattaaaaattgaaaaaattacatatcgcaaactgcgtcgctaatatctcgttataattcattacaatagcaaatccaatttaactttaattaataagcaactttgatgttcagcagaatttagcgatactattaacaacgtctggcgacaacatgttgttattgaacatgtcatcaaatgtcgcaaaacgtatcactatatatcgttgattgtcatgatgcatcaaaccataaagacaatatcgtggaatattgcgaaacgtcgcataattaatacaaactgataaaataaacaaaacatagacgccattagggacgatatctccaaatgtcgctatcattgtcgaaaaatgtcaataaatatataaatcaaatggaatcaaattgccaccatcaaaatccaagcccaaacacaaaaaatcaacttaaaattgaataaatttccttaatctcaaccataatcaacaaaaccaa

SEQ ID NO: 324130 - DNA, 1550 bp, Cannabis indica
ctctctctctctctctcgtcttcctcctctcacactctctctctctctctctctctctctctctctctctctctctctatctatctatcacgatgagacataggttgtgatggtggtagtttctagatttgggttgggggcacaaatctaacgaaaaaacttgatctctcctttccctctccttctatcagttgcagaaagaaagaagagaaaaacagagtatacaaagctctgtgtattattgtattgtttgtcttgttaaggtacaatgatggagcttatatagctcgatacacagttagtaagttagttacaaaaactaattgaaaggacactctaacaaattaactcactaatagtatttaccattactcgatattcagcttcagctgaagatctcgagactgtatactactttttactcttccaagagatgataaaatctttaaggaatatgcaaagtcctattgtggacctccttgtgtctatgcaagctgctgcagagaataagatgccttggcctggacaagatttaatatgctgcaatattctttgagcaacaattaaatgctttgtcctaggagtagtatggaattgactcagtttattaactgagtaagcaatgtctggtcgtgttatgactaagtactgtagtttcctattgtttttctgtacaatgttggatcaaccaaggtatctattgcatcttttgacagttttaaatttgcttccatagaggtgttaacaagtttgctccccagatatccaagttcttcaaggagttgaagggcatatggtttttgggatataaaaatccctttactagatcttgctacctcaaggcctagaaagtatttcaaatctcctagatccttgagtttgaacctatcattcaatctagttttgagaacttctaaatccttgagattgttgctagcaagaatgacatcgtctacataaaccactaagatgatgatgctagtaggagaatgcttaataaacattgaatggtctgttgcagagtgtgaaaagccttcctctattaaagttgtagaaacatttttcaaatcactatctagaggcttgctttaaaccatacaatcatttctgaagcttgcagacaacattaggtgataattgattctctccctttagactatatcctagaggtaaagtcatataaacatcctcatgaagatccccatgaaaaaatgcattgttcacatcaagctagtgtaagaaccaaccatgaacaactgcttaggcgaggataagtttgacagaaactaattttgtgactggggaaaatgtgtctgaataatcaataccttctagttgactataccctttagccacaaatctgctttgaacctctctactaagtgatgagtccatatttatcttataaatatgataaatttatgtattaatatttttaaattgattctttaaattattgattagtgtgattttaatttgttaggctattttaaagactattcatgcttttagagtcttttggagggattttagcatattttggaagaaaa

SEQ ID NO: 324131 - DNA, 534 bp, Cannabis indica
gcacattttttgtaacttacattcaaacctaaaacaatatgtgttttcaaacgaattccttaaaaggaaaaataccttgaattccttcttaaggttaaaaatactttgaaagtagaagcattttcagccaaaattccctattatacccaaaattcggctacatttcagaagctgacacgtgtgctacaagaggaatatgaatcaacttcaatgatatagtaaagttatatcattaaatacaaattaaaataactcgtaatcattaaataaaggaatgatagacaatagttaaaactcgttggttgtataagtctcaagcgagataaggataataactattgaactgatattgacgagacatacatctacctcggaatacatgtgcaaaaaaaagaggagattcatctattcaagcagactaaataaacaaatacaaccgactcgggtaacacatagcgaggcaatcacctcgcaatacttaatcaaatgaaggaatgcagcaagatgaacgacttaccaacacttagcattttt

SEQ ID NO: 324132 - DNA, 401 bp, Cannabis indica
agtatagtattatttttgtctttcaaaaaatgtccctccccttatccttaaggaatgcatgggtatttataggccaacttccatccttgcgctagcttgaattgatcacctttggacgagatccaaccattgatttggtaggtggccttatcaccatatggcattcaagggtgtaaggttgtacaggttgggcatcatacacgtgtcatcctggggtttccatttttgaatttcccttgtcaatagccgtcggaccattcatgtctgtacaattgaacgcacatgctctgtactatggcatatcatgggggacaaaccctgacgccgtacctaaaaaagcctggctattaagttcgtagtctgagatgtacaagcagatgctattgggattttatgcccta

SEQ ID NO: 324133 - DNA, 1389 bp, Cannabis indica
taaattaattcattgattttatttttaaaatagaaaatattctaaaattctcccacttggtcagcatttagatttatctcttaaacctagcattcatcattacataataaacatatgaatcatagccaggtccttattatatgtcgagtattatcttccatggattacgatatattcattctatgacaatgtactttatgtggcaatctacttaagtaaacaaatcctaaaccatatgattattctggtccgcttacgataattttctcagatgaaattaaggtgcacattgttgacctcgcatctagccaacgacagtgagtaaagataaagctattagataaaataaataatagaaagcaaaaacaacaagtaaagaaaacaccaaaatttctagaggtttggccctgtgagaattgtaacagcctactcctctttttgttgtattgacttgagaaacaagaataaagtattctctctcgaaagctcttacaattaatctctgcataattctctcttgagtgttcatcttaatcaaatctcgtgtccctaaatagtgaatttgtaccactatttataggagcttattacatgatgttgagaaacacctatgatcatctgcatacacacacacatcgaaggatctccaaaaaacacacacgaaagtatcccacagaaccaaagacacaaccacacaaacttgagctctgaaaaatactattttattgatttaggaatgtgtttacaagctgataattacacttggttctctacatcaaaaaatagagccaaatggcatttatagctaactaatcactaaggggtaccaactgtcataactgtcgagatggcagttatggcagtcacacttacaacttgaaacacaaaaggttacacataataatctgaatacacatttcagtccatataatctaacaattctccaccttaaactgataatgtgtaccaagttaagactaagaatttgagatttttaagatgttgagacaatgttcaaatttttctgcaggtagtgacttagtaagcatgtctgcagcattctcttctgttctaactttgatgatttgaaccttgccactagatagaacatctggaataaagtgtaatctaacatcaatgtgctttgttctctcatgaaagacttgattcttactcagatgtaaagcactttgactgtcacaatggatgcaaacagtctgttgatcgatccctagttcccttgttatacatttgagccacaaggcttctttgatagcttatgtacaagctatgtattgtacttctgtagtagaaagagccacaacaacttggagattctattttcaacttattgtacacttgtttagcagaaatgttggaaattatttt

SEQ ID NO: 324134 - DNA, 1009 bp, Cannabis indica
ttttttgatattttttttaattaagtagttaaattaagcataaaaattcaaatttgtgatttcattattcgttattagatcaaaattcgatggtttgatatttttaaaattaatatttatagttaaatttgtttagtaaccatttatgggtaataaccattaaaaagaattccatatatatatttagtatctgtatggtttaaaatggatgctaaaacttcaaattcatatttttacattgttaatgtcagtgctgggaactaaatccaagaaacatagtgtattacaatacatacaattatcaaattaaactaaatcaaccaacacaattcttaacccaataatttttttttaaaaaaaaaaaactaacctttgtggccgagggagtctaggtcgacggggatcctcgattctgtccttcaaagcggcgtttagtgtcctagattccgagaatggtggtgcgtttaaagtattttcgtcgcctatatgatcgtcgtaaaattggcaaaataaccgtcgcttatgtggacttctcgacggtttaaaaatatcgggattgtaaaaaaaagagaaaaaatacatatttttatgccattaatggtagaaaaatctatattttctcccatttttttctgcattagttttataatattacctaaattaaaataaaataactaattaattttgttacaataataactaactttaaaacacatttaatttatacaataacaaaataaatatatataataaataaataagtatataaataaataaatatatttatactgggctcggagagagagggagacagatgggaggtagtggtggttcgacgtacgagacaaatatgagagggacaccgacgggacgtcgggaggtgttggtggtccgacgtatgcgacgaagagtagatggagaccgacgagaggaggggtgggtggagatcgatggacgaaagagacgagaagaaagggagatcgagagagggaggaagacggcgagagag

SEQ ID NO: 324135 - DNA, 1139 bp, Cannabis indica
ttgtctttgtgatatggttttattttatttttattttgcaatttttaaccaaaatatgtttagaaaacaatttaaatacagaataaaaaatattttatcataaaaatacatacaattttcacactaaaatcatcaaatcacaaagaattcacatgaacatcattcaaatcacatccaaaataaaataaatggttttaaacatatttatacatgacaataatgttatcatggttttgagacccgttgttaaaacttattttatcaggatataatttgctgtcatgtatgataattaacaacttaaaacatgtttcaaaatgattaaataaaacacatacatagtttaggattttcttatattggaacgcagcggaataaatgactcatctcattcaatactttaaccctcgaatcctttttatagcagagtatcactaagtattgaacttgaatctttttttcctttattaagtgacatgtaacaatttgtacacgatcttctacaaaacttgagtccattttaaatagtgtaagctggtactcaactcacttagaatatataattgactaaaactaatagaattgatttcgaattccatagtagaaagatcaattcgaaatttacttataaaaaagagaaaagagaagtgaatcattaaggttctatctacgcctctttctttagagcatctccaatgaaagctataaatgtggtgtattgccattttttagaatattttcctaaaatttgactccaatagtgatacaaaatagggaaatttacactaaatactaatatttgtctaaatcttacatttatactaaatttttacatttataattttcctattttatttttttttactatttttactaattaaagtttcaaaaaaaacttttttctcttttcttctaagtcagttgctgacctatttttttgggggatgagtttatttttacatttcaaaatatttttttttttggccttttatatgaaaatctacatagcaaccaactgagcaatctaaattgcaccccaaattaacatagcaaccattggagcaacccaaactgtaaaaaatgaaaaaaaaaaaaaaaaaaaataatcttaatctgtctctatttctcttttttttttt

SEQ ID NO: 324136 - DNA, 1148 bp, Cannabis indica
cactgtaaggttttctaactttatatgtgtttattttcattgttttagaattcatattaggttgttaatccaacatacttggtagtaaatctagatcctggtaaaattatttccaacaccttttgcccccaagtccttgtttgagcgtctggtcgggtagggactttttgtctgtcttgtatttgtagcttcctttgccgtgcaggtatgcacaacccaatagtggactcttcgtcttacgtgacttcatcatagttattaaattttttggtgatagatatgggaaataatgtcttggttgtacatcttccccatgcatgcctaattttatggcattaactccccactaattttttttggggaaaatttccagaaactatatacgcctcattattctcttcactattcacttttcacctttgaacttcaaaatttctctcaaagactctttagagcaaaacccttctgagttggagttctttgtaattttttcgagtttttgacatccacacttggtgcgcggactagctcaatcttcattgcttcttccctgtgggtaagttcgaagctttctttctcttttatgttctttgaacttctgccattgttaagtttcaagctttcatgaacttcttgaatgccatactttaggatagattctaggcattccaatctgttagatagctttaggatatataatgtgcaactccttgatgaaaaggattgaatcttgagcttcatttagacattttgatctttgggtttcaaagaacatgaagaacgtagttcgaatcttgatgaaatatgttttggatctgttcatggacctggtcggcacttgggggcctgtttggaccctggccggttcatgatttcactcaagggaacctagccagttcatgatttcattcaagggaacatagccagttcatggctcctttcaaggaagcctggtcggttcatggctcttttgaaggaagcttgaccagttcatcaagggcagagcttcactctggctagttcatggtggtggaccatgaagctagtcggttcatgcggaaactgttgggttttctgccctaaataaaactcatttcaatataatcagatttagtagttaataaggatcagataacatttaatgttgc

SEQ ID NO: 324137 - DNA, 1114 bp, Cannabis indica
ttttcaacattgtaaattatttagaattttaaatcaaattggcctttcatgtacaacaaacaaatctctaatttcaaatcatactccaaatcaacctccaactcttcatacaaaatgttgcgcattttctgcagggttatgtcaatttcaactattaacgtcaaacttcctttgcttttatacacccaattaaatccatcaacactccaagcaccatcatacaatacaaccagaaacacaagcaatcttgcaattcaatacaaaatacaaacaccttaataagcataacaaaaataacaaaaattacattaataggaaacagtgttgataaataattgagaaccaatagagaacctgtaagaaaaacaatcaataattgtttcaaataataatcaatcaatcatcgataaacagtcgagaacacgtcgacaaatcatcgataatatatggggcaagaaagtttgaaaatacaactttacacaccattgacaaacaatcgagagaacaaagataacatgtcaagagtggttagaaatacaaaatcattccccatttcgacaaacaatcgagagcctatcaaaagtcttcgagaaaggtcttctctaacctttggacatcttctttgagaacctttcaagaacttaccgagaaccagtcgagaaaaatacgaacacaaaatactttaaaaaatgagatctcacgattttgacaaaaattatacgaacaaccacatagatctaccgaaatacactatacttttacaattatttaacaaatattttaaaaaaatacttacccattaatctacaataaaagggagatagaggaggtgcgataattgagttgtgagtgaaggctagtcgacgtccttcacggcggttgggctagtgagagatctcggcagacgtcctcaggggctgtaggcggcgaagctagagaggaggaaggagggctttatttttttatttattttttattttttgcaaaaaatggggaggagtcggttgatatggatgggaaagggggatgagtttgttgaaggggatgtagaaagagagattttatttttataggatttgaaaaaaaaaatagtaagggtattttgggtaaagtg

SEQ ID NO: 324138 - DNA, 1212 bp, Cannabis indica
atgaatgtatttttgtaaataaagtgtcaatatgtatttttcatgtaataattcttaaaaaaatttacataaaaatttaagtgcaacaaaaatgaactatataaatatatttctaaagataactgtatatttatttactagaaagaagctacgtgcaaggcacatacttagttttatattaggtgttaactacttcatttaaaaatgatacaataaataattgaagaaaaaatattattagttattgtttgagattatttttatgtttattcaattaatgtaaataatggtgttgcaaattaaaagtaaatattgaatgcaacaaattcatgaataagaaattttgataatctaactgcaaattgttcttaaattaattcaaaaataaactaatgttcaaataataaagcagacacagcttaaaattgtgtaaaataaaaaaactaaaaaaataaaactctaaaattgttgataatcgaagataacatctatctaatgtaaaaagaaaaaataaagatgctttaatggttgagtttagtcttcttttgttttgggagagacaacagtgtaatgtttatattttgtacttttcattctagttggtccacatataattggattgtctattttttagtgaatttgtatatggtagtttcgataaagttacggtgttccggcaaaaaattattatttttcatttaatattataatatatatagtataaataatcaatttaataaatctacttatgataaacaagtacatttattttatttatttaaaactatacctctgcaaaatattttattagttgggcaacaatacatgaaaatgtgttttccacgatatctgtgaatatgacaacatctagggtctttgtattgtcatcaagttcaacatatgctatagcactataaaatgcataataaaatggttagtatcaattttaattttaatttaattttaataaatttctatatatttgaatttaccgtggtgtaggacatctttcatgttcattttaatgacgtgcgtctcatgacatgtaataaaaacaaatatatatatttatataaaaaaaaaacaaaaaatagaagcaatttaacataaaattctttaaatgtacgacagaattaataatctcttaaaatgttccacttatttttcaaattgttataaatattattaattatgtggatgtccaaatctttt

SEQ ID NO: 324139 - DNA, 578 bp, Cannabis indica
aaaaaaaaaaaaacctaacatgattaatttagtatagttttttgctagttatatataaatatgcctaaaaaaaatcaatgcgtaacctgcttcatgatgatccaatatgtatatctaacatacatgataaaatatacatgatccaatatatattaattattagaaaacatatatatgccgtaaaatagatgctgcaaaaatctgcaaaagaaagtaactaacatatgcgaagtctgcaaaacaaagtaactctttgttcttcttacagcatatgtcggtatatgaaccaaaaagaattattggatgattatatatatattaacaaaagtccaaaacaaataaaacaaaaaccaattacatcattaatattatcatagatatatataactgagtcgaaccacgaaaattatatccagaggaaaaatagaatggtactgatcatatatcaataaatcgtaaacttacgacatatatacagaagccataaaatattaaggcacaatattttttaaacaaaaatcaaaaccctaattttcaaaatccccaaatttcataaactaaatcatcagatcttcaat

SEQ ID NO: 324140 - DNA, 916 bp, Cannabis indica
tcatatccctatatatatatttatctgatccgaatgcatattacatctattgtatagaacaaaatgagagatgagtaattctttttatcactactgaaaagtagttagatactttcccaatttttagggttaggcaaataggatatatcatatagcagtctatatattaaaagtaaaagagtttactttttcttttccgaaataatttagtatttagttgacttatttgattcaaatatctccaacctataactcacatttatgtttgtttctaacctaaccccttaaaaaattagtatttttaggattgctaaagttttcatggctagttaacttctaacaattgctaaaggacaccattagtgcttagcactctctttgatgtcatactgttattgatgtaattaagtgtcgcgtgtcatataatttaagaaaataacttttagaaaatatcgctaactaaccgtgaagcaccaccttataaaaggtgctaggcaccactggtgcccaataacaatactctttgtttaaatattctaataaacttaatatatttacaaatataaaatacattaaattacaataaactataatttttgtaatcaatatttttgaccataagtttttggtaattagataataggcttaatgatatttcattaaggtaatatttttgtaatgataattgagaaatataaagggatgactatttagttacactcaaaatgtaaaagttacattttttataatattctaggttcccattttattatatcattattaaaaacatattctatttttagaataaaacttaaaaaaattatttttaattcaaaatatttatcaaaaataaattaacaattatcatttaattttatttgaaaataaaaatcaatattaattattatttataagt

SEQ ID NO: 324141 - DNA, 749 bp, Cannabis indica
aaaatgtattctactttttttttacacaaaattagtgatttgctctatttttatgatatatagttgtgaaactatatctgtatatcaattataatttaaattatcaaatatgccattttaattaaatagacacctcataaatttttgatctatttaaaagaacaaaattcaaattcaaaacttttattgcaggtaatctgtactagaaatttttctgtttttttatttatatatagatatattatatttatatgttgtgaatattgaaaaatgaagcatggaattcattttcattttcaaacacacctgcactacaatgagatgcttcttattatttttttttaaagaaatgttgtaatactatattaatgatattggcataatattgtgtggtataatattggtataataacctcgaggttttatggtccaaagactttatatgcgagtgacaatagagagcccacaagtccatgtgttaagaaagtgaacagtcagtatgcaacttccaaagtcgcatacgttcggatattaactaagaacatttgaaattctctcatttattctgtaaatattttctgccttaattaaatataattaattttgtaacggtcctgtctaatcgattatgtaatccaaaagataacttggtttctatataaaagagtgatccaaccggaagtaggatctaatcacaaatatcttgctaaagtggactaagcagactaagctctgactgaactactata

SEQ ID NO: 324142 - DNA, 1321 bp, Cannabis indica
acaaacgaaacttgaaaaaagatgaaatgataatgatcacgatgaataccttcaattttcaaaccacaaatgtctaattaaaatatggtatataataaattaattaatgtttatacgtttatcatatatcagtttaaaataaggtatataatgaattaattaatgcttaaacgtttatcataaatcaaatatattacattaatataataagtactacaaattaactaaaatttaaaaattaagaaaaatgagagagcaaagaatagggaaagaaaattattggtactgccacctcacataccttaacaacagcattatataagtatatagatatagatagatagatagatgggtagactataaataattcttaatccaatacagttctcccataaatatccatgaagggaagaagagtggaatctcaaccataagaaacaatatcgctactagtactaccgtcataatcactacgggagacaaatacatgtgtatacaaatgttaatcttgacttgaccttactcaaacctccatagagccaccactaacagcctagaccactcccaccactgtcttcaaactaactaaatcttcaaaataatagttaagtattgtatttccatcagctttataaaccatattcaaaataaaaaaatgaacagtattcttcattgcatctccacaggaccacatctagagatgcaacaatagtttcttcaaaatttttaattaatattgttcacgctgtttttctttagtaatgattgtcacaaaataatgtatcaatattagtataattaattaatatgtaaaaatttaataaaattgtgcaattcaatcaacaaacttcaaagttgatgtaaaatatgtttgctcccattgatcactatattgaagtataactgtaattttatttataaaatatatcttcagtaaaaataataattttttttattaatttatagtttatttatagttgtattataattgtcacgagtaactatttttttttattgtttttagttgttttataatttattaataattgatttatagttgtcaagttaatttctcactgttttttagttttattaagcaaagtatatttttgtaattttaaaattttataaacgtatttttataattaaaaattttagaccgtaaaattataaataaaacgaaagatatttttaaagaattaaactaattcaattttgcaactccaaatcaaatttaattatgatttaactaagattaatggttgagttctatatattaaagttgagaatagatgggaatttttattgtcaagtttactac

SEQ ID NO: 324143 - DNA, 1158 bp, Cannabis indica
ttattattattattattattcgtgtaattcaatataaaattttatttatttatttacttaattttgttaaataaataactttagaaaacaaactgtagtaattacaaaaaatagtactactttaaactacaaaaaatctcactaacttctcaggaattatattaaaaagtattggaatccaaatcaaaataatttaaaaagacatttaaacccttatataagacattatttttgatagtgttagaaattattttttcatttatatattacacaatatctcgaacttaagacctccaacacacacgcacctagtgtcggccttgggcataggcgggctaggcccgcgcctagggcccactcattttaggggtccaaataaaaaaatatacatatattttttaatatttttaaaaataccatttatttttatagtaaaggcccaacaatttttttttacctatagcccatttcaactcagggtcggccctgcacgcaccctcctatggccacttgagctagtctcaaattatagtgttagacattaaatgcttaataatttttactaagagagtgaaccatcacaataaaataacatcttacgaatgattaattattttttatataaattattagatctgatgcttaattatacatataatatctgataataatattagataccactgttacatgttacacattttttccaatatcaatttttcttattttataaaataacaccaaaaaaatgcatatttaattactaaaattttatgcttgaatcataggttaattagactttttagctcctgaactttgacatgtaccaaatcatatcccctgaacttttaaaaccatttaaaattgcctcctgtaactattgggattgttggattttaaggacttttgttctaattttattcaattttactatttcaatgattgtttatgtactaaaccatgttccccagactttaatatctaccaaattatgtccttcaaactttgacatgtactaaattatgcattctgaactttcatccatgttagacttttctactaaaattagaaaaaagtccttaaatccaacaatcttaatagttcatgaggcattttcaatgaccttaaaaattctggagacataatttggtacatgtc

SEQ ID NO: 324144 - DNA, 1276 bp, Cannabis indica
atattttaataaaatataaaataccaattaattactaaattaaatatcagcatgatttttttacaaaaaaaaaaatatatatatcagcatggttttttgtcaaaaagaaaataatgagcatgaattgtttttaaaaagattaattaggatttttacctctcgaactttgacatgtaccaaatcatcccctgaacttttaaggtcgttaaaaatatcccctgaactattgagatttttgaatttaaagacttttgtctaattttagtaaaaaaagtctaacatggatgaaagttcagggggcataatttagtatatgtcaaagttcgatgagtatgatttggtagatatcaaagtttggggagtatggtttagtacataaacaatcactgaaatagtaaaattgaatgaaattaaacaaaagtccttaaatctaacaatctcaatagttcagggggaatttttaacggttaaaaaagtccaaggggcatgatttggtacatgttaaagtttagggggtaaaaaacctaattaactttttaaaaatatatatactattaattgtatttttttttagaaaaaacaaccaaattaaaatttcaagagactgtcgtgtccttttatcatctttgcctaatgtccatttatattttattaaacaaacagcaaatcgtgttgcacattatgttgctaaacagtctctattttatgctggttgtagcatctctaatttctcaattttctctgaactttagaatattttgtattcagaatgctaatttatttcaatgaaattgatatttcattaaaaaaaaaaaaatcaagagaaatcagtcagaaaagcctcaaaaagaaaaagagaagatattgaataaaaatattaattgcaacttttttttgtgcttaacatattacataattttacatttcaaataaataataataattagcccctaaattcttttacgtctagtcttataatttgttggcaggacgacatcatacttattaattgaatttggatttttatacattttagatattttccaataatatgtatcagaaaatgaatccaaacaaaaccttgcgtctcagttcatatcaaagactcccataaataaattaacaatcttatttgatgagaaaattgtgaagatattatactgttttttttttctttttaaaatatagggtgattctaatccccttaagaggggtgtactgatgcaccattaacttatttcggtatccagaaaaaagtttttagtctaattttttt

SEQ ID NO: 324145 - DNA, 845 bp, Cannabis indica
ggaattttcaaaaatatttgtttctatgtttcatttataattttacaatgttaagtttttatttataaaaatacacttttaaagttttaaaattacaaaaatttattttgcttagaaaaaagtaagaaaacgattcaaaaataataaaaaattaatctcacaacaattataaatttataaaatattaaaaaactattagaaaagcaatctaacatgacaattataatataaccagcgaacaaattgtgttgcaagtaattattttattaaacttttatttttttactcgcataaaaattcatcatacaatgatatctctaacaaaatagagattaaaaaaatgataaatttatcaaataattttaaaatcgttgttatcaccgcatcgtacttgtattcaccattacatttaaaatccgttattattattgtatctcatttgtagctagtacatttaaaatccgttattaatattgcatattatttttagatggtacgtgttgttttgaactcaccatataatttttaatctaaaaaatagtttaatacaaaacctatcttatattatcattaccttattcatataaaaaagagagaattataaaataaagattaaaaattaaaaattaatatatgtatacattataccaaattgtgatttaaaattataaaaataaacatatatataggattttttttattatggagcctccaaatttatttatgggtgggggtgtctcagagtcaatatcaagaagacattaagtgaaagtgattttagaagagtgtgacacactggaacataatctcttttttcctattttttttaaatttttttttattct

SEQ ID NO: 324146 - DNA, 2605 bp, Cannabis indica
atttccgcaaaacagagtataagaaccttgtaggaaaaaatgaccccatctttggtgtgaaatgcatgtcctcaacactatatgatgatttgattttgttggaaaatcaaataccttggctagtgcttcactgtttgtttgaaaagaccacgactccagatgtagagttgtctttaattacattagtcacaaattgttttgacggcattttactgtagaggagtagacatttgtgaagaggtttacaaatgtgaaaacaagcacattcttgatctattaagaaactcgttgattttgccatcaagtatgacaaaacaagaaagaaatttagagtacttggcacaatgagtggctgttgataccatcagctacagttttagttggaggcaggaataaagttcaagaaagctgaaattagcagtagtgtccctagtattttggatattcaattcaagaatggtgtaattgagattcctacactattcattcaggatgtcacagagagtctgtttcggaatctattatgcttcgagcagtgtctcccttacttgcaagaattaatcgcttcttaccttacattcttggattatcttatcaatactggtaaagatgtgcaaatattttcagaggaaagaattattgaaaattggacagataatgaggaagcggctgtattcttgaacaaaatctgcagcgatattgtcatgtgtaatttctattactttgatcttgtgaaggacgtgaatatatattgtcgacgtcgttggccaaaatatcgaagagtactcatacatgactattttagacacccatgggcatttttttctgtttttgctgcagctacactactcattcttactttcttacagactatatttactatccttaaatagcttttatatgtcatgtctttgtttaaatgttaaattaatatactctctctgtttatttaagactagttgtgatgtagttctttgtttttatcacaaataatataatgttgttgttgttcgtgtttctgcaattgcaataatgtgtaatgcaggagaaatgaaaacatggcaacagaaatggaaatagaaacaagaatggaatggaataaagtttaaattgtatataaaaaaaatatattaataaaaaattattaaattttttgttatgttatattggaatagaataatcattttaccaaaataataaaaaaaatattctattaaaatattattctaatactttaaaatgcaatcaaataaaaaaaaagaatattaaaaatcatttatttttcattcaattctatttcattacctctaaccaaacaccacttaagtcctacttagtcactctaaaattaatagaagtaaaattaattaactatgaggaccggaggttgcatacgcttaaacgtgtatttaatatttaagagcatttataattattaaataataaaaaaaaacaaaattcaaaatgtaaagttttactctaactaccaaatatcattagaggtgaaagatatatttttcttagaatttagaggtttgagaaattcaggtgttgatttcttgatgtttctcaacctattttgatcatctccaatgcaatgcatgatataagaaatataataaaatttaaataaaaaaaataatttacgatataaatacttaaatttaacttacaattgaaataaatatctaaatttaattttttatgataataatacttaaatagtatgtgcacacacaactataaatgtttttattaaaggcactatccgcaagtcatgttaaaaaaaatccatagttttctgagtattgttttgtggttaaagttgggatgttacatgatgaatgtgttacaaagtatagatcaagatacttgaatttttacaataatgttcaacctataccttgagcaatatctaaatgatcatgaatacttaggaaacacccttgaagaccttctgcttccctttggcttctcaatgatctatgcttgcctcttcattcctaactttcttccttcaagtcttcattttaacctcaccgtacacaagttcactcagtactctctcaatttatttttctctgttacattacaaaatgagtaagacattttatagagtaggcaactgttacaaaagaccgacataaaagaaaactaaaataaactgaattaactagctacttgatcagtgtctaatcttgtcttgagttgtgccatgtcatcatagtcattaaaatattatctggttttttagggattgatgtaacaacaatttccacctcatacaccttgtgaaaagaattctttgaaaaatattctattccacaagttttttttttcttattctttccttcatgaaataccaatgaacataaaatcaatatacctcagtcaaatataactatacctcatacttaaattaatatttaatagtttttttttctttatatccttcacgatatacatatcacatacaaacgatataccttagaccaatataaatataccataaacttaaactaatatactattaaatgatttttttccacgatatataatagcatataaaaactatattctgcaatcataagcataaatactatag

SEQ ID NO: 324147 - DNA, 1793 bp, Cannabis indica
aaaattgagggaaaattaaatcatatcaaaaccacaaatcaatatcaaacaatctccatctagaccctaatgaactgtttagctacttgtgttcatcatagcaacttcacacatattaattgagaatggaagaagaatatagagaagaaaaaaatgttgaaaactccgttgaaaaagccttcgcgatcaattttgctctccaaaattcatactccttggttgcttgttgaaaactattgaagtccacttcttttaaaggcaaaaaatgataaaagacgttgaaaacttatttttttttaaggattagaaggggctggccgtgacatgggatccctatgcctacgcatgacccccctttatttgggcagtgagctttctgatacattaactaatagtattttggccataactctctcgatatagatcagaattggacaattaaagatattctgaaaagataaaagagagatctagaacttttatgttttgaatgcctccaaaatctgaacaaaacaaagtctaatttaagcttgaagtttcaactttattttcttggacaattttctctattttatagaccatctttttgtacgatttgtcaattgatacattctaagtgtcgaaacctgaaattaacaaaaacaagcgtaattctatttcgaaaagtgataataaagaagataattaattctaaaaataacataaataataggctaaaaatatcctaacaacgggtgcttaggtataatccagtttatctttattatgttatgattatattttcttactgagtctgtcgactcatagatattttttatatgtgtaagtaaaggcaaagttacggctgaatagcaatgagcccgagcagataaagattgtacatatttgggcgattaaacctgaagtgtttgatcttcggagcagcagattttattttgatagatgctaggcgataacttttgtgactaaatattttgtaaaacagctgtaactttaaagacgagatcctgaattatttaaagtatttatttattcaagtttaaagcttaattaagaaaaaattaattaatcacgatttttcataaactctttgataaggagtacacgatattaagaaatcacgatagcacgcctaaactagtatgttgttatagtgtttttcttcattttttaatgtaaactgggagaagagttagtagttgttgtagttgtagctttgaccaccattttggtgtttaaaacattgaatctcaacggatattaaggtataaatttaatctctaataattttattgaatatgcatgaactttgtattgtattgaatatgtattattgtatatatattgtgaatgagaatgagatataggagagtcttttatgtattgtatatgtttatattgaatattttaaacttatagttttataaatattgtcaattagaatgagaaaggagagtattaaaatacaaatttagaaattaatttctaaaaaaatagttcgtgaacaaaaatttagaaattaattatataattttgatcattgttttctatttttatttttactcatgtgtttttagtttttcagtagctagtaaatagttagttataactacttaataagttactaattttcattcctattcatgtatttttattactaactagttaatcattagtaactagttagcaataaattaactagtcagtaactagttactcataaattatataactagtaagtagttaaataaaaaaaaaaattaattttgatctttatgttgtaggttgtgaga

SEQ ID NO: 324148 - DNA, 425 bp, Cannabis indica
aattatatatcattctatacatttattcgcccatattaattatatttttttttacaatttcagcaaaccaagtcttattcccaattgacattttgctaggtagtgttcctattagtctagtcaaagcatcatgttgtatctttttgattgtatgccttatttgctatataaattataatgcttcattcctcacctgccacaaattataaaccacagaagctatcttatggttaataaaatacttttccttgccttgctaatcttaattttagagattttttcaaacagctcaagaatgttctcagttagtacttttcgttttaaccactctttgattttctccgagcacttcttactataagaacatgcaaaaaataagagcatgtttggtattattttctgttttttgtttttaaaaaattgtt

SEQ ID NO: 324149 - DNA, 1747 bp, Cannabis indica
gagagagagagagaaagcctttcctttttttttttaatttgaaaaatgaatatactaaattggttttgtttaattacttttcagccaacatatactaactaaatcaaattataaacttaaatttaaaaccactaaagacaaaaacataaatggcaaaatgtcaattttgcccttccccacaacactaaaagggtacttaggggtattttgggaaactctaacatcccgactacacccgaaattcccaatgtctaaactattatctcgctataccaaaaatactaaaatatgattctaatagccatacaccgcgttccaatgttgccgatcacaaaatatacaaaattgtaaaatttctatatgtgacataaaaatgcattatgaattcaaataaatcatcataaataattaattcaatattaataaataattttcataataaagccctaattatctgctaattcccaaattaaagctaagcggtctttacactaggtctcagctctggccctttggaaattcggtctccaaaaatagttgaatcttaatattttctaaaaatgaagaagatgcttagaatttttcttgcaaaactccattttaaatggcccaagttgaaaaaatgtcaacttggacgttgggccagccccacatgtcaacctggacactgggcctttcttctggcacctaggaagtgttgtttcttcccgaagtacctatttctccatttttgataaggcgaagaagatgcgaaagtcagattgccgatctaatacttagaagttacccagataaataaattgtcaacttggaatgaactttctctgaatctgattctaatacctcaaatatctctgtagtgtgtctagttcatgtcccaatgcaaagtctgacccatttacattgagatggtcccaaaaacaaaaatcctatattaggaagcggtctaaagcaggtttctcttgattggttttctcacatttgatggaagatgatgaggtagattctctctagatcatggcccttagtctttcagtatacacatgagtatgtaggtcaatgagttgcaagcttttaaagaactcattatccacccctttcatctaactcatactttaatgttttatgcaagcctcgttcatcttggttaagttttgagattaactcatgatactattatttttgctagtcaccgtatgtataattttattacttttatttgatagccatcatataatacaatgcaagacaatacttcattgattgtagcacaacccgagatatattaacctttttatttataattccccttaattttttagactaatatccacgtgtcaatcccatattaatggctcaaaatataaacataacatgtattgaaataaactttgattctaatcatccaatgcttggtgagaaagtttatactgctagaaaaataaagatacaaattaagcaaggagcaggtcgaaagaaattatgtattaaatttttatggacactgattttaatattttattttctgttcatttttagtaataatttctcatgaagctgattataatgctttattttatgttttatcacagtataatatgtttaatgttcaattgtgattttaatatttagagactatgttattttaaaattggtttgtgaatgcatatttatgttacgaaaattattaaaaataatatgcaagtgcacgcaatcaagtagtaaactcatgcaagtgaggtcgaac

SEQ ID NO: 324150 - DNA, 1305 bp, Cannabis indica
tcatttgtgaatttatttaattgtgagtcccattatcaaaagtgggcattagagttataatttctcaattcgagagattttattcaactctaggagtattatttgtattatatgtgaattatgtatacaatttttgctcggcgacaacgaaaaatgcgatggatgactagtttaatcacatgagtaagtttagaaccttatttcttagtgatatatattggaggaaatagaatactgagtttgagcggggttatggtttttgaccattttacctctaggctttatttttctttaagttatatgaagaacgacattttagtaatttgccaaatgagagatttggtggctgcctaggggagtgacccctagttattttattttcaggaaaggtttaatttgataaaccttatttcatttagaagaaaaataaagaaaagccaaaaaaaaaatcaaattacaccctctctttcccttctctctcttcgaaccagcaagaactaaggggattacctgctgatttttgtgttttcaacaacgattcaagtaggatataaagttgaggtaacccctagatcatctgctcttagtttttcaagctttgatgttggtttggatatgtgattttgagttataggggctgttagggtttgagttatgtttagttctaattctaagcttattttgagttgattttgagttctagatgctggttttgatgtattgtgatggaattgaacaagtttgcattttgaaactcaaccttaggtctttaatggaatattttaattctgagggtttttcttagttctgttgcttggaatatattgtggaaggttgttttaggtactctggaaggtttggtggcatttggataagttttaagcaagttagaagttgtttgaggaaacctggtgcaaaccggttaaccaatttgccaagttctataaaatcgaaaccggttttggcatattctccgaaaaacttgttttctcaattcctgcccatttcggtaccttatttgggtgtttccttgtttcctagggtattgtagtcccttgtgataataatagaaccttgagttgtaggttcaggtttctcggattaggggtttgacatgtgatttacctagttatgttatgtgattagggcctccatcccgcacaagacgttccgttcaggtcagcaaactcacttgaattcgaaaaggaggtaagaactgtgtataatatgtgatatatatgcatgttgtgtttatgattgtatatgtttgggtgatatcatagcgacacaaccattgtgtcagtt

SEQ ID NO: 324151 - DNA, 969 bp, Cannabis indica
caccaacccggcccggatcggacggacggcgcgcgcgcgtgtgtggtgggtcaagtgtgtgtgtcctcacccattcgcacaaaactgggtaccccttggggcccaaacccaaatgccaaagttgcactctttatacccttgtcaatgagggttcatatcccatgtgggactctttccaactcacacacactaagacacttatatattttgttaaaatattcacaatatttccaacagttattaattacattaataaatagtaaaataataaataaaaaataatatttattgtagtatataatttaatctttactatattttatattaaattaaagtttttttgaatagaagaaattttattaatcagaaacttctgctaccaaataaggtaacaaattagttggaatccaaactgaaacgacgatcagaaaataaaatagcagctttaacaaagttatagaccactaaattaacagatcgtttaacaaaagaaataaatacatttgtaagagaagtaagcaaatttttacagtattgaacatcacaaataatcattaatcgctaactactcacaatgcaatataaagaaatagaaacatttgtaagagaaacaaacaagcttttaaagttaaggcgctaaacattataaataatcgttaatcgctaactactcacaatgcaagtgttgaacacattcacattcctaatagcaatactcaaaaaagactaattaagacatgttaaagttgggactgaacaaaaaatgtaccccaaacataaagtatgagcatttctgttttctcccctatttgagaagaagccgctttcgattgtaaacattaataaaaggctaaatagtaattttttccactgaactttgacatataccaaattatgccccctgaactttttttgtcgttgaaaattccccatgaactattgagattgttaaatttaaggacttttgtc

SEQ ID NO: 324152 - DNA, 754 bp, Cannabis indica
aagtagtaaaggaggagtgaaatacgttgtagtggttgttgactacttcatcaaatggttaaaagttgaacccatgaacacagtcacctccaagaaggccttgggctttatcctcaagaacattgtgtgctattttgggcttccacacaaaatatatctgataacgggaagcagtttgatagtgtacatttcacagatttttgtgtccaacatgtaatcataaaagcttctcaaccatggtaagagcataggataacgatcaagaggaagtcgtaaacaaaatcctaaaaatcacattgaagaagaaactttaagcttataaagctcattgggcagaggagctctcgcgattcatttgggtatatagaacaacaaaataaacattaaccaaacacacgccatactctatgacttacgaatgtgaggcagtcatcccagtagtaagtatcatcccttcccatagacgaggtacttatgactcaacccaaaatcatactctcctttaagaatcattagaattgatcatagagctcctagaacagtcagaagtccaactcaaaatgtaccaagggaaaattgttaagcattttaattccaaagttaagagtcgaacatttgaggttagagagatcatcttaagaagagtgttcccagcttcacaagaacaaggagtgggggtcttagagcaaaattgggaaggacctaccaactaaaaacgaatggatggatcagaaaatctagacgcttggaatgc

SEQ ID NO: 324153 - DNA, 1033 bp, Cannabis indica
aaaatccaatatccaataaataattggattggatcggatgggtccaaatccattggatgtgatccaatgaacacccctaaccaagacataaaatgtatgtatactccatattaaaagtttctttttttttttgtttggaataattactaaaaagaattggtcccaattttgataacagacaaagggcaagtggaattgtttgcgttatctacttttattcaagtgtcatttatttatatacattaatttggccttcggagttgttgataaacttaagaaaaaccactatccattttaacattaatgttttgcaaaaccggagcttatattttatagccttactatttttattttaaataataatactttattagcagtctcaagtcttaacggctttttgtataatagttttctttctttctttttatgtaaggcatcgtgttaaactagcactttgcaaaggaaattttattttctacaataattctctacatttagctgtaccatatagctgtgatatgtgactgtataataaagagttgaaaaaaaataataatttaaatttcattttagtctactctcaaagctaaaaactgaataatttagaaaaacataaataaacttaaataagaagatcaaaacctatttacataattaatgtgaaagataacccaggaaaacaaacaaacataaaatctcctagtgaaactttttctgcaagtaaagtaaaatgaacgatctctattctctgaactattagttagactaccactaatacttatattaatttgatatggaatctacacaaatttagtgtaaatttttttttttggtgcaacaattataatgatttacacaaaatatcccactaaataaatatattttacttaaataatctcgcattttatattatctattttaataatttaaaatagttaattttataacataattatatcacgactactagtttgagtttaaaattttaaaataatttagtaaaataaatatttattaaatcaattaaacatta

SEQ ID NO: 324154 - DNA, 906 bp, Cannabis indica
attaaagcttagtagctactaaataaaatgtaaaaaccacagattattcacacattcaaaatatagaaaatatagaaccattcagaacaaaaaatagcatcttatttataattatagcccctttttaagttttcactttgttgtttattaggtttaataggtttcctttttctctaataatttgtatacaataacatattttacataagtgctactatcaatatcatattttaatctcttccttaatttttatatttaaaaatacatgttagaatattttttttttaattttttaatagtaatatatgttatagttaaaatataaaatctttattttttttttgaaaaaaaaaaactctaaatagtttctagtacgaacaaaaaaatttattcaaatttatatacattttttaaaatttcaaatatgtttttgaccttgtaaacttaagaatttttcaaaaaatttactttgaataaagttaataaaggataacttcaatttattatttatgcctttttattaagaaaaaaaaaagaaagaaaaagagaacttattatttgtggcacgtaaattgtagagaataatttatgagttgtattaatttaaatttattctcattgtcgtttatattcttaggataataacttgacaaagtggtcctcatatgtattttgttggtgcattcttagaatttgatttatttcttcttgacaataaggaggagaataggaatataatatattttaatattttcagtttaatatttaattaaatacttaactaaatttggaacaataaaactagtactgaaataggttttttgtagctacagaagataattctgtaattccagaataaactagaaaaacaaacagtacataaaagtaaaaacacacaaggttttt

SEQ ID NO: 324155 - DNA, 727 bp, Cannabis indica
gtttagggaaaaaatattaggtatatgtaagtatagaaaatcaaatttctcttttatttctatgcattagtaatgtgtgacaaactctaatagtatatgtgaaaaaattaagactaaagtggataatcatattaattaaaatttaatcatcatttaattagtaataataagaataacaaacacgcaataataattgaaaaaaaaaaaataaaaatgaatagaatattataaattttaaaaataattaaagcaataaaatgataaattaacttcaagatatagattggttcaagttcgatagattgatgtgatctatgactctactctagttctgcaatactaccaaattctctttattgattgaacaataacatgtataatacagtcgagaggattctttgttagattctcttaaagtgtttcaactctcacacttagtcaagaatttttatcattcacagaagatttttcatacaaaactcaagcccaatctctctcttttctctatacttctctctccatctctgaatccctttctctctcaaactcaaagtctcctcttaaaactcatggatgttggggtttgggattttgagggtccctgagcactgtggagaccaccgtttacccaacagtgaccagtgacaaccctttagtgttgggctgagctaaacacaagagagagagagagagagagagagagagagagacgagagagagagagaga

SEQ ID NO: 324156 - DNA, 1231 bp, Cannabis indica
ataggaaatgcatggtctaacccctaggctttttaggggttttatggacgtagtcctttatccttcttaattgatgtgattcttcgtaaagtagccgtcactagactcattaatcatagcatagtagctgcagagagggggttacgccgtcagactttaaaacatatggcagtttcaatacgccttctcccatgcggcattaaatgcgaggtgactgttcaggtagaatttgacacctcccgaagatgctttgttgtaactttgctctccgggagtatgtgaaactcacaggccttctctgggaggcatgttagatgctgatccctttgatcaaagggacttagcctaattatttaaacgttaaacccttttagtctacgtgtctcggtccagttggtccacatattttggacaaaatcaggggcaacaaaataaaaaaagaataacaccagatttaaggaattcaaagcatgtacaatgctctacatctcggtcaaaacaacaacaaacatatctttattgatatcagtgtttacaagattactaaaatcttcacaaactctcagaaattacgagaaaatatttttctctttagtttagactctctttctctcaaccttacactattacatttttcactcaagctatattgatatgattcactactgattataaggattgctagccatttataaatttacattgttgcctaaattaactccgtgaatattgtggctcatttatacagtcttaaatgattcaactcatctccaacaataataatccacgtcagctttgataacgcgcttttagtacactcaattcgaaataatacaaacaagctatatgaatacgtacaattgctcataatcctagatgaacaaccaagattgatagttagctattcgaaagggcatctttgaacaaatgacaagctatccagagagacgcaagctttatctctaaacaccttttaaatttctacaaagacttctgcctaagacttttctggatccataccaagcttcatgttttaaaaactcccaaaccctaaaccttagttaggatttaggttctaagtgacacaccaacttatttaaaagtatacatatttttaaaacagttaatatcaatatatatatataaaggaaagaataaggagtgtctatgtgtcctcttataattttttctttccatttttcctattttttttatcacattttcctatttt

SEQ ID NO: 324157 - DNA, 877 bp, Cannabis indica
tattattttgattatcctgacaaaaatagtatttatttgatgaagtgtagtattcataactaacctatatgacattattatatttttaatgattttattcattgtaaaaaataaaatagctggtagttttcttttcttggagcggttgttttgtgcagttggcttttgtttgtatttattgcttgtcttctgaataaaattcttcttttgttcaaaaagaatttttctcacctagtattataattttattataaatgtctggtcaatattttttaggttttgtgacccatttttttttttttagtctataggtatgtagttttttatttaattaattatgtgtaacaattgttcaattttcttaccttttaatattatgttattttcttctcaatttaaatggtttatatctattttcatataaatatattttgttttattcattaacttttaaatttaaataattttttaataattgataattatatccttatcattaatgtaatttataaaattatacttattaatttatgctgaaagtatatatgagaccacaggttttttgcaccatttttttgatagtttgatactttttacggtttatgtgccttttatatatagtttttgtgccatttattatggcttgtccttatttgttcatgatagttttgtggtatggtcaatgagcaagagaagtgatccactttaagctcacgatttctacttcaacgactttttcacttttaatagataagtatttcaagtctttttacgtccttatttttaatatagattggtttaccatcgtcctttcacattatcttttttcattatattgtgtagtaatagagttctattttttgttattttgtaggtt

SEQ ID NO: 324158 - DNA, 627 bp, Cannabis indica
aataaaagtaaaaattaaaacaactaaattaaaaactataatttcctcaagaaaaattgaaacttcatgtagtgctcaagcccacaaccaatggaactataaagtggggtaagttgaaatatacccatttttttcatcaattaaccaaaagtagccctattttaaattcaattgaaatgtaccctcttttataagtccattaccgattatacccttacataagggtactgttcagggaggtgaggaagggtttttttcatttacgggtataatcgggatataacaaataataaagggtataaattaaatatatagaaaagaaagggtaaaaatgaaattggttaacaaaaaaaaaggtataaggtgcaatttccacctataaagtggggtgtctcaatacaaggcctaataaggaaaactgccacaccactacttattatagcaaaccaatttgtcataagttcaagcaatattttttttattaataaaaaatactcttatattatatttattaaaaagtattagttgagttactcaatgtactctcaccttctactcaactctaacacataatttacataaaaattaaaataaattaaagcaaataaaataaagtaaatatacaat

SEQ ID NO: 324159 - DNA, 726 bp, Cannabis indica
aagagtatgctcgattagtgagaaactttgaaaattctcggcttctaattaaagatcatgcgcataaatacctaaatcatttataaattgaaggatatgttctttggcattaccaaatttcccattttattttcgatataccggactcatataaccacaagggtaagatttgactacaacctccacagggtagggtggatgaaagtcgatggaagttactgatgatgatgatttacccctttaaagccgagaccaatcaattcgtcttttgtgacgaactcagaggaagaccgagcctcttcaccaatcctttcagcaatctcaaaagttctgattcctcgagcattatcatgtgtcgcctgagttcgttgttcattagtatgtactttccttatcaaagattcatttactgcacgttcttcaggtaagccactcctttcaacagatgcttcttggtgtgtctgtggtagaagcgaacttagtagctgcatcacgtcgtcttgggccttttggagcttttctaatctggctaacacaacctcatctatgttcgtcagattagtattgttgttattgttgttgttgttgttatcatttcgtaaggtctttattcggatccgactgtctggctctcgagtatcggagacagacatttggatttaaatgagagaataaattttttttttcaagtgaacgaattgaacgttttccttagtatatatataa

SEQ ID NO: 324160 - DNA, 729 bp, Cannabis indica
atattggagctgatcagaactggcagtattttcatcagcataagaactggactgaaatttagttgtgaaaataataagtaaaaatctgaaattatgtaacagttaccagctttgtgatggtagaagaaactgtctccttctactcatttattgcacttttggctctattctagcttcttcctttttatcatgaattttgttcagtcttcctattttgaccattcttccatttcttcccacgtgccctagctagcttcttgcttttctcgcttctacagtacttacatataatattatatatacatgtgtataaaggaagggatattatactatatataaatgttcaaagtggtttacttgaggaagcatcttgagctatatataaggcgtgtaaggtacttccaaagctttcagatgggaccacactatggctaatgagagcctgcaaaggaaaaaaaaactacagttggatgtggaagcactagaatgagtttgagttgatcagacttctctggcaaaagggcccttagctaatggaactataatgaagggattgttagacatttatatgtataaactgaaataaatatgtatgtgtatataaaatgcggaataaataaatatatagactatataacttaaggatcgaaatacctccagccattgattcttgagcttcaaacccacataagttttgatctacaaaggaaactggttgatgtgggtaat

SEQ ID NO: 324161 - DNA, 1376 bp, Cannabis indica
aaaaaattctaaatgaatgatttaagagaagcaagctatgtagtcagcattaaagtctatagagatagaaagcagagaatattagcactttctcaagcaacttatatcgataaggtgctcaaaagattctcaatggatgattttaagaaaggacacaattacagtccagacatggaattgctctatgcaaggatcagtgtctaaagactcctcaagagtggatgacatgagaaagtacccttatgcatcaacagtagggagcttgatgtatgcagtgttgtatatatgacctgacatatgctacgatgtagggattattagtcattacaaatctaacccaggttcagaacactagatagttgtaaagcacattctcaagtatcttcggggaatgagagatctcatgcttgtgtattatggtagagagttaaatcttactggatatactgattctgattttgaatcagagaaagatagccaaaagtcgacatttaggtcaatattcactcttggtggtggagctgtactctgaagaagcattaagcaaacccatattgtagattcaaccatgaaagatgaatatatagtagcttgcaaagcagttaaggaagcagttcaattgaagaaattctacgctgatctagaagtatttccagaagtagaaaaatcattggagctctactgtgacaacagtggagcggtgaccaactccaaggaatcaagaagccacgagggaggcaagcatgttgagaggaagtaccatctattaagaaatatagtagagagatgtgatgtgacagtctaaaaaattgcgtcgaaacataatctagcagattcattcacaaagacgctacccaacgaaatcttttatgggtcataaaactaatatgagactaagggagatgcccaattttcttttagagaaaggtgggagatgatagagtttatgttttgaaaaagcccgtaaagaaatttctaattataaataagagttgaatattttgatgtatgcatgaatattaaattattaatatttaatattgaataatttatatatataaatatcgaaaaaatttattatttatacatgaggatgtgacttgtagttgtacgaagaattaagatcacttagccatgaataaaacagtcaataacatgttaaacttcgggaatctttaattaatagttgctagtgtggtacaatgatgcttattcttcgatgcaagcaatcttaatttgaatagctgatgtagtgatacatctaagcgaatgtgctatataaaatagagattatatatgacaagaacctatatgaataaagctatctttatcaaacttactgtttactataaagacctaattcatattataatgat

SEQ ID NO: 324162 - DNA, 1299 bp, Cannabis indica
cactctcagctgaaaggagggtcaagttataagaagcaaggtaaaaacttaaacctgtctcatatgcttcttcgcttcttcgactaaatacaatatacatgtagaaattgcactataagaaagttgtgcgaaaaacttactttttaagtcacctcacaagtcaccaatgtttagatatggaactcattattgaattattgagtaatttgcggcataactctcaatatttttacttcgctactaattaacacttaaaatctaaatttgacgacaaaattccctcaaaacgttcattatgttagcaattagtcatttctatatatttttatctgttatctgcgaagttagtagtccaagtatatactgtatatacatggcacaatattattagtccatacaaataaatatttaaaaataaaataaaattaaataaattatttaaaataaaaaaattgtaaacaaaaaaacaacttttttttcttttctttcttctccactttttttctaactttttctcatttcttcattttcatatacaccatcaccaccactatccaccaccattgccaccacaactcatcatcaccgcaacaaccaactaccacttcaccttatttttcaaatgcaaatcacacacataaaaaaccaaaactcaaactaaatttaaataaaattaaatctaacaaacaaacacgcacttctatacacacaaatttcatatctacaactttgaaccagatctaagatctccactgccactacgaagaccaaccccgactatccacctatgaagtctccacacgaacccacgaacctgtcgccatccatgtcgaaccacgaactgacagacctcatccctgtctgtgtcaaccacaaacccgtccccatccccgtcgaaccacgaaccgaaaaacttcatccccgtccgcatcaaccacaaacttgtccccatccccgtcgaaccacgaacccatgaaccccatccccgtcctcatcaaccacgaacccgattctcgtcaaacttgcacaaaaaaatacaaggagagagagagagagagagagagagagagtgtgtgtgtgtgtgtgagtttttgaaatttcctttaaattgactaagtgtttgaaatgagggaaaaaaaaaggatttattaacatattattcatttaatttcagccaagaaaagaataaataaaatcaacatataatttccatttcataaagtcatataagacaaaatactaatggggcaaaaagaccattttgcccctccaccataaaatcatgcaaaacatactaaa

SEQ ID NO: 324163 - DNA, 670 bp, Cannabis indica
tcaataataaaagataaagtataagataatatgacgcgtggaaagaagacgttaatttattaaattgataatcaataattatatggtttaaaaattatttcccaaacctatgaaggaaggacaacgtatcatgctaactataaggatctgaactttataaatatatttataattatacatatatcttttcaattaagtgaaacatcaaaatcagtaggggaatcatcaattaaaaattaataaaaaaaatagttcataatattgattgtggaaagaataataattcccatcgatcgaacactattattcctgcatttttctcactttcacatcagttagagctcatattgattctccccttttgtttattaatttgactagttgtagtttattaaattttatatttttaaaaatatatagattaatttataataatatactaactcaataagtaccttaataacgtagacatcaatgttaatttggaaattagttctgatgacgtacacattaatgtttaacacgtggtaagaaagataacatctcgaaatagagtagtgttgagtcatagcatgtcaacctgggaggaatccctagccttgcgctgatgacttcgggaactccaaaatgggagttcaaacttcaataacttgaatccaactcactatat

SEQ ID NO: 324164 - DNA, 669 bp, Cannabis indica
atataaaatcaaatttccctaattcaatggggtatagggttgtacggtcgagcctaattttacaaactataaatttttttcttcagatgagttaatatacattagtttagttttttgggccctgtgtttgggtaggccctaggcacgggcgtaccttgccttagcccagggcttagcttgccttaatccaaggctgggcctgtgaaatagacaaaatctgcttattccacttttgcaaatagtttcagcttagttcatttaatttggatcacttatttatatagaaagcaagtgtcatttgatcttatatagttgttcagacatgaccgtttattacattaattacataatttaattaatacaaacgtttaaagaataaatgtaagaacaattttgtccattattgattaattgcataaacgtgtgcgacctgtcaagttgcagattgactttccatattccaaacacacgagctcatgggcttgaggtgttttattcgaaaaatcttccaagatcgactgcatttggattcaaggttggttctttttactcctctcggctattatcatttgtatttttctaaataatcacatactttctgcatttttagggtcaaaaatatataaaaatgataggatagtttttgggtaatagaattccaggcaaaaa

SEQ ID NO: 324165 - DNA, 1573 bp, Cannabis indica
acaaaagattcttcatacaaaactcaaactcaatctctctcttttctcagaacctcacactctacctctccatcactttctctctctaactctcaatctcaatttgaatcatctgatctttgtccattcgattcatctcaaatgattgagtgtggatggtacttatagccctagaattaagatcttaaagttggtggctgcaataaacaaagttgttaagttagttattatttaactaacttaaccagctctcctgtaagcaagatctccacgttagcgtaagtcttagtacatccgagaacatatacaagcttctaggatcacacaccaaaggcactcgctgaagcgacttccaaataggatagaaccagcaggagttgactatctggaactaccttctatgatgaataacaagctgtccaaaactcctttttggaggagggctagctatcttgaagactgaaccctgagtggacatgatagttatctaggaacttccttccagattcaactatcattccataggactcctttcgggctggacaaggtagctgtctgggaacaatattcgagagacacctaactttccaggaacaattttcagagaccttttcatttggagaaactataaccacaacatgtttttgactagcattattttttctttcaaggatattgactgtaaaaccacttgaattttatggtttgtaacacttaaccacacaaacccattttttggcaacaaaacctacggaactgcacttttctttaagtttttacacttctgcctaaaaacctacgcaaacccatgttggactgtctaggatataatgcttgatggataaaaaaaaataatgaattgtataaggtctttccccttctcgattctcctcaatggctagatttgttgcacttttcttctacaatgggggctaaggcagggcaatcctttatccccttacctcttcctcgtctattgaggccttttcatgattattacatgaagctgatagggttgataccattcatggtatccaatttgttagaaatgggcatttgtctcatcttttcttcgtatacgagattctagtctttctgaatgcttctatagtggatgggtccactttagtctaaattctagatgagtaaatgtctctttctagcttgcacattaatttggataagtaaaaaatctgtatgggccaaagggttagtgatgataatgtggaaattattgcaagtactcttagagttaaatttccatgccatcctacttatccttgaatacgagcctatgtaagctataagaagaaagaagtctttgccaaagtccaaagtaatatttggaatacgctttaagggtggaaagctagcctcttatctctacaataatgaaattaaacacataagagtttagaaaatcttacattggttacagcgaaatataatgactccttttgctcagatctctaacccttgttcttttctatcgcagagtatttatcaagatctaagcctagatctctttctctccttcgggttggttgtcaccgtcttactcactatgattgag

SEQ ID NO: 324166 - DNA, 1065 bp, Cannabis indica
aaaaaaaaacttatgaagaagtaggagactttatttaggattgttctcgaaaccattaataggtgatttaatcaatgaactttgaccaatgcaactttgtaaaccatatatgagtttggtgatatattttgatcatctccttcgatcccataactcattggtggggtacagtaagtgttctcttttctcctatatgcataccttcaagaccaatatcccaaccctctgacttttgctacacctaagcgaaatttgtaagaaataaaagacgaagatttcgattataagaaataaaaggcttgcaaagtttgaaacaaaaagaggcaaatatgagaattttaaacttgagaataataaaaataattaagaagaatcatcaatatatatatatatatatatgatgatgatggatgtatattaaatattcttgcacctacttgtttaataacattgtggaagataattatatgagcgtttaaaggatcaacatcaacccttttaagtgcagctgcaaaacaacatcaaaggaaatttataaaactcactcttgagtgtaggtgccctttataatttttctatttataagaatccatataagcatctagtaaataaatcttggctagtgctcatacagaaatattgtcataaaatatcatgtacatggataatggtgatgcataccattatctatttagcccaatccatcacccaatatgaaatgaagtcaatcagaaaatatcatcaaaataaacaaaggtttcaaaatatttaccttgtttcttagaatttcctattgcttccttggaacctgttgaaaataaataaataaataaattactgcttgatgtaaccccatatatctaaactaccaatttataatattcaaaccttctctataaagtcccaatatgaagttccaataaatcaaaatctcctaacattttgagtgaaaaataatctataaaagaaacacatttaatcagaagaagaagccaaaccttctctggaagcggtgcagtgctaccctcgtcgtcaccgaaccttgtcgttgttggaaattatttt

SEQ ID NO: 324167 - DNA, 1049 bp, Cannabis indica
aaccctggaagttcttctagaaatacatctaagaactcttgtaccaccttaatgtcttctagccaaattgacttaggctgagtggtatataacaccattgataaaaaccctatgcatccttcttgcaacaagtctttagctttcaacaccaagattattggaatttaagaactctaaattgaccccacatatacaaatggttcctcaccttcaacttgtgaagtcaccaacttctacttacaatcaacactagcatcgtacttggacaaaaaatccattccaagtataacatcaaaatctactaaacgaaattcaaataggttagtaatcgactccctatccttaatcctaattggcataaacgtaatctaccttttggagataactaattctccgccaggaagtagggttccaaaccctatttcataactttcataccacctacccaacttatcaattactctggctgccacataagaatgtgtggctctagaataaaacaaaacagagtaaaaagagttgttgaatgcaagctgagttgtcacaattgaagcactagcttcaacatcggccagggtaagggcaaacactgttgatggatctggctttgtctctatcctctgctattctttctttaactatgagcaatctcttttataatatccagttacaccacaatggaaacatgctagacccttacacttacccagatgatgcttttcacagctggggcgatttcgggtaagagtaacagctcttagaaccactatgtctattaccatagtcttcgttcctcggaacctctaattctcacttgagccattgggcacaaatggaactttcctcttttgatcagtggttgagctactaccacaactaccaaaactagaggtaggaggagtaattgctccactaacactttgagtaccccagcactcctaaatgcattctactatgccctcaatgttgggttttatgccctaaataatactcatttcaatataatcagatttactttttaatatagatcagaaataacatttaatgtt

SEQ ID NO: 324168 - DNA, 1155 bp, Cannabis indica
taatctggattacattgaaacagagttttatttagggcataaaacccaacacactgatggtagcttgttcttttttcaaggcttctgatgtgtgttgtgtgaggttttgacaacttttgagttggtatggggcgacttcgagtccgttagtaaattttgacaagtctgcagtgtgtttgagccccaatgttatcagttctaagaaagatatttttgtagatttgttgggtgtgaagggtgttgaatgccatgagacttatttaggcctttcttgttttgcggggcatagcaaggcatggttgtttcattccattcaggataggatttggaagaagcttaatgggtggaaatctaaattgttctctatggcggggcgtgagactctcatcaaagcagttatccaatccattcctacttattgtatgaatctttttaaactttcaaagacctttatcaaaaatattcatcgtatgtttgctcccttttggtggggtggtaatgatgtgaaaaaaaagatgcattggtgcacttggaaaaaactttgtttacataagtgttagaatagtagttgtaaaagatagagtaaattgaatttagcaatttcctatttttatttagcagtttctctttttgtctcctagctttgtatataaatattactattctatagaacacacaattctattcaccattctctacatggtatcagatccatacttagaattgtgatttaaaattcgaaatttgggctaaaaaaaaggagattagggtttgagttttgggtttttttttttggaaaccctatttggagtgcaagtttattctcattcgccagatagagggactgccaagccgctgaactataaaaccccaaattttgacgtccaaattcattatgtgtgggccctactcaccgtcaatcgccattttctaaattcccatgcgctggcgtgtgagggtacgttcgacatctttttcggtgatggtcaatgcccgtcacactgccgacccttccccgtcctccttgcaacgatctttgacgattcttctcattttgtggtttgatacttttgccttctttgtgttctggtgttcattctttggtgtttgctttcttccttttatctttcaattgtttttgctttcgagattatg

SEQ ID NO: 324169 - DNA, 1117 bp, Cannabis indica
cggcttggcaggagagggacaggaaccacacgcccttgtttggagtgggaagcacgcgcccgtctgggccgtaagatcaacgcacggacgacccagattgaggagcttgctgatgcgcgagtgggcttctattagggtccgaatctgatctttttgtaaaaaaaatatatattatttttttcactccaatttttcactttaaaatactacaataattttaattcctacaaaaaagacaataaattaaatctaaaccaaatattttcaacataaaaatatattttattaatttcatgaagatattaatttaaatttaacttattttaaactttaagcttattaaatgtatatattttcaccattaatcagatgcttagtcttaatctactgataagttaagcatctgaatacataattcactacatctttctgcataccacatcataagtaataaaattctaagtcttggtacatcttggtggtaccaggatgtaatgattagggagtggtataaatttcatataatatctctgttttaagctcaagattgcctgaaacgtaaacttgagtttggtaaagtaacatcccgttgtctaatgccaagaaatcttcagcctggccagctaagacttcttcttgagttttcattaattcggaatccacagattgggaacttttgattctttctaacaaatctaattgaaatgttaaatttatcgagttggttaaccaccaactcaatacctgacttaatcacatcaactgacaattgaggggatatcatagttgtaccaaaagcctgtccgagacctttcctacttaggcattcaccactatattgaacttcccaaaaataaagaaaatttcgcagtcataatctttaactaactccaaccattgcctctgcctcatattcaaatcattttgagtaaagaaatattaagattcttgtggttagtatagatttcatacttttctctgtagagataatgttaccaatttaggtcatgagttggataatgttgctcatatttatacaactaacaagaagcataagcaacatgttaggtcttgtgccctaaataaaactcatttcaaaataatcagatttactaat

SEQ ID NO: 324170 - DNA, 538 bp, Cannabis indica
ggtgttgggttcattgattggtgtcctttaacatttttaatcgacaactattttttttttttgataaatataattatttcaatttttagttaataattaaataactttttgctagatgctacattatttttattattagtattattattattattattataattactttgtgtgtgattagcttttttgtaaaagcatgtatcatgtttcaagtgattaggttcttagtggggtatgcacattgcacggtcacacaataatttaataattgataaatagataaacacaacaatttttctttttaattaaagaatgggatcccctcaaataataataataataaataagaatcaaaaggtagctcttttttgtatagtaaaattctaaagaatatttaatttaatttgtcatgttttttaagctttgttagctttacaaactcgaatgggattatgttttctattttttctcgttttattcatatgcatatacagtatatcatatactattaattataatactttttacattttttttt

SEQ ID NO: 324171 - DNA, 913 bp, Cannabis indica
actatgtagtcccacacttacatattctcaaaatcactacatacgacgtttcccccaagcgacgtggggttatacaactcctggtctttccttcatatatcacgaggctttgatggtcacagcttgactcatgcccttggtagtgaataaatccacacacacaatcgtcggttttaattcacctagggtttcgaacaatactcataaattgtccttctgctaacactagatcacttttcattagaagattttgtttccctaaatcaattatatgaatactccattagctactcatgtcccatattccacttgggaatatcaacaagtttaactcttattgccatttctctaatctgtctatcctgtcacatgaactaccactaaataacatacatgcacagtccattcaaatcttttgatatcccctcattgagtgtacaatgtttaatattgatatcaattgaaaaagcaactataatattgcccataaaattctaacttgagtcggccgaaggaccaatatccgagtccccttgaatcataattggcaccttggcaggagccgtacacttttcttctttaacatcagtccttcttaactgtaggtaggttcttttcagatgacccactacccacacaataacatgatcaggctctacattagcccaaatggcacttttcacatcttggacactcaggataagatcaccatctcttgttctgtaacaccctaactagcataggcgtgttaacgtgattttaaacataatgtgcagctcgttgctaatcaacgaggttattaaaaatcgtgattaattaaaattttcttatttagttaaaaacttaaagtattacatagatattattttgggatcccgtttacaaaatactttacaaaagtttgctatacata

SEQ ID NO: 324172 - DNA, 857 bp, Cannabis indica
atattattagcaataatatatgtatattcattatacataaattttatgctgatggtgtacacataaataacatagcaaacaaaaataaataatgtagtgatgaaatatatagaaatattcattttaattaataaaaaatacactaaaatttaatatgggctttttcatttttacacttcaaaataaattaaaaaaacagtatatagggtaatttccctaaaagaaatataccaaaaaaattcatcaaattaataataagaaaatagataaagttatatctaatcaaatttaaattaaaatgatatgttttgaatatttttaatttcttatattcattaactttaagagatactttcaaatattacaatgaagaaaatattaatagaaattaaaaaatatatcctcacatagagattaaaaaaatataatataaatttatcttttataattttagaattattgttactgtattctacttatagttgagtttacattcaaagtcattattatgttatcactatatctcatagttgttactacattcacaataaatttatcctatattaattataataatgaaataagagatgaagagaaagtatgagtgaagggatataatttgatgatttcaaattcaaaaagaaaatttgacatgaaaaaaaaaaaatggaagcaaaataaatagataaataatgtgtacataaaatcatcatcaagaaatatgcatttatgtaattatatcattgtacacaatcaaattatgtttgtgagtgtgtgagaaaaagattgagaatttagaagaaaaaaatagaaaaatagatagggagcgactgaagatgccaatatgtgtttaggtt

SEQ ID NO: 324173 - DNA, 568 bp, Cannabis indica
attaattaatttatatatatataattctaattaattaataataataataataattaaaaggaagagaaatgatgatgatgatggggatcatgtggatgttgatgatgaaccatttgtaaatctgttgtagtttgacacgacgtcgtatcatcattaaccaccatgctcctgtgatataattaagtgttaattatataagattataaagattaagattaagattaattaaaacgtactgattaatattattgttggtgtctcttggtctagaagcccaaagagaactaagagcccttaaacgaccatagtattctccaatcactacaaaacatctggctgcttgtctcactgttaatgttcttctcaactgatgaagtgtttgttgtctcaaattatcagcctacacaattataatcaaaattattactccattaatattaataatattgggtaagtctatatcgctgttttggtagatcttttatctgtttcggtatccaaaagaattttttactttaacttttttatgatcgtgtatgttattgttaattatttaagattatttgta

SEQ ID NO: 324174 - DNA, 631 bp, Cannabis indica
catataataataaaaatcattttctaatagctattattattcttgtgtattttgtattggtggggaagagacttttgaggcttctcattttgactgaatgcaaaaagctacgaagaggtgggaccgtggggttgggccttggggatatctagttgagtgggttgttaacttatccaaatccattcttatgagatttttttttctttctccgcctgataattgaaatcaacatctaacacagtatatatagttttacacatggctttttcatattcaacgtataaagtactaaaaaaatatcatttatttttaaaagcgacaatctttgctaaaagttaaaaaaaaaaaaaaatttaaaagatcctcgtgtggaaccatttaatatttatatatagtacaatagcagtcatggttaaggaagaaatatgatattatatgtcttattggtaaaaatgctagacaagagatctcttctactaaaagtcacttttggagttgtataatagatatcaattcttgcttatatatataaaatcccttaaagaaaatatttattaatattttactatgtttatcatattttcttagctagttgaaaagaaagaaaaaacttctacaaaaaaaaaaaaaa

SEQ ID NO: 324175 - DNA, 596 bp, Cannabis indica
attatacaaaacatatcaacatatacattataaaaaaattacaatctatcaaattgcttgttacattttttaaaaaattacaatctttcttcttcttctaaaaaccctaatctctatctttctctctcttagctatccctctccactttgcctccttctcttaaggttcgtcgctccgatgagaacattagggacgaagctcggtgctattgtaccatgtctaacaatttctctgccaagtatgtgcccttcaacgttggtgttgacctcgcttttagccaacgacagtgagtcttgattgtaagcgacaagtagtatgatatatattatataatgaaataaataaagacacaagagttttatagaggttcgaccccgagcagttcggtaatagcgtactcttcttagtttgtattgatttaagaacaaagaatataatgattccttttcttagagctcttacaataatatctctgaatatgaattgttagataagtttctcgacccctttgcccaatgagaatagatcactatttatagggctttaagtttggagggaagagatcactttgctatatcatttatacggagctaag

SEQ ID NO: 324176 - DNA, 789 bp, Cannabis indica
agagcaaatgagattcgaaagaaatttcatactactactaaaagagtcaaagccaaaagattattaccttttccatttgactcatattgaatatacaatcattgtaacaaaagcatgttaattctggatctgattcaactacaaaacaacacctacttgtatccagaagattaaatcttttcatgtgttgacttgaaattttaattagacaatctgaaactgtcacaagatgtctcaaagtcaaagtctcaagaagtggaatatcagaaataagagcttctaatttggactggtcatatgtagctgaatctactaatgagagatttttaatttcttgaaagaagagatgtttatactgtccaagaaagcaccatatatagtaccaaagattcaacattactggcttcaagatgaaatgtttcatccttgtgcctctgaaatccaagctcaacgaacttgatggttgaacttatttgcaatcgaaaatcatcatcgtaaaataccttattatttgttgaataaggtagagttggatacttgttgttcatttagttttccatctttaaaaacttggtcattggtatggtttaaggtttcacattgccacaaattaaacaaataataaacagcttccaatacgagctgctattctgtggtgctttaggaatatgtttaatataataaaaattggattgattaatcaaatgaagataattataggaatatgaatgaaccacagaaacacatgtagacttaaaaaaaaaagaaaggttaaagctcagaagcact

SEQ ID NO: 324177 - DNA, 764 bp, Cannabis indica
caactgtataacagggcatatcacaattttattgaaatggtactgttttgattattaaatgccaacttaaattattagactacgtattaaataattattatttattttattttttaataaaaaatatacaaatttgaatggaaaaggatttctaacaaaattttaaaataaagtatttttgtggccacttaatctattaagattatatataacaattacaaatattatgagatctcaccaatatcctctgttatttcagatttttttttctttatttatttttgtgattggattaataagaataaaaatgagaggagagtgaattcgtgtgtgtccttttcgaatttaatcaaggagttttctttctttcaaaaatttgtacactctaaaagaaatcattcaaaaagtattctcatataaaagtttttaagttttttttgggaaatttatggtaaaagtttcataatatagtttcacaaaaattagtgttttatgtaattattttaggagtttttacaaaaatactgaattttgggtaagagtttataattttactgtcacacagatttttttataaaaatactgtttttccaaaacaacagtaaaacaataaaatcgaataattaacacaacaatggaacaactaaaaaataaccctggaacaactatgaaaacttaacacaatacacaatatttaaaaaaaaaaacacactatttttgaaaaaaattcagctccactccacaatacaaaagtgaaaaaatta

SEQ ID NO: 324178 - DNA, 656 bp, Cannabis indica
tcttttatggaaagagtgaaaacgagtttgctggagttttctgtagaagtggtgaagaagaaatggagggaaaaaaatcatatatttacaacaaaaacggtaattgtgtatttaaattcataagaccatataaattaataaaaaaaaataagttttaaatgtataaatcaaaaaaaaaattatgcatttaaaattttattttattttatttattttattcttattcttatttttttttttaattccttctaactaaacgctactaactaaacgctacctaaagttctataattagttatgtgagaaattttaacaatgcaattaaaatcaaaatttatatttatgtacatatatttaataatttatatatatatttttttacatattcttctttttataggttttatttttttaaaagaaaacattactcacatttgcaacaacattaaaataacgttattttgaagaaaaaaatgaaaaaccacactttgtatatttgaaaaagaaaaaaaagttaaaatttgtaaaaaatctagaaaagaaactatagattcgtaaaagtataattttttggggcttttttatttttacacttcaaatcttttttttttttttgtatttttacgaaattccacacagaaacttctatagcaact

SEQ ID NO: 324179 - DNA, 1395 bp, Cannabis indica
aattttattaattatatttaggaaaaaatttttaagatattataagcatgcaatttcaaattttccatatagaaaataggttgatgaaatgtatatgggaatatgtgtgtttgatgatagataagattttttttttatttgagagatatggaatatatagaaaaatagaaaaaggaaaagtcaatacattaaaaataattaaaatatcatatcaattaattaaaataatttgaatttatttttggtatgtaattacaaagtgtaattacacccaattctcatgggggtatgagaattggagagagtaattgaggtctcccaattacctctaattacaccgttactatgtaattacgtgaccatacaaacacgtcaaactgtgtaattactttcaattacatccaattccaattctcaggtagctttccaaatgcgcccttagtattgtatcattgtgttttcattaagagctctgcaattgatgaagagctttgtgagatccactttgaaatcagtcgagttgtgtacggatcaattatataatactcaaaaaaaaaattgaattcatatcatgtttgagctttgctgaccatcgaagttactaccagatttctcttcttaacccacttctctagaggtcaataattgcattatggccctgttgaatctttgaaaagggagatggataatcttgacgaagctttagacattggtgttgatataggtgtcatttgagatggtagcaaaacactgccaaggttgaattgcagtttgtcgaaggtagaggaatagctctttgctcgaatggagatttgggatattgagaatctcgctacctctttgattggggtaatatgatcatcttgcgagtacgtaagaagaaggttatgtagtggagtatttgtggttcgtaaagtggtgctattagagattgtttttggtatggaaactgattactctaatagattggaggtaggatttttgtttggggacgacaaattgagttcgacgacaattgatgggagtgggtgactatcggaggatgagcggagtcttggtcacacaagattgtaaaaatacttggagaaattaagttgatgaccatccatcctttctttgtattcactgcagaaagataaaatgtatgtgcatttcttagtgttgcgaaattaggggtgagtaacggtcggtttaaaaaaaaaactaaattcggtttttggttttcatggttataatttgaaaaccgactgaccattatacaaatataaaaaaaattgatcattttaatctacggtttcgttggtttaaatcgaccaaactgaacttcaattttttttttttaaaaaatatgttttaaatttttataattatttgaaaactaaaaaaattagagta

SEQ ID NO: 324180 - DNA, 941 bp, Cannabis indica
ggaaaataagtttatacccttcttaataattagttctaaaaattaagtgcgaataattattaattacctcatcaattttactaagaaatgagttggacgacttaaaaatttgatagatggtacccttcgatgatctccaaataaggaattgcgtagtagtaattccgaaggagaaacattattaggatcatgtttagagatacacaatctcatgaacacatccaaatcacaaacaccacgctcgagagcaatgtagaagaaattagagtctttttccacaccataatacctcacaatatttggatgttggtttttcgatttttcgagagccttaatctctttatcaactattttgtagtattccaattgaagccttttcacggcaacacttgaaccgtcgaataaaccctcaaatacaatgcttccatagctcccttgaccattattttatctggaaatatgttaattctcactattactcttggcttattcaaattagtattagtatctgaataatcactttccatatcctgagttttaagaagaagaagaaaaaaataataattattagattaaagaaagacaaatataattaagtcataattaaactacttaatattagatatatatttatatataaataagattataattacctctgaattatgtaattgatcatcatccatgataaaattcatcgtatatatatatatatatcaaataattattatgcagccaatttaggaactagaaatatttatatatgtttatacatagaagaaagatgtttgatcgacaatgcttaagaacgtgttaagatcattcatatgactttttttttgaccatatatatataaataatccttaataaatgctaaaatttattgatgattcaaagaatagtattattattaaaaaaatatattttgtaattttttttt

SEQ ID NO: 324181 - DNA, 1145 bp, Cannabis indica
gataactaatcagattgtaaagagttttatttagggcataaaacccaacacccgacataactaatcagatctcgtatgtcgaaaagcatcaagtatctttcgacaatgttcgtcttgtacaaggagctaggcttgcctcaacctactccatacgagatcagtcactactttgatttgaggtctgtgccgaagcagaacagaaccggatatttttattttagccaggttggtcaccaatagttgggtgacactaattgcacaaccatgtcgaaggttggtgggtacactaagaagtactttatcgcctatggcctccgtaggattgggcgctacgaattttggcctgtaccattcttcagacgctctatccctactttgcagataagggatagggaaaatcacatcctgtctctctcgacagagcagagaaacataattctgttgactagtgtggacgatttttagaagtaggcttatatcctcctgctcgcgaagttgcaggagtgccagctgcagatggggcctaccctggagatgggtaagctcttgactagggtgatgatgaggtacctttatctcgcattgtatggaatctggagaagaaggaaagggctctccgccagtgtttggccagcaaaggaccagtaggtgatgattctctcggtatcgggcctagaggccaggctttcgagagacttacccacatcgtgcctacatctaagggcaaggacaaggctgttaccaaggaattagatagttcctcttctgattacaatggtatttaatagctaataacaccatgcttttgtcttgtactgaatgtttataatttctttttgacttgcaaatatgtcttccaggttgagaggtcttactgggggaccttcagatgaggccgcgtgacgagtgagggccaaggtggccaagacttcccgtggtggagatgctgccaggtcatcactacctccccctcctccagggcctgcaccaacttggtaccctttgatacggcttgcaagccagggtactcagaggcccacagttccagccctgaaaatatatgggcccaagacgaattaaattttggggccctaaaaaatatataaaaaaattaaaagaagagtgttatgggatttgaacccatg

SEQ ID NO: 324182 - DNA, 1020 bp, Cannabis indica
catcaaaactctcgaactcatggttggcatgacactgctttatctttgcttgcacaatagagcacccgtaaaacaaaacccaacaagaaagcataatcaaactcaaatataacatatagcatacatatcacacttaatatgccattgcgtaaataaatgtgacactgtagtaatataacacgccactgcgcttataatgatgtcattatatcctatttctatactgcatagacactacatgttatgctcacacaactatttattacataagaccttctcatgatttttcttgattttgattattgagtctcatctagttatgccttgatcgcataactcttaacaaataattaattagctatgccttactcgcataaccttgtacatatactcaattaattcatatattgcatgcataaatatagaaactttagggtaataatcccaactcatatttctaactaagtattcacgtaacatacaagtacatcaccgcgctatactctatgtgcaaggttcgctttcgtacctgaattctaaagtatgaggacaatttttagtccacaggtgatctggagcaagtaccgatattcttagtcaaaattcctagtttacataatataggattaatcccaaaattacatttaacaaatgttcacatttaggactccaactctataccaagcaatagagctcaaaacgaattttctaacggtataaagaacgttcgtaataaagtttggagtcaaaaattatacccaatattacatgagaaaaattgaattgtcgcctcggagttgtaaatagtaattttgtaaagaaaatatgtatttttgtaaagtgataaaaaaattagatatagctgtaaattttcctaaaaagagaaaattattgaaaacttgattgtacattgtctagggcttaagaagaaattattgaaaagtaaaaattacccaaattatgggattttttttaccatttacttttttatggtatttttaaataaagctttgtgtatat

SEQ ID NO: 324183 - DNA, 1127 bp, Cannabis indica
atactatacttgatatctatgctctttttttttgttctttttaataaattacccaatcattcaattgcaggatttatgcgcatcgatgataataagctgtaaatatctttttaaattagcaaaaggtcgcaaaaattgtataaatattacagaatttagttgacaatactatttgccttaattttgaagaatttcgtagttgttcataatattataaaaattattttgaaagattttatggttatttttaatttttttcactgagtgagcagcaaaggcttaatagatataactataggttaaatattcaattgaaaaaacattcaaaaacatgtcgtaaattgaaaagaataaataaaaaaaatagtaaaaataaaaataaaagttgtaaaaataattattcaattaatctttctacatgattacttaaaattaattttaatttttattacaaaatgcaaattatacacaatgttaatataaaatctagcatttctttcaaaatataaatttatatatttatatatacttaagccacttgtcatatgaggcgtgtggaagtttttcttattcttctgaattttgttactttcaaagtttctttaacattactaattattgtgcattttacttaaatacattacactacatgataactaatttatactttcaaaaatcatcaatatctatggttaaaaagatgtccctatagtataaggacaaaagtagagtatgtactatagaaattttctatatatatattaatagttatatctatttatataaggtagtgcagggactagagacataactaatatattttcattgaaggtgctacaattattatagtcataacttgttttaattaaagaatgttacaataattttttctcgataaaaaatttaaataactaaaaaaattgagagttctttcccttaatatatgttggcttaacgagtaggggatctagtttttaaagtattattacctagctattaaagttatatatatatgagcaagactatagtagtaaaattattttttaaaaataaataccaatataaaaataatttaaattaattttataaaaaaataataataattcaaaataaaaattaataaattt

SEQ ID NO: 324184 - DNA, 1145 bp, Cannabis indica
aagcctttagtgatagagtaccatgcccacccatagctagtcaagtactcaatcatagtgcggaagacggtggttaaccaaactgaaggagagaagatacaagttcaaatcttgataatgctctgccacagaaaggaatcaagggctagaaatttgaacggcaggattccgctgctatcaatgtaaggttttctaaactttatatgtatttatttcatcatattcggaaatttatatttagggtgttagattatagattataatcaaacatacatgttagtaaatatagatcctcgtaaaataagttccaacactcttagctcgatcccttaaggagaatgggaataaccttaatctgatggcatcatcactaactccaattatatcagatgtctggcacatctcctcgaagttaggaagatgcatgtttgggtcttctgatagtactcccccaagttggactgtagattgaaccatctgcagtatggacgggttgatctcaaaattattggcttcaatggcaagtggccttatacaggatctagcccctgtcatatttggtagcatataatccctcaagctacagttaggtggattgcgaccattattgccattgttgtcgttattggcgttgtcaaccatgactacttcttgttcaaccccaactacacttctttctagcctcttgtttcttatgtttcttctataagtcttctcaatttcagaatcaataggcactattacattttgtccttgacgccgcataaaccaccaataccttaaatagaataaaaataattgaaaaaaaactagttaacaagaagcagaaagaataactaaaatagaatttaatctaattattgtaatatcaatttttattcaattcttcgatatcggtgccaaaaacttgttgcttaaaattatagtctgcgcaagtgtacgtaatctgttgtagttaaatactcacacatgtgaggtcgatccacaggaaattgaaattgaggactacttaattagatttgtgtttatatttggttaaattaaaaacaaggttgaacaatttttaacagaaaaatttaaaaaaaaaaaaaagaaacaataatactgtagttgactatggatgaatgattaggaatatgaatcct

SEQ ID NO: 324185 - DNA, 819 bp, Cannabis indica
ttcatcgagattgaaaagagctttcaaattttgttgaagcacgtaaaaagcctccagaagacactggccccaggattgttggggaaggacttttcatagatgaatgggtaatgcattgaatatatatcgtctttcttcattgctgtgtatttgtagatttaaccctcatcatatgcatagtctaatttttgctcaatattggctatatataggagtcatttttgtaatttcattttgattaattcttatttcaatttattcaaagttttaatatcattgcagaacacattaatctcttaaaaaatatttcaagtaaacaaaaagaaatttattcttgaacttgatcgatctgtcattttgacaactgtgtatgagattttgtaagaagagagatattcatagagattgaaagagaagagggtcacactttggggacacagagcatcgccttccttctctctctctgcactttcctttcctcttcctaaaaccctaatcctgcttcctttcttttctctctcaattcggttccattttcgatcttctgtcactgagaatctctgctctaatggcgggaagtcgtgatacttcatctatcaacaactcgcctcctccgccatttttgagcaaaacttacgacatggtggacgactcgtccacgaattcaatcgtctcctggagcagtcaaaacaacagctttgtcgtctggaacgagcctcagttcgccagggatctattgcccaagtatttcaagcacaataacttctcaagcttcgtcaggcagttgaatacttatatgacagctttcaagtaaggatc

SEQ ID NO: 324186 - DNA, 1977 bp, Cannabis indica
attaagtcctccatatgcggtctatgtttcccggaagacgagtccagcaagaatctcgaatctaatcgaaacacaattggccctcctacctacaaacacaaagttgggattgtcattttcaccaaacaaggtgtacaaactaaactgcaaggtgtaaaaaaaaaaaaagcacctgctgttgaaaggtcaaattgagcctaggatgggaatttggatcttctgccattttagaacttttggaaccgttgagaatccttttggcaaaagatgaagcggaagacatatccaaccgagcatctaccctggttagatcaccataaaactttctaaaattcccatgctggatagtatagcaaactgaaccaaataaatcagcactcagtgggcttctcttcttagtacttgcagaaatgccctcatattcttttgattcagcagacattgagttcgcccggtcgccaaaccaggcagcacaggtaccacctaagatgaaagttcaacaatgatattcaaacgaaaaaactttcttaaaagagaatcaccagtaattatattgatacttaagagaattaatgatcaaatcaagcacttttaaacacttccagcaaataagaaagagcaaagctagaggttatactcgacgttaattcatcattttaaatttaacgtctctaatttaaaaccgaatgtgaaactttgaattcattcggctcctttatgaaaaatgaataaatttccaaatgtaagatatgaatggagaaaaaaaaagcattttaaagatttctcccaatctccttaaacaaagacaaggaaattttgtcataaatatctaacattttgctctcaaccgagtcaccacttaagattcggtctctagcattttatttcctaataatagaagtaataaaaaagttaaaagtataagaatttggaaaagaaaataatccattagttataaaattctaaaattctccttgaaaaacagaaataaaataatgaaaagacagttgccaactttatcaaggataatcaaaatttcaatatgaatgaaccacacaaatgagggatagtgacagtaagtacctataattccagatattgcagaatggggttcgctaagacgcacatcatatgaaggccgccaaaacagccccctgtcagttttctcaattgtatcctcccgtgtctgaaccttcctccagaagtccctgcttttctcataagaaaaagcagcctttgcacataatccaggcaaaagagatgtaggagcatcgacaatttggccatttagtgcatcaggatgaccactgtttttatgcaatccaaggcgataacgaaatccagagtcagaaacaagggacaacagatccaaggatattgactctggcacatcccaatattgtcctttatgatcaataaacagctgaggccatgcagcctcaaaagtgatatcatggctcgttagctgcaaagacattgcagatgaagataaactaattagacttgaaacaaaagaactaataaaaatgtaagcagcatgcatattgagaaggcttgacatccaaagataaaagtcacttgtcaaactagagttttaatgtttaaaagtggaatgtgtacagacagaagaacctgacatttttaagtaggaaacttgtaggctgaaatgattgaattgaagtatgcatctaacacattgtcaagcataaattggtcttaattcacttaagatgtatgaatataagatagcgaaacatgtgggccatccatcccttcaaaatagggtaaataccattttagaccctgtgttttgtaaaaattactaattgggccttctgttttgttaaatgacaaaatgaactctgtattttccaaaatggtacaaataggaccctgaactgattttttgtcaaaataaaattcaataataattcgatctaaatgtgttatgacaaaactgtttacattttttgtatc

SEQ ID NO: 324187 - DNA, 1435 bp, Cannabis indica
aaagctactcaacacagaagaatgaagatcttgcttcatcggttttaactatacataggtattatctcatattttatcttcttattgtttctgacatttcattcatgatataattacaaatttataaatacagtcaatatcattttttttttgttttgataaactttatttacacattttaatttattcaattatcaaaactctaagtagttaaagcttgatagctatattaataaatgtgtaatataataaattcacaaatcactcccacattaataataggaattatttcacaaaaatataaaaacaacaaaaaaattacaaaaatatacggtttcacggaattttaaatatttgtacgatttttttgattttatttacagacaatacggtctttttatattgtaaatgttgtaatcttgttaatttattgttgattttttgttatctgtattttcattttacttttatgtagttttcttattgattttatgctgttttcgtgttattttttggaaaatcataaaaatgtaagaaaacattctttaaacgtaaaaatgtaattattttacaaaaaatagtgtcttatgtaattattccatatcatcgtatcataatattggaaattagatacctatttgcattttctgagtttttttttcttcaaaacattctaccctgtcatatttgataattcatttttatgttcatttatctttactgatgagtttctttttatttaatcattttttattttagtttatattatataatattttaaattaattttctatttttaaatgaattaaaataatttataaaattcaaaaaaaaaaatagtttataaaatatttatttggtagaccaataagagaacaatatttatttttttaatcaacggcagctaaactatcttaactattattttacttgtatttagctctctaagctcaaattttagtagtaaaaccctccaaattattgaatcgttaacaaatttaaaatatcattaatttatctcaattaattgccaaaaactctatttgaaatttgaaattattatatttctaatcattaattaaaaacctataagtaaatccttcacaaatgttctttttttgtcttatccatgtaaaaattttactatatttgacacaaaaaataattttataataaatttgcattaatttttaacattatactctagtacaaaattacaaaactttatgtaaaattcaatatctaattaatgtttttattaaaactatgaaatttaataactttattattaatttaataagcaaaacaacaataataataataaataataatatatatacttcataacggagtgttatagttaaatctatatatttataaaaaaatgcacaaaacaagtttaagtggtatcttagattttttttatttttatttt

SEQ ID NO: 324188 - DNA, 714 bp, Cannabis indica
tttggtagactttttaggggctgactgtgttgttgagacatctagttccaatagccagtgtttcaaccttcccactagtctttaccatctctcaatcgatccagggatagtttcttgattttaccctttcatcctcggagctgtaatgcttcttcccactagttaatctcttacttagaaaaaaccacccatttagagttagcctggagatggtttcctttcgcaaaaagggagccttcgcaatttcacacatcttccttaggcttttgattctttcacaaggttgagtcccaggagccatgcccatgactgctttaaacttttaggaattttcggtccttgttagtttaacattttagctaattatgcagcccgatggactaaacttataggaagtccacagagatttataagaaggaattcgggcatattttttttcttcaagaaatttggccgaatacccatcttatctacagattcatacttaagtttagcctttgaggaaagaattcaagtgcgtttccctcgtaagacttagttgaaaacgttttgtgcttttagttgcatgtgtacactcatactaataactttggcaaatggacataagaagttactgttgggctttatgccctaaataaaactctatttcaatgtaatctttaccattcaattatcaataaagaaacagaattatcttcattacttatttagtat

SEQ ID NO: 324189 - DNA, 745 bp, Cannabis indica
tgagacaaactatgaataatgaggagaatgagtgaaatttaattagtaaaatacctttagaaaaacctattttgagacaaaatttatgtcccctccttgttcctttggttttcttcatcatattttaaaacttgataatataccttggccttgctgggatcaatgccgaacattagtatctctaacttattttactattatatgtaacaagaaatataatttaattctacatatcatttttttaatgaacttagatactaaaactctgattccacaacaaggaacctagcttactcctaattcaacatagataccatatagtatatattttaacagatgtcttgatagataccccataaaccttgagatgcttttcacattgatagatactctttggcacttgccatacacattacagagtaagaaaagtcatttaatgatcattttattttattttttaaactaagattcccccttatcctcaatatttgagaactatataggtacccaaaaaagaactcggaatgaccattttaggtagggtatttataaaatactcaatctaattcgtaaagtgcggatatttatgcttgtactgattatattgaatcaaaaattcaaaatccatacttgtacgaattgaattgacatataaaaattactaatcaaatctaattcacatatatttatatactagatagatattacgtgccaagtcacgtatgctaattttattttaggtttt

SEQ ID NO: 324190 - DNA, 828 bp, Cannabis indica
ctttgaggaacaactgaacccgaaacctctccattgatctattagaaaagagaagttgttggtatgaagacatgtcataatgagagagatccaacgaatattgaagcccattttacccataatagccacaagaaaaatccattcaactcggtcaaaagctttactcatgtcaagttttagtgtagcataagctttgttgcctctattcctatgtttcaaactatgaaccagttcaaaagcaagaagaacattatccgtgatcaatctattggggagaaatgcactttgtgtttcaaaaatgacggttggaagaacctctttaaagcgaatgaacaacaacttagagataagcttatagatgacattgcaaagactaattggacagaagtctttcagtgtcttcagcttctttacttttgggatcaacgtgactaaagtcttattaaaagctgctgaactgctacctttattcaatacatttaaagtaactttggtgactaactccccaacaatgtcccagttatgatgataaaatattgccgacattccatctataccaggactttcatctgaccccgttgtcttcaatgttgttaacacttttaaggtagtaaaatccttgcataagaactcattttgctcggttgtaatagttgttggtatggtagataagacatgggacaaagcccaatgatcttcttcagaagctaagaataggtttagaaaataagaagaaaccatcactgtgatcccatctttggaggttattatagtctcatctaggggtgtttataaaatagccgatccaatccaatccgcacgatccaa

SEQ ID NO: 324191 - DNA, 690 bp, Cannabis indica
ttcatctattattaagtttcccctcctcgaaaaactacatggttcttgatttaaacgtaaacaaaatcatacaatttaaaatacagaatttctaaaatgaaagatggataaggtctattgaaatagagtataaatttatgaaaactaaaccaataatgagtgtgtctcacacgttaaacaatattcaaatacatactcattatgacaatattatctacacatgtatttaaaaatggacttttgactttaggcatatcactctatgacataaaattttgcgattggaaaagaatatatataataatataaacaagttgtaataaacattctgtctgagaatattgttgatacaacaaacaacattgtttgacttgaattgagttgagaacctagtattacaatggatagagggccattaacaatagttctatatatatgaacttcaatccataactgtataagtgactggcactgtgtataagaactaagctaattaagggtcgtggtaatgctaaacgacctcgtgaaagtaagccaaattaaccatgggatcaggtccggccctgaaaatatatgggcccaagacaaattaaattttagggcactcaaaaatatattaaaaaaaattaaaagaagagtgttatgggatttgaactcatgaccttaaactttatgccatccacctcaacc

SEQ ID NO: 324192 - DNA, 1128 bp, Cannabis indica
ctcagatcttggtgatactctgccacagaaaggatacaagggtctggtaaaataattctaacaggtggaggttctcttatgatggtggccgactggttgtcatctaagtaactccattttcttggagatgttgcgaatgtctacgcatggtggttggttaatattcagggaaagacatcgatatggatttgtctttaccacatacagtgccaagctgttaacagtaagaactcgtcaactaaattttagttaaaaaaataaaatgtaaaaggctaaagatgaaaagcttaagagaagttaagagcatcgatgttgtaaattcatgttgtattgaatatctaagctctcttacaaatggtggttttccaaccctctcttcaatgacagagaatggtatttataggaagctataatggctcgaaaatacaagtggtcctaaaagttagaggacaaaactctatctgtactatgaatatcagcacgttagaagggtagtggagaagtggtggtcgtgtgttattttatatcccaagtgggacaagtggtggacaagtggtgtctccacttcttttacttgtcgtactcattgtatgttcgcctccctttcaaaagcgtgcttggcttgacagacttgtctcttatcgtgtattcctttgacttttccccctatagctcaggctcacaatgtgggaataccattagaaaatttagttaagcgttaggaccatgagacacgaaccttgtttcttagacttagtaggattttctccctcaatgaatttccttctcaatccttttggtggttactctattgtaacaaacattctaaatgtcattgctcttttgtgtggagtaagtggtattaggtggtgactagtgaagtgagtgggtaagggaacctgggagaatgagagtggggaggtagagactgaggatggggagagagagtgaggatggggggagagagaaagcagggagagagagggaggacggggagagggagagggagagagagagatggaaagaacagggagagagagtgagatgggtagagggagatggatagagaaagagagggaaagaacaaggagagagagtgagatgggggagagagagaatgaggatgag

SEQ ID NO: 324193 - DNA, 674 bp, Cannabis indica
tagtgaagtatgttctatgaataaatgtagtgtgctcaaatgggtggaatatatatacatgttagaggagtctgaatatcttgaatatttattcgtagtgaaatagattctgcaaaaacatgtactgctaggtggaaattacttttttttttattgtttaggatttttatatgttcttaattgtatgcttaattttttttgggatcatcaaatttatagttttcatgctagcaaaaattaagtagaattaggataaagtttttgatttaagttattttaaacttacttgttagattttgtttaaaatttgcagtatggataaatcgtagtgttggaacttgttttatcaggatcttaatttactaacaagtttgtttgattatgtatattgtaatataacatcctaaaatatgaaattcataaaatgataaataaacacataaaaggaacaaaatccttacattggttgtaataaaaattagtgactccttccagtcaataacttaaactcttgattcctaaattgtagcaaggtattaccaagtgatgaacctagatagctttccttaacacgaactgtaaagactcacattttaaaaagttaaaagaaacaaaaaaatatataacaataactaagaaaccccattcgtctcccccccccctctctctctctc

SEQ ID NO: 324194 - DNA, 610 bp, Cannabis indica
ttaattccagggtattacaatatcattctaattctgtaacacgttacaaacattagattcatacaaccccgctattaattgaccactttttgaggtcaacaagctagaagttagaaggtctttggacaacgagtagttttgatccttggaaaaatttgcagcatgagggtcaaatttatttttcttcagagttgttttatgcttcaaggctccatcactttcgtttttgctttgtttcttaccctttttcattggaagattggttgggctccaaaaaagttaagaaaaattgaccatttgtacaaaaaatcaatatgtgagagataagaaaactagagataaaattggtaaggcacataaagggaaaaccgataagtctcatctaaaatactatctgaaaagttagttgaaggtggataaactcaagtatctacgtactctctagagccaattttctcacaaatatataaaatgttaattgggctaagatcccaagtttttgcccagtacacattactgctatattggtctgagttaccataatatgagttgttgctattaacttgaatgtggaatttaggataccaattatcaaacctatgggtgataa

SEQ ID NO: 324195 - DNA, 1564 bp, Cannabis indica
cttattgctctatgtagatgatatgctcatcatgagcaaggataaatctgtgatcaaaattatcaaagccaagcttaaaagagtttgagatgaaggagcttggactatttaaaaagatacttggtattgaggtttcaaggaactggaaggaaaggaccattagcttgaagcagtttaggtacatcaagaaggttatgcaaaagttcaacatggaagatgtaaagagtacatccattccgttagggtgacagtttattttttcggaggaaaaatgccctaacagtgcaaagtagaaagaggaaatgaaggatgtaccctatgctatggtcttagaatgtttaatgtatgtgatggtgagcactagaccggatatggatcatgctctaagcatcctaagtcggttcatgttcgatccgggtattaaacattagaaggccctcaaatggttactaaggtacttgaagggcacttgagattatggtctgacctacgagaaaagaaatggagaattggagttaaaaggatttgtggatgctgactatgcctcaaatagagataccaaaaaataatcacttcttacgttttcttgacaaaccagagttgtataagttggaaggcccaattacagtctgtgattgctctttccaccacataagcagaattcatggcaactatgaaagcattcaaggaagctttatggcttttgggagttctttatgaattaaaagaaattaaagggggagtaattgtgtattcagattgtcagtcacccatccatttttgtaagaacccaattcatcatgaaaagagtaaatatatagatataggactctactggagtagagaaaagatagaagaagggcttgttgatttagagaaggtcggaacataagataatcttgctaatgttaggactaagttcttaatcgtaaacaagttcaagcattgcttgaacttgatcaatctcaaaagttagtatactaagattactagaacaccaaccatgatggatgcattctttcttcttcatcatcatcatactcttaatttgaagtaactaggtgaaatttgtggtattgtttctccaaatgaaaaggactccaaaggtttcttattattcctgaaaagttgtggattcgcggaagctgaacctagaaggctttcttgtccttccgagaaagatctttaggaaagctatctctcctttggaaaggagttttggattgctagttgttcctcctagaagatagtcctggatagtcaactccaattggctatttcctatctaggaaggtccttcagcaagtgccttgaaccgagactctgaaagctctcatactcgctcccagatgcactcttacttcttacatggagacctcactcaaaagagagttggttaagttatttattccctaactaacttaacaacctcgattcctacagccaccgcctttaggatcttgatcctaagcctatatataccaccctcacttatcatttcaataagataatcagattgagacggaaaaataaaaagagaaaagattgagaggtagagaaagag

SEQ ID NO: 324196 - DNA, 1322 bp, Cannabis indica
ttattattattatttgaaagaattataattagtgaaagtggttagatattgcttgtctttgtatatagacagcttaatttgcacaagttgcactatattaattatgtacaaaataattttccattagatttagaatgttggaataaaagttttcaaattagttatttttgctttaattttttaaatcttttgtagcaagtcatgatgaattgtgcttagaactccatcaaagattacgggtgtgattgaccaattaaataaaattatacagcaaaaataattaaaagtaaataattattatacgtggattaaggatggtttaaattttattaattttactatttttaattttaagaatattattattatttggcacttaatatttattaagatatatatatataccttaataccagatgaggtggttaatagaaattgtggtatagttcttccatatgtaaaggttttcaaaagttgttcttgttatggaaagtcatctggaagggcattcgtgaaagtctaacttgtccatttataataagtgatctcttggaatgatagatatcgttcggaagggagtttccgaaagtttattttgtccacaccggaaggagtcttcaggaaagctagtcttccttcggaaaggagttccaaatggttagctgttatctcttggaagagagtcacgaatagtcgactccagctgtcactattcctatacgggaagtcccttcaatgttcactttggttcatagtcctggaagcgtaccttttatctggaagtacttttgcttgtgccaacgtgaagatctttacgaagagtttgttaagtcgtaactaacttaacaacttagcatttgtagacaccgactttgaaatccatatttcttatctataaatactaccaacacttctttaaaaaaaaattatatgtaacatatgtgtaaaacttatatgatattttgtattttgctgcacattaccaattttccattaaaaaaattaggaggacgtttggtaacaattttgttttttaattttaaaagcagaaaacaaaagtaaaatttgtgtttttaaaaaataaaaatgtgttctataaccacttttgtttttcaattttaaaaacagaaaataaaagtgtgctctataactttcaatttcatttttattttttaattttatttaagtcaggtcaaggtgtgagtctggggccggggccgtggtccgagttcgtgactggggccgaggccagagtccaggtctcaaggtccagttagggtcgaaatcttaaatattgattagaaaaaaactgcttaaaaaaa

SEQ ID NO: 324197 - DNA, 618 bp, Cannabis indica
atgtagtcaggtgacatctcagaaaagcaaaactgaaaaagctctgggtcaaaactttggcccttgaatttgatggaaaaagcttcaaagggtagggaggcgactgatgaagaacaaaacataatcaaataagatgtcagggttagataacatattgcatgttactgtgacttgtcaaatttttttgccatgtaggctttatgacattattaattgtaaaacaaaaaattaatgtagaacctacaaaaatttggtgggaaatttggctccaaaaattttaattaaattttgtccactatgtttggaggtaaaactatttacatagaaatttatcagtaggaatcataaataactcagtgtgataataattcccaatatattttacctacaaatagtctgaattctaaaatattcgtatgtaaggtatatatttacttacaaatatatatatttgtagagaaaaaatgtttagataaagaacatatttcttgtagtgattgttttggctgagattgatttagtaaaaccaatcttttatttcatttattcaaaaaaatagaatttctttttaaaaaaagatagcatctctctctttaaactctctctccctctctctct

SEQ ID NO: 324198 - DNA, 608 bp, Cannabis indica
aaataattaagatgcaatttcatattgattttgatacatgaaggtgttatatacaatctgaacaagagtccaagactctaacaaattaactaaaagcctacaagctcgaacagtaaaccaactaaaaatatagttataactaactaaatatattgctaactactaaccgctcttaataattcccatgcatcttcaattctaagtttgtctcaaaaaacagagaacgtgctactagatatttccttttgtaaaaaccatcaactattgatcaatagtaggcacatgcttgacttcaaccaactattggatgactttctctcaaacaaaatacaaattcatctcaatgtgcttattgctccttgcatggagattcaaattcatagtgagcaacactatgcacaaattgccacacgagatggggttggggggggggggggggggggcttggaacatagatgtgtaattcagagaacaaaggcctaagccatgtaatttatgctacaacatttgatagattgggaaatttagcctatgtacttggcctggaccactactacaatgtaagcctttagcttccattttttcaacccaatttataaaaagggaag

SEQ ID NO: 324199 - DNA, 1098 bp, Cannabis indica
aaaatcttctaagttctctttaagctttcttcttctcttaagaaaaacatagaggaaaaaacattatagcaagaattaggattcttcaagttgcaagacccattagtaatacatcaagccttcttagtccaatacattgactcgtggactagagttcataaagtcttccatcaagaatgacatatttgggaacttgatattgaatcttatgttaatcagtgttggaatatattttaccatgaccttgatttactaacaagtttgtttttaacatcctaaatatgaatatctaaaacgatgaaaataaacacataaaaggtatgagaaaccttacattggttgcagcagaattaaatgactctttccgatcagatctttaacccttgtatcctttctgtcacagagtatgaccaagatctgacctcgaaactctttcagttgtttggattcttcacagtctcacacactatgattgaggactaacttgctatgggtgggcatgcactcaatccctaaaggctaattttgttttgtgaagaaggctataggattttgaaaattagaaggaaaagaagaagaagaagtcttaaactcgctagttgtctgacaagaagaaaactaggtctagagtctttagaagcattcgttggataatgagacatttcttttctttttatactaattaacttagggttaggattgatttatttggaataaaaaaatgataaaataatggcaaaaaatagacctaatggccggccatgaagtgggcctaacactagttagatttttgtcacttttctcaaccatttatctatttttcacaaataccacttttggaaatttcaaccctataaatgccaaaactatttacttaataattaaaataattatccaataaaattgtcatttataatatttattaattagacttcacaaagtctcttaattaataaattaaccctaaagtcctatttcttcacaatcaagccataacttagtgaaaacttcataaactagacattgtctaattttagaattataatttattaactaaaatcgattaactgagtcttacaagcagtttgtctcaactag

SEQ ID NO: 324200 - DNA, 582 bp, Cannabis indica
agaaaaaataataataataattatatatccaatgttttggccaatatggctttcaaaaaaaatgttttggccaataaatattgagaatcaattaattattcctttttttcccctaaatatatatgtatttattattattattattattattattattattattattattattattataaaagaattgactcatatgaagctgaaaccaatgtctcataattgagagaatataattaatgtattcattgaggatgtataaatatataccaacaattttggtataattgacctaatcctatatataatcctataatatattatagggtaaatttataatgcatgcacttcttttggagtgtttaagtagatcctatttattttgatattcatgagatattttggtatatatatatataagtgactattcaatggttacatttttattgtaaccatatgattacatttttctttaacctgtaatagcaggttactaatagtagactttcctttttaaaatttaattaattgtaattaactattttcttaaaataattaattaaatagacattccttttttagaat

SEQ ID NO: 324201 - DNA, 1125 bp, Cannabis indica
gagagagagaggttatttatattatgtatatatttgttatttatttattatattatatatatttattattattattatttattattattttatatacataaaaccttttttgatttggtcaaaatcgagtcttcacatatagtctaccgtttttcttcttggaagtaactaccttgcttaagctaagggtaaaagtgactgcaaacttccatctaacagtcatgattacccgttatgactagcgctcatgactttacatattctctattaatctagtcccgctatttttgtgccacgttactcttgccacgtcatcgattgttgttaaaatttggataaacaagtattttaatttgtattattgctttaaaattatgtacaataccatttaaaaaaaattatataacttcgatttaaatgttttttttaataaaagcatgcatatatacgatttaagtaactattagtatacattgcaccaaacaatatacttatatatacttaatactatgtactaaaaaagtgacacaattaatacctgagatagctcattgtttttataataattcctagacacctgatggtgttttcgtggatgtgtatcttgtatgttttggttaaaaaagaaaatgccataaattccaatttatattaatgaataacagttagatttacccaaatcccaactaacttagacaaagaaattgtatgccatgaaattttgccgaaaaagaagtaggctacattcctgtcacgtgcggacatgaaacacttaacttttaggacatacaccttatcgtttatggtttacaatagtttatctacacattaattactaatatactaatatatatatataaattataataatattaaattgtgtattcaagtaaagtgataatggtttgactaatttggcataaaagaatcaaagacacacggaatcgttaaaatatatttaaatttgattagagatcttttctcctagaaagatgttgtttaaagtacgtaccatcattcttatgtaaaacaaattaggttaatttatgttaacaaattaagtagtataatattgtatagggtaatttgcggcaaaacctcctaaagtggacaggtttttgcaac

SEQ ID NO: 324202 - DNA, 841 bp, Cannabis indica
tacaaaagtgtatacataagtagcccattgtgacagttaactggatgacaccttaaatatgatactagttcagtaatttggagggtttcactattaaaatttaagcttttagggttaaatgcaagtgaaacgacagttggaagggtttagtcgccaaaaactgttaaataaatgacaaagacaaaaactaaacaaaacacccaaattcgagggattaacaccaagccaccaccttgtccataagcctaagtatagtgccaattgatagagagcagctgcagcaaaccaaatcaaagccccctccttcccaaaatcgtgatgattccataaattaaactactaaaaagatggaaaactcattggaaaagaatccatgatgcacagttagccaaagcccaaataagtaatcacccttctcggccaagaggccgaagttggtggtacccacttaatcgaggcatgaaaaaaagaaaggaaaacttacaaaaatactaaattttgggtaaaggtttacatttatcctgcaacacggcaaaaattatatttatactaccctgacctttttttatcttatacagtaggcaccaaaaactacatacgaggcctccatcttccacagacatggacaaaaccaccccagcaacacaagaacactagaaaataactattaattttggcgagatggagcaaaaacagtaaaatcgacgttaaataaataatcgtgacaaaaaaacagtaaaacaacattaaaacaaataaaaaaaacaaaaggaaaaaatgatttaaaaaactaactatcttctgtattgcctcaacaccatatgcaataacggctatattt

SEQ ID NO: 324203 - DNA, 1700 bp, Cannabis indica
gtgtgtgagagagaatgggagataatataactagatgtgtaattttattaaagaagaatctttcatgggagtttgaagagggggaaggatatgtatataaatatgcatattcatatataatagagagagaatagaatagaagaatagaaagagagaatagaagaaactgcacgcaggtaatatacatatacatctaaaaaaagcactgaaatttaaactttgttacatagtaaaacgacaagctctctccattattaaatactttattatataaatatattgttttaaaaatgctggttagtgctaagccattggcattttggcattataggtaggcattcataaatatatatttaggcaccaaagaaaaataaaagtcggcattcacaactcaacaagctgaattttgggataatggctaatggttactacacaaggagacaaatgcattgagatagtaaccatacataatatatataactgcttaattaatttataaatcaacatataacacaataatttatatatttatggacattggacaaaacatatctctctggccatgtaaaattcaaatgtaataaaaaaatatattaataatgattataatgagattctgtatggtatgactaatgaaaagaagtgcattataaatatcaataaatatatatatatagagagagagagtgatggagaaaaagcaaagaggagctgtgagaagtggtggtactggtggtgcatggtggcggtggtggtggtggtggacttagttgtgtggtgtgtgtggttatttttttttctttaccagcctttgcagacttgcagtactaccactactcccatttttattatacatttaaattaaatattggatatattcccgggaactgcgttattttcaaccccatgcgtataaattcttggttttatttactctaccactcccatgttatattttgttttgtttttttttattttacctttttacaccctctcatttccttttcctttttctttaattaaatttttttgggtcactttttctttttgatttgctcgttctttctttctttttttgtagtgttttcaaaatttcaccatgcgcagacatagtgacacacacaagcacaatatgtatatgtatatgtatttataaatttatgatcatgtagaatgaattaacaatttttttatcacattccatttttatcagctttagtgaataataatatacatattaatattgtttattctcagtattattaaaaaaaaattaaatttatttttcttttgaacaaaagaaaatttaaattttgatgtttaatttttctatataattaaaaaaaaaaattcaatatataacttgttccatgagttggaaaagataataaaaaaggttatttagtgaaaaagtaagataaaaaaataattaaatttcacttaaatatttttatgtaaagatatttttgatatagtatgtaaaaatagtttttttatatataaatattttaattaaatagttaaattaaaggaaaattacttcatatattattttttaactttttttttttttctaaatttacggtttgagttttttatgtggtttctatgtgggttgttatacggatttagttgtaatttatgttgctccgttagttgcaatagagatttctatgtgaaattctataaaaatacaaaaa

SEQ ID NO: 324204 - DNA, 1360 bp, Cannabis indica
ctatctacttattagtgtttttaatttatgttcttgataggtgttaattgaccacaattattattgttgttcttgctttatatgtttaataagtgtgttgtgtttgtgttggcatggaactatcgatatatggttaataataattatgttatgtttgtgttgacctaattgtattgtgtcaaaattgtatatgcacgaacgtacaaacatggcgcatgtggcaaacaaaatgctaaaatggtgtacgtgtagtttaaaaaaaaaataattgaagatatacattttaaaataattattaatgtaaagatcaattataaaattaaaaattaagacagactaatattaaaaacttaattttaaaaaaaaaaaatacacatataacgctgatattagggatggatccacattgcccctaaaaaaatcaagaaaaatatatatgtattttaattagttacgatatatatttaaaatgaaaaataatatatatagacagaatattaattttagtgtaaatgattaatttagattgtatttatgatagagggtcaagagttaaaatttcactaagagtatttttttttctttttaaatttacttttgccgatcttctccttaaaaaaaaaaaattaccccctcactttaaatcttgaattcgccactgacataacactgatttaaataactatattaatattggccacgtatgaatagtttgaggactattttcaatagactagaaaatgataggacacaataatactttttatttttttttttaatagttaaccctaaaaaaattctaatataataacttaaaatgaaggatcaaatttataatttataataaaattaaaacatacatagtacccaaccaaaatgaaataaataaattaaataataattattaattaaacatattattattaattgatgggttacttttcttgtacggtagtgcatatggagtatgggagtagagtacgtagagtgtatataaaatagtataatatactattatatattattgtatttgtatatttggtagggatcgatgttagtgtagggtttggttggtggatatttatcttttgtggaacatgttggtgtggtgtctagctagattctatggtgcattttattattggctttctgctgagtttttgatttaaacccctaaatcatttatatattatgactatatatatatattgctttactattcttggccaaaaacaaactcacctacgtgctcatattctgtcaatttctatatgcatccacaccccatgtacattctaatcaaaactataattaatatatatatatatatatatatatcatactcaatctccatccatcc

SEQ ID NO: 324205 - DNA, 1606 bp, Cannabis indica
tgggaaattttcctaccgactaatggttagatcatcatgttgtagtatcagtccttgtggtgtgttgagtaagaaactctaggtgggtaaatggtatgtccttacccacatgtgtgcctattaatacctttatttttcatgcaaaaggtgtgaacaatttcatacttaccaaaattctgctaaaattcctactagctttcttcttcaagggaaacaacaggaatacattgcttggatttatattgtaaacacttataatattcaaacacacgacgataaggttaatacaatgaactcgtggactagaaattattaatacctaaaccacgtaaaaattatctgtctattatttattgttttacatctttcttaagctccaattaattagtttttaaaaatctcgataaacaatgtataacttatttaatttatattatgtttattaaattattaatttatttaagttttgttaattatgttatattattattattaaattattaatttgtggatgtgaatcatgagatgtatttataatttattttatgtatttatgtgtgacagtgatagtccggtaattaactacttattcatcgacgctcgctttctctaagtttcctttgctgctcgactttgtattttaaggttagtgtattaaaaaattaaaattgttcatattagaggagtttgaatatcttaaatattctttcgtagagaagtatgttctgtgattaattatacagcagtgaatgtgaaatatacatgttagaggagtttgaatttttaaatattaatccataaacaagtagcttctgtgattaattgtgttaatgagttggataattggattactattttttatattttaaatatataccgtattgttatttatttgattttaacaggttaaaaaaaatagtcaatatagaagaaggtaatgaatctgaatcaagaaatcaagagcaaatagacaaagacctcctttgcctcctaaaggattaaaacaatcacttttttttattattattttttctaatgttattcatatttcattatacaattattcctgtaactagttgtagtattagttttgctatgtaatttttatcaattttttatgttatgtatattatattttttacactacttaactgattattgctatttagtttttcttttattattatttttctttttcaaattatctttttctctttactttagtgtttcaatttttttaaaaaaataatgattttaaagttttttataatatttcctcttatttataataaatttttatatatatttttaagcttttttttttcttttatttttctctcgaatttagttttcacaaatctctatctatctagccaattaattacgcttaccaaagaataatatgactttttaaaatgcttagccctccttctgtccatatttttgtaaatatttcaagaagactgactattgtttgcaacttaaatttattgtgtagttattgttggaaataatgaaatatcacctaacatagatattttattaaagaaaaaaactattaatacaaaaaaaaaattaaaagaaaaacttttataaaataatataa

SEQ ID NO: 324206 - DNA, 1313 bp, Cannabis indica
gatgtgtgaatgcagtcttgacctgccaaaaggggcacatggggaacgagagcctgaaaatctccgatttcgctcccaatcaaaataaaaaataaaaataagcaaaaaaataacaagagagagacacatcatcgaatatccaccgacagaggtgttatacaggcggcgaccatgaccgtcattcaaaaaaaaatagacaaacatgcatatcattttccctaaaaagggctactgtctaccaccatttgccctaacaacggagaaaaggtatctatatagaacaaacaacttacacgatgaaggcgagatggaagtagaagacgccgtatgacggtagcacttcgcctagcaatggggaggaaagtaagaggaaatcgagaaagtctggaatttgttaagtgggtttagaatccaaaaatcaaaaggcagtgaaatgaatcagtcgagggaagtacaggttttttataagccatttggggtgtgagaccgcatcgaataagtaccatcagacggttggggttcacaactgttcaaatccccttaatccagcggtcaggatgaaaatgcatgatgagaaaagggacggttgaaacgtttgagtatctttctgacatctacattaatggagcggtctatcaataggcgggaaacgaatcgttgcctgcaaagaaataagaaagaatgatgacaatcataaatatggcccacgcgttccgagcacgtaccacaacacacatcaagatcggaggcaatgcacaagtcttatttatctacgactaaataagactcagggggtaaatgttgccttaagtttctccccagtatagaacatgtggcgaaccgggaccccctacccagagataatcaaagtacttaagccaaatcccctctaaaggaaccagtaactactccggaagctagctcttgttcgtggaaaagccagctcgtcttcctctctggaagttgaagggtgtatgaacccctccaaatttatggaactggagatgaactgttagttctcatctaatgcagcatgaatgaagcgtctaggaacacccataagaggacgtgtcaggcgtcattaactcgtcttttagcaattacacgataatcaagggtataagtgatggttccattatgaagaatcacatcaatcaagaaatgatgaaggctaatctcacctaaaacctagacagcctactacttagtctatgcatgccctatttcgtacatatgggaacttgtctgtgcccatggctggcatgttgggttttatgccctaaataaaactctttacaatctgattagttatc

SEQ ID NO: 324207 - DNA, 698 bp, Cannabis indica
aacgaatttattaattattaaattttattatttttactcaaaaaaaaaaaatatattttagattatccaaggttacataattttcttttttataacagaaataacttaacaaatgtatatgagaaaaataggagacttattaatatagtgaataatatttcatcatatatcttaataaataaatcaaatgaaaattgtgtatatatatacataaaaccccctccccccaaaaaaaaacaattacaacttacatatagagatagagatgtattgaaagagtggtagtagtagaagtagtagttcttttcttatttgatttgggttttttggttgggccaaacatacatgtcgttaaagagggctgaatttagtggaggagtactagttgtacttgtaggctgatcatcattatcttggctaatatggtttgttacaatagctacacattcttgggcagtagaaggatacttattaggagccattcttttactcacaattagggctgtacaaaaaaattcgtaaatcgcccaaactaaaccgaaaaaattgataaaaattacaaaccgaaataactcgaaaaaattacaaaccgcctactctgttaattgggcaggtagaaaataggttcaacccatctaattaaaccgaccaacccgatttgaattttaatttttttttaacttttaatttttattata

SEQ ID NO: 324208 - DNA, 989 bp, Cannabis indica
tataagtgacaaaaagtaaaaagaaaaaaaggatggcagtggtcctataaattattttttttgaacaaagtggtcctataaatataaacatatatttctaaaatttctaatctaataacaaaaaaaaaaaaaataataataaaagagagaaagaagtaagaaaataaatgaaagaatgtggactaacataagctttgatcagagagaagttagggtttctgcaagagtaacaggaggaagtgcttgcttgtttaagtaattgattcagatgatacatgttttagtaattcagatatctttactgtaaattcattgtcctcatcagcaataaaagaatgttatatttctacaaaatagaggcaaagagaaggagcaactattgttaaacaatgaaatgcaacgaaattaggtctgcccatttcaatcttcaaatttcaatataaccatcaaattctttaaaaaacaaatggaaaatgaggagaagaaaaataataataataaaaatctaaagacgtaaagtggcttcctttttacctttgaagtaatcaatctacttctcaacattactgagtttgatattccctcttatttgtaccgaaggtggttaaaaactcgcaggcattctatgaacaacaatcctgatttacaaaagccaaatttttataaatatgggaatttattttttcatcccaaaatttacaaaagcccataaatctcgtcactacaaacccaatcgtcattgtagagagttccacccaatcagtaggagtaggtggttctttcaattattttccatattattttgatcgccaaaatccctgccattgtacaaagtttcacccaatcgacacaagtagtggtttcttcaattgtttgcccatgaatctcgtcactacaaacccaatcgtcatcgtagagagttcaatccaatcagggagtaggtggttctttcaatgtatttttttagatttaatagaatttattttatt

SEQ ID NO: 324209 - DNA, 792 bp, Cannabis indica
ttagaacccatcaaatttattatagtcccattactttttataagaatttcgacatagtaacaaatctaaaatagacgtttcccattttaaaaacctgccaaaacacataaaaaatattccgataatatccagtacaattttcataataattatatcagtaaaatagacgcagccacgccgaagctccggcgactaacaacggtggcaccaccacctcacactgttttggggatatttgagctattggttttaatgcttatgacaagtggagatagagtatggaagtcatcttttcttgaaggggtctgaagttgctcagatctaagtcgagacatctcgactccgacgagtttttccataatgatgaagggcgagggaattaagctcgaggaccttgggagttggtggtttcaaggctcgtggagttcagtcgtggcctccgtttaccccttttttgaacgacatcggctcgtcgtggctacaccgagaaggagataggaacggagagagagagaaggacatcgagaaagagagaggtgtttgggggttctcgacgagctcatggatatttggtgtttggagtggctcatcgggatgactgagaagaaccacctaggttctgggttctccgacggcgcgcgaggatgtagcaagataaagagagggtattaggagagggagtgagaagagaagagtttagggtatactatattcttctatacttattttttaattttttaattgctgaaatttttatttatttttttatttttgttgtactctttaagtgtc

SEQ ID NO: 324210 - DNA, 1175 bp, Cannabis indica
gagaaaattagacatgagtcaaaaaacgggtcaacacatctgacacgaaatataaaagcggctgacatgaaatatgacacgaacacgacacgttgacacgttttgccactcctcctacttaacaccatatcaatgtgatacattataattgattatcgatttattatattatttattaaataaaaaaaaaatgtgagactattaaattgtacaaatatataggggtttgtcacctttttatggtgattggcacctagcttcttaagatgtggcttagtatttctcttacagaaattatatcttatttaatatatatgtgataatatattgtatttgtaatagatattgtttatttattttaaagtaattttaaataatttacaaaaatacttatctacgtacataatctaatataaaatacgtactattattataaataatgtgttatatctattttttttagtaagtgttatgtctattattaatacaacttaccatatatataatatatattcaaaagaaataaataaaatcaatatattaattgtataatatttatattattattcaaaattcaaattaattgaagctaaccatttatttatttgatcatagaaaattgatatatgtatttctaactaattcttaaactggttaataataaacatatatatttattatttttcacataaatatttattttattaaaaattaatttacaagaaaattatacagctaaatttataaagtgtttacgtttagtcaataacgtcaatatatatttattatttaaaaatatatatctttaaaaaaaattaaaatataaacacttctatattgtaataactaacatgtttattaaaactaaacacttttaaaataaactagattgaagttcgtcgaattgcacgtatacttagttatattttagttttcttttttaaatattataacttataattattataatatataatattattgatatttttttttttttgtaaaagcttgataattttagtgcactttttaaaataatttttaggtaaacaaaccatttcattttaaaaaaaattaatatataatataaaataaaagaaaaacagtgtgtaaagtttcaaaaataaattcttaatttttatttataatttaagataattataagaggtgtttct

SEQ ID NO: 324211 - DNA, 1725 bp, Cannabis indica
cataaaagcaatccctataaatcagcgacgatatcaaagatatggcaagctgtccaaatccctcaatcagtgtactctatatatttaatgtgtaatcttaccaattatagagattgtaaataaaaggggaaaaccttccctcaagcatatagccctataaatagtgatttattctcactgggcgaagagtcgagagaattatctaagagagtattctcagagattatattgtaagagcttcaagagaagaatctctgtattctttgctcttaggtcaatacaaataaaggggagtaggctattaccaaactactcgagcccgaacctctttataaactttgtgttctttatttatcttttcatattacatttaaattatataactcatcgcttacaattaagactcattgtcgttggctaaaagtgaggtcaacattttgatgctttcattgagagcaagaataacaaactcgctctttacttcaaatttagtcataaacatgatggtggtaaagactcgtagaggcctggtcgatccagcgaatccaccagcagtggatctcgcattacagaatccaggaaatgcaagggttccaccagccataaatcttgaacaaccgccaaccgtaggtcagggtgtgacgtctcctttgaatggaatcgcacctggtgtgaaagagattggaaataccagttcaacagccaatctgggtatccccaacactggggttccaccaacaacgaatgtccaaacaactgttggagatggcaccgagatccaaaacctccgtgatgctcttggactcatgcaaggccacaccaatactctgcatcatgattaggaagaactccatgcttcagtgaaccttgcattagaagagcagaggtacctattcgctgaacgaagggataaagaggtggaaacattgagggctcagcaagcagccattcacaaccaaacaagactggccatcgtactgatacgaagggcgtatcaagctactaatcagaaacctgcgaccagcatcccgcttggcaagtaagacaaagatccagttgggaacacttctcagactctgaacggtcagccgcccaatccctagtcataggttccacatgtgggtcaagtggtaggtagccaaaccttgtccggtaatttgtcaggaggaattatagctaataactccgcccagactagcgattctggtcaggtgcttaaccaaaataataaaacactgggacaacctggtgtatctgtattcaatagattgggaacaactcatgatctaagggataatctaaacagaaggagagggttagacaagcagtatgtctcacaagccactcagcccggggcccgtgcttaaaatccagctcaaagagattctaacgtgaccttagtcggccaagaggccgaacaagttcatccattcgtgcaggcacagttggatgaactgaaaaatatgttccaaggcctggacggtcagaagaacaacgatctagagttggatcgagcatgtggatcccctttttctctagagatcaatgttctagagttgcctcacaagttcaagaccgacctggaagatgtatactaggaaagaagatcccttataacatctcaaatgttttgaaatgcaaatggacctacaaggagtacgaggagatctatgtgttaggttttatgccctaaataaaactccatttcaatgtaatctattttat

SEQ ID NO: 324212 - DNA, 743 bp, Cannabis indica
tctttcttttctattttctagacagcaaactttgcattcattctttatgttgtgcaccagcaagcagtcatcatgttcatcaacttaagagttttttgatttgatagccaacttgtcctccattacactttacacagcatatatagaacaaaaatcagcaacttcttggcaattactctaattcttctctgcctccttaacaacttaccttagaaagcaagcaaacaccatacattatcttcaagatcatttattatatatatatatatatatatatatatattaccctcaattgaatccacatctcttatttctacttcactactattctattgaccactctcatcgtcaccatcctcatccacatctttattatctccacatcatcaatacccgtattagcaaggaagtcccatcactttcactcatgaatttcaaaatgctatcccatatttctgaattcataattagtttcaatatttgggtttgggtttgaagtgttttgagttgagtttgaaaagtttggcactgtatttgaagaattattgggattggatttgaaatggtttgaggtcaagtcatcactcccacctcaaatatagttacattatacaatgacacacatagtacataataaacacagaacatatacattttatgcaattaaattgaaaataaaaagaaaaatttgttaaaatatacttaaaaatttagactattcttttaatataccacctttaaat

SEQ ID NO: 324213 - DNA, 1144 bp, Cannabis indica
attattttaagttttttttgaaataaatgccatattttgtacactttaagtttttatgccatatatatcataacttgtatttatttttccatatttttgtaaatagccctattattattagtgtaattaaatatcgagtctcatataatttaatataatatttttaagaaatatcgatagttaattgtaaagtattgaattggttcagtcttctagacattgcagcattaagaaagtaacagaaagagaaaaaaaaaatgaacagagagaaagaggaagaaagaaagaaagagagaaaaaactcttcattgattaagtacacttgttacaagcttttatatataacaagaactaaggcacttaatcactgcactaaccaaaactaggaaaagacaagaaaatcagctaacagaagttaaccactaaccaatttaacagacacaacagagtgacagttacaactaactgtcataacacaaagtaatacttttaaaagatgttaaatattaatggtgcccaaatatacatcatagggagtttaaaaaaaaataactttattatacttaatgtgcagtctttattttttctttgaaaatggaatactctatttttttatacatattttaaatctatcctattcctcctcccacacatatactcacacatgatcaaccatctaagttttttttttatattaatatatatatgaaattacaattaatgctcattgtagccatgcaacacctaagtatctcttgagttgctatagcaacccatagcaatgctctttctcactataaaccaaatttgagaaattctcaatgtgtttgtattttcaagtgtttactcaatttcgagagctttgtattgcaaaaaattatttgaaacataatagatatcctattagtattccttcaaaaaaaaaaaaaagacatcctattagtattaccctacactacacatatcaacattgatgcctagttggacaaaaatccaactcattcactagctaatggtgccatactgccatttcaaaagattttttctttttcaattaactagggtgccgtttggtaacacttttgttttttaattttttaatctacaaaatgaagtaaaattttgtttttaaaaaaattatttt

SEQ ID NO: 324214 - DNA, 808 bp, Cannabis indica
agtatttttgtaaaaaattcactaagattctaatatatttgtaagttttcctatgtaaaaataaataaataattttcttttattttttttttttggtgtttatctaatttatatactactaataagagaattgtgttattttaaagtttggatatatgacgtggtacttacacgtggtataattcagttaactctttaacctaatagagaacttctgggtagaagtgtgcctgacaggtccatataggggtgacagtcataagctgtggatttgtgaagcacttgacaaattactaacttgccggctagagatgataaaagttataccttgctaggggaattccacaagtaaactcataaagaagacaagtctcgagaaaggcctagacgggtgatcaacttgccgaccaaaataaatgctgccacgagtaccggtcaaagctacacgagccttaattttctcgtttacaagctttcgcaaatatctcaaactaaatcctacaaacttgaatccaacaaatctatccgataataaaagagcttcaacagattgtaactgcaccctaaaatatagggatatttattctttgtttactccttttacagagcaaaatgtaataggggtgttcatccaattcaatccgcactattttggatttcattttttggatccaattcaatctgcacaatagctcaaatccaatccgcaaaagtgcggattggatcggttattttggattggttactttttaatattaaattatttaatatttatatttttttaaataactagcaacaaaataaaata

SEQ ID NO: 324215 - DNA, 901 bp, Cannabis indica
aaaaatatatgtgtaatggatacctgataggaatcatttccccgttgggtaattcccgccctgctcccactttaatttaaacggatattaaagcgagtatgggggtgaatttaggaaacgggtataagggtcggggagcaatccctgcacccgccccgccacgtttacaaccctacatgtagcaatatcgacacaattttctatggtagcacctatttatctctattggtatagcatctttgtgtttgccaaataagccatccacataagagcaaacatcctccaaaatttaaccattggagatgttctaacgtggaagcattaccaccctaaaataatatcactacatagtaattagacaaatcactccaaaacgagatatttttattattatttataggataaataatagtataaatacttaaagattaaagtttataagcagcatatactcggcaattttttttagcgtcatgtgtatctaatatttgtaaaagtgtaattttgtttagttacctcaatacaagctctggtagtgtcttaaacagaatagtacatgtaaaactcatattttaaattgatgactctaaacggaaacatgtaatatcaattacttctaaatctaataaattcaaaacggagtatgtattgatgaaattagatgaaaattatagttctactaacattggatacttataaaaagtgatccaaaattagcataatgtaaaatttgcattgaaattaatgttatgtttttatatttatcattatgtcatttttaatattttattattaaattttagttaacattgtcatgacttttattattattattttattattaaattttatattgagtgatcagtggttaaaaatacatttttatttattttaaatgata

SEQ ID NO: 324216 - DNA, 1466 bp, Cannabis indica
ccactcattgtcaattggttttgcgatggaactccatgattctcaacacattgtaagtgagattaaatttgtaattaagtatagaatgtatagtttacaaaggaaaaagatttgtctagaagttagaaatctaattactcatttgttaattgagtaagtattcgggttgggattggtaggttgtggccttgtttggttatatttgttctgttgattaataaatttcttctttgatcaaataaaaagtaaagataaattaatgcataattatgtcaaaatgtctttgacgatagggaaaacctatatgtttatgtatttaactttatatatttattttttaaaaaatcaatcaaaactaatcaatatgttaaaattataaatatttatatttatttttattatttataaatatttataaaattaataaaatattataattataattttttttatatattttgtaatatagtaaatttatttgtatataagtaaaaattgaaaaaaaatatacatatttaattataattaaagaaatgttaaaaataattaataatagttttattagtgtaattaaatattagattttatatattttaatttaataattatttgcaagataattatgtggtattagtatcatataagtattgagtaatttgtcattcattatgtaaccgtattgtttccctaccataagcagagcttagcgtgagcgttacaacacataggattggatttgtgtatgtacgtaggtgtagtaattacctttaaaaaaaaaattaatgactatgatatggacaaaaggacatataagtttactttgtaatttatgtattaagtaataagatactgtcaatagggaaatctatgtcatcctattaatatatattgtgactcagacacagtgtatgtgtacatgagacggtagtaaacaatattatcatgcacactgatagcttttggcattaattaaccactaatgaggtcttgactatttgtatatccgaaagcaataagacaagaacacataccaataataaactaattataaaatcaaagccaatacgtttcttttggggaaaaaaataatatgtccacctacccactaaattcaattcagttatgtacatatatacttgtttagcctttcacttttctacatctcgggtgtgcatgaatcgatccaatctaataaaaatcgatcgatccaataataattgaccgttaagtattagatatctaattgtgatcggattgaattggatattatttttcaaatatctaatttgatcgaatcagatattaaacacggtggctaaaaatccaatctaatcaaactaattagtattttcatttagtttgaatgagtaattatattttgtatggttatagtaaaatctatatgtatatatgaaaattaaaattttactctttttttcttgaattggatggatccagtctaatcc

SEQ ID NO: 324217 - DNA, 663 bp, Cannabis indica
cctgtgactgtcccgttgctctttgtgagccatagcaataggatttcatagaaaaaaaagcatttgcagtaagcctagtggcttcttatgatcattgatcaaatagcatcacacttaggctcttgagccttaaattaagtaagtcttcgaaaagaatgaacgaaacatacataagtcgacatagctccatgtgtatgttctttgtttggccattaatagaatgaaatgaaataatggtgagcctagttgggcgacagacagggcttctcttcttcactcaaagaggattggtgcaaccttcattttctttgtgacagatggtgtgttgttgaacttttgcaaggtcatctttaaggccaaagaagagtcaaaatcaaatgttattctagaggaagctattatctctctttgttgaccaagagcaggtcaagtctatctgaccaaggcaggatgaaattagtctgaactaagccgaaggctagcaaatttgaattactttgacttaaatctttctttttgtagttcttcccttcttgggccaaattcctaatcaaagcaggcaaaggcttcttagattcattcatttctcgacgtagttagtaaggcttttgggctagtagcttatgagtcaaaagcctcttctctctctttcttttgagtcgt

SEQ ID NO: 324218 - DNA, 1313 bp, Cannabis indica
taccaaaccctttactcctcttcctgctgtacttgatggtactctactctacatatctctaatttactctctacagtttaaagggttttttttttttttttcaatgcaaacatttctcatttgagctttggtaaatttcagaaagagatgctctgcccagtcaccatttgctcaaaattaagtcattttccaaactttccaaattgcccatacagaaattcagtaatgattttgaagctgggggctacaaatggtttgttcattgacttttttagcgactttagttttgttctccttagtagtttaacattattacacactgaaatttatcgcaatgtataggaacttttctatatacccaactggggacaaaagcaaagatggagaagaccatatatctgtgtacttggaaatagccgaaacaagtactctccctactggttgggaagttaatgctatctttaatttctttgtatttgatcaaattcgtgacaaatatgttggtccacaaggtgagttttttcatactctttcaagtacttcgtttgaatatttttatcctctcaacctctttcctattggctcctcctgagttattacagatgctatagtaaggcgattccattgtatgaagaaacaatggggcattgtcaaattcattgatctcgaaacatttaacaatccttacaatggttaccttgtcaatgacacatgtagtttcggcgttgaagttttcacagtcaaaactaattcgaaagcagagtgtttatcattgataaatagtccggtaactcggaagattagtttgagtttttctaatgtttcaaaaccaacaagcagaattcaaagtgggttatttcctgcaggagactataaatggtatgttgatgagtagtaccaattagatagatgaacattcatgtatgtcatgttttgatttgatctattttttgttttgttttgttgttggctgctctctcaggagagtgttgttctatgcaaatggatgccaattagaaggcaataaaaccaacaatattgtttcgctattccttgttgtggacgcttcaacacttgctgctgacaccaaaatacttgtgcattacacctttcgagtgaatgacaaaagaaatggaaaccattttgaacgaagtggtgagtaacataaccatatgcttaataagacttaaattaattaattttctgcttgtagtttcttgttcttgtttagataatataaagggtaaatattattttgaaccctttgttttgcaaaagttaccgactggtctatgtgttttgttaaatgataa

SEQ ID NO: 324219 - DNA, 1567 bp, Cannabis indica
ctcgatctgaaaaaaggaagccccagataattgaccttgccctccggcgatcctatacccaacagatatttgatcccttgtttcatgctagcaggggtattcttgctgaagaatattgaagtcttcattttattaaccttctgtcccgaccaagagcaaaacttctcaagacaatcccaataacctttggcttccgctaaggaggctttgccaactagaatgagatcgtcagcgaagaagatatgggatataacagggcccctcctactaaacctgatactactaatagctttcttatctagggcgtcttctagaagccttgacaaaatttcgacagcccagataaataagtagggcgaaaggggaacaccttgacgaagaccacacgacggatttatcttgccaacagggcctccgttaagagagatattgagagaggtggttgtgatacattgagacacccacttacagaactcatgaggcacctcaaaacactcaagcacatggtcaataaatctccaactcattctatcatacactttcataaggtcaatcttaattgcaaaccaaccttccctgccttttttcctattaaacgagtggacaatttcctgggcaatcacattattatcttgaatattcctccccagaacaaaagcggcttgggtgggacatataatcttaagtaacatcggcttgatcctgttagcaatgatctttgaaatgaccttatacaccacattgcagagagagattggacgaaagtggtttggtctcttcggattctggatcttgggaatcaagacaatattagtagcattgaaacctttgtgcatacaccctgattgaaagaaatccaggactgcttcacagaagtcgttccccacagaatcccaatagtgcttaaagaagaggactgacattccatcaggtcccggagctttgttactgctcatagtaaacaaggtagccctaatttcctcaatagagggtctccggataagatcagccttgtcgtccattgagattttacccttgattaagtcatgacagttaaggtcgttcccaatctccacaccagtgaatatgccattaaagaactccataaattcaatgccaatcagttctcttttcgtgatccacaaattatctttattgagaatgctcttaatggcattccttctacctctgatcgaagcagaaatgaaaaaaaatttagagcatttatccccttcctttagccaagaaaccctggccctctgcttccaatataaatcttttctcaccctagcctcattaagggagctacgtaaagccctttcagtatcccagtctctagatcccaccggaaatttctgaataaaatcaagtctcctttccaggtctcggatcagagtatcaattttgccaaattgggatctgttccagtgcataagcgcaactcgagtagccccaattttcttacaaatcctggccggggcccaagggtaacttaaagaactccaagcagagtccaccactagtctgcttctctcatccctagtccaggcttcctcaaacttaaagc

SEQ ID NO: 324220 - DNA, 1425 bp, Cannabis indica
attttaatatgtaagacaataaaaaaaaaatatataaatgtttcataatttaataccataactaaatatactaataaaattatacaaatgacataaatataaatgaaaaagtagtttatttgttgtgccaaatttggcccaaaatttgctatgtgccaaatttacatcactttttggcacactattggagcacactttttcttaaatgagctatattttagctttccactacttatttacatctccattggagatgctcttagagctagttcagattttcaataatttatctttttcagtatataaactagagtgttctaagaggttacgagtgggaaaaaggtaatggcatggttcctaacccaaaatttctatttatgatatttagatacaccaagtggtatctaaaataatgataatttatgtgttatatatcaaaataaccagcttaataaataagtcacattaacctatccttgagtttttttttttgtagccgtcaaatattactgatcacaagtcaccaaattcctattctgcatggcctattgacgaaagtaggtatgagtagtggaggcactgttgtaagccctgacatcctgataaaggatacacaacaaccaccacttctgcaactgaggaccatctgacaccagagaaacgtagaaggtgcaagaccaactcctgcacctacaattcgcaacaccatgacgtcagcttgtcccttagggaccacaagtgtgttctaggccattagagcctataaatacccaattcccaaatgtgagaggggattaaaaaataattttgtaacacctgatttaaggaaatacaaagatacttttctctgtattttgctttgaatacacattgttattttcatcttcatattcatgctaagttttgaatttgaatcttgatttttcagtcataagttagttgaagactttcaactattaatagtttagcgtcatttgtggaaacggcaagcacaagctacgttgtttcctcgctttctattgttacaagatgcctagatgctcccgtcatcttcagggcgtcgagattcgtctagataataccaactagccgcctccaaaagagagacaccaacacctactattgaagaaattggctagaacagccaaataccatagacaagaggaggagactatcatcatgacgataatccgaaaaacacatgctaagatagggtaactacatccatcacaccttatggtgaaaatggaccacaaaggcaaagaatcctgtcaccggtaaggcatcccccaccaccaatattgtaaaatctcggtacttcatgacattgccccaaaaaatagaagcaagtttttgttggaaatattttacctaatttattaacaagtatgtttcattaatatcctaatatgaattttaaaacaa

SEQ ID NO: 324221 - DNA, 929 bp, Cannabis indica
atgtgggcagcttaataagactcgtgaccatacctttttatggctgcacttttagtgggcagcttacagttcaggttcgagtcgaggctgaggccgggtttggagttctaggtcattgtcttggttcgagtcggggatgaggttggggttcaggttcagttctgaggtcaagtttaggtctggggttccatgtctaggttcgagttcgtgaatgggtctgagtcgaggctgagcctgaggtttgagtttgggcattggctaggtttgtggctgaggtctgggtctagtggtctgggtctgaggtcaagtttagattcgtggtccaagtctgaattcgagtccaggtcagggttgaggctagggtccggatcgaggttcaaagctggggtttgagtctatgtccgtgttcgggaaacgggtctgggtccaatattggggttcgagtcctgtacatgagtttggatttgggtcagggtttgagttcgagggtcgggtctaggtcatcttccgacacctggttcgggttgaggcttaggattgagtctaggtttggttccgggtcagtgtgggtagccccgggccctggggccaacatctgggtttttgtatgggctacgagtcgagtttgggtcagggtcaaagttaccagtttaggtagggtctgaggctgacatttaggtttcggtctatggtttaggtcaaaaagtcaccaggtttgaatcatgagtcttattcatattggggtctcaaagtattcaagtatttttttagaaaataaataaaaaaaaattaaaaataaaaaccatttctaaaaaacaccaatcaaacgcgagttgtattttcaaaacttcaaatacaatgtcaaacatgcctggtatatttaagggttacacaacaatagaaatgaataaaaattaaaaattattagt

SEQ ID NO: 324222 - DNA, 881 bp, Cannabis indica
atggctttgtcttccaagtcataacaacaatagagcccacttgtgtaataagatttgcaacaaggaaaaatcatattgtataatacatgtatgatgaactagctcaccatctattttttgtttttgcttttttctttctttctttattttttagcctccttaacctataaagacaatatcatatgtgattgttcaatgactatatatgcttcttacttggctctttagtgttcactattcatttggacaaagaaatacatacacaacacaccaaatcaaatcctagaaaggacattaattttatagaaataacataattgggtagcaagaaaaagacacattcatccatcttatttctcagttgaatgacaaacaatttaaatatttgtccttagaaggatggccaaaaggaaatgttttcaagaatgatataaatggatgctattgcatttcttttccttgaatggattatttgattgaagtcatttcctcttctagactctggcatagccattttcttattctatgataagatcagaagctcaatattgcatataaagaacttgatttctaattcttctttagtgctgctattaacaattcagtaaactgagagatatcatctctgcaaagaactgtatttatatacatgaattcttcttctttcatatttagtaaatctttaaacaaatgtaccatataactattcttttgatctcttcttcaaaatagagagcaaagttgcctattggaatgtttgtagtctcaacattggaaagtgacctcaaatcagacatgatttcattcatagagtagagaatgtaataacttgatgattgagttttgtggtaatgtgcatgtatatatagatgaaggattct

SEQ ID NO: 324223 - DNA, 1326 bp, Cannabis indica
ataattcagaaaagaaggataatcaagatgagcaagaagaagcagatctccaaaatactaagaaactacagaaagaaagcaattgcacaagtttcttcatagagtagtagtccctgctgtaatttcttatgctatgcagttaaggctttctttaagtgcttgggctatgaatatgacccacacgacgtcgttccctacaactattctcctcttcccactacgcaaatttcagatcaaccttcttctaaggatccatctcaaacaaaaacccctgtaaaatctctctccctctccctctttattattgttattatttatttatttatttatttatttattatatttgaaatgtgtatggttaattaagtttctaatatatatttatattaataatatataggaggaggatcaggaggaaacgggcataactacagtggtactttcgagaaggactccaccaccacgaagacaaggacccactcgcggtagaggaggtcagaacaactgatcaactaaacaaagagatatatttgatcgagagcaccatcagaatcctctatatatatagatatagccttctttttcactatttcaggttcaactaaagagtttatattcactactaattagacttctttaacttgtgtgttatatgtatatcatcttatgtacaattagagtaatgcatgtttttttttcttttaatttgtatgagtaaatgtttttgtttgtgtgtgtatatgtacataaattgtgatatatatattgataagtcttttttagttactttatctaaaaaaacatgcatggtgatgtcttttcttttctttttcttgcttaagttaagtcatctaatcaattggtttaatttgagtttacattaaaaacagtttattttttttatttatttatttttttttcatttttacagaattttatataaaaatttctattgcaactagcggagcaattttaatcgcaacaaaaaattatataacaacccacatagaaattattgtagaaatcactttggaaaaccaaactataaattttaaaaaataatatataaagtaatttctcttacaaaaatcatgtattaataaataattgatggtttgataaccatccacacttttgatccttattgcaaaatatttgttatgttttattcacttctgcatgatttgttagtatttttttttaccttcaagtaatattaaggaagtaaattaattacatatatattatgggaaatttaatttttaatgcttatatattcttaaaattactcttctaaactcataatatttgtatatttgttgggat

SEQ ID NO: 324224 - DNA, 820 bp, Cannabis indica
ttatgaagagttataaatactaaattagtcatctagccatttgagtgactagtgcattggtggcaatcgcacccagattcaaaaattcatatactcgattcagcccaccaatgtccaacagtctttctttcgtgtacctgataaaaagtcattattaataatcgtcactattaaaagaacattatcgagtttattatgaagagttagaaattatacttgcaccaaactcctattggttgggctcccaagtattgcatggtgcacaatatgaatgtcacttttaacaagccaaatagagtcatcttcgaccccaaatagctcataagcaacttcgaattggattatggacgacttggaccaccttttgacggagttccaaaaggtaataattgaggaagtttggtgtggttggacataacgaccatgaccttttgccttactcggcctttcagggtgttttggaggctgtgttggaggactcagtaaatctttagaggctattttgcttctcttcatgggttgcttctcaagtttcttggtgggtgggtgtgtatatatatatagaaaaaaaaatagtaaagttagcaatgccattaatgaataagcacaataagttaagtaagcaaattgaaacataccaaattgttatacccgaaattttactgacacttcagaggaggacacatgtcaaccttggagaatacaaatcaacgactataagggcaattatattaaaggatattaaaatggaataacttattaaatacggagttgataaagtatatctataactcgccgactgtaaagtcttaagcgagat

SEQ ID NO: 324225 - DNA, 1507 bp, Cannabis indica
atactagtgaatgtacgtgccgagcacgtattgcttagttttattagtatttggttcttttagtatttgaatgttattttatttttaaagattactaaagtttttgttagtaaaaattaatatttatatttgaaatattatttataatgtaattaaaatatatagtgtaattataaaattgtaaataatttattattggagtagtagattattcttatttaggtttttttttttaacatagcattgtaaacgtttatatctataaatattctgtaaagtgttaatattatatgaacatctccatttataaagctaaaaagtaggtcaatgacagaagtggtatatctgcaatcacacaaagatagaagtggtatttttgcttcctatgcttatccagagaaaacattagataacgtgaggttaactttaatatataaagatttttacttttttaaaaaataaataaaaaaaatattaatattctcccaagataggttggttagagagatatgtggctaagatgatttttttaatttaaaaagagattattaatatttaaaagattgtttaatttttttggtttaattattgggtttatttgttaacggaagatcaaacctaatcgttaaatttaacaagaatattcttacacttttaagtatataagaaaatatgaaacatgaaagtttgttttaataattatatatataaactttctattcgaagattgagaacaatcttattctgcattagtatagctaataaaaaattagattgtattattctgtgaagaatcaaatccgtaaatgtgaagtttatttgtccctttcaaacgacaatgaataattttttaacgagaatcttcatccaaatgtatagaactccactatttaagttttatgattcaaaagcaactttcatttgggaaaatcaacgttccataacgaataataagacatacgtgaaggaaaagttaaaagaacgaagctggcaacgtattattgatatggaaagattgtcttggccagggagtactcatacttttcaaccctgctacttcgtccaaattaacaaaaaagatctatatattcttgttgttgcatatatttacgtacagatcagcaactaatcttgaatattattacatatacatataaaaaaagttgaatcgtacaaaaattaactatagagacgtctaatttagaaaatacagttgagaattaattgtgtcaaaccagtactatcgaggatagatttcagtgatcatggatctatcattagcagagccttgagttgaactagccatagattcataaaactgttgctcaccactagttgttgttgtgcttgattgtgttctattacgatgagaaaggactgctggttgttgaggtggtggaagtatagcagagtagctgttaagcatgagaactattgttgccatggtgggtctatgaacaggattttcttgaacacataataatcccatatgaatgcatctaatcac

SEQ ID NO: 324226 - DNA, 1007 bp, Cannabis indica
aatttattccatcatcaaactgtccgttgcaaaagacaaggaatagaatttcctcttttcctgagggtataaaagttttattattgtaagtcaacttgtgaaaaattgtaataaagttgtaatgcaattattatatatgttgcgagtcaattatcataaaaaccaaaaaaaaaaaaatcgtatgtaatagaaaattaacttacgactatcgtcttttctctattcaagtcatttattgccaattctgagccctatatttattatacatttttatgtttgttgctcaactattatacaacagaattgcaactaaggatttgtaaatgggcatgtttaagaaactttttcatgcatttctttctatttactaacaattaatattgtacattaatagtaacatatggagaaataactttaagacatctgtaaactaatttaatatatttatataactaaccatgttatagaactttgcttaaagagatttgtcctacattgataatattaaacaactacaaatttgataaacactatcattatgttattagtttgtaatcagtgatgtcaagttttagagcgctaacctttatgcagttgtgagcaagtttactaaaacataaaaaattaaaatagtaattccacatacgtaactctacctacatgttaattcactattctattcgtaatttaatatgaacaaattcactattagaaatctgaaaacaacgtgaatgcaataggataaacattagctataatattgattcattaatataattgtaatattttatttgtgggctatataaatgtttaaagggctggctcatagtagttttgtaatttagttgcctcttttgtatatgtatacctaaagaaaactctttattatatttaaccattttgttaattttttttaaaatgatatttactaactttgcttttaaatttagggccaatttacagctcagcccaatttttttggaacttttttattttttacactttca

SEQ ID NO: 324227 - DNA, 1349 bp, Cannabis indica
caagcaattgataaagtgaaccaaaacatacacaaatgaatgaaaaatacttctgtttctttattgatgttgaataaaatatattacattgaaatggagttttatttagggcataaaacctaacaatgtggatctatgtacttgagatggatgtactcatttaaacgatacatgaaaattttgaagggttatgtcaaaaatagaagtaggcctgagggttgtattcttgaatcatacatcattgaagagacgattgaattctgctcagactgtagggaaataagtagagagagtaggggtgtttctgtttgtggtgtaagccaagctaatcgtgaagaagcgcaccggcttgtgttgtaaaatactgacgtggtctaaccgtacattgagtaagtttaagttaacttttcatagttaaaataaattaataatattccattgaaattaaaattaatcaattgaatacttgaagggaacatttaaattggatcaagactactaattgactaaggcacatcaaaaatgggtacaagatgaatattatcaaaatttcagtccatggttaaaaaaaaagatactattaacattaatgttttgttatgcatcatatattgatttaccttggctcactaatcaacttgtatgttcataggtatatgtggaaatgtgtgaatcaccagacaatgtatccaacacactactttccatatcacaagatcctttgtgtgatgtactcaagtacccatcgtactatataaatagtactcaattttgcacccaagcctgtgataaatctagaaaaatacaaaatagcggtattatgatagtttctaagactttctaaatatctagttcaaaagacaaaaatcctattgaatgtgacaagtctttaaacgatgtaattcaataaatttgaaaattagattacaatagttttcaaatccctatttttctttgtgatttgggtagaagtgataatggggttaaagacgatgaatttagattcaagttaatggacttgaatcgcatcggacataagtttgataggtttacaatggtgtcccaagccaattaagttttttacgtgagcgatctattagatgcatgctagtcagctgtcttgacgacgcaactaaaagattttgataatcaagagtctaatggcgatgatctcatgcttagtgaccaaattcatcaaatcactccagcacctattgatgtcaccgttgggggcgatatcatatcatctcgtgatgatggtgaaggattatagttgaacgaatctataatacatgagtcatatatcaaatacgtattgatatttagtctttttgatatatttactttta

SEQ ID NO: 324228 - DNA, 937 bp, Cannabis indica
tttcaaaaagattcttagccttcatgaaataatggaagaagctaaactttgtcttgcggtgaaaggaaataagcttagagctaaaaaaatactatgacttgttggtggaggttgacaaggctgattatgctagagcagtttgggacaagcttattatgcctaaacacagattcctatattggaaaatagctaatacccaactgcttactagagatttcctatctcagttcatgactatctcaagcactttatgccctgtttgtgaggtagagttcgaaactcatgaccatctgctttttacttgttcctatgctaaacaggtttttattgcaaacaattcttggctgggagagtatcaatggcctgattctattgaggatatgatggaaaggtgcacaaacagggtgaagaatttccaaagtcgaatcactaatgcaattgtggcagcaacattgtataatctttggaagaataggaatatatgtattttttatttgtgttgtactgctcctagtcatatgagcttgaatattaggaaagaggttcggctgagaatcttgagtaaggggccttttaaagcttgccaaaagaacaattatttactcaatgtaattaatagttggtagtttttttgtgtggggttgatggctgtagcagcttccgctggtttggtggtgtggccttgtgcctttgtgtatttttttgcttgtttttgaataaagattcatctttttcaaaaaaaaaaattcattaaaattaattttcaactttaatctaattttcacaattgaaaatttttaaactatctacatttcaaagaaatgaatttcgaaattaatgtgggaaatgattcttaaaataaaataaaatatattctgaaaatttttctaatttaagttggtctgaaattgaaaaaaatttcaacttaaatatattt

SEQ ID NO: 324229 - DNA, 1016 bp, Cannabis indica
aaaaaaaaatagaagaaaaaagaaagaaaaagaaaagaatgaaaaaatttaatgaattattttgtttttaattttttaatttttaaatcatttttaataataatttaataactaatataatatggacaactaaaaatttgtcacgtgtagcatacatataggcagtccactgtggcacttaactgagatttttagacacagaagtgtaaaaagtaaaacagaatggtggttcagtaaattttaccgtaaaaaaataagtttatgtgatttagtgttacaaaacgtaaaattcagatagttttgtcgccaatatccttttaaaaaattatcaatatggcatcaatgtcaaattttgacatcaatattactttttaatttgacacccaaacatctctaatggttagcttcttctaagcattctaccatattattaaacactttctccaagcatcaccattggaggtgctgaatggaatgctaaagtaatggggtaagacattttaccacttttgaaaaaaattagttttccaatatcattaattacaatgttgtcatgaacagtttttaaataattaatttatgaataattgttaattatattatttctcctaatttacatcttaaaatgttatgtaatgaaacaaaatataataaatattgtagcaaatgtagcattttaatacaaattatacacattattactggagagtggagatgtcttaccatttttttttttgaaagaggaaatggtcttacatttgtcatgctctcacattaattttacctctccctactttctctcacattaattttaaacttggtataatttgaaattgttaatttatttgattttgttataaacagacaacatttttttttttgacgtggtgaacaaagtcacacatgattaacaatgcagcacatcacaatcggctgtggagctcctcgaaccagaatagctcatcgcctaaccgaaaggcatgtttttgccaaaccatgagctgcggaaaacaaaa

SEQ ID NO: 324230 - DNA, 1867 bp, Cannabis indica
aattagacatcatggtcattacaaataatgtattccggaatagtagatatctctaccatagcagttaagttatgagcaaaagcccaattagccacattatgcaccgcaaaattacacagacttgaaatgaaagaaaaattacaacccacaacaaagaagaaagcctattacaatggtgtacgtaattatcaattcactagtcaaaggaagtcccctttaaggaactaataacaatctcagaatcgctctcaataatcacataatgatacttcaaaaggtctgccgtagtaagcacgctgtaactttaccgataaggggattagtgaattctaaaatatcagtagcaatccacaaaactttttccagaaagtctctagccaaagccaccacacacatagtctcagtccctacattaacatcacagttaatctttaaccagtcttcaggaggaggagaccaagcgagcgtaacagtagcagatgggggagggaataaacaagatccataatctgcataacagtgagtaataaagtcaatataatgtgtgatgttattcagattattgttatgtatcttatcgttttgggcccaccaatcgtatcaaccactaccaaagcatagagaaaaatctcatccacattaacaccctttgcttttagaccccacaaaaatttaacccaatcccattacaaccaccaaaaccaaaaattagccaaatctcccacggggaagttctccacaaatgaaaagctaagttacaatggagaaagaggtgttccatggattctcctcccatcccacaaactggacaggaagcattatcgatgtgcattctctttgctaaaagagcgcgaataggaagcacatccagaggatacaccaccacaaaaacttatggcactctagcactttactattccacaatctattccaaagggaaggtgccacgaccgacggagaagcacgatccagggcttggaccacgtacacagacttacttgagaacttgcccgattgctctttggtctaaatccaccaatcttttcctgaccactcggttttccccttcacaatattacaaactattttaaagtcaaaaagggaataaagtttattaatgtcacaatcaccatcacctaacaacatatcagaaacatttcgcacatcattaggatgattggtagctggtcttggaatgaactctttttcatgggatacccacgggtcttcccaaatatttgtatctttcccatcgttaataagcttgcatgcacttttctttaaaacatcttgagctttgacaatattatattccaaaaccaggaatctgaattcttataggagcaattcaaaaagtgtatctttcatatatttggctctaagaaacctgcaacaaagcgattgattttcattgatcagcagccaatcccacttagccataaaagctttattcatctccactatttttgaagtcctagcccccctttagatttgggaaggcacaatttgtcccaagccttcagatataagcccctattacctttatcacctccccacaaaaagtccctgatcatttcatcaatcttggacgccattttttttcaaaaattttatcgtttgcattgcatatactgagagagcgagaccaactgatttgatcaaagtggcacggttggttttcgagaggcacgtaacaataacttagtatatagatcacgaatgattctcgtgttattcacgaggaaattacattgcatacttattttgttttacatgttttaatttttatctttattttttatactttttaagatatacccacttttatagatgatgttcatattataccccttagattaatgtaaat

SEQ ID NO: 324231 - DNA, 659 bp, Cannabis indica
caatctcaaacgcacggtgacggcaccccctgctctcgacacaatgtctaaggtgtgtcccttttttttctcttttttgtttgtgagaaagtgttaaagattgatttagtttgtgaaacctaaattttgttagatttagggaaattttgttaaaacatatagtcggatctatgaaattgaaaaattttgaggaggaagaagaaggcccgatggggtcgataagggtccaatggtccttctttttatttgaaaaagccaagtctgatgggtctgatgcacagtccgataggggtccaatgtttgtttatttgggtattggtttgataagtccgattgggccgatggccagtccgataaggggtccgatgtccatttaattttttacattggtccgattgttcgatatgttcgattggtctgatggcaattccgatagacagtccgatgtccgtttaattttttgcattggtccaattgttcgattggttcgatggccagttcgatagggggttcgatgtccgtttaattttttacattagtctgattgtccgatttgtccaacgcagtccgatgggtagtccgataggttggacccaatggtcatagcaattaaatttaattaattaatgtttttaaattattttatttaattaattaat

SEQ ID NO: 324232 - DNA, 891 bp, Cannabis indica
aaaaaaaaaaaaacttttgaaagaaaactatttcattaaagggggacttatgtaatccctccctttatttttagaaatcacatccctcaagccttagtatccattagattatttatgaaaaagtcttggtaagatcaagggttggtggagaagctctcgctaaggggtatacatctatatacttatataatgctgttgttaaggtatgtgaggtggcagcaccaataaccttcttttcctattctttgctctctcatttttcttaatttttaaattttgattaatttgtggtactcactatattaatgtaatatactctatgacaaatgttactacactcagtatataaattatgactgaaatctgataaaatatcatacgttactatactcagtgtataaattatgactgaaatctgttaaaatatcataaatacaataaaagaattagtaacggctacagtaattaatatataaagagtttttttatcttctatccttaatatattttactataaataatatgcagtagtatattcaattatacatattgcccataaaactatattcaataaaaaatatgtactctgatgcaattatattggaggtagacatgaaaggcttattttgagagctaaaattatattggtaacaggtgcggttgattttactctttcccaaatgtttgggttgctcttaaagttgtctattctcaaactatcctaaaacaattctatgaaatctttgtaaataaatgtgttcttgattaattgttttatttgatagtaatatttgtttgtacagtataataattttttatcaccctcttttttttttccagcaattggtgattgctattgttgcccctaatttcacccaatatacgtggacc

SEQ ID NO: 324233 - DNA, 767 bp, Cannabis indica
aatgagatgaagctgttaaagactgactcaagagataaatcaagcacaagtactgcaacagcgagcaccatgataacaaaggtggaaaaatctaatgtataccaaaagaaaggatgagccaaaagattcatccaaggaaaaaaagaaacaaaagaatcatgagaagtatgtactcatttattcagtttatattgaattgaatgaaactcgcgagaacatctacctcgctaatgaaaatagggtcgaattttgtagaccagaaccgaggagacatgcgaggaataagtgagattcaactaaatattgccatttccacaaagatattgggataccatcgaagaattccgtcaattgaaagatgaaattgaaagtttgatctcccggggatactttaggcaatacgtgagaactcaaaaaaatgagcctaatcagcctaatacctgaataacccgagattgcaacctccccccgttgagggtgaggatatctttattatttttggagggcctctgcatagacctcattctccgcatcagaagatcccatttcctacagccgagacctcattcctagcctcagggaatttgtccacaccagagattggctggtccaaaggtcttcttttgcaagcttgggtcttgggccagttgggttctttagtaaaatccatgaccacgctgacggggattaccttcttctcggatttcttgtcagcctgagaaggacctctaaacttgctctcaaaatctatgtgttgggttttatgc

SEQ ID NO: 324234 - DNA, 1192 bp, Cannabis indica
ttcaagcattgtttagacttactacaaatttcagcctagcaagctgggtttttgtttttgttacttgcaagtctgtaattttctgtttagagtgtttaatcttttaattttgtacattaggttccgaggtggaggtttgtgaaatgttagttagttaccaaatgtacacgtgtcaagttagttggctctagttcggtatgttaggtaagttagttatcaactaactcctagctattcctaagacatgtatatataaatgtctaactagtgctaaatcaatgctgtaacattcattcacactcaaatcaatacaatacattttaccgaaactttgtcttatgttcaatggccaatcggctaatgtccaagtgagttaatcttgagtgttttgagagagatcaatgcaaggctttgcataacagtagattgttatatttaattttttttactataaatttggtcctcgtttttaatagaacgaacaagtcacaaaaccaagtactctaatattaactttatttactaatcccaacgcaaacctcaaattgcaattagaaaaaatgagttaggttggcgaggttgaatggtttggtgcgaaactccaagatcttggcaaaaacctgaagtgtaaaatatttttcaagtgtgctctagatctgactcgagttgttgcatcctactattcttgttagcagactctcggtaatggaagaaagaagccaagacattagtaattgatcttgaacttcccattccaagtatgcaggattaacagtattcgaggtacgatcatttttagaaagaatttgacgaggagaagatgattcttgaatgtaaaattgaagacgattacctcttatggcagcaaagaaactgttgtcgccatagccagtagttgtggtcattcagtctaattgaaaggctgtggttaaaataggctggagaagcattgttattttctctatttctgttgagcggaggcatttggactccatcatgttgagctcgacctccttgagttctaaaattgcctcgatcactggaattggttctgacattgttactggtagcaacattggccatcaatggtggccatgactctgatactagggttgtacatcggtcggtttagtcggtttatactatatattttccaacccaacataaagatcgggttataaaattctgcatg

SEQ ID NO: 324235 - DNA, 992 bp, Cannabis indica
ataaatttaagctacaacttacctgtagtgggtctcatggatgcgactcaagctccaaaagttgatgaccgacctccatagtcaattttgttgttcgattataatctaaggtcaaaagtagcctaaatgtatttacttatattttttggaatgttttattattatcttaattggtcattctttcctataaaaggagagctccactagctcatttatcaagtttaagataagttcccattcagagcatctctctttaatttctctctctagaaattagagttcccatacatagatatttttctataatccatctcgtgagaaataaaacttgaagcaggcgttgctccattactgtcgcgacacaggaaataaactactataaattgttgtgtctctcttatttattcttaactcataatacattctcgccaatctagtgagtaggtgtgaccaaatatatatgtccagatttttgtgtcaacactcttcttcaagatagctcctacctcacttaaaaaacttggccgatgtaaaacaattattggagaacatttgaagcattagattagttgatttatgaccgaggctacaaaagtgaagggacttacacaagagggaacactggaaaaaggggaaaactttccaacctcaagctggaaataatttccaccatggtggtaaaaggttgaacaaagaaaaactttggcaatagaaaaacaggaagttcaatatgaactttggtcaactacacctagagcctttgtcaaccttggccatatccaagcatcaaattgaaaatccatctcggtgttttcttcatcttcataaaaaatggggaaacaagtatttttagggaagaaacataccaatacggaagaaaaacaagggatcatcaccatggctaacacctggtaatggcctagctcacaagttgacacctggtgctggcatagtgccaaggttgatattttgtcaacctaggccaattctga

SEQ ID NO: 324236 - DNA, 1808 bp, Cannabis indica
gtcaaaataataaaaattttatttctattttatactataccaatcatcacaatttttattcattattgattctatagtctttaccaaacaaaagaatagaaatttcattctattctattcctattcctaataccattcacattcctattccatttttattttgtaaccaaactccaaatatctttgtaaacataaaatcacgtgcctttttttacgtgcttttttgtaaagaatagaatctttatggtcataagttttttatcttttgttgtaactactttatttagggccatcaataatacctaactttgttaatttctagatttagaatagtaacataccctacatacgtacggatgccctaatatctttaattaacaaataggtgtcggatgcccctaatatctttaattgacaaattacataaacatctttgtatatatatttattaaaatatggagagtatatgtatgtaaattactaaataaatttaactacaaatattaattttaaaaatattaaattatatttaaaaaaatacagcgaatcataaaacaaaaaatttgaattatcaaaaattatatatttatataaaaatatttaaatgaaaaatcaatttttttacctttatcaaatttttttttattattattatttcttttttcagcgataaaatatttaaattttcttaataatgcctatattacttaataaaaatgcatatatataaatgatataacatttattacctcagaaaaatagagggcagagaagagaacggtgaaaaagggctccatagctttgatagtgtgtgtgaatgaaacagagactttcccaaggctaacattggtcaacaagttgcctaatgtgtgcgccacagccaagggcagtattgctgcaaactgaaaaacttattaaccattaattcacttacctaaacaaacaatatttctaataactaggcctttacttttcaacttccaataattacactcataattattattattattacatcaaataaaccgtttgttacacttaattatgctgaaataagtgcaacacatctcaattgcataattgatcatttaagtcccaaaaatatgtggtgaattattttgccctccaatttccacatccaccaatcattcatatacatacaaataattcaccacatattcttgcttcttatagatacaaattatttcgtattcaccaccttttattgggaaatacaaattatctaaataaagtcaaaagaaaataactatcacagctctaaaaattctataaataataataaatattaagtaatttaatattaaaaactaataatctaaaataaccgatcaaatccgtacttttacggattggattagattgaattggatttgaattattatgcagattggattagatccaacatatgaaatttgcacttagtacagatcgtatgcactatgagcaaaatagtacggaataaatttacacgactattgagataaagaggagataaaactcttcaaaaaaagagtaaatgaaataaaataaaataggcaaaaaaaattaattcaatgctataaaattatcaaatgaatgtctcaagaatcgaactcatgtcacttaacaagaaaagaaattattactactaaaggaagtgatgttttaattgtttttagagtacttttattgattattataaaattattataagttgaatatgttgtagttttctagaagtataattattgtattaaaaaaaaatttaattaaaatatttttttatgtaaatttgaaattaaaatata

SEQ ID NO: 324237 - DNA, 1264 bp, Cannabis indica
acaaaccctctctcatgaaaaccctgaaatctggtcatcacagtgtcgatttccaattgtagtgtctgagcttgctgatggccttttctttgtcacttttgggtgtgaggggataaaggtagaattcttgagggacaaccatggcattttgctcaaagtgtcacggtttttgctgctcctgatagtgctttccctattcttccagagcagcttcactatgtccctttctgggttcaggtgtatgggattcctttcatgtgtaagtcacaggaacttgctaagtttatagcttctgatataggggatttggttgaggttgatcaatctactgttagggagggtattgggtcgtatcttaggattcgggtgttacttgatgttaatctacctattaggcgtagtttgaatgttcgatttatcaaactggggagggagattattaagtggattgactttaaatatgagcaattacctgaaatctgctatttttgtggaaagcttgatcatactcgcaagtattgtcatgcttatcttcaaaaatgtgatgaatgtcctactcttcctccttgtccttttatgattcttcttcgtggtaaggaaaaaccagctgagaaagtccagccctttcagtatccgcaccctccttctatttctgtggttcagcagcctcaggggggtttctatcttcctcctgtcacaaactttcctacaatccagttctcttctttatttcctcaatatttaactgctgatactcaatttgctagtgcttctgtttctgatggtatcatgattcctacccctgttaatcctaacaatttgactttgagtactggttctatggatcctactttgcatgttccttcacctgtttatggggcttattctactgattctatccttgtggctgatagggcttcttgtgaaccctctgggggcatacaatctgttcagtcttctgtgggaagtgcttctgtttcagcctttaaggctggctctggtgatccaaatgcctttgctggtcagggtgatcatcctgctgcccaacctgattcttctgtgcgagggaaaggccttgcttctgcttctggtgtgaagcgggcttcctttcaatcgcatcagcttatggttggtggctctcttagggaaactcttaagagagctagggcaaatgataatgatgatgctaccactcttgctgatttatctttggaacaggcgggtgttgctgggcacagctgtaacaccctaactatcttaggcg

SEQ ID NO: 324238 - DNA, 718 bp, Cannabis indica
aatgtaagaatagaaagaaagccaaaaaaagcggatgatgttaatcattgcataacgcctttttacagtatgaatgaatgagatataattaataatattgcatgtcatcatcgtacgtatatatatatacatatataccatttacatgaagaaacgtagctcacaatcttatatgatatgatcttcatgaaaaaggaagaagctacaaatggaagttaattaatatgttgccacgttgtaattttttcatatcaccatttatataattaagttaatcatttctaattaattatgaggcagctttaaatatttgttcttatgatcatatgtgcttatatatatatgtgtgtgtttggatatgcatgtttaatcagtcccctctttcattggaaattgttaagaaaaatctcacatatatataaatttatatatatatatatatatatatataagacaaaacaaaaaattctcaattaatacctcatcctctctgtatactgtattcatatataggaatatatttcataaatacaataaagaaaaaacctacagaataggtatctctctctctctttttttttttttcacaaaaatctatattcttattttcgtaacaatattaaattatattgttttcacattattttcatgttagtgttatttacagaccaacacgagtgtttccagcgtgtcttgtcctcactcgcacgtttcctgg

SEQ ID NO: 324239 - DNA, 582 bp, Cannabis indica
aataaaacaaaaataataataatatttagggacactttctcaaaaatcaaaataacacaatgaggaagaccgaggagcgcaattgacggaaagagtcaacgtttgaaaatgggagctaattaatataattatttaatgaaattgtttttttaaaaaaaaaaaaattaaagaaaaaatatgaatacttttttttttttttttttgatgttgtatattttgtgtcatttattgtaattaattattagaaacattttttttttaatttttgaatatgtaatcttatttattaattttaaatgagtgaatagaatgggtaattaaataggggttaaaatttaggggtgttcactaagtatccgatctaatccaatctgtacgatctaattcaatccaattcgtaaaatgtagatatccgcacttgtgcggattggattagattgaaaaatttaaaatccatacttgtacggattggatgttgtttgacctcaaaaagtaacccatccaatccaatccgtacttaattatgtatatttttaaaaaattataatatataatatatattaattttctagtaatattaaa

SEQ ID NO: 324240 - DNA, 943 bp, Cannabis indica
atttatttaaaaataattttattgatatagtattaagaattttaatgtaatttgaatatacaaattaaaattatgtgttaaaaaaaaagtttttgtgagtgtgaatgagttcaatattagatttatttattttgtgagtgtgaaagtgtttaaggtgattttcatggctttatataaatcttaaaatatatactatatacatacatatgttactttttttaatgtttggaatgaaacatgatgtttttgttaaacaactaaatttgatacaagtgagattcaccaacttggaacaacaatataattctttagcaatatttaaatccaacaaaatcttgatgaatcaaaaattgttactttaatgttttaatgtaggaaattaaacatgccattttaatatattgttgtttgtcttaactcttaaatccaacttaatactttgttgtttacttaatacctatatagtaaattaatttgaaaatatacatttccatcaattttggtaaatatttctctctctctttttttttttcttttcacaacaaatatataaatatgttttatatttaaatatattctatcaataaaaaatattcatcaaaattagtgaaaagatacaatttgagctaacttatgatgtatattttttaattaaacaacatttttaaatggtttttttaaaaaaggcaaacattttaaaacttaaatagtcaacatggtactaaattacttcaaactcccttttaatatataaaattttaaaacccataattattatattaattacaataaattttactctaattaggatgtgatgttcaacaatacaaagaatttataggcttatccattatggtaaactagacaaagaagattgaaattttaaataaatattcttgtttatttacaaagggttaatttcacaaatgcacaaaaataacaa

SEQ ID NO: 324241 - DNA, 1731 bp, Cannabis indica
ttctatcagcctctcggaaacaactgtaccttgcaaactgggtaaaagaaaaaataaaactaacaaaatactaaacaatcttaaaattatgcttttacttttattgttaataaaattgcattacaccacattcgaaaattaataacaattcaggccgatttaattgatattgcttactcttacttcttacagatacagcaattcgatgggcccaactgaaatgaatggtggagccccggcccaaactttgaacgggtacatgcatggatggatgctttgattctagtgtggccttttatatcaagatttgcagcaataaaacgtgtactagaattgtactactttcttctccccataagtaaattttatttatttttctttttgtttttcaaagacccatatataacttgtgattatgtatgcataagtaacaataagtagtacctatatgctatgtcattggcacagaacaccaatattgtattgtataaaataatcgcactaccctataattctttaagatatatgaatggaaatgtgtgtgtgcatatatacgatggattttcacatagatataaacaacctcgaatgttgtactaaatgttttatcaattttgtgcgcatatacaatgcaaagccagtggtgggagctgctccccgcgcctatcacattttgtgcgcagtaatttgtggaggggttattaataataacccgtaatattttaggaagtttttagggcacccgtaatatttaacttctaagatttcatatgttaataatataattaagcatctaaatttaatttttataaaatatggcaaactaattataaataactacttttaaatagtatgatgtcttatagcaatatgctctttattgaacatgtccttcttagaatgggacgcactttattggctatatttatttgtgttgataatttaaattggactagacgagtgtcgacctaaatttaatcattcatgacattttattaagctgtactacttctagttagttaattctattagagttttgtatgaagttagtttaggttgttatctttgtaacacagttagttgttgtcactactataaaaaggatttttatgttagttgtctttctttttttaagtcggtaagaacctctctgcatctataaatatcattagcctcttgatcatttttgattcactactacaaaaatgactttttacttcggttataaagcgacgcataaacattttgtgtcggttggtaaaagcgacataataatggcagatacaaatagtcaagttatttgcttcattttaaaatcaacgcaagctgttgtttttcttcgattgagaactgaagcaaaaagtatgctctattagcgtcagtttttaagtgaagcaagaaacttagcttcaaactgtaaccaaagctaattgggttattgcgtcggttacaatttgacacatatttttatgcaatttttttttactttttgttggcagctataaaatgacgcattgcggtaggtaggagaaaattgcagatttctttgcaattttttccacttgcattttcaaatattagaattgatttgcataacaatatttatatgactaacaataacatttgtaatataataattgtgaggactcggttaagtgactcaaaagtaaaaatataaataatgataaataaataatataatgtatatatgtacattcaaaaaaaaaaaaa

SEQ ID NO: 324242 - DNA, 1480 bp, Cannabis indica
taagcaaagaaaaagagaaaaaacttatcatttttcacatatattttatctttaaaaaaaaagcttaaaattttcatatatctctcatagtattagaattaattggattgaaatcctagtccttgttgaaatgtcattcgaattaatctagagtagaaaagaagaagagaaaagatctttcatctttttcttatcatttatctttttctttttaaactatagctttatcttaatcttaatagcattagaaactgttgttaccttttagatttagaattcctattcatattctcaaatgaatttcaaaattctaagctagaagatgaagagaaaaaaaaaatcatatttcttatcatttttcttttctttttaatttttaaatttaaaagattcccaattgctttaggattaggagattgagctcgcttataagtaagagagtttttaataaaaaaattctcaatttcctcaatacttcccacgctaaaacagacacaagtacatcaatgcattccttttaaggggagcgttgtagaatttttctatatacatgaaatgtctcaattacagatgcattacttctttattttatattaaaggagtaaataaatagagcaatcctcaacaagtcagtaaaagaggaggaggaggctggattcaaaccctcaacaagccagtaatctagcctcatttgatttgttgccttctgctccacaactacaccaataatacctacgacagtgcctaccgccgcactaacctccacattagttgtctcaattgtggtgccagcaacttaactctcttcttgagatcccttcagtaggctccaaattcccaatgaagatcattctcatagaatttgtcgctatgcagagggcaaaggattctgaacacgctttgagcaggcaatatgaggaagaacagagggttttgtgcatgagagcaaagagagtttctgctatgaagagggctgaaacctctgaaggactttttgccactgttcctcctaggccaatggtggacatcgaagccctagaaaagcagatggcacctacggtagggagggaagctgcgccttttgctgctgaacttctggatcaagtggctagtagtgcatccaagtttcccctggagacatgggcgacttgcagtagtactgatgcattcaccctggcccacgcgaccaatcagcaagcagtgggggtgaactttgatctttacatctttattcttactatcgtgtattgtttttgttttgtcatatttcaatcctgtgcaaggtggctttgatggtgcatagggctataaaggaagtgggcacctttatcacaaaactcgaatatgtcaaaactaaaatcaacagctgtaggccaccaacaagtgtctgctgaatcaaaacgaggttttgaagagggaccttgaggacctgaaaagtagaaagacttgctgaaggttaatctgttggaaatattttacc

SEQ ID NO: 324243 - DNA, 963 bp, Cannabis indica
agagagagagatctaatatgtgttaacagaagtagtatattttattagagaggagagaaatagaagagaagagaagagaagaaatgagtgggaagagttttgcctggaaaaacgaaaaatattataataaaaaactacaaaatagtacgaaagcagccaatgctaaaaagcgctggctgttcaatgcacaccccctttttattaagtacacgtaaaattgatttaccaatgccgttttgacacgtcacctctcaggtctgtaggacatggggtgcgcatggctgatggcagcgcacgatagtgcttccttttaaagtaaataaataaaaggataaattgaaaaatatattttttttatccattaatcaaaaatatttttatattgtttttttattagaatatgcctactttttttgagtggattgcctaatatattctcattttgtacttaagtctagcatataatttacataatttaaggggtctaatggggacatcatccataaaagtaggtatatctaacaaaatatgaaaatagaggtaaaaattaaaacaagtaaagtaaagtgggtatacaatgtaatttcctcataaataaatgaattgagaagctcaataaataaataaatttgtttaatggactaaaataaatactacaaaaaatgacacattttatcctagtttttatgcttgaaaaaaatagaaaataatttatttcatttttgtataaggtacatatggtattattctttaaactcccaaccaagattcagtttattagttagtctttaactaacttaattatcaattatgagcttgtatattggtcattttggcctatataatgtaaactactcctctcatttcataaaaagtcaaacacaagggagaacaacaagaagaaagagagagacacaatacagtagaaagagaagttagagtgagaaatggagagagagagag

SEQ ID NO: 324244 - DNA, 758 bp, Cannabis indica
ttttttcgattttttttttattacagatcattatctttaagttactttttaaaaaaattttgtttacacgttattttcacgttgcggtgacatgaaaataatgttgaaaaaatacaaatctatagacatataagtaaaaaataaaattcgtaaaaatgtgaaaaaaaaaattaattttaaggtgtattttgtaaatttctagggattattacatgaactattgaaatttgaggcatgatgagtgctaccgtcaaccttctataacaatctcttagtcaatttccgtgcctgaaaatacatgttggaaattttttttccaaaatattttttatgacggtgttcgtcatagttacaatatttttgtaaatttttaaatttttttgaataatttattataccaaaattaggtttaaagatttttaaactcgaatagtaaactagaatattagtaacactgttttttttttttttgaatgaaaataaactttattagacagaaatatctgctaaaacaatagattgaagagcaaggggaacatcactctcagtaaaacgacgacctgaccaataataagcaccacgtgccatacagtgcgcggctttgttagcagaccgtttaacatgaccaatagaaacactacttaaagaagataaaatagattgacaatcttgaacaaatagaccaaaaatagaaggcatagataccgaactaagaatagcttgaacaactaaaatgcaatccgtctctaaaatgacat

SEQ ID NO: 324245 - DNA, 797 bp, Cannabis indica
cacagtatactgcagtatagaaatttaaaaaaaaaacaagtaaaaaaagtaaaaaatagtaaaaattagtatatcatgtaaatttcccacaatatataactcttttttactaatattaaaaattgatactttacatgttacaactgattaatatattataagttagagcttattaatgattcaccaactattatacaatttttaacccaatacaatctaccaaagtatgtaggagtgaatgagtacaacaccactattatgatgagagacaaacacttgcatctatacaaatatacacaaaaattcatcttaagttcagcttcaacatatgacatgactccatggaacaaaaaaaaggggcacaccattatccaacatatggtatttatttatatatgataccattcaatatttagtattgagaaaccaattctctatgctaaatatatcaatatatttattatttatagcatacaaaattggtcatctatttttctgttataaaatttagattcaatatgttttcaaacataaaataatgaagcagaaagaaagggagagatatgtaaagaaaaaaaaaaataaattaaaatgaacactactaatataagagttaaaaactacaagtcgctattcatataaagaaaatgaaattatatactattcattcatttttgtttaattatattccattatcaaattcaatttttaagcttaacacatggatggtgatgttaaacacaaatcatagattatgagtattgaaagcaaacattttactcaccaatcaacactta

SEQ ID NO: 324246 - DNA, 931 bp, Cannabis indica
tgagagattaaattttttaaatttaaagcttactaatatctaaaacaaatatcaattaataaaaattaattttattttgataattaaatttttctttgaaaaataagatgctacacaaaattttacaaatttaaatttatttgataaaatgatttataaaagttgcaaaaattgaaaaaataggcaaaacaagggagtatacattaattgcgtactcccccgcgcatgctagggggtttgagtgagagaccatgctgcatgcagccttgttgtgcaagggagcttagtcacgggctacttcagatagcctcgtgttagagaaaactcggataggggttgtctgaacccgtatcatgaccaacttttgcccctcagatgcgcgtgcatccaccaaaccctagcatagatatttttccaatttcaaaaaatcataactaattcaattttaatcaaaatttagttctgtaaaagccaaaattacttattttatcaccaactttccaaaataattttggaacgaaaatcacattatttttcataatttcataattaatattcaatcattaattaacacatcgaccaacatgaacacatccaaatcaaccaaatcatcactttaaatccatatttcatgaaaataaatcattaccatggctctgaggccagttgttggaacttgttttactaggatctagatttactaacatgtatatttgattacaaagtataatctaacatcctaaatatgaattttctaaaagaatgaaataaacacatataatattgtagaaaaccttaccttaatagaaaataatgactccttccatttagatctctaactcttattcctttttgttctagagtattactaagatctgaacttggatctctttagaagatggaattcttcacaatcttccacactatgatt

SEQ ID NO: 324247 - DNA, 1187 bp, Cannabis indica
tttgggtacaatacatataaaaagaggtatatttcaaataaatataaaactagaggtaaatttgattaattgtttaataaaatgggtatttttaaacttaccccatactatgtaatttaccaacccatgttgccaacttaaaaaagaagaattcatatgcaacataagaaaataacaaaaaaaatcaacaataaaataacaagagtacaacataaaaagatcgtattttatgtaaataaaatttaaaaaatcgtaaaaatattaaaaatttcgtacaaactgtatttttataatttctttttgttgtttttgtacatatatatttttgaaattatcccttcataaaatgtatagaagtaaaatcgtgtattcttgaatcttgacacaaataatttggtccactttcaatcgtttatatgggccaaatattcaaaaaacataaactatttgagcctaggcccataatcctataacatatagcttataatattattccttttatttattatgatacagtttagggtaaatttttatcatatttaataaaacattcttactctataagtaaatttacacaatacacttaaaattctatttttatttttatgtttttacaaacttttttaatattttttcggatacttgtaattatattttttatgaatttttttacgagttttcacttatttttattcaaagaaaaatattgattttttgtaacaataattaaaacaatattattattttcttataacagcaatgtcaaaataatgattttttgaaaataattgaaaaataatatttcgtacttttataaagaaaaaaaaataaattcttaaaaaaaaagtaaatctgtaaaaatataaaaattttgtcatttttaaatatttataaaataatccttaaaaatatataatataataagacatttttttaggaggaaattacattgtatatccactttacattacttgttttaatttttacctctattttcgtattttctcagatatactcacttttatggatgatgtctccattagaccccttaggttatgtaaattatatgctagatttaagtagagagtgagggtatattaggcaatccactcaaaaaagttggtatattttaataaaaaaataatataagagtaattttgattaatggatacaaaaaaagagatatt

SEQ ID NO: 324248 - DNA, 1497 bp, Cannabis indica
aatgtaaggttttcttaaatttacatgtgtttaattatcgttttagaaagttcatatttagggttttaaacaacatacttgtgagtagatctaagatcctggtaaaataaattccgacactgggacccagacccagacatagaccgggatccaagacctaaccaagatcgagacccaaacctggaatcagacttggaccaaaataaggacctaacctaaaccaagacccaagacccagattcggaccttgacctagacttagattggggaccataacccagacccggaccagacccaaacctagacctaggacttagaaccggaactagactagggcactggacccaaaccagcaccaggacttagaccagaaccaaaacctcgaccaggataaagacctagacactaactcgaactaggatctagaccaagacccaaactcggacttggagctggattgggatccgagacccacacttgaactaagacccaaaccggaactaaggtttagagtatagggtttagggtataggattagggttttgggtttagtattttacgatttagggattttagggtttaggtttagggtataggacttaagggtttagggtttatggtttagggtttaaggttaagggttaaaggtttagggtttagggtttagggttttaggtttatggtttagggttaagggtttatggtttagtgtttgcgatttagggtttagagtttagagtttagggtttagggtttaggatttatggtttacggtttagggtttagggcttagggcttagggtttataagtaaccaaagcttatagagcccatgatctccttcatagaagaagacgttgctcgggttagtttctcgcataatgacccctagtcatcactgcataaatcaagaacatgactgtagcaagatgcatggtggacaatggagcctcctccaacattctttttaagttaacatatgaaaatatggggctccaactcaccgacctagcaccctacaatcaaatgatgtatgccaggccattgcacctgttaggtatatcaaactacccctcacagtcagagaaaattcaaccaccagaaccctgatggtgtagttcgttgtaattgatgttccatcagccttcaactgttgggattttatgtcctaaataaaactcatttcaataaaatcttatttgttattaataaaaattagaaatcatttatgtttgcatgtatttttaaagtttaaggtttaatatacaagttctgttaaatccagaacatatagttattcacaattaaagtgatgtcaacacattggaaggtaattatgattatatgcttcaaaagactatgtcccatgatttttcgctgatgtgatagtcatcgataaagtttacttacaccttggataagtgttatgttctttccaggacattggcaaagtatgctagtatcatatgtattttatttttattttactaatcatttt

SEQ ID NO: 324249 - DNA, 1148 bp, Cannabis indica
agagataaagtttctttgatttgcgaaatgagatcaccgaaaactgagaggtcttccttgtgatggtgaagggcatcagtgatggatttgcaatccgtttcaatgtcttgaactaaaaagtgttcttcaatgcaccatcgaagcagggagaggagagcctttgcttcaagggtggcaaccgggcccccgccatagtagggctgagcgagagcggccacaaccaaaccttcactgtttctgataactccaccaaagcccacttttccgccagtcttaggaaccgctgcatcaacattgagcttgaggaggccatgggcagggggaatccaagaagagggggcaagaactgaacgagtgggacccatgaagcttggaactgatgaggacgcattataatctgccaagaagaaaaaaaaacttgaatatagctaagaagaattctttattcttttccttaaaactaatctagtcttataaataatgtgattgacctttcatgtatttatatatttcccaaggaatttaattattaccaagtactcttctttttagtaaaggacaagtactctttctgcacaccaagtatactatatatagggtacctttttaaactaaaaataataattatataataaatccttttcaacttcaagaaacaaaagaaaattaatataataatataatatctttgtttttgttttttttattagttttattgtgatattattcatttggctctacactccattgttgggataatatatatatatattaatcttctcctccctccatatcaaataaattaatattttccttgtcaactttaaatattagaactctatttatattttacaaaaacaatacataaaaagaaacatttagacatgcattatatagtttaataagaatatcatgatcctgttgaaaataaaatcgactcaaaatgtatgattcttaacatattgaaaatataccaatgcctttttcatattaaaaatataaattatacacaaacaaacataattgttttaattttactatagaataattagcatttttatttcttgaacttttccaaaaaagcgtacaagtgaggacaaagcacgctgaaaatactcgtgttggtctgtagggtcagtcatcaatcc

SEQ ID NO: 324250 - DNA, 549 bp, Cannabis indica
ataataattaaaaaaaaaaaaagtgaaaaccaaaacatagtacactccattttcccattgttattcttgatagagataatttcataattagaaatagaatatcatcactttcaatattttaatattcattattattactactagctagccatataatatattatattatatgaacaataattactagtagtagtagtagtggtggttatgtatatatatataattgcttttgcatgatttagtggttaatgtagacataagggaactattaacacttttagacaaagttgccactaatgagaaagaaagtaaaaacacactcacacatgtacacaaattattataccaaaaatgaggagagttgggttcacaaccacaatctccaagaacctattaatgggatgagtaagagtagatggtgtcatagcacatggatatatttttgttagtgggagaagctgatgtttacacttataaagatccaaaccaaaacctctatttctctctctctctatatatataataaataaagggagagagagaaagaga

SEQ ID NO: 324251 - DNA, 1184 bp, Cannabis indica
taagttttcactgttgttctacgcgactgttttttatttgttcctctgttgttttaattattttgttttgttgttttacgattattttataaaaagacagtattttttttaaaaaaattcgtgtgacagcaaaattataaacttttgtccaaaatccagtattttttgtaaaaatccatataaatatatatacatgggctttaaaaaaattgtaaaatagaagaaagtttacaaaaatattgtgatacggagtttttttacatttttactgcaccaactttacaaaaatattgtgttttaataaaattaaaagaataactaaaaacaaccctaaaataacttaacaaacaacatgaaaataactataaaacaacaaaaatataactataaaacattaaaaaaataacaaaatattgacctaattaattgcaataagcaaaatatatcaactccccaatatatttttttgggattagttgcagcataatcctcaatatttttattttagttgcaattaaccttcaaaactcaaattttgatggcaaaatatccaaaacaagcaccattaaaaaaaatgtattaaagttcttttattttaaaaatattaacatacatttttaatggtactaataataataaataaaatgtatatttttgtgttttttctaaaaatatatattaaatattattttatcaagttaacttatgttctaaaaatttatttattatataaaaataaaataattaaaattaatattgtatcaaaatttaattaatacttataaaaagaaaatatctcctttcaaattttataagtctgagtagagaatacatattacatcatcagacctagctagatatagatatatgtatatatttgtatattttggttttatatataaacatgcactggatctggacctataaagagacatatttgaatgttgaatcgtcttgttctaaagaaacaaaacatcaatttggtttcacatacaagaatgagtgatgactgatactctatactctatactctatactatatactacaaaatacaaaatacaaaaatcatgctaagcatgataataatatgtagctatatacatatatcaatatcatttgtatcaatcaataataaataggaataggaatagttacataagacactattttttgtaaaatattt

SEQ ID NO: 324252 - DNA, 1624 bp, Cannabis indica
atccctctcatttcagcgttatgccatgagtgtctttcagactctgcgctaagtacttttgagtgggagagtagagcattttctctcatcgaccaagggtagctacgtccttctacaaatttagaaaaaatacttccctttttcttcgtttttttttggtcgaccccaagaacgtcatccaccttgactcggagacccccatgagtgccttctttcatttaatgtagcacactaaaagcgaacttactatcgctatgtacttcttcttgtgtaggggaacttttcctaaggggatatcttcgatatttattttttatgggttgatagcgtaggctttacttggatgtacgagcattggggttattggctagtagaccctataggagtccgacaagcttcccgaagtatattctcttgtgtctgtttccaagaatctgttgccttcctaaatgcgaatatacctttttgctctctcgtagaagtcttcaatgtcatcaaattcccttttcaacatattcccccataatccactcccagggcgtattccagcagctatggcgaacttatgttcttcgttggacattcttcctactttggcacttcgacattaaagcattggatgtaccttcttaagccttctttctccccttgctttacatcagtgatactcattacaggcataatgtaaacacttgccgcttgacgctgttgaaggaattcctctaaaaattgttaccataatgtcattgttccaggtccacacctcttgaaccacttgtatgcgaccccttcaagtgtaatcacaaggcattggcatcttgccttgcaggataccctcttcatcttcatcagctcactaaaagctcctagaaggatttttggtcagtcgtaccatcatatggcgtcatgcaaggctccttgaaattgggtggaagtggttccatttgaatttccctcaagaaaggggactcttcgtcgagttcatcatcctttgaatcttcctttgatgtcgtagccatccttcgacgtagatcttgtatctcttattctagctctctcattccctttttcactctttctcgggagttggtgaacagaacatggattttcctagcagttcgcatggagacttcgggtagtactcctctcatcccatcatcatgcagctctccatcatggttgaggggagataccttgtgctcgctttgcttttgagagggggtgctagtgcaatgtccccttgcgtgagattctttggctcaagccccttcgtatggctatatgatgtttataaattgcgatcttacccaagcagatagattcatgttgctctgggtaacctcttgggttctcattttgcgataggccccttcctccctcaccctttaaggtgctacccgttgatggcatggcgctcttcccaccattgtgcggagtttagattgtacactcttaccggtgacctttgtacaaaaagtgtgaagtttgagttttgccttcaagaatggcgctcagtacttcttgcatattggccagcgtagtttctagcctttggctcttccggtagagattttttagttcatcttcatagtggcgagtttgggattttgggctcatagagtta

SEQ ID NO: 324253 - DNA, 1796 bp, Cannabis indica
agttttaatcttaatcacattttacaaattcctacatgttttaatcaaactaccaagtatattccattacattaaaagaaagttcataactagtccggttaactttattccaaaaaaatcatatatgatagtacttactattcctgttaagtttattccaacaccccatatagatactcatcagtattactttcagctcttttccttttttcctagctgacccaacacaatcttaaaaaaaaacattgttgtggttctttctgagcattaaaaaaaaaagcctgaatttgaagctcaagagcatttggttggatatatatgaacttttgaatgaagggcacatgatgactgatgccagactctgccagtgtgtctcatatcataaaaatatgaaaacgcaaattaaggtgaaaaattgattataaagacagtaaaagattaaaatactcatgacttatttactgtaggcactatcattgtggtctgagattgctgataaaaagaagacatatcatcattaaaagcattatacacttactttcttttattcatcaaacacaataacattaacataaagagagtaaaattaaaaggaagaaagaagattggataaaattaattatcattcactgctgtgaattgaacagtactatcttttctagttttccttcttttaacgttacaaaaaaaaatccaaaaagataaaaaataaatgcacaaagaaaatcatgaaatgatgaacaccctttattcatacatatgtatgtatgtgtattttccttgatgatcaacagcagccacagcaaagaacatcaaaacaacattcacaagtctcgaagcagcagaaacagcaacacagggcaaacaaactgtaataattatatatcaaaaatatattaaaattaaatccaattaataattagatgattaattatgaaaaataataataatatttaccaagcgtaaaaaaagcctttatcctcgtggcgctttttaacctgtccaaggtatgattgatcctcattttcccctagagcatccattttttaaaattagataaatacagaatagagattagagagtgaagcaaaattaaactcagatatcatcatattatttcaaagggcacataatttataatcactgaactgtgatcacaagtcactgttcatctatattatacttttcaatattttgtatgatttgtgtcactattaacgttatcgtggcccatttctttgtgaccaaaaaattgtaccaacaacgtcatacagctcatatctgactttttattttgaataattttataatttctctcctaattatatggttagagtgttaattgaaacatcttttgaattttacaagtcacattcatcccttctgtattatcagatgtaaaatatattaagaagattggtgacataagattataaagacattatgtttatcttctaataatattggaagactgatgcataaaatagagaaaagaaaaaaagtgagacaatccatggggaagaaagataatgacagaccatctgtgtaattaaacaataattaattgaaaagcgagtaattgaatttgtatgtaagtgaaggtaattgcataatttggtatatttgtctgaacatataataatactgtaactgtgtaattagaagtaattgaagagttccaattgcactctccaattcttatggtcacccatgagaattgaatgtaattacactgtaattactaaaaacttttcatattaaaacattagctactaaaaaaatattattttcctatg

SEQ ID NO: 324254 - DNA, 1113 bp, Cannabis indica
ttatgtttttgtgaaataatccccaaaaaaaaaatagtaaaagaagtatgattttatgtatttaatgtaaattttcttaaataatggaagtacaatatttgccaaccaaaaaaataataattatatatataatataacaataattaataaatttttggtatattattttttctctagcagaaattgttataatttttttgttagtatatatatggtaagattatagtaggacctagtaaaagttttctaacggtaaggaattttttttaccattgatttttaaaaaaagttccataccagtagggttacttttgctaagtcctaccaaagaattaccctatatatgtacaaatttcaaaatttaattcaattatatgcaatattatatgtttgtttgtaaaagtattttggttttttttacataaatctagaatttttctaactaaattagaaaaatgcgaaaaattagagaaatatattaaagctgaaaaaaaaacatggaaataataatatacctataaaaagggtatttctatatttaaaattctattcacttaattaagttttagaattaacacttaaaaggaaattaatattcaatccgttaagaaagtgaggattcaatattgtaaattaagttctcaaccatctacattgttagattttcaaaacagaagttgtaagaatcatcttcactgagaatttaacgagtgaaattaaaaaaaaaaaaactaacaatatgaataggagttcatgatttctcaagatttaggctgatctactaattgatcatctttatgatatgaattagatctttatagtaaatgactaatttgataaagacaatttaattacataatggcattgtcatgtataatctctattatatacaacacattcactgtgatgtccatctacatcaacgatctaaattaagattgcttgtatcgagtaacgaaaatcagtgaaccatactagcaaccattaattaagatttcataactttatttatagctcgtcatcttaattatctatacaatacaaagtcacaacctcatatatgaataagaattttttttatatttatatataaattattaataaataattcaa

SEQ ID NO: 324255 - DNA, 1078 bp, Cannabis indica
aaacgatctgaattaatcaaatcattcacaccgaattcatttgttccggtcttaaatgatttgcggattatatgaacatatctaataagaggtctattcttggagaattttcatttttatagtttttaaaatataggtttgcaaaaatatgattttttttttctcaaaaaaagttattttatggaattttttttaaaataaagttaaagtatgaaaaaaaatagcataaagtgcatggttatccatcttgttactttaaggatacctggttattcttacctgattttcttatatttttcaattttttatttacttttcctataaaataacctaaaaatattaaaaactgataaaatttataatttcctctagactgatccatgcttaaaaagacattaataattcccttgtaataataataagttaataactttgttaaaaaaaaaaaacaacgttgggcctatttcaatgagcatgagatagttgtagtttcatcttagtagaatgggctcaataaatgggccggttggagctcgagcctggccaaagcccatttcataaatagacctaatttgtgtgttcggtattttatttctaacaagcttttactttcatcatccatgtaatgttgaagtgaaatatactatatggtcaagaattccatatcaaacttaatttgtgactatttttgttcacaaattttggacagtgagagcataagtgactccttttaactctcatttgtagatttagatcatatactagttagggtttgtggttataatcatagtattttaaaaagtggaaatatgttttagaaattagggtgctatacatggcaaggagtatgaggctttatatagaggaaattacatggtatacccactttcctttacttgttttaatttttacttccatttttatattctttaagatacatccacttttatagataatgtcctcattagaccccttaaattaatgtaaattatatactacacttaagtaaagagtgagtgtgtattggacaatccactaaaaaaagtaggtatatattaaaaaaatataatatgaaggt

SEQ ID NO: 324256 - DNA, 971 bp, Cannabis indica
catacagtaatagatatagcttagtaatttcacatttctccttataaaaaagaagtcccaagttcgaattccctttcaattcaagaaaataaatctactgtaatcaaatgattttttcatctaaataatgagtacactgtcgtatataatttacacttggacccatttccacaaaggaaaaggatgatgtgtcgacggtataaatcctgataatttataagtcctcaaataatagaatcatgcgagaaggttaaaaaccgagataagattgagtcccacgttatgcatcacataacaataagataaaatcgggatgcatagagaagtatacatagttaggatgtataatggatatacgtgatgaccaagtgttttcttccccgcgccatatgtgaagattgcatcttcacttcgattagtccgaagactattatatgcgacaacccatatggcccacgggttttaacttgtccgtatacgaacagtcaatatgcaactaaggatagtatacaaacaatcaatatgcgactaaagttttcgcagatgttccatacttaaatgtaaatagtcagaatggtcttaatcatttatttcatgaacatttgttatttaatttaatgcatcgaatgtaaaaatggtcacttgatgatcaattatgtaattaaaaggacatgttatagtgagatttctctcacctagaaactcgagaccagactcctctttaaaggacacgtgtattcagatttccaatgaaagctgaaatgtccgtgagagacttctcgaagtttagacctcgcccaggataaaaccagcgagatattgcgagtgcgacctaagtcgaaccacgtaaccataattctcattatgcagggtagatccaactcgcatgtgtcagaacatgtgcgagtgtcccctctatatttccgcgaaaagtatagagaccaactctctatgatgcaatttggtcccaa

SEQ ID NO: 324257 - DNA, 593 bp, Cannabis indica
aaactgtgccaaacgggccctaaaatattttatacagcttttaacacatcattgaagaaatatctcttgaaaattgctaatctataacattatatcacaaatttagcacttcattgtaaatgatcttactcattggcttgtttgaaatgtcgtattaagtcgtattgtattgtatagtattatattaaattggattattatatatcatatttttatataaactttaatttatactaaaattttatatatttaggtgtctataaaagttaataccacatataattttaaataaaaatattatataaaataaaattcaatataatactatacaatacaatacggtgtaccaaacgaacccgtagtgtttttacaaagtatggttttggttccatctatttttaataatgctcctaattaattggttcgcggtattttaaaactctatatttttttttttaagaataattacataagacactattttttgtagaataattatattttttcgtttaaagaatatttttttttacatttttacgggtttttaaaaaataactcgaaaataaaataaaatcaacaagaaaactacataa

SEQ ID NO: 324258 - DNA, 1157 bp, Cannabis indica
aatagagtattcttaaatagaggttctacatttttgaattaattataaattaataagtgtaattattaagtatatattgttgtaggtaggtagacacgtgtaatagtattattggaagaagtggagagtgcgcctctctctgattccgtacagagagagagagagaggtgatttggtgatcgactcacacacagaggacagaagatatatcacttctttctaacaagaaaattattctctctctatatatatatgtatatatatcatatgaagggccacgtcagactagactcatgactatagagagtgtaacgttttaattgacatcatcatctatatatatatatgagatattgtatatacactcgttgcttgcaatattattgcacgctttagaacatgatcatatatatgatcatcaaatttatatatgttatattatattatatattcaatccaaatatattggggttgatttaatttgtagcatatataatatagtaaacactaatgtataatgtaatgatttaagtgtttgtagttaattataaaaagaattggtagaagaaaaaaaaaaataaattagtgtacatatcaataataataatttgttcaaatgggataaaaaaatatatgggcactcgctttcccctctctctccatatatatatgggcacacaaacataagacagcttaaagcatttccaactcatatattaaatttgttgttatattattattgaatttagtgttaaaaattattttcactctaatcataatactaaaaattaaaataaaaaatattctttattattatattattttttttaatataataaaaaagagttacacatgcaactgacagtttgaaccttattttcggtgtgttaaaatttttaaaatttctcaaaatcttgtatgatgtcttaaataaacgaccataaaaaaattaaactgtttacccgaaaattttctttggtgatgtagatatcaatgtttgacacgtgacatgaaggatgatgtcattgagttgagtagacccgagtcatagcagtcaacttgggaggggaccctagcccgacatctaggttgactctaggatcccagaacgaaagttcagaattcaataacttgaatccaactcactatctttcagt

SEQ ID NO: 324259 - DNA, 895 bp, Cannabis indica
aaaaaataataatatatatgtattatattgatttaaaataataagatttttaatatttaaaattataaattgaaaatttttgtatttattcttttatttgttgttttttacaatatgaattttaaattttagaataataaattaaataatataaagaaaaaaaatattattttttaaaaataaaaattattcagtttatttattttaagaattatttaacattattttcataataatctatatttttaataatattttatttttgaaaattattttatttagttttcataatattacttaatagtgtttgacacgattttttatcaacttaatcttaaaagataattaattggataataaattcaagaaatgaagaggtaaaataataaatgaacactaaatatttttacgtaattttatagttaaatctatatagtccaccagtcaatattatttatgagttttggttgtgtttacaattggacatagtttctctaaattaaaactgtatctcctatttcttttgagtgaacccctatgtataggaatatgatggtggttactcaattttatcttagtaaaaatttgtaagtgatgggtggttaatgcatatgtttcacatatagctgaacaattggataagcataaataaatatttatatttaaaatacaaatagaagtggtctttgacttggttagaccatgttgtttgtgagcagatgcatagttgagtgtatagtacgaggaggtacatcattgaacatgtactgcgaggaggtacatcattgaatatgtattacgaggagatacattgttgtgttggattaaaaaatcctttgtgggcacatatgtataatgtatatgctatcataaaagtgtgataaaaaattaagtg

SEQ ID NO: 324260 - DNA, 637 bp, Cannabis indica
aattaagtatttatataaaattatattatcatataattaattatgtgtcattacatatataatgaatatttgagttcaagtgattttcaataaattagtgcggtacgtatagttgtaagggcaaaattataaatttaatatactacgtgccaatagactatattattatatagtatattcgtttaaatgtgttgcaagtgattttcaataaattagtgtggtatagttataatcagatattttggcttaaactgcgcgtttgaggtccagtttagttttaagtaaattgtggtaagacttttaattaaatgctacttcattatatatgtgttattggataatggaaatgacattgatgtcctttttagtggaatagtgatttgatcttgaaaaattatgtttttgtaaatgccaataattatactatatttcagtaaaaatgcaactatcactacaaaaaatgtgacttttaccagcacagttcgctactgcgctggtaaatcagcgcatttcgcaaactgcgttggcaaagagatcaaagttttaccagcgtacatttgcagtggctaaaatctaacttttaccagcacatttacgcgctgagaaaagccttttttgccagcacttttcattttat

SEQ ID NO: 324261 - DNA, 966 bp, Cannabis indica
agagagcttaaaccctaattaacaactgaaatccttagatatttatatattaaattgattaattacaaaagactaaaatactcttaaaccttgatattttcaagctactttattgggctattagggtccaagccaagctcctgcatggagcagactgggcggccatgtgttgtccaaaggctggccagccagctcctttaaggaaatcagttgatgtcccgtttgagtgttggggtccctattggctgagatgctaacctgaccttcctcttggtgagctgtattgccacatggtactgacttttaccgcgtatgcaatgccacgtcagtttggcaaaaataaggataacaataattattattatttagttattttttccaaaatttaattaatttttttatcaaatactatataataatacacaattaatattttttttagaatacatgaaattatttttattttaagagattaaaaagaaacatcaccattgttgaaacacaaagccaagggtcaaaatttttaaagaaaaaaaaaacataaaaactaagagaaaatctaaggggctcgactaataggaaagaaaatcgcaccaagtatagaagaatatgaaaatgacaattagaaatggaaatcaagagataaatgttgtggggagaataaaacaaaaggattagaattgaaagcgaatatttagtaaatatgaatattacatgaatggtgaaagtagtaaaaaaaatataaggattcattatcctaaataatttgaatctccaaaacgtaggatatccagatccattttagatcgggctcatctatatcgatccccaataaaaaaaaattaattaatattcttctaaatctaagagaggagttcgttgttgtattattcaaaactctgaatgttctttatgtaaggtaatatagtaaaattattttgtataaaatagtccatgaatatatgt

SEQ ID NO: 324262 - DNA, 1831 bp, Cannabis indica
atatatgtatatgtatatacataatatagctagcttgatttattacgtagaaaagtaattataacctttattggggcagagcatatgtacggcgattctagctctttgtcctctggtccttttggtgggcaactcgatgagctgcatattatttaatttatttatttaattttaagtgcacatatatgtatataaacaattttattaataataataataataataataataataataataataataataataataataatagtaatttagtatagtctagtagagtagtattgtactgactcgaattttcctggagaaaacacaccaacccagtcatcattggagggtttggagtttttaacagtcacagtaacccattctgcttctagttcagcttccacacgtccctgtataatttaccaaaattaaataaatattaatgaataatgagacaaaatgttattacttaaatatataataattaccttttgataaagttgaagaggttgagcagaaatagtggcagtgccctgtaaatcaagctgagttttaagaatgttaatcttggatagtggttgatcttcgtatggtattacaatatgaccccaaactgaagataataatgataatgtcaccattaatattagcataattctcttcatattacccaacttattaattattattaaccccattacttatattttatactcacactattgacactaccacacaccaaaatcttctacgttgtattattttgtaaagctagagataccaatgccaatttatatcaaaaaccatatgctttatacgtatacaagtttcaaaactctctaccgacacctcttattaatttaatattatattatatacattatttattgtccagttaggttaaaatatataatagatcttttgtatctatatatacaaaataaaaaaaaagtaacatggtgatcattgtgttccatctcaaaaccaattagtaataagtagagtagttctattcttatatatgactcaattatgcaccatctattcatgtgggacaatatccacaatataataaactaaaaatgtaacaaagccaaatatatacaaaatatatataaaaatgtaatgtatgaaatacaacgaatatcgtaatgcatgaaaaaaaatttactgaattaaaatttgggttgagtcgtggattaggttgctctctttaagacgttcgcgacactgcctaaaattatacaagcagactatcagtctcctcgtcttcaagataaaacaatccaatcgaaccactatatcggagctctattgcacgatagagaaccatcgaaataccacatccaataatcaaactactgctcggaacacatttgtaatataatcgtatataactgtatatatttttctgtcagaaaattatgtatttctcttattggttctgatgcattatataggaaatgcacagtaggcagtaacgggaagaaagatatctttgatcatgagacgagggatcgtgcacgatgctggaaatcaagacgagaaaacgtctctatttactaattaattaaacatatttaaaaactattttaattaattaaataaaaataataatttattaaataaaactttctccaaaaaaaaaaagtagacaccacacctgctcgccagcttagctcaacacggtcggacgaacggcaacggtgcgtgcgtgtatagtggtccgatgtgtgagtcatcacccatgcgcacaaaattgggtacctcttgggagtcaacctattccaaatttgcacattatatacacatctaatgaagtgttcctatccca

SEQ ID NO: 324263 - DNA, 2266 bp, Cannabis indica
ttaatctaaaattaatactaaaaataacctaacaaaaccctgatgggacagtgtccaaatataaagcaaggcttgtagcaagagggttccttcaacaatatgaccatgatttcaaagaaacctttagtcctctggtcaaattagctactatcaaaattatcttaattgcttcactatactagaaatagtcaataaggaaacttgatgttaataatatatttttgaatggggatttagaagaggaggtgtatatgaaccaacctgctagttttgttgatccaaaaaatccccatatggtgtgcaaacttcacaaaactatctatgacttaagacaagttccaaggacttggtttgataaactaaaggctactcttacttcctttggatctcagtgtgctcatgcagacaatttttcattcttcatgcacaccttagatcattccacaattgtactcatatatgtggatgatatcttgttacatgtagttcaaatgcagttgttacatcattaatagaaagcctcaactctctgtttgcactcaaatatttaggttatctcaattatctcttaggcatagaagttactcattttgctgaagggttacatctatgtcaaaagaaatacattctagatctcttggtcagggctaaaatggataatgcaaatccattacttaaacataaggtgaaaaacttacaactacagcgagtgatgcctattataggaacattattagtgcactttagtatgctactgtcactaggccaagaatatattatgcagtcaataaagtatcacagtttatgcaaacatcccttgaatcccattggaaaattgcgaagaaaatacttagatatctcactggtacatatgactttggaatgctcttgaaacctccttctaccttgtctttcactggtttttgtgatgcagattgggcctcgaatccagatgataggatgtctaccttggtcctaaccttgtctcttggtcctcaaagaagcaaaacacagtgtctcactccagcattgaagtagaatatcaaagtttggctctagctactgctgatctggtttgggttgagtctttactcactgaagttaaagttctttttagaagccacttacaatgcggtgtgataaccagagtactgtactcatgtctgccaatccaattctccattctcggaccaatcacattgaattagatttatactttgttcgagaaagagtgatcaacaagcagttgctggtgaagcatactcctacctatgaccatattgcaaatacttttacttagacattatctagcaccatatttaagcttttaagggacaaactcaatttattttccaaatccactctaagtttgagggagcgttagtgatgtcattagttagttataccagccttagttagttcattgtttgttatattttgacaattgtatattcttttagttaattacattaactaacttaactcttacatatatatatattgagttaacacctccattatcagtaagatatatacattcacattccatatttcttactctctctctttctgaatctaacattctaaacttatcaagtgagagaggcacgaaattgaaatgggaacggaaccacaacgacactgagagttgggctctggtgacgctcatcatcgtgtgtgccttgtctactggcatcaggagaaaatatagagagggcgctgatcacctgatcgggctcctaggtttgattcaccgacgagatgtgagtcctcagtttgccattaaaaccatcgtcacaagaagggatagcagctcgaatttgagcttagttttgggaaaagtaaagaaagagttaggcctagggatagggagagtcatcaggaagaaataataaaataaaagaagaaaaaaaatttatttatttattctattaattttataactttaaattatttttttaaaaaaaataaattttgaaataatttttttgtaattattaaataataatattatgtgtaccaatataaatgtgtcacgtgtacatgtaaacaatttatattgacacttaactgtagtaaataaataacaccttaaatttactaacagttcattaatatgaaagattttactactaaaatttaaacttaaaaagtaagtgcagataaaatgataattcaaaaggtatagctgctattttctattatttgctcattagccgagattaatgatttttattaattaaaactttttaatagtttatttatt

SEQ ID NO: 324264 - DNA, 947 bp, Cannabis indica
aatttttacaattacaaaaaactttttaaaaaaaaaaaaaaaaaaaaaaaaaaaactttaatagatattagagtatataaatttttgtatgtaatacgacaagacaataatgcaatgataagagggtttattattataatcttttacattaaaaaaacttaataacttttaattggaatattaattaattaatggatgataagttgaaggaagtccttatcagatatcacatccacaccacatactaataatatttataatttaagaagaaaaaaatgatacattttgactgacatatccatgtggaaccctactaaggaccacatgcattgtagtcccaatatatttgtgattatgtcactcttccctaccaattatcaacctacaatatttttttaaaaaaaataaattaataaagcaaacaaaattttatatgtcaaaatttctttcaaaagatttggaagagtactttatttccctctaacattatatattttttagttaaaattaatataattaattaatttaaaaaataatttaaatttaatttatttattaaatataatttaaatacttatttaaaaatattaagaaaattaaataactattttttatatcaatcttgattcaaatttgaattcgatgttaatttaattaattaattatattttataaaaaaaattattaattatattgtttaaaatatctaaatttatttatttattttattgtttgataaaatcagttaaatatattttttataaattaattaaagttatatatttaaaaaatttaattgaattgtattaaatttaatttttattattatttaattaataatcgggtaatagtaactctaatataattttaagcaagcataaattgcatgttattaagatctaatttataaatataggtctcaatatatttagttggtctagattgag

SEQ ID NO: 324265 - DNA, 1594 bp, Cannabis indica
attaataattaataaaaattaaaacaataattattaattaatactaaaataataattaataattactaaaaaaatataactaacaattaataaaacaataattattaattggtaataaaacaataattaattaaacaatacttaataaatcaataaaaataaaataatacctaaaacaataactaaataattaataattaataaaaacgaaaaaaaaacccgggtccgatggctaccaatcagaccttcacaattttataagtccgattggtccgattggtagccatcaaacaacaccatatttttggcacccatcggacccacgtatcccccaaacagtcgtaccatcggaccatcgcacccaagacggtcggaccatcggaccccaaacatgaccatcggaccccaaacaggagcatcggaccctcttcttccccagatccgaaacacccaatcccttctcctttcacagatccgaaataccccaatcccaattccacaaaaaatttctaaaatctaacaaataatagtttcacaaacaattccaaacaaaatcacaaacaaaataaatcttaaacactttctaaaaaaaacaaaaaaatcacaacatacctttgacattttagcttcgggtcagtcaccaccgtcggtcgaactcctcctctgcgccgtcgagagggtcagtcagcaccgtgggtcgatgggtcgagcgtgggtcgagttctgctgccccgtcaccgtcggttgaggtttgcgttagggttgggcgatagtgagttgagagagaggaagagagaggctgagttattcgggctgtaatgtaaggggtattttcggaaaattagtaatgtggtcatatatgaccaattttaataactatgcatttagggataaaattttagagtattctaagtatggaaattcaaatttccctcattcaaaatattatataaaacacaataacatagagctctttctctctataactatgctaatcaatattcaataatagtaattctcagcaaaagaaaatattcaatagtaactaaaaatacaaaatatactaacaataaaagttttgtttaagtatcattttaggagtactcacataaactttcttatctataaatatatatatatataaaggagaagtatgagtcggtgacgtggcggtgttttaaagtactcattcttttttctctatttttctactttttttttttattttctccatttttctactttttttattaagtatttattcttttttttatatatatatttttctacttatttattatttttttaaaaaattgattattatataaaatattaaaaaatgatatcataaaaatatcatacacgtatttagatataatatcatacacgtattaacaatattagtttttttactattttattatttttttttagaatttacatttacaaaaatatcatattgaaaaaagatcaatattagttttttttactatttttattatttttttttagtaatttactttttaaaaaaatatcatattgaaaaaagtatttttttactttatttttttattaatttttttttcttattcac

SEQ ID NO: 324266 - DNA, 1078 bp, Cannabis indica
aataataataaaataataatagtactaatgctaaacaagaaggtttttacgtgattttaaagttaattctttatagtccatgagcccatcttattcttgaaatttgatgagtttacaaagtattaatagtacaatgttcttgtatcttcttttaagattttcaatttggccatccctaaatctgtgacttcttcccttctttataggtgtttggggatgatagttattcccatttgatcttatcttcataatcgttcatgaaacatggagaatttttacgtttcatatttacaacacatggaataaatagataactgcgataactacttttatctttatccaaaatggttatgctaactaagtttatatgcctcgcaacatataattgtaactggtttttgtgcttatcatgaaagcagttttttaaccgaggtatcttatttaagatgctccttgcgttctttcataatattaggactaataaggtgtgttttgtgagatactatcttctcaatttttcatgaatatcttaaagtgaatctctttttgtcctttagtttttcaacatactcacgagtatgtgggtcaatgagttgtaaccttttaaagaattcattatatacccttttcagctacttgttcctatatattctatacttgttttgtttttcctttattatgtttataccgagatggactttatgctgttggttgttcatctggttggtcttactcaataataattggtattcaatacgtctatcatctgtattccttgaggcgaattactgaacatatttgtttcttcactatttgagctggttcgttttccagcctctttacatgtgttgtgaccatacagctgctcaaaatattagtataatgttataatataagataaaagataaaagagatatgtataatgagtttaaattttaattgtaatgtttaaaaataaaaaagaataacactttctgttttatagccacatttaataggaaaatttgattaaatatgcttacataatcttaaatttttttccgtaaacttagaattaccaatatttgtaatctaggcc

SEQ ID NO: 324267 - DNA, 640 bp, Cannabis indica
acatttttctttaataaagttactagtttagttgtgagggagggatgaaaaaaaaaaagggtacattctcacaccctaaacttctagttaatatgtaatactatatagttaattttaacatgaaaaaggtgaataagtaataatatatgaaacaaaaatatgagggaataaattagttaaaaaaattgtcaaattttatatttttggtgcacaatgaaaataaaggatcaaactccaatttttcttaatattttttttgttacaaatgtaaaacttttttataattagaaattaataaacataataatattgatgcaattcaatattaaatcttatattctttaatttaataattattttaaaatatcgttagatggcatttcatgataatgttgaacatgtgcctaataacaatgtcttagtgcctagttgatagtgatattttcataaatactcaaaaatgacaaaaagtttaacaaaaatatgaatttgtagttttttaaatattttcacaaaaatacaaagggttgttttcacattgccgctatatgaaaacaacataaaaatacaggttttttttttcctaaaaaaatacaagtaaaaaatttgtaaaagaaaattaaaaaaaaaatacaatttt

SEQ ID NO: 324268 - DNA, 735 bp, Cannabis indica
aaaaaaaaaaaaaattgatagatagtttaaaaaaaagataatatttattaaatcactaaaattcttatcatagcattaaaatttagcaatttaaaccaagctacacctgacatacactacctagcaaatgaagtaattagattgagctttatttaaataatagatacatttgaattaatattaagatagtaatagtatatataattaattaataatagttttccgtaataaattgaagagcaatctataacaaaacaaagaataatgaataaatataaaaaatcttgatattaaatatttattattagaaatatctatagtacaccatcttaaaaggttgtttcgatagaatctccaatttgtttcaaaaaatatctatagaatcatctataacttttaaaagaaatttgaatagtttaccgtgctgaaaaataaagtttgaacagtatgtatgcaacaaaataaggaaaccttattttcgatattgtaaattattttaaattttttaaaaattcacaggcaatcctatatagctgcaacgtaagcaaccatatataaaaaaggctaatgagtcatttttccccctaaactttgacatgtagtaaatcatgccctctaaacttttttccggccgttaaaaattcccctcgaactattgagattgttaaatttaaggacttctgtctaatttcattcaattttactgtttcaggaattgtttatgtactaaaccat

SEQ ID NO: 324269 - DNA, 1027 bp, Cannabis indica
aacattaaatgttatttctgatctatattaataagtaaatgtgattatattgaaatgagttttatttagggcataaaacccaacatccctagccttgcgcctaggttgactgtggaatcaagaagacaagaagaatcaagtccaatgcctaaaaattaaaaagagatgaaataacattccagaagtcaacctaggcgcctagtgtttttacctagcgtccaggttgacatcccaattaggatttcagtttttgggttcgtcttagtgtaaatggttaaaactttgtactttgacttgaataagacctgtcacaaattaatttgaagcaccaaaattagaatcgaaacactttcatttttgagcacctgaggcaccatgtgccctgagcacctattgcgcaacccagcacccaagttgacatattgtaaacttgagcacttccaatcataatattgaagaagtatccaatttattttattagtttccatccaaaataaagaattaagtacttttgggaaagaaatgcatcgacgtggaggccaaaacggggacccagcccccaagttgacataggcgctgggcctggtgcctaggttggcactttgttaacctaggccatttccatcagtagtgtagaagaagtcttctaggtatattctcaatttttgtcaatagttaagatttgggtgctttcggggaacaaacatagtgatttgggagccagaactgggacccagtgcccaggttgacatttagttaacttgggccatttccaataagtttttttgagaagtcttctaagaatattctttgttttcacaaataattgagatacaaatattttcaaaaatcaaacagaaccaaccagttgcaaaaagctggaccgactgcccaggttgacattgttggaatatcttttacgaggatctagatttactaacaaatatgtttttaacatcctaaatatgaatttctgaaacgatgaaaataaacacatcaaaggtgtgagaaaccttacattggttgc

SEQ ID NO: 324270 - DNA, 500 bp, Cannabis indica
aaaaaaaaaaaaaaattaatcagtggtgaagaatggtgaagatcattcgctaaggacagaagattattatactataacgttagaaatatatttttaaaaactaatagcaaaattacaattatgaatatataaattgggtaagaaaattagttgttgccatatatttacacatccaaaaaaacataacttatcttttacaatcgataatatatcaattttggtggctacgacagcagaaaaaaatcaactttcccacagaaaacgaacaccacaactctttgtttaacatatataattgggggagcacatatataattgaaactgttagacatttatatgtataaactgaaatatatgtatgtatatataaaaaacggaataaacaaatatatacactatataacttaaggatcgaaatacctccagccattgaatctttgatctttaatcccacataagcttgatctgcaaaagaaaccgattgatgtgggtaatcgggc

SEQ ID NO: 324271 - DNA, 740 bp, Cannabis indica
aatcctttcattttccatcaatttctttcaatgggataaaaattgtagatttctctcaatttttcgatggagaccctccattaaagtgcaatcaatttggtttgattttattttttttatttctctttgttgctcttttttaacaagtatagcgacaattaggatccaaccaaatggatgtataagatgatgtggtcaagaattgatgttttgaagattgaaatcgtctttgaaaaaaaaaaaaaactgtccaatattcaattgtagagatgttcgagccacttggaaaatagagaaccctttacaaggttttattttaataaaattttaagaaaaagaatatatttaagtatacaattgtgggcaacaatttgtttggatagatatcaacagcaatgccatgttacttctttccaccattatccatataactgttctgatattaaaggagcacaactgtaaaggtgatgtagctattagactaatatgtactactaagtgactaaactatattgatctaagggatattggcggctaaaccacctaaactttacggtttgtaacacttaatcaccaaaactaaatttttggcggctaaactacctaaactctggttccgttttgctctgcacacctccgtccaaaaatcagcgttaagtgccacagtggactgtccacgtgtacacacttgtacacgtggcaaatttttagtggtccacctaatattaattttaaaaaat

SEQ ID NO: 324272 - DNA, 527 bp, Cannabis indica
tttttttttactttttttttctttttcttcctcttcttctttcttcttcccagccctctttctctctcgtctacattattaattcccacaccagctctacccaccacctttaatcgcccattagaggcctcaatgcatcacagtcttaggcctcttcctcttcttctcatagctaacaccacgggctttggcctaaaaatccctaacctcacgcaagtaaagtctgacggcgtgtgcactgaacgggttagcttccggtcgaccaccgtgctcttcgtaggctgcgcggaggcgactgatgagggcatcgaggctaccccaggcctagcggagcgggctagggcagggagccgtctcctcttctagttctcgtaccgactcggcgtcgtggctgctccagtcgatcccccgcctttgccgccgattaagttggcatctgttgtaacggtagtagtagtagtagtgccttaggatgtggctttgtatgaagaagaaagaagaaagaagaagaagaaggaggaagaaaa

SEQ ID NO: 324273 - DNA, 1585 bp, Cannabis indica
atcccattacaattacacatatgtcctttatttatcctaaggcctatcaataccggccgctcgaaattcaccttgtcctcaaggtgaagaacaacaagcttccacaacagtttttgcccaaatcgaccattcgcgataaagcattggagaaggcctctgtcaaaaatccagcgagtagtcgcctggtcataacaccaagctgaagctatcacttgtgctcgtcctctatcaaagaaccagcccagtaaatgcgtattgttcaagctgtgagagacacaccaagtttcaacaagtcgacttcgcttgaaaaacaagtccaacatatgcattttgcacttccactccttgttacgcctttgaaaaatgttgtagaaaattgtgcttgaggtatcatgtggctggatgtggcttccttccaaatttttggcattaatttcaaatttaatttccaactttgctgaatatctttttaattcgtttgctgccttaaaaaatgtctccttgcccctttgaatataatcatcataagccaaataaaagttatccccctgctgaattagaaaattaacaaccttgttgaccctctaattgagaacatcaagtcctttaaacatcatcagagaagggatagtacccatcacaccaatgcttgaaattacatgctggatgatttgtctcaatattttcagtagcgggcaaatccccattatcatcatataaccaaaatgagaatagaaaattatcaataattggctctatcccacaaatgtgttgagtcaccattttagagctaaagaatatgtaacagtaatcaagtccacattcatattctgtagtgatttctttgtgccccatttgtctaacagtgcccatgaataaacaaccccccttatcatcaactaattttccaaatccaataagaaatatgaagttagtagtaagattggttctattccatttgatatacctggtgacccaaaagttattgtgcaagcttggccatggaagaaactcttgagagcaagcttttcttcctctatcaaaaagccaacgagcagttggtgtctttccctcttcgtcatatccaaaagctgaacgtgaaacttgtgctccagccaccctcacgaagtctcgcctcccttgtttcctcgtcggctgccttgagatgccttctgtaagtcacattgtttcctctctaatcgtacgatacaatgatgataatctcttgccacccggattccattcttgtagtagccaaacatattcatccgtcactaagtggtggtagttgatagatgggcaatacaccccaacatgaggaggaacttggacgaggaaggtggcgttaaaactaggtttaccatgcttcttcagtcgttgatggcgaagcaaaaaaacaagaatacccgaagaagagaagttgatgttaggagtccaacccggatcccacacgtgtgaagctatggatagaacttgcgcaccgaccaccacggcatccgcttgttgccgccagcaactcgttagcagcgattgtatctcagatcccacgactgttaggttatttttagtattaattttagattaa

SEQ ID NO: 324274 - DNA, 529 bp, Cannabis indica
tgttcttcatttctaaaaatactttttgaaaacaatacaaaaacatgctcttagactcttgtttctatttttaacaatttttcatggacatatgattaagtttgcaaaaataccatattatgtaataatttgtgtttttaagtgttaagagctgcagattctaacaataatgaatcagattattgtaatatattatttttctttcctacatcaagctcagctatttcaactgataaactcaattaatatacttataactaaatggacaatttcaaatatacttccaaaaatgattttttaaaactaagatacataattatatatacttactaaatggactatttggctctagcgctagctagaaaaatatatattatgtacttttttaattgagtaaatattgtattttggtgagattaatatatatatatatatatatatttacattagttacttttagtgataattttttagtcacaatacaaattttttgtgactaaatgtgacttttggtcacaacaaaaaacta

SEQ ID NO: 324275 - DNA, 1908 bp, Cannabis indica
agttgtggaatgagatgattgatagtggagttagtcccgatcgcagttcgtatatagtgctgatacacgggcttttcctgaatggacagttggaggaagcatacaaatactacatggaaatgaaggaaagacagtatttgccagagcccaggactgaggaaatgctccaagcatgggtgactggaaagcaccagatggcagacgtagaagacaatcaattaagatctagacagccatacgggaaaaccattcctatcacaaagaaaattgatcagcaaacacactttcttcgcgaacctgagacaagaagtgttgttagagaaagaggtttctccttttgggataaatagaatttccttgttttgtttaattattggatgataaatttcgccagtgatcaacgagacatgtttctcacaggctataccatacaggtgcacaccattctccctgccaaccttatcatttatgtaattacaatagtgactttggcatttttcttttatcccgctctatcacacaaacacacacaccaagattttttggtctcgttaactctactgattgatgttttaattcattatgtgttttgaattctgtaaaccgtgttcttgtagttcatatgctttgttagttcaaatttcatcatggaatccttacagttagtgttgaacatttatccagctgcctccatctagaaaattgagaaaaataaaagcggaattgaagctttacatttacatgtgaaaaccttatgaggatgttaactgatttcaaattatggaggccgagttgtcaaagtctttagtggctgtgttcagtgtttctaagtttgtgtcttctaatttagttggttagctagaattatttgttagtttagtctataaatacagagagttagccttgtgagagaggagtgaattttgtatgacatattttagagtaaaatattattcacggagtttaccaagtttctggaataacttgggattttgtaattgttcttgctcttatcaataaactacatttctttcaataactgaattgtgcacaagtgtgtatcagaggaattctctcatacagatataaaagaaactatttatttttagctcgtatacatattcgttgacaatgacaatgacaatgtacagaacatctattcttgtattacggtttcattgtgctggactcagtgatatgatttgataagatttcttgcctacaaatgatttaggacatgctaataaactagatttgttgtctacaatatgtaacatgtagtttaatatctttgaaatttgttggctgagaaagtttatcaagggttcaaaattgaattagtaagatgagatattaagatgaaaaggttaaagaatgttttagtcattggattgaaggatagggacactcttatgtgttttgttggtgtatttgtatgtgaatttaagtttcaataatgaagggatgtttccttttcataaggactcaagagtagattctctttagtaaagaaagattataattcagaaggtgggcaatgaaaatctatgcgggatttctttcgagcacaacaatgaattattttgttatgatcatatcaaatgtgtgcacttaattagtaatgcatatcagaattctcacaagcactattgatatgcataaaggttcaattaatttgtgaccatagatacattgcagtgctaactttaatgactgacattcatctgaggattgttaaggttggtataaaggccctattagtgaacgaaagactatgattgagggaattagcagtaagtgaggacccaataaaaagagaagttaggttagaaaaggcttatgaacatacaagatccttagtgggtccatagaattgagctatatatattctataatttttgttgttga

SEQ ID NO: 324276 - DNA, 1334 bp, Cannabis indica
aaataatttccaacaaaaaccatgccgcgacccctgggaccaacacccaggtccagaaaggaggcgtgccgcggcatgctaaataccatgccccgacacctgggttcaaaacccaaaaaccaacaagcatttcttcaaaattcagcaacaaatcacatcaaaatcaccccaattagcatccaaactctcaaaacatatccacaaattgtcaagctcaaagatagggcattaaaatacataaaacaacccacaatataccctgaaaattcagattacacattcaacacaaataatgctttaatcaataagaatatattctcttaaactacaacttcaaaaccattcaacccaataatttttcagcagccaacaccttaaaaacttatgaactcaagctagaaaaacacctcaaaacctcatcaaaagtttaatcaaaactcatatcaatcatataatcaaagatttatgcaaaaacatgctcagatcctaaaaggaacaccaacatgcaaccaagaacattaaaagcttagaagaacatgcttttaaattcaatctcagctacaaattcaaaatgaaagaatggtaagaagagctacctcaaatccaagccacaatcaagctttaattcttcaaaagcaagcttaaacacaagtaaatctcatgcaatttcctttaattcaataatcaaaataaatgagggtttgagagggagagagggttcgggtttgggggtgaaacaaccagaaaaattccatttaattctcaaaattcatttttcttttattaaatataaaatatgggtcaaaagaccaaattgcccctagggccaaataactctttcaaactcaaacaagggcctttaggtcattcacacacaattccaaactcaattaattacatattattcaccaatatttaaaatgccaaataattcaattcaaattgcatttcgggcccaaactcagttcggcccgaaatactcggttgtgactataccgcgccaacctgtcagaacacacgtgaaaaagacaatacaatcatactaaataataatatagtcccataagcatgctattaaattaatttgattattttacccttctcgggtcaaaactactaaaataccccttactcaccaacggggtcttaatatgtcataaatcatataaattcacatatattaaattatattataatataattttttagttattcatatttatctaattagggttttgctaaatccatttcacaaatctagggtattacaattaccccctccttatagaaatttcatctcgaaatttacttgaacaactccggatatttctgct

SEQ ID NO: 324277 - DNA, 635 bp, Cannabis indica
atccttagttatagtaaatatatatgttttattaattccacactttatacttaatcatatatgtttcagtttatacatataaattatgtaacaatacatagcgaatagaaacaataaaagaaactgtttaaaattatcgcaattgaatgaatcaattccgattaaatgatgcggtcgagatggtaaaaaaataatcagactcaaaattatatatacggttttatcaaattgttagatatgtgtattcactcttttgaattattaggcattcgatgacacatggatcaaacgaggtttattttgagaggtttatcattataagattgcgtgtgtgtatatacacatatagatacagaacatgaaagtcaagctttaatcaaattaaatatatgaaggcagacaaaattaaatgtaaaggtctatgtgcgtgtttgtaaaacacatattacaattatatatgtacatatattcaatggattacaaaaaaaaaataagataatgagagtgagaaagaattactctccaaacaaaaattgagcaaccttcttgattcgaaagcttgattaatggtttacctattagaatatttctatttatggaataaaataaaaaaattgattttgtgataaatgaat

SEQ ID NO: 324278 - DNA, 1163 bp, Cannabis indica
tatatacgctttaataaaaaaaataattgaatatttattataactaattataataaaataaattgaaaggttgtaattgaatatttatcattactaattataataaatttttatgaatataaataaataaaaaatatagaattttgagaaaataaaaaaagttgatgaaataaaatgaagagtgccacctaacctccctaatactttcctgtatatatagatattgatttatatgtacactagatgaatgttacgtggagagctacgtaaatgttagcttcatttaaggttttaatttttcgtttttagattttggtaattaaagtaatatgattatttgaacaatttattttataaattaaattgtatatcagtgtatttggtaagtaaaacataattgtgtctataaacttatggtatgtacattgttattaataataaaaaatatgttagtctcagtatatacatactcatatagtagttattcttaatgtaaaaaaataatttatgataaattataacaatatgagttcaacatttattttttgtttttgaaaaattcaaaagaacaatatatctgtttttgtaaattttaaaagaaacattatgtaaccgcaaataaagaagaattgtcttcttcaaatagagaaaagaattataatacacatatgcaaaaaaataagaatagacttggaagagtacccttctcgtacccctgtctgctctagtgggacttacaaccacaaatttaagatggccttaggaacttcttctgtcaccaaaagcataaactaaagcacatgatataaacaataccaaatttgtatatatattggtcattaaacaaataataaatagcattctaactttaattaagtactagtaaattagagcaaaaattgtaagccgttatatttgacaaattctaatagtatatgacatgttaacaattattaatgaaaataaataattaaaaagaaataactacaaaatttgaaaaattaaactaaacaatatttttctttgtgacatatataaacatagatataaaatataatcatacatataatatatggccatgatactcaagttgtatgattgtgtaacgccctaatctaaaggcacgctacagtattttttttttaatattgtgcaatctttgc

SEQ ID NO: 324279 - DNA, 963 bp, Cannabis indica
cattttcagatctaaatgtaaacaactacagcagtaagcttagaaagagccaacaacgaagaacaaaaaaaaacaagtggttaagagattttaagtaaagaaaactagagattaggtaaatgaatctaagaccataaaagagaagagatagagaaattacagagccaatcgccattgtagaagtgcttgtcctgagcccaaatagtatagttaacattagtagtccaacccatctttcctccaacaatccaacgcttagcggagacttgaggtgccatgaacaaaacagcgaacagaaatgcgagcagtccggtcaccgtggccggagaaccgaagggtaaggcttttgtgaagagactcattttgagagggtgtaagactcttttcttttctctagaaaactctgtttggttcgagagcagtaagaaagctgtttctttgtttttggggccttttataggaaaatctcatggtggcataggagtattgctattaccatgcttagtatcgtttaaacttcttattttacgattagttagcgatattccttaaaaaaattattatacagtagaacctctatttaaaaatactctattcaagaataacctctaatttattataaaaaaaagcaagtcccaatttgggccagttataaataagaataacctctaaattgtaattagttatacattttctaagtcccttattaccaaagtacacctctctatataagaataattacatcttaataaaatatatacatgtattttgtaaatttatttatataaaattaataattttattttaaattataatacatgtacgaatattatatttactttaaaatatttctattatgatatagtattaataattatttattgttataattgttacattgatatttttttgtttttaatttttttttctagtgtaactctatttagttataaactctcaatt

SEQ ID NO: 324280 - DNA, 982 bp, Cannabis indica
aattaaaaaaatagtatatagggtaactccccaactttttatttataaaaatacaattttaaaatttcaaaattaaaaattatttttcaaaaaaaaattacaaaactataaatgaactataaaggtactaaaaatataatacaactataaataaattataaaacaatcaaaaaataatttattatttttactgaagtatatttttgtaaataaaaaatgttaattgtaaaaataaaaatttctccgttaatcgtattaacgtatttttatactttatttttagaattcttagtctaaaaacttcaaaaaaaaatatatataaaaaaaaagtgtgaaattctcgtttatttatcctttattttttcagatttgtagatgagtgttagagaagcttttatacaatgtgtgcgaaatatgattttttttatgaaaatttataggaagttacacattttataggtttttataccatgtgtgcgaaatatgatttttttatgaaaaaaaaaaaaagaaaaaaatagtctaacccctacatgaaacatgtcgctgtgtcatttttcatcaaagtgagatttccctggttcaaatattcattcaattaagttgagatggaaccactctcgcagtgacttccacacaaagcccgagatattatgtcacttctaaaattggatcgaccttaggagaaaaaaaaaacaaaattattgaactctttatataaaaaatataacatttttaaaaattattaaaaatatatattggaaaattctacaatgcacacccttaaatggatatactgatgcacccctatctattttagcatccgaaataattttttagtcaaatttttttttcatggtcatgtacgttataaatatttaagacatcctgcaaaattttaagaaatttgaaaaagtttaacatgccgaaaattatgttcaaacagtgtgttgcacgcgttactattttattttatacgcgt

SEQ ID NO: 324281 - DNA, 2039 bp, Cannabis indica
ttgttctctatgtatataaatgttggtttcaaataacacaggtaaaatcaaccactcattatttgtttcaggtaatcataatgaaaaaattatggacaatagacctcaaagagcgaacatgcacgtgcaacagtttctaaatcgataaaatgccatgtggacatgttgtgggctgtgttgaaggagataaacatggacccatacaagtattgctcagattactacacaaagaaaaattggctagcaatttatgaaggaacaatgtacccaataggaaaccaaagtgagtgggatgtaccacaaaatgtgaaaaacgtaatagtcttccctctagttgaaaaggtgaaatctagaagacaagaaaaaagaaggatggaagctggctgggaatagaaacaacataacaagagcagcaaatgtgagaagctagggcacaacaagagaacatgcagtagaagacatcaaaaataaagagaacaaaaacaacttaagaacaacagtggaaaaattgaacatacatttaggcataagatactaaagaaagaattttcatacaagttttattatttttctattactattataagggatgtcaatgtaacaccctactagattagatgtgttattgtgattcaaatactaaatgtgcaattcgttgctaatcaacagatttattaaaaattgtgtttaattaaaattttcataattaacctttaactttaattaaataaactttacattattcgaaattttgtcttttaaaagttacaactgtactataaaatatttatttacagaagctgtcgtttagagactaacaaaatatagcctgctgccttgaagatcgaatactccaggtctaactgccctgatatttacaatcttcattagctcgaactcactattgttcagccttagccttgcccttacctacacatgtaaacaataacagtgagtcgacagactcagtaagaaaagtataatcataacataacataaaccagattataactaggcgcccatacacccaaatataacaatatcccgcatcccatacttactgagtctagaacgttcgtacgacaatactattaaccataatatcagcatatactcgatactctattcgtaccgatgtgatagcgtcaatcagtactcatgccaaacatacattcgttggtatccagtgtagctctatgtgcactgatatcgctatatcaatatgttatctaataggcattcataaacatgcacgctaaatatataatcataaatgcatataattatactaatcttacattgattctaaatttaagtgtgccggtcaacttgagtgaaaactgctgcttgacgatttataggcccctaagtcacaacattcataaaaattgataagtgatatgccaaatcactttttgggaacttaaaatcaaaactagaagtattcctatcaatggatagcgtgacaataccctaaatatcgtcaaaacacaaaaaactagggttccaatactgttagtaggtaaactggattgccaaaatggaaaactggttcttagggttctgcctggggaaacggttaactagttttacagggctacctaaatcaattaactggttccttgtttaaaaccctaaaattaacaccatgaactcaaatttatcccaaatccaaccaaactctccagaccacctaattaaacaatatcaaacatacttcaagcaacaaaataagtataaacctctgaatccaaatctgccattaaagaacaaagtttgaggttaaaagctcaaactttgatctttctccaaattaacaacaaaaccagctcagaatcaacttaaataatcataaaaaatcatcaaaaaaaacaccttaaaaaaagccaccttgtacaaaaataaatcctatgtgaccatgcaagctacagttttctgttgcctgtggactcggtggatgccctgaccctatgcacacatgggcgtctaaagaccatacaaacgattttttttgaccaagtttggctttgttttgtttt

SEQ ID NO: 324282 - DNA, 2115 bp, Cannabis indica
agacaattcaaagttaagatttaaaaagaatttgtacttacgtatgatgcgaaaagcagttgtatttatcagagagaggcccgtcgtctagaagaagtcttccttaaactcagttttgttgggcaaccttacgatgatcatgcaatcattcgtgtgggtgctgaggtagtaaaagcctcctgcacctcgcttccttgcatgaactgctttaatcgagtaaaatatactatctctaagggagtagggcaatcccatcgtaaaatatagtataagaccttcaagcttgcgagaatcctatacgagatggggttcagctgaaagggagcaactccgagatagttgcagaaatccttgaaatattcccttaggggaaggactaccccagccttgatgtgctcaacgctccaggcaccaacgcttgaagaattgctagtgctaggtccactgcactcctcgcaaagtacccttttaggaggaaaacaactaaattccccaagagcaacgaaccttatgatacaacccttactctactcgataccacaggactctagtatgccgtcgacataagccctgatagacctaacattggattcgatgagttcagcctcaaaggtgacattggggatcctatggggtctttgatttacgaggcttagaagacatgatatcaaattcaaggtcacctagggaaaaataaatagtgacttcgggtaaaaatattggtttcgcgagtggaattgaagataaaaagggggttcaagccaggctgcgtctcgtaaaaaacgacatttaccctcagatatctcttgcagaaattgcctatggcgactagcaacttcgtcttggttggtttttattatatgatccctaatctttgcatcatttacttcaagtaaggatcgaggtttctgggcttcaggtttgaatggaagggcaaatttcttgggacactctatttctaagaattctggagaacaaatttcagaaccaaattgggacattttaatagaaagagcaattccaattcctggaggaaattttgttaaaaacaaaaacttataaatatggtaaacctaagttttaactccatctattccctaaaagttaagcaaaaaattaaaaaaattgtcaaaacccagcaaagcaaaacgatgatgcaatcagttatgactaaaaatataccaagaacgaagagaataaatacttactggttaaagaagaaccctggtgtaggggagaactctgtatctaggttcaagacgagtgacaggatgaaatctggggacgtccgagattggagatcgaatctgaggaaattcacaaaaaatatgtcaacgataatgagggcatgcaaagcttcaaaaaatcaggatggaaatttctcagaaaagcttgaactttttgaaaaggcaaaaatggtggaaaaatgggtcctttgttgttttatactttgaacttaattatcgtaggactaaagagcaaaagatccaacagatagaaatcgagggagaagtggaaaagatggctcattaatgatgtgcttagaaaacataaactgccaaattcaaaagcatgcatgtttcaaaatggattatgacgaatatacccacggtaatcagttaaaaagaacttttcattgaaaaagattttttaacgggcaattattataccaaaaattcagctatactttagaaggtgacacgtgtcaatgtcaggaaatatgaatcaacaaatatactgataattatatcagtaaatgaaaatgtaataactcattaaatgcagaattaatggagtatgttcataactcgctaactgtatagtattaagcaagatagggatatacaaactatcaattcatgtattgacgagaaaccatcttgtcttggaaggcataatcctgagagagacatgaacaacgcatagcgaagcatctacctcatggtatgtaaataagtattaacgaggtgaattggttattagaacacttagcgtgtaatacacgttatagtaactaagtgtactgactcgagaacttggaggacatgattttccagtctgcaagtcctttcaaaaagcagttcttaagtttgctcagtacactggtgctcatgc

SEQ ID NO: 324283 - DNA, 1274 bp, Cannabis indica
taaaataaatttccaacaggaacctcttcttccttttaccaacctagcgatcattcccagtcaaaatgttgtggtttcaatccccattcttcgctgcggtgtgatgcttccttttcacccttttgtaaaggccatcttaacccattacgacatttcacccttctaacttaccccagatagttattgcataatccttgggttttatgtgatgtgtatggaatacacgcaaggggaactcacaattgaggattttagctttttccatgacataaagagtgctggccatgataatggcttctactgcattgataaatgggctaactctaaaataaatggggtagaaggcacgatttctaatataggagattggaaatcaaaatggttttatgcatttaagatgctagggatcagaattgacttcaatcactgacctcgtatatcgcatacttttatacttagcttttgtttttattattctacagacactaatatcttcttttttgttcgcaggtagactggctcgatctgtattagatcaaaattgtttggaaatcgctgaagttttaagcggccttcaagttcaagatcgcgactgacaattactgtgcacttctacgaagctacgagaacccaaattaattccagcagatgccaaactttaacaggagtcattatacaagagccttctgagaagcaaaaggagagaatagacaagcatctttccaagcagacttcgagacaaaaatcatgtaatatgatttagcaactactgataatactgtcttaatgtttaaaatttttaattttgtacttcttttcctggatatgaatttcctgaagcaagcttcttcttttaaccacaaactgaaggtcaacattgcgactccttcaactgcgacacctcaaaagaggaagagtgaggtctccacttgtaatgactgcatttgtaatatggattagtaaagaaaattagcactaattattggtattattacaattatttgaagatttaatttatttgtaggtcccattgttagaaatgggcattagagttataatttctcaattttggagattttattaaactctaagtgtattatttgaattatatgtgaattatgcaatttttataatttttgctcgttgtcaacggaaaatgtgatggatgactactttgatcacctgggtaagtctagaaccttatttcttagtggaatgtatgattgatgaaatagagtaccggggttgagcggggttatggattttgaccattt

SEQ ID NO: 324284 - DNA, 1012 bp, Cannabis indica
aaactttcctagatgtaactcccgacgtggtgtgccacccataaatgtttaatgactattattctcgatgtcttctcttgtaaaaattttctctgtaaatttaccgtaacttgtcgaagtaaaaaatagattgctaaatcgaatatcattggtccttctagcatcattatgacctctaccgtcaatggtccctctagcatcactaggacctctaacatctgtggttcctctattagtagttccgtttggatgagtactactagtactaggtgtcaggcgatcttctctacgagaccttcttctctgagtcagttgccctgggtatttggaacaacagtggggtcagggttcaaagctacaacagtagggacctatgtatattaatcgtctcttacatcatcattgccttcaaaaaaaccattctgggtctgaaccatcaccaaaaccatcatgaatgggcatttgtgctacaatatcagctgtcggtatcatattgtttaattcaagtaacacatcggtcgccaacacctctagatttgtttctaaaatgaaattctcaacctcgctgtgagtatccttaataatacttgttgtgggactaggatcaatacaaatattattcttcaccaaagacacaaacaaaggagtaaattcatctggcttcttcgcaagcatagacaaaaataaccttacacgcttatcatttccaataatttcagggtgatacattatgcctttcatcatttcatgtacttgtaattcacttctaatttcaagtcatactacactttgtcaacatcgagttcttcgtacaaaagatcaaccaacacataagtaagttacattcgtattaatctcgaatgttaaattttcggctcagttataaacccattctctatcctcaagttctgaaacacactattatacataacgaatgcaaaaacagttgaacctgtcacagacattaaaaaaacacaataaaaactttagaacaaaaaatctaaacagaaaa

SEQ ID NO: 324285 - DNA, 1338 bp, Cannabis indica
cggacaatattgaagatatttacgaaaatgccactgcatacaaactaagcatcagcaagccacctgcatgcaccacaacatgcgctaccacttgaccaccacttggccaacttgtgtgcatcacttagcttgtaacgtgccatcgtagactgcacgtaacacctaacaacaagcaactctctcaaaccgattctaaggtgggtaaataggagcgcaagctgttgaaatttcaatgatattttcagcaataatggcagcagtagtttttcagttatggtggaatagaaatcaaggtctttgaaactacaaacttatatatacacattgattcacttgtacaaataatggtttgatagtttgtaaagagaagtaaaataaatagcaacctttttttaagcctaaaaggtgttgtttagattgtaactcattgtttttttaatcataagagttcattttttcataatttatattcgacaaaaaatgagacttttgctaatgtatttttgtactgacaaaaattgagtattatgctggtaaaataaaatttatttttgtcaatgtatttttgtgctagcaaaaagaattgacaatttcgcattagtattgaaattgttgccagtgcaaaataaaaagcgccgactaaaatgacttttgttagcgcatgcgcaaaaaaaaatcttactttcacctacgcattaaagcgctggcgaaaatttaatttttacctgcaaaattatgcactgagaaaaatcttacttttaccagtgcattaacgcgctggcaaaagtcacttttgatacatggatatttgacttttgccagctcaataatacaccaggaaaagtttgtaattatttttttatttaatttaaaatcttatcaattatgtttaatttaaaataaataaaatttaaaaattaaaactaaaaggcttaattataaataattacacaatataaactataattttaaattattttaattatacatattaattgagcttttaattatattgcatattcatagctatattggtcacttttgagtaaatattttcttactctgattctttcatgaaaaactctttggtcctagctaacaacactgcaagtttcctcacaaaaaagaaaaaacactgttagttctttcttttgcttaaaaatttaagttgggtttttaaaaatcaagccctcaaacaaataatataagaaaagaagaaacataaaaatgttagattactaaagtgagagtgagaccataagataataagagtaaaatagagaagagaaagagaatctgaatagtaaaaatcaagtagttaaatctgaatagttactg

SEQ ID NO: 324286 - DNA, 1176 bp, Cannabis indica
tcatccaactgaatcatacccttgtttttctcgaccccccataagctcgtcacgagtaattcatccttcaaagcatcaaaactcttattcactagtttgatatcacgatccacttccaacttgaaccctccagcactgccttgggttccggcaacgccatgcaaataaacctcaagctggtgtacggaatgtatgggttctttcaagtacggcgacaaaaaggtgtcgatgacaagctcctgtccgacttcgatgtagtcgcgaaaaattcctggcagtggcgagtgagggacgaggtcacacttatttgtcacgcgcaggacgtgaaggttgtggaggttggagaaggtggccttgaaaccatggtttccaaagcgcggactggctagaacaatggccgtgaccgggaaggccttctcaaggtttcccgtcggcttgttatagtcattgtatacaacatcagtggcggcaagagtggccattgctgcgcccatgctgtgtccggtgaaggtaatactcacttcttcatccttgtattcatctaccaactctctaatctcacccagaatctgatcattatcatatatttattattcataagtgataacctaattaaagaaaaaatttatttgtcactttaagtttagggtaagttttttcacatgttacattttaattacattttatattttatggttttgtggctcccttttataattagttaacaaattgtgttatttattaaattaaaatatatagcattgattattgtccacagtattatatatgattatagcattgattaaatcgacaaacttctctaacctatgaatatattttaattacttaatttattaaaactgatcaacatcaaatattaaggtcaggttgatgggataggatctactatacgattaaaatacataaataaaagggttatttgcggcaaaacctcctaaagtagggagatttttacaactaaccaccaattctaaaaattttgcggtaaaactccctaaactcaagttctgttagcacttagccctttccgtccatttttctctgttaaatgccatggtagaatgtccacgtgtacacagtgtacacgtggcacaattttattggtctatgtaaataagtatttaaaaaaaattaattatttaaaaataaaaaaat

SEQ ID NO: 324287 - DNA, 1983 bp, Cannabis indica
gaatagaaatgtatattaatgaatgtagaaacacacacaggacgaagccttggtatcagaaagcaatggaggtggggagtctatggagaacaatttccaattacaagtccacaaccacaaacgacactactaatacactaacactatggaagacaatatccaaaacgacaacagaattgtcaagtggtggtactacaacgacatcaaattctaatagacaaaataatactactactaccaataataataagctaaggaaatgtagttcccttaaagtggccacttcattgactagggtatgcctttgtgcacccatatcatcctacaatgaagtgtttagaagagttgagatgaacaacaacaacaacaacaacattcctcctagaaggagcaatagttatccaagatcatcatcatcatcatcatcatctaatcatcatattattaagcatatcaataataatcaagatcatcaaattagggtttctagtacaagtgggaggcatagcatggaaggttctagaagagtgatatttagagggaaatcattaagtgaagatgttttgatgagaagatttgtggtggatgaagaggcttctatgatgaaacttaggcgaaggaaccaaatggaactcattagaagaggaaatctcatgaagaggaacaagcttggccctagccctcttagctcaatggtcatggctactcccactcatcaccaaatttaattcattactttttattattatttaagcattaatattcattaatctacttctctttttatattattaataatatatatcatttcaccaaatttgagactttaattatttttcacttaatagtaagtaattttttggtgtgtaatcccttataaagggatcgatacacttttatgttttgcctatggatacttgctttctccatccaacttgtgttgtaaattcagcaacaataatatcaagaattcaatctaaaacctgcattaaatcaacaacaacttgaacaataataatacacacaaataaaccagttaacaacacaaagtaacaaaataaaattaaactagaaggagacaacaagatttatcctggttccggtcttagagatcaattcgatccctcgccatactccaactgaaaatacaatatcaattctttcattaacatggagatcaagagagtagaaatacaagcaccaattcaagagcaacacagctctgcaatactactcgagaaacagtctcagtttctcaactcctacccgagtacaccctgtgttcttgaccccttcaagaacatggtttcacagcttaaaaaactaagcactcactctctaaactctctctcaattctctaattcagaagtgaaaagaatagcctatacataggtacaactcacaactagaaataggtgtaatatcaacaccacctaactaactaacataattgaaagttattagttaagttggttaagagtaggtgagttaatatgaggttggtttagaggatcaaatagcttccttgaaagcttcagtggtggccatgaatcatcagaatctgtggttgatagtgccaccacgggttgttgttgtgattgccaacatatgcagcttctgttgaccatgaatacataggcagtagtagatcttctgttatccctgtttgatgcataatcaacatcaacatagccttctaatctcatatttgatgtgtctctttgataaatcaaaccatacttgattgtacctttcaagtatctaatcaaccacttcactgcattccagtaatctaacccagggtttgccataaacctgcttaatgcactcagagaatgatctatatcaggtctagtactgaccatgatatcattaggcatccaacagccataacatatggtacacctttcatgttttctctatctgtttcagttttaggacaatattcatttgacaatttaaaatgccctgcaagtggcaca

SEQ ID NO: 324288 - DNA, 826 bp, Cannabis indica
cctaataattgttgctcatgttgaaaaggaggagatttatgaggttttttattctttggaaaatatataggttttgtgaagcccacttttatgtcattcaagttgataaaaattgactgtgcttgtataattgaacggtcaagatcatgaccatgattgtgaatttgtgatgatgatgaactatgatgatgatcatgttgatgatgatattggtgatcatcttcattctcactaagaagacttataatattgtaattgctcttcacatgattattattgttccttattgtctcttgacattcactactccaagaaaagtactgcaaaaatattaattaaacaaaaacattaattatatattagattaagaactttctaatattagatttcatcatgttaaaggaattagtaatacaaggatgaattaattaatatatgatattcatcaggtgattaattagaattagttaagaataataattaccaggaggacaagaaggagacaccaaaaactcaatcccatatcttttttaagtataaatatcttttatcacttctttttctgctcttcagatcattcaacataaaattattatataggaagaagaaagatatggttgacattaatatggaatggcatggtatgatgtcacaacccacatttatttattttttatttctacttaatttatgttattgaaatgagatccgtcagttttgtccatctcttttttttaaataaaaaataaaaatatgatatatatatatatagaacacttttaatgggtaatacccattgatgggaactaaaaaaataatagggtaa

SEQ ID NO: 324289 - DNA, 1347 bp, Cannabis indica
gttttgaaaagtgttatttttttaataaaggtaacattagtatcttaacgccagtttatttatggcatcttattttacataagtaagggcgttacatatatatatacactatatataaaccactataccattaaatttgaaaatcagatttcatagagtataaaattaaaaacctgctaacgaacctgacttaagaattttgattacacaactatatatatttttattttgtcatgtacttatacatattatattagacgttttccacaatgagactaaattaaatagttagagggatccttattattaattggaatacagaaaagaagtaaatataaatataaatataatatctcacgcaatctcgcgagtatctattattaacggcaatgatatatatataaacccataattctataaactaaatcaatactctatttatgactaagctactaaaagtacaaaccttattttcctcagtagaacgagtggttgtttgatggaatagccaaagtgcccaatgatatctgtaacatattgatcaacatttatctataactataaatctatatatataatacaatacagtgacgttaatggcgaaatggggatttaagatttggaagtacctaacacaaatagtgataggaaataagagatttatgagaattataaattttagattaatttttccaaatatataccaatattcttaatcgtaacctaattcaattagatataaaactcataaaactgatacaaataatagatatttgtattatttatgcactaatttatgcattttttttttataaatatttgcagaatatttaaactaatattttataattatttgataacaattataattataaaataccttgaaagcactaaatacactaaatcaatactcctccaacttttccaagaatttgacccaaaaattttataccgggtagttatgttgttttgtgcccatcgtatgttgcaatagttcatggaacagaacatgaactatttaaagtaattgaacctataatcattacatggaactcaacataatcatggttaaaataaattttctaaaattatctaaagataattaagcaacaaataaactaatgtaattaagattatattaaaaagataacctcttatctttcatattcatatgtagtagattgttaagatataaaatattataggatataatatgatcaaagacttttgtagctaagagttttaactggatgctctgtctgtaatctgaaatgaataactcattgcaatattgacttaacaagtgaaaaaaaaaaatgagagttttcttacatattaatcagatta

SEQ ID NO: 324290 - DNA, 871 bp, Cannabis indica
tttttatttttattttaatctcagtatttatttatgtgggccaatattagtgtgtcatgtgtacattgtgtcatgtggacaatactctatgtacacgtggacagccagcttggcagttaactgccaaaaatatatggaaatggctaaatactaacagaacgtgagttttgagagttttgctgtcaaaatttgagttttgaaggttaattacctgcgaattgaaagtattaggagttatgtcgtaatttactcaatatgaaaatcataaacaatcaaataacatcttaaagtttaggatcacttacattaatggtagcaaaataaatatccttctatttagtactctaactattgtttctttctgtcgcatggtaaaaataagtactgaacctaaatcttcttttcctttgaatgtgttcatcacggtcttctgcaaaggtctgggtatcatcttgaatagagtgggatgatactcaattcacctttgaacatattttgagagtgagaaatatattataattcgaatttagctaaggaaaggaagaagggtgatgtctgacaaagaattagggttctcttagaattaccaagctctctctctctcttcactttctttatataactatcacctaggcttaggtttagataagatagacttaaaataaatacaatgggcttaaagaaaactctaggcagaaatcactaatgggccattgagttagatttttgccacttaatttcatgtaataaaactaatgtgtgttttctaattttaccacatatcacatccaattacttaaatactaattttattttaataattataaataattattaaataaaaacaaaatttaattatatttattaatta

SEQ ID NO: 324291 - DNA, 826 bp, Cannabis indica
taactataactataactataacactgccgtaaaaaatatttcaaaaaaaaaatattccattgtgtattttcatatacaaaaattgactaaaaatttttaataaaaagttgacactaacattcatcaatattgttcaagttgcttgttttgattttgattgatcttgagaaattttcattattaattaattgggatttagatattatcatctatctccaatgagttatggactatccttttctacatatgttattgaaagagggaaaacaaaatcaaatgacgacttgtgatggacttattttatgattggaaaataatatcaaagatttaagtttatctagttcatttatctaaatattcattgaaaaataaaataaaaaattcggcttttttttttttggggaagattatttcataaatactcaaaaataataaaaatattacaaaaatacagtttcataggatttaaaatatttttatgatgagagtgatgttccccttgcttttcaatccattgttttagcggatatttctatctaataaagtttattttcattcaaaaaaatatatatttttatgattttttttattttatttacaaaaaatacagtttttttatattgtactcttgttaatttgttgttgattatttgttatttgtattttgtatgttattttttgttgctatttgatgttattttcatattatttttattgttttcgtgttgtttttatgaaaaattgtaaaaatatatatataaaaaaaaatcaaacataaaaatgaatttttttacatccttatgtaattatttcttttttttttttt

SEQ ID NO: 324292 - DNA, 655 bp, Cannabis indica
ttgtaaaatatatatatatattctctttgttttatctattgataaaatgaattaaaatttttatctattgtattttgacctatattaaattatgttctctgaatttttaaagtcgttaaaaataacccttaaactattgagattattaaatttaagtacttttatctaattttagtaaaaaaaatagatgaaaatttgaaagatataatttaatatatgtcaaagttcgaggggcatgatttaatagatttcaaaatctgtgagcatatataatttattacataaacaatgactgaaatagtaaaattgaatgaaattaaacaaaaaattcttaaatctaacaacctcaataatttaaagaaaatttttaacggccaaaaaaaattcaaaaagtatgatttaatacatattaaaatttagagtaaaattcataattatgataaataagaataatagcaaaaagggattataaatttatttattatttacatttttaaatacaacattaattcttaagagaaagttataattatgactcgtccatacatataagtaacaacaacgttcaatattagatccttattattagaggtgttcattggatcacatccaatgtttttaggcctatccagatccaatccaatcatatattgga

SEQ ID NO: 324293 - DNA, 972 bp, Cannabis indica
aagatggtgtaatcaatataaaataccatcatccttacaggaggaatcatctaactcctcagcaaccaccttgcccttacccttacttgtatgtaaggggcgagtaggtttcgtatagctctagcctctgggactaatctgaagagaagcatcaccaactgagcccttgtagattaaacgccgacggagggctgtctccctcctctccaaattttgagctattcgagatagaggcttgtcatcatccatgttagggacctatccatcactagaacaaactccctctacagctaaggctccatttgcaccaactggtgagccctaggcacctattactctaggaggatgagggtacaagctgtacttcaaaaagttagccacactgatcaatttgattatgattctcttcttcacagaaagagataggatgagattttccctatccctcatttgcaatgtagggatggagtacttgtaaaaagatactcactggaaatggcagtgtcgaaccctgttaacatcttgagcaattaagtagttcttgcatactcgccaactcttgacatgggtgtgctattagtgtcacccaaccactgatgtcctgcttgactaaagtagaagtatcaagacttgttctgcttcataatagacttgaaatcaaaatattatccaatctcatacagagtgggctgaggccagcctagctccgcatataaaacaaacattgccaaaaggtactttatacttttaggggtgatttgtgttggacatagcctgaagtaagcaggtgtgtcttggaagtatggatgaagcggcaacattgcccctactcaatgtggcattcagaccacacaatcaagtgttatatataaatactatattctatatttttttttaaataatgcatcaaagatattttaaaatattatattcttatcttaaaaaaataaattaaaaaaacaaaccttccat

SEQ ID NO: 324294 - DNA, 1029 bp, Cannabis indica
ctaccaaaatcctgttttctggaatggactctcagggtacccgatcttagtggggcagaaattttccgtctaactgtgaagggttggtaccgaagtagctccatcatcaattaaggggggccaattttttttttttttttctaaatatttagtataataatatacaactatttttaattttattagatttttttaaaaaaaaaaaatgggaggggccaagactccctttgcacttggctctgttcctgcttgattcactcgtttgatactttaattatttttctaataacatttctcatttttagtcacaacatataggaataatactttgtaattagtcataatttttctatttttagtcacaagttttgttgtgactaaaataaatttttttgtagtgctcttatattttttcttggtatattagtctaagatggaattcaataaagggatggaagtttagatgaatgcaaatattaataagagagtaattaggagagtagaatgttagacctagtacatatagattggaggaaatttctaactttttatgcttttcttgttttaataagtagtacttaagagcattgcctagcacaacttaaaagtgacgttttgtcattggctatatttcataataattattaagttaaattatatgaattattctgattggtagacatcattggctcatccattcaaccccccaatggttttacctaactgtcagttatgacagttaggattgagttataacatttaggctataaatagcctactgctacaacaactaagcagcaatcttggggagaaatttttcagagttttgagagctagtttagtgtgcaagaaagagagttttttgagtgaagttgattgtaaatgaagttatgtttcttgagtgaatgtgtcaagaacactttcatgatcaacattgtaattctctcttctagctcaataaagatccaagcctttggggctgttctggtccgaggagtaggcaaagtgattcatcatcacttgttcgaa

SEQ ID NO: 324295 - DNA, 1502 bp, Cannabis indica
tttaacacaaaaaaaaaagttaaaaggtatgtaaactagagtaataaactctagaaaccacttcaaaataacttccatcatttctaaattttattctacctattctagcattgttgagtgaataaccaatgaagaacataaaactaaattctttgcaccttattttgtcgatcttgagtgaataaaatgttgattttgaaattaaaagataatatcattttctattctacaatatttttgcttctgaaatttactcgacattatgtgacatattcgtgtatttttgtacagagacttatatttttgtcttggttacttgttaagtgttgaatttgacgagatggaatgaagcggatgcacggagggtcaccttagtttccttcgcccaaatgctttcaactgatttaggagagtaccaattcgttatcatgtactcaattttgttttctggatggacagtgtttattttttcaatgctctatttattttgaaaagagaaagaaagaaaagaaaaatcaacaaaataaaatggtgtatacgtggatagtcccaattttgtttgttcatattccaacaaacgagctcacatgctctatggtatttgtactcgcagggtggccttcgggcctatcattttgaatgtctacgctcatctatgattgcattgttggacattctatgtgtcgacaacatggaacatgcaagttcctgacgagttgttgaatacactaatcaatcaaaccaaaacttatgtaaagaaacgatctctattagttgcaagatacttggtcatcacatatacttggtatatgtgcaaccagtattaaattctctcggtcttacttatgtttttgactatgcgagacataatatgcgattagactttatctcggtggtatcttctcacaagttctcatcaagcgagattaaccctataagaactatctactaaaacatcatccttgccattaaaaattggatatcaattttatccaaggttgtactcatacttctaaacaaaaaattcacagtataacactttttttttgtttgaaaaagaggatgttttaaaacctgagataaagaatacaacacaacaagaatcctcaggaaagccaggaaggcaaacagccattccaacaatactcaccatctaatcctaaccctgccctagcacaattgtgagccaatttattgaactcacgaggcacataagaaagtatacaggtaggactgaacgatagcaagtgtctaatacgaactacaaaatcactcataacagaataattactaaaagacccattaactttatccactaaacccttacaatctgactccacaacatcaacaggaagattaacactctgagcccattctaatgctagaagaagagccttggcttctgcaacatcaggaggcacagtccctatcaaaggagcaataacaccagccaccacctgatcttgagcatctcttaccaccacaccaagactatgtttttt

SEQ ID NO: 324296 - DNA, 799 bp, Cannabis indica
aataaataaatttatctttatttttccccaaattccctacaaatttagtctaaacaaattaaaaaagttgaacaattcaaacagcatggacttagttgggcctgtttcctaaaaccaacaaaagaaagcccaacaataagcccactttttatacttttatattcttcaaaatgggcaaagtcgaagtgactagttttctttggtttgacaatatttggtgattggtatggttgtttacttatttattagctttaccttaatagtgcattaattaataaatgaaattcagtttaattttgtaatataaaaagtggttggaatatttcaatacgaaaggaccaaagtctaaacaaattagtgtgggttggtaggaataaatatgaagtaaattaggccaaagtctgaatttttttactgcataatttatttacataaaaatttgaaaatagttggagactgtggtgatagtctaacaacaactcttgatagcattccccaacttttatttgtatgatatgtgagttattaagagtagagtcaagtaagtaagcaacataacaagttaccccaattgcaattattgctctagttacatgttacaagttacaagtaagcaacataacaagttactctttccaaaaaaattattgctctagtaagcatggtatggtatcaccgtgacaatatgagatatttttgtatgcatatttagggtgggtatcgtctaatccaatctaattgaaccaaaccgaaccgatcaaatctaatccaatcataaaaagttggatatccaattaca

SEQ ID NO: 324297 - DNA, 603 bp, Cannabis indica
tttattagctaatttattagatttgaacattttcttaattttagacatttattaacttagtttataaatttaggaccattttgcatttcaaccctttagataatgttcaatttgaatctgtgtgaatgtggttaataagatcaacaccaaaatagcattagactcgtcccttgattaatttttcgtgacattcattataatatggctctcttgcataatgtaagtatttttcattgttttagaatagttaatgttattgcctatatttgtctatgactactagtaaagtttggtcatctagattgtattcattactaccttatggttaatgcataaatatttaatgagaattttgaggtttttcttcttagaaaaagaatagatatatactccaaattaataatattttgcgtgaccactagcacattcttgtactatggtttgatgtatagcaggagcacttatgaaattgtcaacagaagcacatgtgtttagccgtgtgcctagcactcgcagatgtagatatctaggttatatgtataagtttatcttataaattttttaactcaatctaaagttcgggttgttaaaatttaagtgcaa

SEQ ID NO: 324298 - DNA, 1024 bp, Cannabis indica
aattattatttttggtatatatattatattttattttcaaataatataagtatatagatacaatgagcacatcaactgactcatatccatcacagacaataattgtctcttttttctttcttcgctctggccaatttgttttttaaaagcgtacattcatctaaaaaatgaccctccttcttgtagtagcaagctttcccagtttcattttctattctcggtctttgactagcgattgatcttcccatgactgttcttatttgtcttatatatttttttcatatcttcttttaacatattccgttcaccactagttttagctccatcttttaatatcttttgaattttctttgaattttagataaccttaacggagagttttttcttgagactgaacttgttagccagtgatttcttatggtaaatcgatgctaaccttctccacaatccaataacaatttcttcaatggatatctcttgaaacctcatctcctaagctcataaggattgcactatgagcctttgtctcaatgtccttttgatcttctcatatttcaattcatcgaataatttttcatcgattacttctgcaatcgcttaatgcaataacaatgcattcattttaattcttgaaagatagaagtcattaaagccattgaatttgcctgcttcaaacttttctaaagtcatctcaatcgagtgatcttggaagtgcggataataggttcttgaatcttggatcacaacctagagctcttgtaccaattgttgtgaattaatcaccatagttttaagagcataacttaatcaagactcaaacttagaacaatatgacaaatagacaaattaaaatgcaacaaatttaaaagatgagaacttagttttattcatcaacaataatctctacaagagagattgaatctttgagcaatacggaaatggaaattaacatcttacaaataaactcacactgagaagttcataatcaaaacacacaagccttctatttacaacctctctctct

SEQ ID NO: 324299 - DNA, 1388 bp, Cannabis indica
gagaagagctaaagccatgtgattggcatctcggcttgggagagagatggtcgaaccctctttaatactaaaaatctttagaaagtcaggttgattatggcatgccaaagtatatatgctgatgtaggattctctgaagagtcttagaccatgccattcgagcaaagtgatgaagatgcttagagtgttactatcattctgtctcaaactgtgatggaagaagtgacttttgtttgaaatgacaaaatatttagggagaatatatgtattcttagaccaagatgacagagaagttacctctgctaggactgctccagagaagcatagggaatcagtagattgttgacatccatgctgtgttcttatacttgggttcgaacttagtggagcaattgcatgagtaaggctcctcacttcttgccaatagtgaggccctgattggtgttagggctgagaacatcctgttgcagcgattagttaggccagtgtattcaataatgaagtttgccatgccccttgattgttgttcaaggttgataagtgatctcaaattgacctagttcaattgcctacttgagtaggggccctgatgcttctggtttcatcagaacttgccttagtggttggtcaataagtaccttcactatgtgagcttaaaaatatgaccttagttttctagaggccaagaccaagcagtaggctaacttctcaataggtggatacctcaactcgaacccaataagacgcttgctgatgtagtagacatggtgctgtattccttcttcccaacgcaccagagcagcactagctgcatgcttggtgattgccaagtagatatatagttcttcaccatctattggctttgataggataggaggcttggctaaatgatgtttgagagcttggaaggcttactcgcattcattattccatccaaagcccttgttgtttcctttaagtaaattaaagaagggagcacacttgtttgttgactgggagatgaacctactaagtctagcaatttgtcctgcgaggctttacacatcttttatctgcacactactacaaaaatgggtttcaatcacacacattgagtttgcttagcttgtggagcagatggccggcgacaagacataaagagaagggttgagcgggtggcagagaagatggccagagaagattaggaggttctgagaccccttgcgaccggtggtagagcccaatcgaatggtgtaaggctggatggttggactgctggtggaggccaaggctgcccgcgtaagaacttcagagagaatgagagggaggcggaagagaagagatagaggaaaagtgattttgattagggttttttttccctttcttcttatattcatttattatatttt

SEQ ID NO: 324300 - DNA, 411 bp, Cannabis indica
accaatttctttttcattttatgacataaccaaacaaaaggtattaggtgaagaaaaaatcttgtcctttgacatgaattggttgtgagttggtcgtgagcgttgttgtctgctgcttgttttctgtggtggtttcgattgtttttgtatcagttggaagagaaagaagaaggggtcttcttatgcaatattatagaagatgttgggtagccaattgacgatcgatggtgtttggtggggaagtttctatgagtagggccattgattctttgtcgatgcagaatggttttctttatggcaaccaggaaagggtatgtacgtaaagaagcttcaaacgaatttataactctttcaattctaccatcaagctgatatacaaagggtaattgaatgaagtgttgggttttatgc

SEQ ID NO: 324301 - DNA, 733 bp, Cannabis indica
agactacaatatttatagttttgtgttaaatttgattacaattttttagaatgaattatttagtttagcacatttttgtagaatactatttacaattggtaatttttttttttcaagtgtgttaaaatataacataaactgtttttttagcactccattgaagatgtctaagaatggtataaagtagcaataacactccaatatcaaagataagttttcaacagtaaataaaaattcatacttcaatttaatactatcattaagtagtgtgttaactaaattttgcatgtttatctattaggtatacttttttcactcgcatcttccaaggatttgaaggggagaagttattactattcattttcttaaaattaatataatgtaaggtagcaggatagacttctaacataagtgtttgattcatagcaattataatttagaatacttttctagcattgaattttaaattcatactttaataaatattatcattaagtaaagtgtaacgataattggattttgtatatttgttataggccaatgtgatttttttatttattaatctttgttataggccaatgtgattttttatttattaatcgctcaattatttaagaatctaagaaatttcaataagataagttttattatactttatttttaaaaattactcccatgaaattatatatgacataaattttaaattacttattttaagattctctttataaat

SEQ ID NO: 324302 - DNA, 1491 bp, Cannabis indica
agttaatatatattaagtttatagcagtacgaataaagaacgaaaacgaaactctcctctattttccgtgcgacgaaactctcctttccttcattttctttgattttcaatctaaaatctagtaattcaagctctaatagtagcgggacaataaatcattgaagagaaaaaacttaaagtaaggattaatttcgtcttaaattaaaatcgattggttttatatagtgactttgtgatttagaatagttatagagattctgacttcataaaattattcttgggtagctatgggactagttttgatagttacttgttgaaattgaggtgattttgcgttaaaaattgagtttgaaaccttttacaacttaagtatgaacattagtggcgttttccatttaaggacttgatttttaattttattacgttcggatggtggtatttatggtatatgtgtgccctgtgaagtttggagtgatttagacaggtttctatggtatttcagtgagtgcaaaaattgcgatttttgacctatgttactgccaaactagtccatcggttggtggaactggttaactggttcgtggggaagtagttaaccgtttcctaatcggtttatcgttttcgggttttttccagaaaattaggaatcattttttatcataacttttcactcgagtatccattttagacgctctatatactttatcaaagattgcaacgagctctacaatatggtatatgtcttagagccgaaatataagttttatttcagtatatttataccacaaagtttggtaagaaaccctaggttgtcctttgtaactattaagatgtgttatgggatagatacttattggttgactattgttatgacatagggcccgggattattgatcattctctaagcatgtcgtccaacaaacctgaaccgacacttgaggtaagaaaagttaatgtaccacatgacatgacatgttttgtaattgtcaattgtctgattaggcaatgacatatgatgatactatggatgtgataaacgggctcacctaattaggtgatgcaatgtacctatcagtgagacatgattaggtacgggcgataatgatatgagaatgccaggtcatggcatagattaaaaccgttgttaggtttcttcctgtcagcaatactgtattaggtacgggcagtagtgacacgtaaatgtcaggttatggcataaactgaaaccgttgttgggtttcaacttgtcggcgatacctgattaggtacgggcggcaatgacatgtgagtgtcaggctatgacacaagcttgtctgattaggtgatgcgatacattagttccaggttgtggcacaggctcacctgattaggtgatgcagtgatattatgtatgatgttaaattatgttacgggcttgccggattaggcaatgcaatatataatcaattttatttttgtgcatatggttcgtttgttgggttttgtgcccta

SEQ ID NO: 324303 - DNA, 1878 bp, Cannabis indica
ataatataataatgaaggttgtttttggtaatatgctctaatcaaccaatcattagtttggcataatgttgcttattgaacaattccttgtgtttagttctcttagccttattaaaagggttttcgagcgagttgtatcttcaatgatttaaacaaaattatttgaccattataatagtatgccatcaataggaatctagcatatatatttaaagcctttatctaatcaactttatcccctttatctttattattattattttttggaggaaacaagtaaaagttaacccttgaagtgcacgcccgaccaaactttcgaaacaacaccgatctaaagtggtaaaatatttatttacaagaaaacacttgtaataaattattcaagtatcaaactttttgttggattattttatcattcgtatatagtatacgtacaatttaacaatgctatgtatgaatgactcgacttcaacataaaattttatgagtcatgctaggaaatccagttactaacatatatacgataaagaaaaaaaaaaaaaaaaaaaaaccatataattaatatatttatacgacaactaaaatctcaagcacagaatcagaactccaatgataagtattttttgtcaatatacgatgcaatatcgttggatcccatttcaattcagtgtctttttcggtttaattaataaataaagtgatccgatatgatctgtgttattctacgactactacgactatatgactccactattttctatgttggccaactcataatgaataaatgtatccccatttatatatatatataaataaatattttcatagccccgtagtaccacatatctttcgttacttttaacacaattaatggaacttttactttttcatgggttgagggatgccctcaattacaaggatgcccccaaataaacactttgagcttgggcatccaatgtaaaaagaaagtgattacaaagaacattatcatatatcaagaaagatcaatagaattaagtctattaatttttttagttagcgagagaaacaataaatgacagcttataagcctaatattcaggattaaacatcaacatcccataaccattaacctctttatgattttattttttttgtaaaaaaaacaaaaaacaaactataaagagaataatagttttcagtttgttacgtaatattaattatttacaaatgaagcatttagagtcagctaaacgtgacatcactttggtgagagattataacatgataagtttgatataatataactcaactcccaatcccaacattgagaattaagtacaaaccaaattgtgtattataatagaatttaagattctattatcattatctaatttgatatgctaatccctcaacaaacaaactagatgtggttgatgacatgtgctacttaaaattatgataatgctgaaatttagactgtgctcttactcttacatgagacccattttgcatctagaactaaagaagttttgtcgtgagttttgtgagcaccaccaaattttatttaataaaaacactttccaaataaatagatagaataccttaaaacaaaagaaacagctatagggtgacttaattatatacccaaaaatagcatagaaatatatatatatatatactagatgaaagttacgtggcgagccacgtaaatattagttttatttaaattttagtgattttttaaaaaattacgataactaattgtaaattatttttatttatttgttttaataaaatagactttttaagtaatgtcataattgtatatataaacttatgatgtacacattgttattaataatactaaaaaattggtaatattagaagtacttatga

SEQ ID NO: 324304 - DNA, 584 bp, Cannabis indica
aatcacgtaatacgcctatgctagttagggtgttacatgtacctcctcctcctcattggtgcgacctcctctggatcatattcactatcaaaactctcaacccctaggtcaatctctggctcaacattcgcacggggctgagcagtctcctccataatcttaacttgaccacttgtggccaccctagccacatgagggtcatatgcgggcgccttacggagggtttgtttctttctggccataaatgcattgtaaatgagggacctatgcggctgtcacctcccctattcaacacccagtggtacctgcatggatgatataaggggaggtgagcaacctaactaagctacaaacacattaaagtcaccagtacccaatgtgtaatatcccgataagtctcgtagtaaataattagggtttatatttatattatgtgttaatcaggtaataagtgggattatgatcctactaatttatttcagcataaaatttaaattttgctgtaagtaagcaaataagcgtaatttgtaaattacagagatttatatagcatgtgtgaatgtagtctcttaattaataaataa

SEQ ID NO: 324305 - DNA, 598 bp, Cannabis indica
ccaaaaaaaaaaaaaaaactgacagaaaattggtatattctaaaataactatattatccttaaattacttatgttatttgttttataaaatatttctttccaaatttgaggagaaaatttttggtaaactctacttaaaatgtttctcttctcttttttatttttttaactacacttatattttattttttctctctttctactttatatttttttccctaccaaacataaagtaaaatattattcacaaaaactataatttattataataaaaaatttattagtaacaatttataaatactgtttttttattaacaattaattttttgtgaagactaaaagtgatatttagtcaatttttttttattgtgatatgattaaaaaattatcactataaagttactaaatgcatttttttaagtgtgtgtaagtaacatttgtggtcattcttcatataatattttctttttactctatacatttaaggctcgtttggtacatcgtataaggatcgtattgtattaaataataaataacaatatgtttggattaaacaatgtattgtattaattattacgaccaaattttttaatacaat

SEQ ID NO: 324306 - DNA, 874 bp, Cannabis indica
tacttacaaaaaaaaaaaaaaattggatatgtgtagaagaacaaaatggacacgtcctttattttgtttgctgtttggtataaattttatttaaaaatggtccaatttctttgtgccattttcataggtggaccactccaataaaaaacttaaaagaaatacagaatttcaatgtacaaatatatataggaacatgattttgtttcgtaattgtacttttacgaaatgtattccgtgatgtacgacagccgttagatgagggaattatttgatctgatggctgaaattaatctaggagttattagggttagaaaataataaagtaccctgacacttacctagagacccatctaatgtaccacggaatacatttcgtgaaaataatcagtgtccctatatatataatctttctattttctaataatattctagtctctatcccaattcaaaaacaactttttttttcaccatacttttctggtccaaataattcaacatcctttaaccatacaagttaaatttctttatttatttcattaaaataattgacgatgacattattttcttgttatgatttaaaatttatccaaaattggaatgaatatatttttattctttttagatttttttttaaagaatgaataattccttgaacaaataaatcataatgccttttaatttcaaatattaggaaattctaataaaagaaatatttttatcaaactatacaaatttcttggctaattagcaatttttccccctgaactttaacatgtaataaatcatactcctgaacttttttagccgttaaaaattctgcctgaactattaagattgttaaatttaaggacttttctctaattttagtaaaaaa

SEQ ID NO: 324307 - DNA, 1888 bp, Cannabis indica
tgcctggtagaaacggttaatcgattctatagtactagcagactaggttaaccgattttccagtagaaaaccctagaaaaacttcatatctttctcaaaatcacttacccaaactcaaatcaaaatttttccagaatacctaataaaatcacctaacagtagtttccaaagaaaaaacagtaagcaaaaatgaaattcaccacacctcaaactagacaaaaccaacataaccaaatcaaattcaactcatatataaactagaaatagaaataaattaaaccttaagtcaaacagcacctaaaacggaaattgacatgctataagtcaactaatagcttaaaaactcaaggaataatagtttctaggacttaccttaacttgaatacaaaaaaaccctttgaaccatagctgagaactcataaaataattgaaaaacaattggttttcctctaaaattttgctgagagagagagagagagccaagaggtgatctttgtctttttccttctaattgtaatttttcttaacttttccttaatacaaaaaaaaataataaatctaagttaattctatccaaaatggccagctgccacttagtggaatgatccacttaacactaaattaaaatgccaaaactactcttttcttaatgcttaaccactaaaatggcttaggggtaaaatggtcatacaccaccatcctgcctaatcccaacaacccataataaaatataattgtccccaaaaataaaaaggttttatgtttacccatgtgactctaatggccattcgttgcattttccattgtcactgtgcaaaaattgtaaaatttataaatttcacatatagcataattaatacactagagtttaataaaatttctaaaattgagaaattataactctaatgcctattttctaaaaataggacccccaacataaatattcatataaaattataatttaaagataactaatgctaatagccctactaatccatatttaatcatgcagtcattacagtgaagaaagatcaacaactaatgcctccactaaaacaaactcatcttctgtttcccaagatgaacttgagcagggagatagtgacgacgagtcccctgctatttctcaagaagatcttaagcaagaaaatagtgatgaagaatctccctcttcttcccaaaagactcaggagagggggcagtgacaaagattcttcctctgtttccaacaattatcaagaacaggagagcaacggtgaagatgtgtcttatgagtcttctaaagatagtgaccaagaaagcgatactgaagatttccaatgagatagagagaccttatatcgtcacagaagtgtttgaacccgagacaaacaacttggagtttgttatgactgccacttgaatccagtgttggttcaaggtattagaacagggagcatctgtgacgatatcatcaataaagcaattgttctctaaatagttcgcttcacaatgagattcactttaccttgtgcaagtgaatcgaccgcctcctaaaccaacaagaagcgacaaagacatttttaggaggtccatcgcgaaggtatggcccctgcactattattcgaacatggcattagtgtagtggggatcacttcaactaagctttgatgtaaaacgaagatctacaactactacttctttttctttcaacttagctcacagtgatgcaattgaatttaatatataatgaataaaagcgttgagtaaagcttattggtactttattgttattaatcaattgcagctcacagacctaacaatgctctcaaacgctaaacaaagcttgtagagttggtcttgaggtaactacagttatttctttagtgagttaaacactaccaaccca

SEQ ID NO: 324308 - DNA, 873 bp, Cannabis indica
agagaaagagagagagagaaatggacgaagagataacatgggaagagagaattcatgccctaactcatatcctaacaagccccacaaattcaccatctcttcactcacagtttttcatctccacccaaataccatgctacctaaactgggactacccaccagtcctttgtaccaaatattcaaaaactttcccatctcttgatttgaaatggggtatctctctgttcatgaaaagggtttccagaattggtgtccctgagacttcttggaggtccaaatgcccattccttcagccaccgccattgattctggccaaaggagttgaagaagctcagtggggtgaagaacagagaagacaatatttcgggaaaagactcagaaggaaacctcttctcaccaatatcaaccctttcattcctattctacttcccaatctgttattgttttctcttttgctatgggaccctgatcttcccgatgcctaatcagattcgcttttcttttggttcaaaattcctgtaatatttctttgtattattactgtattccatgtatttccttttacgaattattgaattgtattctgctgatttgtgtaattcagagctgaaagtacttttgaactctcttctatcttagcatagcaattgttagattattaaaagagaattgttaaaatgtatctagcactttatttggtgtgctattggtgcaattaagtatcggatctcttataacttaataaaataaacaatatcgctaactaatcatagagttttatttatgaagggctcctttggaacgtctattgtattgtattgaattaaattatatatattatatttttatataatactatgttaaactttaatt

SEQ ID NO: 324309 - DNA, 994 bp, Cannabis indica
gattttaggttaatataaaaaattaggtatgtaagtatattagatatctaattagaaaaactagcctaattcaaattaataattggattgaattagattagattttgaggcctaattagattggatcggataatgaattttcaaatctaattaccaattagattaaattagattagaagaaaaatattgaattgaattggatattcaactatactaataagtaaggtcatctatgtttttatagcatataaaaaaaattataattcaattttttacataacattgtacatagtacttaaagtattaatagtccattaattttaaaaaacttctaaataatttaccaaaattattttacatgtacatatatataaaaacacagagacgcattaacactaaaaaaaataggtttatatcagcggacgcagccccgttattgatctatttcgacgggtttggcccaccatacatttcaatgctgagaatattggtggtgaatttatctcggtggtctcggtccttcgttattgcagacactctcggcgggcaaaactcgccgttaattatgatgcgatctcagcaattatgatgcaatctcagcagtctatgtccgtcaagatatataggtatatttttatcccaatttaatatttttcgacacctatctcgacgggcccaacccctcgttattggtcaatattggcagtgatctaaagagctcgccgaggcccgagatagtgtagtggtggaaaaaaaaaagtaatttcccttactattacattaattgtatataaaaatttacaattcaaatataatttcaaaataatcaatcaatactttaaataaatgtatgtaattcatctcttaatataataaagtattatatttgaccacaaatataattagtcatctatacttaataattttaatctaaatcatgatatatactcagataaatcatggcatagcctaaaatttactatactataatata

SEQ ID NO: 324310 - DNA, 731 bp, Cannabis indica
tctatgtagaattaccgtaaaatagtaaaaaataaaaaaaaaaaaaaaactgttttagaagtgtaaaaataaaaaaacccttaaatttatatagctaaatgatattacttttccttacaaatatgagacctttaattccaatttagtcctggcctaatatcaaaaataataaaaaaattatcatttaacatatgagttagtggatcaataaatattacaaaatatagggtctaaaataatatatacttctatgataataaaaataatataaatttaactttgtatttatttggttaaggaaaattgcagcataagtccccaaaaagttcagtttgatacagataagtttttaatcttgaaaattggtggtaataatccccaagctcccaattctcgttagtccattagtacatgtttaccgagattttcagcaactgaatatttttagaccttaagaaagaaataacagaataaataacaaatacgagatttttacgtagttcaggtgttaactatcattagtccacaagtctatttcattaggctcattgaccggtaaatgttcatacagattagtacacaatggacaaaaactctattagttgatcaaaagtgtaatatcttgatagtaattctccacttgattcgtaatcagtatagtgttgtcattccaatggtcattactctgtaccaaaatttgtagaggttccatgtcctgaaatttgtgtatt

SEQ ID NO: 324311 - DNA, 1227 bp, Cannabis indica
gcatttgtcacttttatttacttcaaaactatgtgatatgacaagattatcaaatacctcatgacattgtttaggtgcctctttcaaactatataaggatttatataatttacacatttatgctcttgaccatgaacaacaaaaccttcaggttggtccatgtaaatctcttcttctaattcatcatttaaaaacgttgttttaacatgcatttggtacacaacaagattatgaatagcgagagcaataagtacacgaataggtgtaattctagtaacaggtgaatatgtaaatctatattttctctttgtttaaactctttctcaataagacgtgcctactattaaagactttagtttctgcaatagtctttatttcagtagctcgttctctctgcttctgttctctgcaagttgtgctactttccttcttcttctctaaactaccttaactgattcttaatatcttttagttaagttagttgctaatatatagggaagttagttaagttagctggggttgttatgttagttaagattgtgttgtttagtctcctggactatatataagtaacccggttccctttgtaattttaccaattcaattcaataagattcaattcatttctctcttcatttcgcaatatggtatcagagcgggaaaggaatactttcccttgatccgatctctctctcaccgtgcttcttctccggcgacgttgcatcacagaactctgttcagttctgtcgattcttcctctcgattttttcttcgactgttctttcttctgattctttttcgattcttcaatggcctctgatgatcaaagttccactcatggcatcgacaatgacggagtacctgccatggttgttgatcctttgaattcgacattgcagactcatctgaaccaacatattgtccaacagagaagtcaccttgaagacccttcacacccgtactacttgcatcacggggataatcctggcaatgttttggtttctcagcttcttactggacaagataattacatgtcttggagtagggctatgatcttagctatctcagtcaaaaacaagcttgggttcttagacggtacaattcctaaacctcccccttctgaaactattatgtacaatgcttggtttaggaacaataacattgtgatttcgtagattttaaattctgtgtctaaagaaatttcatctagcattttatatgatgaat

SEQ ID NO: 324312 - DNA, 1792 bp, Cannabis indica
attatacacactattccacttaaaattattgtttttctgagtttttatgattattatttcttaattctctttgaaacattagttttttttaaatatatatatatatatgtaatgggtacccaatgggaatctttcctccgttgggtaatccccgccctgccccgctttaatttaaatggatattggcgggtatgaggtgaatttaagaagcgcgtatgggggtgggggagcaatctccgcacccacctcgccccgtttacatccctaagtagagacatttgtaaaaataatacaatatgatgtaaagaatagacttagaagtgtggaagtttctaaagtagatattaattggttcggaaaatcgtaatacctagagtccatgattaaaatgattgttttgatgtaaattatgttcaaatggtaatatacatatctaattaccaaaacaaaaataattttatttcattcctattttcattcatattcatatttacatttttatttttattcctttgttttcatttattccaactaaatatatcttaaaaatttataaaaatattaatttcaccctaaaaatctataaaaatattaaaagatggtagattcgtattggtaaaaaaactgtggtatttgatcctctaaaccaagctaattctaactcacctaccctttactaacttaactaagtttcagttatgttagttggtgctggttttgcacctaatttctaattgtgagttgtacctatatataggctattcttttcacttctgagttagagaattgagagagagtttggaggttaagtgcttagttttctaagctgtgagatcatgttctcgaatgggtcaataaatgattgggtgtactcgggtggtgaatgagaaactgtgactgtttctctggcgtgtgtatcaagtgcggatagatcattgttgctatgatcttagtgattgtatttactctcttattctccattttaatgaaagcaaagatgacgtttctcagctggagtatggccagggatcaacttgatctctaggattggaaccaggataaatcttgttgccttctctcttgattcaattatgttttctcgtattgtgtttgtttgttatttctgttcttgttaattgtttaatgcatgtattagtgttggaatcttgttattgttgctgaatttacaataaaacttaatctataacatctatatataaatggatgttataataaaacaaataaaacgacttgtctttatcgtttgtttatatatatatatatatattattttttggtaaataactttttgtacttgctattgtcaccttaaggtgttcaatgccataccaatatggcatccaataaatggttagtaattttttttgttttttttttttttatgaatgatctttatactatttttttcataaatgattttttgtactattattgttatgtgataccttaaggtgctcaataccatactaattcacatatgcaataattaattaacagttttctaaataaaatttaattaaaatttgtgggaactgatattaaaatatactaataacactatgttattttttgtggtgttttgtaccttaatgtgtccgttaatatttttgttattaaaatgtacattttttttattaacttcaaaaaattttttttgttattattatatataagtttgcaataatatttttaatgggatacataaaaatgtactatatttagcaaaagaataacttataatatatttgtattaatttttagtattatactt

SEQ ID NO: 324313 - DNA, 742 bp, Cannabis indica
tttttaatatattataccatagtaaataaaaataaaatgattagtattttaggttatttttttattttaatatattatatatagtaacaaaaaataaaaacaaaaaaatataaagtgaccggtagcggcggtcggtcggtcaaccaaaccatgaccatagaaaccaacccgcgaacccgcccgaaagtgtaccgggttgaacccgacctgcctgaataaaatgaatttttttaattttcgggttaaccggatcgggtctgggcgggttggccaggtccgagtcaaatccagtcaacatgttcaaccctactttcaagggatgcattgtaaaatttttctacatatatgtacatatatgttttaagggaaaattctataatgcacccctaaaagtgatgcagtgatgcattcctatatacttcgtcatccgagagacttttttagtctattttttttttcggtcgtgtacattatagttatttaagacacatcctgcaaaattttgagaaattcaaaaaaatttaacacactgaaaataaggttcaaactatccgttgcacgtgtgactcttttatcttatacgtgtgtgaaatagactgtttgaacattgcttcccatattgtaaattattccgaatttttcaaaatttcgcaggatattttaaaaactaagaaaaaattgagtaaaaagttttaggtgattttataatatacccccttaaaagggatgcactgatgcaccc

SEQ ID NO: 324314 - DNA, 883 bp, Cannabis indica
caatttgaatgagagcaatgaaagactatagaaagaaagtaaattgaccatccttatttttaataatactagttggttaacacgtgctttgcacgtgtgtaaaccttttataattttatcaagtttgtaatgtacagttaaaattaaaaaaaaaataatattaaaattataaaagaattaatttgattaaaattaaaattcattttgaaattaaaattaagattaaaagaggttaatttagttaaaattctttttgaaaaacaaacccgaccgtaacagtttataagcaatgagttttatttttcaatacaatttcatttaaaatattactttattattataaattaatttataaaagtacatatggcatcactacgggttaggatgttacaattataacatacatttaatgtattgaattttataatgtaaaattatatgtttttctagtatactaactaacatacattttatttattgaatttataaaagtacatatatggcatccctgtgttacaataatatacattttatttattaaattttataatataaaattatatatttttctagtatactaaggaaaataaagatttgatattctaaaataagcattttattttataattaaaattttcaagacttttgaatctttaaatttaatatcataaaaacaaataattataattaaaaactttaaggggataattatataagtcacaattttttgtaaaaaaattacatttttacgtttaaaaatattttttttacatttttgcagtgttctatataaacaacacgaaaataataagaaaactacataaaagtaatagaaaaataacatcaaaacaacaataaaaaataatatacatataacaaaaaa

SEQ ID NO: 324315 - DNA, 1140 bp, Cannabis indica
aaaaaaaaaaaaaattaactcatcttttaacaattttattcacgaaacctctccacaattattttaattttaattaaaatccaattatatatatagttaattaaaatgaaaacaaaaactgtgtagaaagagattatgttatacagtacctctcaattatattcatgctttctttttataatacatatatatttagataaaaaaaattaataaaatatacaatgctgagaattcaactaatgcatacaaagtacaatttggatagcttggctattattaatttattattattattttagtttattatattttggtagtattttatagctattaatttaactgactagaaatttaaaaggatgttcgtataattaacaaagttcgcattttttaaaatgaaataagttagtgtggaatgttataatatatattttggactttgaatatgactttatgtatgtgaaacagatagatgtatataaagaagataataaattataggggaattaatttatatataattttttttaaaatttattgtttgagtttttaaagtggtttctctagtgatttctatgtcggttgctatacaatttttagttgcgatttaaattgttacactagttccgtaaaaatacaaaaaaatattattttaaaatgtaaaaataagaaagcccctaattataataatatttgtaataatgaaaataaaacaacaatgtttaatcgtttctttactaaacaaataagtttttctttttgcgcaaaatatatatatttatatgtgaaggattgagaaagtgtatatctaaattaaaattcataattttgacttgggacattgattaaggaaataagaataaggaatctcatggaagatgtgtttattcaatttaattcgcactatttttacatatgacctacagtaagggtatgtttggaagtaaggagacatgggtggatggagagggaaggagggagaggagtggtgggagatggaaattctatttgtttggcatagaggattgtgaaaaagagagggggagggggaatgatttacaattcatttgtgcccactattttgaatcctttctcaaatggaaggattgtactcttctttctaatttattttaaattaca

SEQ ID NO: 324316 - DNA, 780 bp, Cannabis indica
ttaacttttagctgtagcttttcaataaattcttcaataagctgttttttaactgattaccaaacacctttttgtcataacttttttaaaaagtagttgttagcttttccaaaagttgtgttaaatgtgccctgtgtgccttgagtgaatatgtttgggccatttccatgaaagataacctttatattcgataggtcaactcgatatatataaaacaaaacaattggtgtgactatgaggtccccaatgcatcaagctggtattggaaaagggttgcacaagtgaaagagaagttaaagaatttttttattgagaaagatattcagcagtacaactactctattgctaaaatgttcatcaatgtgtcgcagcctctcatggaaactgaaaaactaagtttttgcaaatgtcaataatatatatgaaaatataaaactgtatacgtctgcagaagcataatgtaattctgttactgtagaacccaattttgcagcgacaaaacaaaacagacagaatataaaaataattgtagaaaattaaataacttgacacaagagatttgtacgtggtatgagtgttctttcgaacactcctagtccacggggccacacccaaagaatgaaatcaactaataaagtatcaacaattacaaagacaattgacttatacaagtttagactacctctaaattattgccgcaatccttatttgtattgcactttatgaatctgacttctgaaacaccttcaagcgcgaactcccttcgtctttgaagtgtga

SEQ ID NO: 324317 - DNA, 923 bp, Cannabis indica
gtcctcacagtttggtcttattgttcaagatgttaggaatttacttttagctttatcttttgtggagttatgttttcttaaacgatatgcaaataagttagctcattgcttggtaagagactcttgtttctctacatgttgtgtgcttcaattggaggattgttcctctaaagtgcgttcaattattttaaataagtttattaattattaaaatctcctgatttattaaaaaaaatagctaaaaatgtttactgctaaaaattaaatttaagtatttatttagaattaagaattaaactgatataaatatttatatcgtatattacttttttttttactatttcatttcatttgatctttagttattaaggtagtatatatattaataaagggttggtacatatactataaatcacaccatcaattcttattgctttctttctccactatcaaactaaaccaatgacaaaacttacatattttgcttttattattccataccttttttttaatctcaaccaatggaacgttgacaaattaaatttttacattaataattttgtacttttttcttcattgattttcagttttttatgcttgcttaacatacagactaataagtgtaatacaaggtaggtaactgaaaaaatagtattcttcatatattattcatcaacctccataagttcaaatatattaatttgagtgtgattttaattctatttcgatgagaatttgcttctagcctcttaatttatagtctagtacaggaaattaattactacacagaaaatcattactagaaattcaaaattaaatacactgcattattattgtcattaagtaaagttgatatttgttttgttaaacgatctgtaaacaaagctgctcactgtcttgctaggagctcttgtttctcttca

SEQ ID NO: 324318 - DNA, 833 bp, Cannabis indica
gatcaagacctggtttcaagtctgagtgttatgcagtgtcaaagactaatggcattattgtctcaaagaacatcagatcaatctgttaatccttcaaaagaaacaccacttgtttctcatttttttggtgagaacctttttcttcctaaatccaaatggattattgatactggtgctacgtaccatgtttgttttgagagaaatttgtttaataatattaacactgatagttctattactcatgataagttaccacatggtggtaatgcaagagtagaaggtattggcactgtgaatatttttcttaatttacctcttcatgatgtcatttatgttctagtttttcagcataatttgttatctatctctacactaacagatactgatgcttactctttcttatttcatgacaaaaattgtgacattcaagacaattcgaagaggtaaatgattgggatgggtgaaaagattggcaagctttattatctgcattctgaatccaaaactagtgtaccttttgttttctctttgtctaattctagaataagtgatcaaactgtttgacactattgaatgggccgctctagttgtataaaaaatcattctatgaataaaactttacaattttacagtgattcctctcctaattttatatataactcactcacaaccttcagtgtagattagtggagatcacctttatccaaatgcttataactcctatctctaagcactaagggaactctcatggaaatagttttggaaattatcaagtcttagggttttctagcaatatacctttgatagaaaacttctcatccaaatgagcacat

SEQ ID NO: 324319 - DNA, 1238 bp, Cannabis indica
gggcacaaaacccaacatatatcacatatagacaatcacatatataacatgttcaatgctattcttaccttgtttctaaattcaagtgagtcggccgacttgaacggaaaaccttgtgctagatggatgccctaagtcatatttatgtaaacaggtaagtgacatgtcaaaaccctaatccgagaacccaaactcactactaattaacagttctgttattggtaattattataaaaataccataattatcaaggaaataaccatctaaggctttgaaaataacactaaccacaaatcaaactattcgggaaacctacccctgatacgattagccggtttgcactaggtaacccaaacaagttcaaaacttgtccaattcgtgttcaaacatcaccaaaacttccagaacacctgtaccaacctcaagtaatattttcaaagcaataacagcaagaaacatacacaaatccaaaaatgtcattaatgacccaagtttgattgttcattcaccacataacatatcaaaactagcatcaagaactcaatttcaactcaaactgaacctagaaactagactacaaataattctaaccctaacagccattgattcacaaaattgcatgctagaactaaacttaaagcttgaataactaaaagattgaagtgctagggcttacctccacctggaaacaccttaattttttgttgaattctagaaaataatgagggttagggctgatttctgccaattcttatggtggtcgagcaaaagggagagagaaagagaaatttctatagttttcttgattttttttggattttcttcttaattaactaacccattaattccatttatgctgaaaactaataattgggcagctgtcaagctctcaaacagccacctaatcctcaagtgtgaaataccaaaaatacccctcttacttgtaacttaagtaataataagtctacgggtaaaatggtccaaaactataaccccacttaaacccagtattcgtaatatctcaaaagtttgtcctgctaagaaataggttctaaacttacccatgtgactttaacgaccatccattgcattttccgttgttaccgagcaaaaatcataaaaaattgcactgaacccggacccggacccaaatccccccacggtcctggcgctgaacccggcctctgacttgaacccaaatccgactccggacctagacccgacgtaaaaaaaatca

SEQ ID NO: 324320 - DNA, 919 bp, Cannabis indica
tcgaaggttttggctaatagattcaaagaagtcctaccgaatgttatatcagataatcaaagtgccttttttccggggcgtcttatttctgataacatcatgatagccttcgaaattatgcattatctgaagcgtaaaagagttggtaaggagggttttatggctattaagcttgacatgagcaatgcatatgatcgtgtggaatggccttttattgaaaatatgcttcttcatatgggtttcagtagtcattgggtgcaacttattatgttttgtgtgactacggttacttataatgtgattcatggtggtcatttaatgggacctatcactcctggtagaggtttgcgacaaggagatccattatctccttatttgttcttgatttgtgcggaaggtttttcctctttgctgaaacattatgagagacaacgttggttgactggctgccgtgttgctagaggtgctcctatggtttctcatatgttattcgcagacgatagttatgttttttgtaaagccaataattttgagtctcaaaatgtgatgcgcctccttcatagttacgaaattgcttcggggcaacaagtcaactttgctaagtcatcagtcttctttagcaaaaacacttatgaggctattcgtgatcgggtatgtggtgttatgggccttagtgcagcttcgaatgatagtttctatttgggtttgccttgcataatggggaggaataagaatgcaattcttggctttttgaaggataagatgaggaaaaagatctttagttgggaaacaaagttcttgtccaaagctgggaaagaagtattgataaagtcggtagctcaagcattgccaagctatgctatgagtgtttttcttttgactcaagagatttgttcaagtcttgagagtatgatggcgc

SEQ ID NO: 324321 - DNA, 1128 bp, Cannabis indica
cttgctgacttttttactaagtcacatacgatttctcgtttttattttcttttaggcaaactcttgatgcttcttccagcagcatcatgagttttagggagggtcactacaagaaaacctacttttgccggcacaaaaatacgtcgacaaaagcaaactaaatgcctcggcaaagctttgccggcgcaattatacgccaacaaaataggtcagcgaatcttggtcggtaaaggagtttttaccgtcgcacaggtgaaatgcgccagtaaaaccttgttttaccagcaaaaaattgcgccgacacaacttaaacgtcagcctaaatagatacccttatctgctttgaacctgctttgagatatttttttcggcgcattaatgcgacggtaaaaggttcgcgccttttctcagattagcgcgaatagttttaccggcgcaataggtgcaccggtaaaactattcgcgctaatctaagaaaaggcgtgaaccttttagtgttaagttttgccgacacagtaatgcgtcgatcaaatgatttttttaaaataataaattaattataataattataattataataataaaattaattatattatatttatattaaaaaatacaaacataatttacattgataattaggaatttttacaatcaaaataatatagcaaaagtgttgtactaaaattagtaagtaatgcaaataaacaaaatattaaacgatgttcgattggaaaaaaaaaagtgaagttccaattggtatataaaatatgtaatattatatagacgagtaatgtcatcgtcattgtttctctgagtctcggaaggatgcgatgacgatccagcaccaggagcaagcgatgatgatccaacaccaggagcagcggggaatggtggaagatccatggggccgaagaattcatggcaggtgctcttttggccccaactgccttcagtctcgggagatggccaaagcctcttagttgtcgagattgctcccccgagtacttgcgtcataacaggcaagtctcgggggtattttgtgggatctacggcagtctcatcaggctgatcctctgtgggcgcaggttgagttgcagctatttcaactatttgctcctaaaacaa

SEQ ID NO: 324322 - DNA, 807 bp, Cannabis indica
tattgccctttagcggccacattgtggagcaatagcggccgaggggcccgccgctattgctcctgaatgttgtagtggctaactcaagtgtcggcaaaaataattattatgaactgtatgtatacgtgctaaccaagtctattaattactattttcaaattcaatccaacaaaactttctaggagaatttttttctctaataattttgtgtttatatgaaaataaacatagtattaatttatattagacgttgtaagtatagtgaagtggtgaagtaattttaaaatactagtttaagaaaaaacattgaggctccattgctactacatgttaattacttaccacatatatacttttagctagtaatatataatgttattatttggggcaccaagacaacttaacactcttattatttgtcttacttcagagtcgggcctagctatgacaattgatacatgcatgtttccttggtgaattaaattactcggtaaaaagaaaattaaatttctaaaattgtagaccaataaaatcttatcgtgtatactgtcttcatataaataattcaacgtacgtaacacttagtacatccaaaataaatgaaaatgttaaattattaacaaaacacgttttgtgccaccagtaccatcaccatcaccatcaccaaaagttacataattgtttatgtacaatatatatatatatatatgtgtgactattcaatggttacatttttattgtaaccatcatggttacatttctttttacctgcaatagcaggttacgaacaggtaaaaattctatttt

SEQ ID NO: 324323 - DNA, 747 bp, Cannabis indica
aaaaaaagaatatatataatagtatgttattgggtcaagaaaagagaaggaaaatggcaaaaggagtttggtttggttgttattaacaaaatattagtcaaagtcgtctttgttggtgttttgttgaccattaattattaaagctttatgtttttcttttcaattcaactttgaggtcacgtgcatgtactaagaaagttactttatctcactctttaacattttctcttctttcattttattatttaataatatatagtttttattgattattcaataatattttgtttcactcatcacatgtaaaacaagtttcaaaacaattaaatttattttcaacactagttgaattattcataatttattaaaatatatttataggagattctaaataattaaattatacatggtaaaaaaataaataaatataaaagaattgcaacctgttcagccatttctctggtaattgacttaggtttaaagtttattattattgagagtgactcgagactagtgatcaatgtcctcaatgggaaggagtctcattgggctcttgagaactatatctccttttgtttgatatcaactccttcttttattagttgtaactttatgaatattagtagacattgtaactttactgtccataatgtggctaagtgggcgttttcccaccagatgtatggatgtattccggtctccgcgatctgccggagaacctactatgtaatgacctcaccatgctaa

SEQ ID NO: 324324 - DNA, 984 bp, Cannabis indica
ggcaaactatcatcacccccactttcccaacaatcctttacaatttcaaagcacattggctccttgagccaagcgttttcaaacttgaaattacgattaggagggtaacattgatatttagtctcaatgttaccctcctaatcaaagactaatacatctttagtctcaactaatttggtcaagagatatttctataattactcaaaaatgaaaaaaagtttacaaacataggaatctactatatctttttaatatttttatggattttaactttttttataacaaaaatacatatagttatttttttattattattttcgtgttactgctacatgaaaataatgtaaacataatgttattttctaaagaaaaaatatacacgcgaaaaatatgtaataaacaaaaattgtaaaaatatatacaatattaaaaaaaaagtgcaattttaagtatttaatgtggaaattcctcaatcaatgtaaattttagttgtaaattttaatcactaatatattttttagcatcaaacctaactttaatttccttggtgaggtaggtggttgcaattgtttttgcttaatttttaaaacaatggttttaatgacatttatatttgttgtagttgttagatgtgaaaataatattaattaaaaagagcatatttaggctttttcatgaaaaaacaaaaatgtatatttgaaaaatgttgaaaggcataagtactgcttataattaagtatatcaagaattttataatttaattcaataactattataaatatcgataataatttataaaataacacaaaagattaggtatcactcgttcttattatatttaagagactaaatttcaaatattatcaagttataaagacgacaagatgtaatggtgagcttagaaagttgatgatccctttcttaaaatccaaaatttgactatttttccactttacatgttcaatcttttcaacattaacaaat

SEQ ID NO: 324325 - DNA, 545 bp, Cannabis indica
ggaataaatgaaacatatacatttaatacatggattttgacatgacacaaacatgaattcctgcccttagtttcaagactgtttatggcaaaaatagtaggattataacacaaaaaatacctaaataaaaatattttttttatatattataatttagttttctttaatgaattttgtttaattatatttttatggagacttaacaaaataatttagtaaatatatatgaatacagcataaacaaatttttaatctacaaaaatattgaaaagacaataaaaatttatcaaactaacaaccttgacaatgagctttatagtccttttataagggaaatttacaaaaatactgaaatttggattaacttttataaaaaatactgttacacggaaaagttttcaaaaatactgtgtttttataaaacactagtaaaacacaaagcagaataactcaaaacaacagtagaacaactaaaaaacactagtagaacaccagtgaaaacttaacacaatatacagcagtatgaaacttataaaaaaatacag

SEQ ID NO: 324326 - DNA, 1335 bp, Cannabis indica
taaaatgttattttacatattattctatacaataaaagcttaaaataattattttatttttagaatggtatataattcaatttattttttaaaattagtgagagttagtccataaataactataatatactacaatttcatataaaagattcaaattataatttcttcaaatataataaataaaaggagaattactcccatatattatttttttattattttttttttcaaatttacagtttggatttctaaattagtttctcctgtagtttctatatgggttgctatacaattttttgttgcgatttaaattgcagcgctaattacaaatagaatttgtatgtagagtttcatcaaaataacaaaaaaataaaataaaataaaataattttaaaatgtaaaaataaaaaagtccccaaataaaaacactgctatcaattggagcgaaacttgcatgcccccacacaaaattcctcagtaacttttaagaaaatatatatgcttgttataaatcaattatcattattttgttattacaattattaattagttatcaagaaactcacacaataagatgtgccaatttgaagaataatctagctgtcactacacatgtaatttgtaaataaaacaatgttagatataccgaaatggatagtaatttctgttattaggttgtgcagtactatattattatttcctaatttcagtgatcatatataactattacgtgcgaggcaagcatacttagttttatgttaggtattttttattttatttaaaaacaatacaataaatagttaaaaaaaacatattattaattattatttcaaattatttttaggtatattaaatagtggtattgtaaattgtgtgttagtatattactatattttataagtaaaacataattgcatctataaatttatgatatgtacattgttattaataataaaaagtacgttaattttagtatgtacatactcatatagtagttattcttgacctgaaacttttgtattttttttaggaagcatgggtgctcccccttaagcaactcaattgatcatatactatctatatgataaataacaaagttaaaagtattcttacaaaattaattattattttttcaattagtgctatttgccaaaccctataacatttgaggagagatgaactataatatctgtgtaggtacccctcaatctaagaccttgtgggaacataccataggtcagatcgtttggacttacccctctagatttataatattagaataaacataacttgagcattcaaaatgtactttgtaagatttaaaagtggaggttc

SEQ ID NO: 324327 - DNA, 2051 bp, Cannabis indica
aattatacctaaaaataattaaaatcacaaattctgaacattttagatataaaattaacaataaatttaagaatatttaatttaatttatccaaaaaacttaacaaaacctatactaacaaacattaattataaaatttaaagtaaaattaaaacattaattaattataaacatacaatctaacaatacatatttcataaaagatatcccacaaaacaagaggaaaaagtaacaaaattgcaaataagtatttcaaaaattaaaatttaaacttagatttttcaaacaatatgtgtatatatactatacataaatttttttcgtcatttttttccttactttgttcagtcgtcatttcttcattgtcattttttttttctcaagggaatcttaattcacctcaacaaatatgaagagcaacttaatgccatagttgttaaggtatgagctaaacaaaatttgatctacatcatgacgactttataatcttgtattgaatagattgttaattaaaaaatcgcttcaggtgtttcaactggttaggtgtttcaaagaagatacaaggagtcgtacataatcaacatgcctacaagaccatttggcaaacaatcatcttttatactaactcaagaggaatggaaccaaggtcaatggtacattttgaataattgtcctgagtaagacacatacttaacgtaagttaaattttgtttcttttcaaatattatgatatttatgttttagcataaaattaatatttcatagtacttgttataaaaatagagaacatagtttattcttacaatctcaatgatttttagacattgaccaagtacaaaagaataattttttaagatggtttgaaaataaagtaagtataaaatataaattaaaatatcctataactttattagtttttgcatcataaaattacaatgtgaaatttaaaatatcacagataaaaaaaatgaacgaaacaacttctgttcaaggagtacaagatttgtatgtaattgcagtgcaacctgatttgttggtttgttcatatgatggttgtatggttaatggagttcgatatcatacaaaaagtcgagattggttgaagcagaatatgaacgaaaaatgtgcaatttttacaacgtcattgatcaaatttaggaagtacactacctctattggaacagagttctattgttcaaatgttcttggtacaatatcaatgggaataaaatgtatactgagtatcattttactagtataaatattagctcaaaatggtttgaagatgaactatttgttcttgccaatcaagtatgttcagtcttgtatttagatgatattaaaagttaaagatttgaaagtagtgtagcaagtgaatcatcgtcacatttgggatataccaccaaagtcagatcatggggaagatgatgatgaagatcccactatcatcggttctgaagcatatcaagaagaattttcaaataatgttgatttaaattttaattcaacaataagtgatatcaatcttattcgcgatgatattgaagatatagaatgttatgatggagtatttagtgatattccaataaatcataatgatgacactaaagaagaactgtaacttgatgattctaaagatataatattgagtgataaaactaattaagtataaagtgtgccaattttttttaaaaattttcaaaataaaaatttgttatatgcaatactaattaattttgtatttttcaggtttacaatcatgtcaaattagaagttgtgtgatctaccactaagccgtctaaggtcatttggtccaaagaagtcgcataataatgattcaacatctacaaaatctccaactcctatgccatgttctccaaatgaagattcaataatatcatttgatgatgaaattcaagaactcttaggtacaaaccgttcatacatgcaacacttaattaagataatatatacataaatatagttatatcacaaattatattgtaattatggatagagtcagagaagaacactcgtggccctactcgtgg

SEQ ID NO: 324328 - DNA, 614 bp, Cannabis indica
atttatctactgacctcttagtcacaatataagaatgatgatttataattattagtcacaactttttcatttttaataacaaattttattgtgactaaaagtgtgttattttttttttgggggtgttggtatatgcatacatgagtttacaactaatcatgtactatttgaaaaaaaaaaaaactcatttacaattttcaatccactttttaagttgtaagattaatagatatattaatagaaactttaataaaacagatccaatactcctaacatttgaattaaaattaacaatactttatgaatcacacaaagaaaaatacttttttttttcttgaatatatgattaagtgggttggtatattattgcatgaagatatcattaagaaaaaaattaattatagacttagctcaattactatagtcaatgattgggaaaaataaacaaaacgtgtcaattttatatacacactaactccatacttttatatacactaaactaattatatatgattatgattaatgcaataatatgagtttatttatttaattaattaagattattttttagggtgattttacaatgcatacccttaaaaaggatgtactaatgc

SEQ ID NO: 324329 - DNA, 745 bp, Cannabis indica
tccagtaacttcttccacacaaaatggaaccttaaactttaaactgttatttgagtgtaaataaagtttaaattattattaaaaacttagttaagaggtaaaaataatgaaaatagtgcttcatcaaaatgaaccagcactcatataaatttttctactctattttttaaaatatactataaaaatttaatattttttattttgcattaaacttttacattaattatattatacattaatttccctattaatctctacatcactaaaatattatatttattaattttaaaagtataatattaattcatacacatacacatataaaacaagcaaaaataataataaaataaatttagagcaataaataatacttccctacatgtgtagagaaaataaaaataatcactatctattgcttgaaagaaaatgtaaaatagtccagttattttttaactattctctttttgaaggagctaatgtgagtgctatagttaaaaaaattagcttataaataatgtttaattatgaaagtgcaactagtagattttaatgattcaaattaccaagttatctatctttagattgattaatttcaagatatgaattatgaacatgaattaaaagtcaagctgtaaatcacacatcaatttacaagcttcatctgcactgagaacacatctcagctgactagtgcttgggttccccgaaccagggtaagttcatccactaattctcaaaggttcat

SEQ ID NO: 324330 - DNA, 977 bp, Cannabis indica
tcaaaaataaataaacaattgtcttatcaaactgaatctcttgaattgaaagttaaagaatatgagactgattttttgaagaaagtaatcagaaactttattaaacttcaaactctgctactaaacaaggtagcaaatcagttaggacatcccccatactgaaaacacgatcaggatagaaactagaagctcttgcaaaagcatgagctacttagtttgttgaacgtttaacgaaaaagatcaaaacattattaagtccataagcaaagctttacaatcttgaataacataaccaaaactaaagatcatattgaatggattttggatagattgtatggctaccaagcagtcggcttcaagagtcacctgctgccatcctttggctttaatccaacttaaagcttcacgaattcaattgcctccgctagctcaggtcgaaccactcttggataacatcgtgtgactccctcaataaggtagccgaactcgtctctagcaacagcaccaaaaccatagccttgagtgtcttcaaaaattaaggcatcgacattaatcttgataccatttgacatagggggctccaccgctcggccccatctctagcagctagttgagatgactccacaggagtttgagtggccttccattgatcaaggtaagtaatggcaaaagcaacagtagaagagacattagacagcttgttattccacaccttatcgttccgagatttccaaatggtcccaacatagaacaacaactaggcattgagtttcataggaggatgagtcaaatgtgctagtacaccaatccaagaaatccataccagcagtgattgttgtattcaccccagccttctcccaacaagccaaagcaaaagcacatgtgacaagcgcatggagtatggtttcatcatgagcatcacatatcggacataggctactaacagctatccttttgattgttggaaattattttac

SEQ ID NO: 324331 - DNA, 939 bp, Cannabis indica
acattaaatgttatttcttatctatattaataagtaaatctgatcatattgaaataagttttatttagggcataaaacccaacatcttactgctgcagttgatgatatagctcattctttggcttcttcttccacaacatgctaatggaattttttctggtctttgaatttaccgtagaagattaaaatctttgcttggcgagctctccaagatgcactaccagtagctacttcccttgttcaaagaaaaattatcacggatgcaacttgttctctatgtcatcgagcttgggaatcaataggccatgctttctttggctataaatttgctcgtgcagtctggcgatatgcgggttttaactttcattggcttcctcaacaatgcttaaaggcgattacttagtacacctttcaactatatatgctaaactagaaattgagcacataatttgcatattatgtatatttggactgagcgtaatcgtgttttgcacggtcacaatgcaaaaccagcaagatctgtgggttcttttgctactaattatctgcagcaattcgtttcagcccagaaccacaacaggcagctggatcggttgcacatcaccagcaacatcaacagaatgtctctgttgcagttcgtcaatggcagtctcctcctccatttgtagtaaagttaaatgttgatgctgccgtggactgtcagcataacataatcggaagtaggtgtagtggttcatgactctgctggctgtgttctcgctgcaatgtcaaagcctattgttggcaacttcgcatcccatgaaatggaagctaaagccttgtttcatagcatcaactggattttacaaatagaagtgccaattactcatattgaaacagatgcgctcttagtttctaatgccttgaatggcacttgtactgcaatttcttcttttcaag

SEQ ID NO: 324332 - DNA, 1972 bp, Cannabis indica
tctctctttgaatgagaacttttccaacacacacatggtcattaattagtcaaaagttaattagtcaaattattacaagcgaataataattttgcgttctctccctctttgttaggatcactagtgtcgatacaagttatgcatgtagatgtgtctagtcggaaatagtgttgtgaagatagataaagataatgcgaggtggaggacaattcatggggtgttgaccttttctggttcgggtgttgtttggatccttatgtgtttgtgcacatggtcatcgtcgagggatgcatatctagtcgtctgaattcattcttggtgtagagcgaggcaacacaaagggtcttagcccataaggtggcactggttgggtcgagaggtgatcgtggctagtgaatctagtagatcaaatctatggctgagaccattttagctaaaattggtggtagttgatgagaggtagggatcctaagggttgtgtgtcttggtggataggttttgtgttttgttctttggcttagattcactagtttttgcttgttattttttagaataaagatgtttggcacctacattgcattattggttaagtagactcacttggtgtaattatatcaaacaacatttgaatggatccccttcatatttacatttagtgatgttcaaatgtttattggtcccattttttttgtgtgtgtattttagcctaatgcatcaaattttataagatatgtgaatcactcttttgatgttttcaataagcatgaatcaaggaaggaccttgtacttgagttgtaaaaaaagcatgaaaaatgtgagatgaatgctaagcttttgtccaaaatatggatcaaataatcaaattgtatcgagggaaatagagaatttcatttataaaaatagtaagaagaaatgtgaatgtagtgttctttatatacatgtataataagtgccatgttttgtcactatcaagtgttatattacaacaaccactttaaacaatttttaaggtaaagggtttgtttcaaatgactaatttgccacaaaaaaaaaataataattaagggactaattttttgctaaaaaactaattaaacttttagaacaataatcatgactaatatatttttttcaattaacataatgattcaagaatctattgattaaaatagtatatgattttttgaaaaaaaaaattgaagaaaaggttaatcttattatcgttttttttttttttttttggaattttttttttgaaataattttatgtaaaagtataatttgtatttatatcttttgatagtacttttgtaaatattcaagtagaaattacataatataaccaaaaatttaataggtttaggctcaatacaaaagcccatgcccaataaagaccgaataagcccatcaaagactcatgagcacctacttaataggcccaaaccattaggtgtattgagctgtgtaacttgggttttgaccaaattcatggatttaatccacacgtcctcactggaaggtactaactcattttacttcaatatacaattgtcctttgttccataggtgttatcatatcaaattattgtaaattttaaaattttgaaagtctacatataagtatgtttggtaattttatagtaaagtaaatagcggtatctaaagttttgagtttataagtggcataaacctaatgatttttttagtgacataagtacccaatgtgtaaaacggtaatttttctctattttcgttcagtacagactccgttttaaatttattaaaaaagaattggaagtaactgatactacatattttcgtcctagaccaaataatttagaaattgggtcttatatgtgtcatgtttaagtacaataacagagtctatactgatgaaacgggaaagaaattacagtttataacattaggtacttatgccgtactaaaaaaactactataaatttatgcctac

SEQ ID NO: 324333 - DNA, 1190 bp, Cannabis indica
atgatataattagtgtccatttcaagaaaaggagttttaattacaatattttattataactttttttctaatttttatatttgaatatatatgttggaatatttttttttctaatagtgttcattataattacaacattatttttgtaaattttaaaaaaatttcaaataatttacagtatcgaaaacaagtttaaatttttttaaacacacgtggattaactgaaatataagaaactctattgttgatattgtaaattatttttttaaaaaagtattagaataatattgtaactattacgaatacttctatgcatgaaaaaaaaattcgtttcaaacatagaaattgagaaagaagttgtaattaacgctcattttcccaaaaaaaaaaaaaaaaaaaaaggatggctgtctcaatcaaattgaagattttttagcttttgggtaaacgtttagagcatgtttggtttagtataatgaaaattgtaatgaaattattattaccattacattatttgcttttatttttaaaactttgtaatagctttacattgtaatggtcattacattatgtattgtaattcccattacattacaaaactaatgtaatgatgattacattgttaaaaatatcaattttgcccttttttgttacttttatttaaattttaaatattaaaagtaataaaactaaggatatttttgtcaatatacaacttactttatttgattacaatatatattacagtgtcaaaccaaacatcatactactatttttattacaattcttattccattacattaccattcatattacaattacaattcccattacattacatcaaatcaaacaaccccttaatttgaagactttttaaattagtacataaattcaataatttaatcctttttaataagagttactaaaactaatatcactctaaaatcgtgacaagattcaaaagacaaaaaaacaactaccacaatttaacctataaaatagcagaataatagaattgaagatgtgagactatttctaatgagagattcaaatgtgttaaatttgacacaaaaataattttatttagtacactatttataattgtgctccaatactcaaaatgtaaaataaataaataaaataattaattatattgataattgatattttgttgagaatataaaaaaaaa

SEQ ID NO: 324334 - DNA, 1060 bp, Cannabis indica
agtgggccctaagcgcgggctagcctaagaccggccctgatgatactctctaaaatttattacattaaattatattaaactcgataattagttagattaatagcgatattaacacgtatatattagagttagtctcacacttgtaatgtgtgaaaataaattattatatatagggattattttacaaaaatataaaaacaaaaaaaaaaattacaaaaatacggtttcacggaattttaaatatttttacgatttttttgattttatttacagaaaatacggtctttttatgtggtaatcttgttaatttgttgttgattttttgttatctgtatgttattttttattattattttgatgttacttttatttagttttcttgttgattttatgttgttttcatgttattttttggaaaaccataaaaatgtaaaaaaaatattctttgaacataaaaatgtaattattttacaaaacatggtgccttatataattattccttatatataagataaatagactactcttttattatcaattaattttaaaataaaatctcatacatcttattctaaattttaaccctaaaaaaataccaagcactatttatttcttttcacatttatcatgtcataagtcataataaagagaaatgcttagcaccctcctatatgtcaatatcgatattggtccaattaagtatcaggtcctatatagttcaatataataacttttagggagtatcgctagccaatcggaacgcgacatctcgagaaggtgttaggcaccactggtgcctaatagcaatgctccataataaaatagctatagatatgtcctattccatctttgactacgtgtcacacgatgccagcttctccactattaaatgagtttttaaatggcaagaagataataagtattaactacattaataatacggtaaaaaaattagagaaatactaaaaaccataaagaatactgttagtgtctcattaacggtgcccaatatcatcacaaattattatatttttagcaaaagtccacttcactatattat

SEQ ID NO: 324335 - DNA, 906 bp, Cannabis indica
ttatatgtgtttatttctatttgttttagaattcatattaggatgttaatgaaacatacttggtagtaaatctagatcctggtaaaatatttccaacacgtactagtgttagtaacacagtactgtactctttaaacattatacattgtaccaacgcattcaatatcgctaccgtgctagtgttggtagtataggaatcacaaatagcatgcatatatcacacatacacatactcatataaaatacgttctatgctagccttacctcatttccgaattcaagtgtacaacctgacttgaacagaacatcacgtgttggatggatgccctatgtcacatttacgcaaatgagtaaataacactccaaaacctaattcgggaacctaaactcacaactatgagtttcgatattgacaattaacatgataatatcttaattatcgaggaaacaataaactaagactctgaaaataacacgaattgacaaaatggattgttcggggatcctgcctatgatttggttaaccggttctacaagacttgtagaaccgattaatcggtttgcactaggtaacccaaataaatccaaaacttgcccaattcgcacccaaattataccaaaccttccaaatcaccagtattaacctcaaataatattttccaagcaataacaacaagtaaaacacataaaatctacaagtgtcatttatgactcaagtttgagtcttcaaactcaaacttgttcattgtaaagaccacttagttttaatttggaaattagcagataattagggctttattatggaaattatttattaatattgaattacttatttatgattatttatttgaattcagaatgcatttttatgtcacatatagaaattttataattttgcatatttgt

SEQ ID NO: 324336 - DNA, 1692 bp, Cannabis indica
agaggtaaaaataatagattttaaaaaagagggtaaaaataaaagaaaacaatataaaaaaggtatagagtgcaatttcctctaacttttatctaattactaaaattttatgatcggattaaggcttagaatctaacatcaaagtctgttaatccctagctatgttcggggacttggaggttgtgggttcaaactagtgacaccgacattcatttttttttcactttaaggatctacatggccacgtaaggatttgactatgtgtccgcgtctaggtcttgggtctggatctgcgtctacatatgcatttgcgtccactttccgagttcgagtctaaatttggtctaggtcccgattcacgcatttgagtcttgggtccgagtccgcattcgcatccaggtaatgggctcgagttcgagtctcggtcccaaatttaaggttgaggtaggtctgggtccaaggtctgagtccctaactccggaccttttgtaaatattaaatataagataatacaaatcatttactataattgatttttttatatttattttgaactttattataatttaacaccgtaaaatatttaaaatttctaaaaacatgtaagatccaattgtaattacaatagacatataaaactaattataatataatttattctttaagtgccaaaagaaaagttcacactaccggagcttttttttttcttgaagaatgccatgttcattagaaggaaaacgagatgagaattacaaggggaattccctccccttgataggaaccaacaaattggttaaacaatctaatcttttttgctaaactatatatctactacaacattaaatttacaattgataagaaaaaaagaaaaataccgaaacttcttaattaaatctaaaatcatgaagaaaatatttaaaaaagagaccaattcaaaacacaacttctcttttgaagcacttgcacactttagagtcacattgatattcttacttaaatggctagttgggtcatcctttaaaattttaaacatgctataaattatatgctatgagtcaaattaaatattcccataatttccagccgttgattcaaagtgatcattaggatatatcaatctcatagttgactaaagccactaaggctagcttagtggtgagggagggatgagaaaaggggaagtcatgagttcgaacccaagacctttaaattacaaactattaattgattgtaaaataccattatgctacactcaaaaaaaaaatctcatagttgactaatctgtgaaccaacaaattaaacaaagtacaccaataaaataagagtaagatgaaatatttgattaattaaattaaatgctaatggtttgactggaaaaaccaactaaaatattataaaaataaattatgcattttactttcaatgaaatattcttgttcatgaaaatgaaccaatcagatcctttcatttgaaaagttagtgattgtaatattaggcattccacttaatttggtctactaaaacatcaaaaaagtttggtgatgaagagaaaaaaaaattaataattagagagagaatttataatataaattaatatatttatataatatgtactgttattagaatattgttttttgcaattgaagtactatatctttatatattaaaagtgcctatctaacggcatttctt

SEQ ID NO: 324337 - DNA, 563 bp, Cannabis indica
aacttaaaaaataaaagtgttactaaacgacaccttagcaaaaaataaaagttaagaaaacaacttaaaaaaaaacaaaaaattaacctcacaaaaactataaaacaaataaaaaataatgagaaaatcaatatcgtgacaattataaatcgactataaataaactataaaataatcaaaaaagaatatcgaacaattattgattttactgaagaacgtattgttgtaaaaaaaaaattcaaactgtaaagatgaaattttctttatgttaatgtatttttgtatttttttttccaaattttttgtatatatgtaaaagtttctttaatctacatttaataaaggttatttaggatttttgccccgaattataacctatgtattattgtacttcttaaatttttcaacccgttaaaaatggtccataaactattcacaatattgtaaattgatcattctatcaaattttgtcacacgtgacaaacaaaataatgacacggctgcttagctagttgccacgccagtaccatgttaacactacatgtgtaattaatttgaaaaaa

SEQ ID NO: 324338 - DNA, 1641 bp, Cannabis indica
tgaagcggggacgttacagaaacactataaaatgaacatgatgctctcatctcatcaatttgtcaacttatcttttcaacctcccaaaaatctagttttctcagtcaaacaactagtacatgaaatacaccttctatacagttttcaagccttcttcattgttcttcatactacagccttagtgatagagtgccatgcttacacatagcaagtcaagtactcaatcatagtgagtaagacggtggtaaccaacccaaaggagagaaagagatccaggctcagatcttgataatactctatgatagaatggaacaagggttagaaatcttagcggaaggagtcattatattctactgcaatcaatgtaaggttttctaaactcttatatgtttaatttcattgttttagagatattcatatttaggatgttaatcaacatacttgttagttaatctagatcctggtaaaatattccatcatggtcaacctgagtggaattgctgctcgacaatttataggcccctaagtcacaatattcataaaactgatgagtgatgtgctaaatcccttttttgggacttaaaatcaaaactaaaagtttccatatcgatggataacatggcaatgccctaaatattgcaaaaataggaaaatatagggtgctctaaattgccccaacttgtagaccagttaccaaccgaaaaaccagttttgtgggatctgcttggggatgaactgaaattccagttcctacaggtccaaactgaactggtcgaccggtgcaggaaccctaaaaaaccttctaaactattcaaatcaacccaaaatcaacccaaaccatctagagcagctaaacaagtcacaaggaacataattcaagcaacaaaaacaggtataagcctcaaaaaatcaattctaccattaaagagaaaagttttagctcaaaagctcaaaccttgcctaacttccacaacaagctgaaaatgcaaccaaaaatcactcataccagcatacaaacacctcagaaaatagatttaaacttaaacaatttgcacaataaccctaactcaggattcatgtatgaaaatctaacttcaaacttgaaattcaaagagaaaaagggagagaagtttacattgagctaacccttacttaatctatagaaaccttagctgaatccttgatttttcatcttgaagttgaagtaaaaagtctaagtttttttcttggctttagggtgaggactgaacaagggaaagagagagaaaggagtgttggatttttctagcttagtcaactatggttaaaatgaaaaagtaacttaataaattcagtataagcttattactaaagcttacaaaactaaataagtaaattcccactaacttaaatagtattaatcaagggtataatactaaattaccctttcttaattacgaagcaactaacataattagtggtaaaatggtcatataccataaattcgataactcttgacattcccaatgcctatctaaatttccctgctattactaaaataccaaaccatatgaaaatgtggctctatcggccaaacgtcgcgttctactgttaccaggcataaaatatgaaaaatataaattttcatatataacataaata

SEQ ID NO: 324339 - DNA, 1660 bp, Cannabis indica
atcccggagtgcctttgagctatgttcgcttccgggagtaccttgtactccgggtgcatcttccgggacccgtttgaataacgcttcctggtgtcatacaaggacttagcagttctttctcaagtaatttgatccacgtgtcccttcctgactggtccacgtatattgggcgattttaggagcaacagtaggtattgagaattatatattacccattatattacataccatattttaaaatcataaggttttattatttttattattaatgtaatttatttaacttttaaaaaataaattatcattataattttcactatctcaaaagggaaaagagaacaaaaaaaaagttgaaaatataaagttgtaacaataaatttcattaaaaaaaaaatgtagtagtacaaaaagataaatcaagttgtcagaactaagtaaaaaatcgtaatataaaatcatattgaggagttgatattattttgcacattacaattaggtcattattttgttatttttttttttattgttttgtaattatctttttgttgttttatagttattttaatgttttttgttaagttgttttagagtttgtttttaaattatttttttattttattgaaacgcaatatttttatacttttgaaattttaaagcaataatttttacaactcagtacagtaaaaaaaataaacaaaaaaaaaaatgaatagtaaaaataacaaaaaaaaaatgactatttttataagatgtccaatatttttaggcgaagttagagatctgtcaggcaatatcttcagtgagagttagggtcatataaagatgtttttatatctaaatgctagaaagtgattgtaaaaaataatatattagatgacattttggatgtggtgactttggtttcacagatgctatgttagtgttactctcttaaacataattagagtttcaaaatgtagattaattcaatctctggtattaaaaagaaagtccaccaaactctatcgaatgatttttcattcacatactgagagaaatagatagaaacttctgtaacattaataccacatgaattagagaaagaattggaaaaattaaccatttggagaattgccatgctcgttatcattttcaacaataatgctggaaggatctcattatcatcttcaataatagaagtatgattaaaaaagacaagaccaacaataaattaggatagaacttcaaaatttgttatatttaatgaactgaaattaggtaaataacaaacccttttgggtccgtttggtacgcaggattggactggattggactgaaaaggattggactgaactggacaagattggattatgctgaaagtaatcatgtgtttgatttaagaatggactggactattttatttatttaccttaaaaaaaaaaacttaaattaaataaaaatatataataataaattaaaattaaaatatataataataaataaataaaataaataatttgtagcaaaaaaaaataatatatcatatataattaagaatatatcataaatatataataaaatattttgtcatattttttatttaataaataattaaaatagtaaaataaaaatacttgaataatattaaattatttatcttaaatactaatttaatataaat

SEQ ID NO: 324340 - DNA, 751 bp, Cannabis indica
gaattaaattcctgggtagcttgaagtaccactgctaggcggcttctgctagtgtagcatggaataccctacaccgcacgtcaccccgtactccttgcagatccatctgcatctcaaaatacttaagatgtgataagggatcttctttccctgtatatatcttccatgttggcattttgaactttggggtagttcaaggacgtcaatctctggactgaagggtgatcccgtgctcggtctagctgaagatcagtgagttttgggtcggtctgaccttggaccagattttttcagctgatccaattgtgcttgcacagatggatgaacttgttcagtctcttgaccgacctatgtcacatcaagcactcttggagttgggtcctgaatgcggatgcctggtttagcagtaggttgaatgcattgttcgtcgaaacctcttcttgtgtctcgttgtttgatttgtttgaccagtgagtaggccagaatttttcagtttggatttattaggtataactccacctaaagagcggtcaagtaggatctggccatctaccacttggcccagaagttggacctatgattggggattggatgtctgaccattatgagtctgggcggtttgccaagtagaaatttcttctgtcccacccaatggaatactgcacgtggcagcttgttgccggttagcaacctgataggctctttgtatcagtacgattgcctgccttgtgcggtcatcgatggctgcttg

SEQ ID NO: 324341 - DNA, 1270 bp, Cannabis indica
tatattgttaattctatattttgtttattcattatttgtttaatatacaaaaaaggcttatttattgttaatgaaaattcaagctaatagtttagtgcttttcattaagagtcctttttttgagaattgaactctaaaaaaaaaaaaaaacaaacgcaactgcccacaagaaaaaacttgaatattttcctaacatgaaaataatttgcagaataacaatgttagataggaggaggcggtgcatcgctaagggaaaaaggcactgagaactcaaccccaagaaggccagaaagtaagaagaagtcctactgaatgggatttcgagaggaatgtagacggggaagaaataccagagaaaagaaactctaatgcttatgaccccactatgtacataccaattataaaactgaaaaatcgtcaacttcgccagagacttgcagagtcaaatcaaatgaacgttgaattggaacgtgaggctgctattgcaagagtagtcccaaacaatgctcctcttacacaagatgaatttctgactagacgaccgcaagaaaggcctcgcgggttgcggactaggagagcacaagatccccatattgaagagaacaatccaaataatccttcttgtccacaagaaaaacaaccggggcgaaccatggaagttcatgttgagagggagaatcccctaagcccaggtgctacaacttctagataagggcgaccatatattttgataacttctcataagaatatgggaaacccaaatgaacaaccaactactcgatcggctcgtcctcttcgaccaccacgaggccctcagagaattgaagaaaattacacttatttaagtaaaggtcgcgtggaaaaattatttaaaagacgaaggctaacatgaggtaactcaaaaggactgaatcaaacactacaatgagtgagtacttcaggtcgagaagaacttcagggtgtagtcaatcaaacactgcaaaaatactaattatactatatttatatacacttctcaaattataaacaaacaaagaaaaattatatataatttgtaaaaaaaaaaaataattattaaagataatatataaatatttaccaaaatatgaatgataaattaacataaaaaaaataaatatttaaaatttattgtgtaagatcacccttaaaagaaaaatatttcttagataaaagaaagtagcataacaaaaatgttatttataacttacataaataataccttaatgatttctaaatcatgtgagacttt

SEQ ID NO: 324342 - DNA, 734 bp, Cannabis indica
caaataaaccacgcaacacaaaggaaaaattctacatcttccttggttaaagtagtataaattatataaacaatatcatggaaagaaacattaaaagaagaagaaaaaatataagggtagaaaattgttcatttccagattcttcgaacactcttgtagaagaacagggcatgtgagacaaattcatcatcgataccacaacgagcacaaattgggtattgaataatcttcctaaaggccaagttcctattggtgggcaaggttgaatttgtggctcggaaagcaaaatgtttcaccttggggggaatatgaaagtgccacaggtttatccaccaaggtgagggagaagaggaagagggaatgtcaggaggggaagcagacgaaaagctaagatgataacccgtttttaccgaacaggttcccaattttctgagtttctagatcaggtcgtcttcggaaggatgaagggggaggggaatggaaaggatttcccgaataatgtgaggagggaaatagtggctaagacggctaaagtcccatgtcatattatcattgatgaacgaggccacccaatccgagacggggttaataggactgacatgattgtaaccgagaatccagggatcatggatagtggatgtgttctgcccattgctaattgtcgaaatgagacccttgttgtaaagaccgcttagcttatatttagaaattagcagataattaaggtttaatta

SEQ ID NO: 324343 - DNA, 1178 bp, Cannabis indica
ttgtaattacatttctgtccttgtatttagtttaagtatcagtgtaagtggaggtttatatcaacattctttttaagatttctctatctaacttaagcatgaaattttttgcaagaaaacatttcgatgtttcagcctgatccaactgaaaaagacaataaaagcttggagagatggagatcttcttaaagcgagagtcaccaatcatctattggagatgacctaaatatcttatatattctataaactctattttgcggctacttctattatttaactttggttcaagtcttaaactaactccaccactccataaatgatacaagtttgcttagagcatctttaatggtacataattttattaagttagtatgaaattttcacatcatttactctaataatataccaaattatgtaccaaattagtatataccaaattttacactattaatgatgttgaattttgaatttacaccaatttggtattaaacttttttttttttggcattctagcctttattttaatttattttaaaaattaatcatatattttagttctcaaactaaaatttatcataaaaattataattaatttaaaacattaatatgctagaaaatacaaaattacaataacaaaaatattaatattaaataaaataaaaacaagctaacaataagttatgaaactaaaaaaaggttattaagtaaaataataatttaataaatattacttgtgattttatttaaagtttttttttcttaaaaaatgtataatgtttaatcgatttaattttaagtaattttaaattttaaatttttattagtagtcgtgaatgttatataattatatcataacttagctattttaagttattaaggtaaataatataaaatgtgaaatcttttaaataaaatatattttttagtagaatatttggtgtaaattatcaaaactgttgaaccaaaagtagaagattttacactaaattggtgtaacgtaatttttttttcttttttcgagctagttttttatttttcagttgcaatttaaataaatttagatgatttattaataggtattttttttttgagaaaaatgcttttattaaacagccacaagaggcttttctaccagcaaaagggtagcagcacagtcgggcaaatcaattgtccacaac

SEQ ID NO: 324344 - DNA, 707 bp, Cannabis indica
gtagggtaagagaaatggtagatctttttctttcttgctttacatgaatataaatatatatgatatatgagaatattattagatgaaaatcttccttatattccaccttagtattaattaattgaaataaatattaatcccaaaactttggcatcaaataacattattttgatgacaattttttataatatacaaacttaaagattggtgcaaataaaattattattttataatgtgtcgtatatatataggtgatagagtttcaatatggacaagtctatatattgaggttgtttagatattatataataaagttgataattaatatatacacacacatggcaaatatataaagggatatactgtcactctcataaagtaattaattttagatgagaaatatatatagttgagtttactttatatatatacatacaaaaattgtgatagctaggttgtgtaaatatacaactaataagtaataaggttagaaacaaagtcgatatcgtgaaacccataacgtttacgtaataataataataataatatttattaaataatttaattaaattatgtttcattcaattctgatgggataccatactcttctacaatagaatattttatggcattattactttttccaaggctgcctccttaattaatgaaagccgggcccagcaacgtgggcctgtaacccaagtggg

SEQ ID NO: 324345 - DNA, 1539 bp, Cannabis indica
tttttttaattagatagaaaaactaagcataaaaactcaaaattttttaattttacccattcataggtaatacccattatatgttataaataaagagtagaaattggaattaaaaatatagttattaaatggtagaattaaatatatatatatagttattgaaattaaaaacacatagaagataatgcttttgtgataaatattaaatggtagaattaacaaaaaaattgcatgcgtttttataataaaataaaggaaaaagataacagtttctaaatttaataaaataggacttctgactgatgatgtagttattttaaaaatattgttcagactttttttgttttatagaaaaaaacaatttaacatactatttatgaaagttttcatattttattttatggtactattggattgttttctccacaaaagtaaatgtattgtaaaatggttcgtcataacattatatattttttaaaattaaaaaatgagggttttatataaaaaaaaaatattaatgatagatttttagtctatgaaatgtataataagggggttaattttaataaattatgtggatataaaatttctactttaaatgaaaaggaaaatcatgactcacatgattaattatttccataatgaaatgtgtatttgtcttacttttttgtgataattaagatgataagtaccgtatgaagttggtttagcaatcgcgcgattgttataatcatcgaaaaataaattttaatttatatgattattggttattttagaattttttatattaaatagttgttaatgtttttactaaataagtaaaatattataaatcatgtgtctgctattttcttttttatttctacatagaaaatgaaataattttttattagtttatagatataataatattatatatattcatctaaaattaataattaaaatgaaaaaaatctaattttttttatttgttattttttttttgtaaaattttaatatttatacagtttaatatattttttttttcatatttttacattttttttttcaatttttaagatttttaattataattttatggtgttttacaaaaataatataaaaatagaattaataatccgtatttttatatatatataaaattattgggtgattctacaatgcatccccttaaaatagatgtattgatgcactctctacttgtttcggcattcagaaaaaaaaaatttagtctaatttttttcatattcatgtacgttatagctattcgagatatcctacaaacttttaagaaattcggaataatttacaaatatagaaaacaatgttcaaactgtctattttacacgcgtataaaataaaatagtcacgcgtgcaaacacactacttgaacacaattttcggcgtgttaaacttttctgaatttcttaaaattttgctaggatgacataaataagtataatttacattgaccatgagaaaaaatttgactaaaaaataatttcggatactaaaaacagaatagagatgtatcggtgt

SEQ ID NO: 324346 - DNA, 571 bp, Cannabis indica
gatagattcttaccgaagtcaaacgaggacaaaaaacaagctacccactttgaaccaagacctaggcaagccttggttcccaagccttgaaagggtcggccagggtctcatgactcagccaagaactaggtagggtcaccatacctaggcatgaattggctagctttatagggtgaaaccctagagcaagccaactcccatggttaagtactagggccagccaggtctcaagcaagacctctcaggccagggaaggttagttttgaacccaaatgtgtgttttttctttcaaagcttaaatatgtgcctcgtattctttatggctcatagagtccagaatcacaataagactaaaatcaaatctttttcatgaaaatatcataaatcatacattccaaaactatcgtgaggatcaatataccaaggagattacaaactaagatgagaatcaaaaagtttccaaaagctttaaaagcttgaaacttggtaatagcaagtaccgagaagggatatccaagaagagaagatgagacgtatatgtatataaatatatatattgagagagagagag

SEQ ID NO: 324347 - DNA, 1402 bp, Cannabis indica
gaaacattactaacttgagtaagctactcatctacttaaaacctgagagatgtacatcttttgtgtttttgatgtaaacacatttatcacactcattgatgttaaagttattggttatcataacacatcaaaattttcatgccattactttagtgtttgtttaaatccatatataaaagactttatcaatttgcataccttcctttcttgtctagtaactacaaaactatatggttgttccattctatgtatatttcttgtggtatggtttcacactattttgtttatagtacattcgattcacactaaatgtgtatattatattttgaattcaatcaaatttgcataatagctcaaattcaatccatcaaattcacaaatattgaattagttatagtatttattaaaaatatattattttttacataactatcaacaaaataaaataaattataattattttatattgccaacaataaattaaaacaaattaaaaataacaaagaaacaaattttaatattttaaagagatgtgtaattttattttacattacattttcggttgatcaattaaattttaaaatatatttgtattataatatgtattaaaactttaaattactaatttatatttttaaatattaaatgcatatgtaatatttttaatatatatatatgtaaacatgtgtggattggattagattaattaattttacatatcaattaacattcagtccgtttttaaatatgaattttaacttttcttaattcaatctaatccgcacaagtatctacactttggagactgaattgaatggcactgattgaattgaattgatattttttaaatatgaaattattattattaacggccgtgagaattgtgaatcaattatggttggaaaataaaaaataaaaagttagaaaacttaagagcacttggaagaatgggttgcaaattcaaaatggagtcttgcccttttattactgtcaaatgtgtatttttttttttttacattaattttattggtgacttacaaccttgtggcttgtactaagcaaagcctgttgacaggacgtagggtggtgatggtgttggagtacgaatggtcagggcgccaaggaagtggagctattactgctcgtactatcttctgcctccactacttagtactcgtctttcttatgaacatgttgttttgaggtgtgtatcaatatcatcaccacacttttacttgctcccaataagtcaccccacatctcattaagtgtttccctagaaaaatagagatgccttagtctacagcttcttagagtctccaatgggtgatttattatagctcgtattgtaaagagaaatgctaaagggcaccagtggtgcctaacaccttcctatgtgtca

SEQ ID NO: 324348 - DNA, 1399 bp, Cannabis indica
ttcttttaacaaaatgtgaaagtcttagaaaatagtaaaaatagttagaaaaaaagataagatgccacttaagatcttttgtgctttcctttatttatatatattgattgattgatattgatattgatattatatatttaggtgtccataaaaattaatagcacatatatagtttttcataaaaatatcgcataaaatacaattcaatacaatataatacaatacaacttaatacgaccctccaaacgaaccgcattaaattttaattaaaagtctattaaaatttaattaaatatataaataaaatataaaaaatcattaaaggtttaaggtactaataatgattgataaaagactaaataaaaaattaacactgcgtagtaaaatttcgccatattatattttatgtcaaattttaacatattctaattttagactacattataaatattgaattttaattttatgaaatcaattaaaaaaagaatacacctcctcagaacgtgtgaatcaattacagtgtcagatatatcataaaaatgggaggttgtaagtaggcgtattcatcattagttcggttcaaatttttaattttttcaaatcaaatcagtattataattttataaaaagttaaaattaaaccaaacttattatgatcaaaccaaaccataccaatacacttaaaagaagattgattgggttcaaaactatatatggtctgtattttatagttgtttaaaatttttttttgcaataattatttattttttcagtaatttttttacttttaataagtttaacaataaaaattattatcataataatatataaaataaatatgaatattctacctaaagttattcccatatattaatattttatccaaaaattatatactaagtatatataaaataattatacgtttagtttgaactgttactgaaatttttaaaacggtgaccaaatcagagaatttaaaacagttcgtattgatcaaatcattcacaatgaattcatttagtccggtctcaatgtttgttctaaattaatttaagtttagaattacggatcgtattccgaagctccacctaagcatcatcttacatatatttttaaaggctaattaggatttttgccccttgaactttaccaaattatgcctcctgaatttttctcgcagataaaaatccctctgaactattgagattgttagatttaaggtcttttgtccaatttcattcaatttaactatttcggtgactgtccatgaactaaatcatgctcttcagactttgatatttactaaattatgccacttgaacattaacatgtaccaaatcatgcccctgaatcttcatgcatgttagacttttttttattaaaattagacaaaagtcct

SEQ ID NO: 324349 - DNA, 518 bp, Cannabis indica
aaaacaaaatcgtgaggacttaaacctaaagcagataatattatactaatgtgagagttaaagtgaagtgtcgatcaaacaatgtgggaggaacggggcccgacacatcttagcatacatgccactttatcttactttctcccaccactcttccacattctaacaatatggcattagaactaattaattaaaattttaacgagtatctaatctaaattcaataactagtcggaaaagaagagccaaaagaacaattgtgagctaaaagtactacttgtaatcgagctatatgataatgtgtggtaacatagtatcacatgtgaaaaatatatttaaaagtgtataatatatttgaaaaaaaaatacacttaaaagcttttaaaaagaattaattatattatttcaaataggcatggcaaaaagatccattcattcggatcggatcagtgatccgatccgacggatcattactgatccgaaacattcggatagttattggatcttggatcagatccgac

SEQ ID NO: 324350 - DNA, 1416 bp, Cannabis indica
gttcacaccaattgactttctcctaaagctaatcacataaataactaatattttctaaaaagtttttttttttttttttcagaagtaagagtaatatggaattaattaaattagttttaagcatatatcatattaatttaattaatgtattacatgtggttaatttttgaagattaaaatctatatttcaaaataattttaataatgaagaacacatttaaaatagtgagtagaaagggttgtcctctgttatgaaaaactcatggactccattatttgtccagcacagagggtatgggaagggcctcgagatggcttaattttcgttccccctaaggaaggtgttgaaccatacattgtcaaggctgacttcctctttaggataggataaattgatgtattttagtacggtatcaaccctaaggtaagactactaagttaagtcatgaaatttaaaataataagttatatttacaaagtaatgttcctgtatttgacactaggagacatcacttgactaaacaagtactttattttgtaaagaaaataaaagctattctagttataattaataaagataagaacaagtctcgtagattatttaatattaattaaccgatcttaaggcggaacttcaatctttgaataatcttatcgtagaatttctaaattgttttatgtttttttatatgtgctcatgcattatatttagatttcaaacaatacaatcaacataacaatccctattataacataaccgaatttgatggtgactttctatcaaatagagaattgaaattaaatttcttttacgaaaataaaatctatttgaacttgtcgctatacaaactcgctggcatgatatacgtgaacattctaattaaataattaaacatttaaacgttcactggttcaatctattgaaatagattatagctaataatttaaatcaatgtgaaatatgatttaaataaattaaaattgttttaatggatctatttagaacacaataagatcttgaggataatagattgaaattgttcaaacaattaaatctatagagataactactacaaaaaccctttttaacggcgatttttaagccctttcagcgtcggtttatatgaactgacgccatagggggctaaagggtttatatgaaccgacgccatagggggcggtaccaaccgacgccaaaatcaagcgattttcagttttttctaaatacttttttttggttaatttaattatataattttaattatatatttattaatttatatattattttatttaatttaaattacatatttattttttaaaatgtaaattaaatataatttaaatttgggtaaaatacataatttaatttcataaaagtaattaaatattacacaaacactaatgtaaaattag

SEQ ID NO: 324351 - DNA, 1188 bp, Cannabis indica
taaataaccgaataaaaataaaaatgtaaaaaaatggcaaaaaaagataccaagtgtaaaaatccatacatttttttcacttataatgaaagtattattgaataattaataatacttcttgtgtattatgatattatttttataaaattaaaatattattattattttagcattcaaaatatgttatgtcacttacaatgtaagtattattgaatatactatactctaattttgtgtattattttatcttgttcataagattaaagcatcattattcttttaattttcacaatactatttttcacatgatttacaataatactttttctttctatttataaaaaattattattacaataaaatatatttttattcaaagtaataaagagtgccattacaagtttacaaccatagtagtataaaaaacaaaatatttgtgaaagaaactaataaatattgatacatgtatctaaacttaaatcctcaatctccaagagacctaagctcctagcaacaatcttgaccctttttgcaataatcttgtttcatgctctttggtagaaatcactgcacaaaattattaatttgaatgattagtcactattaattcatttaattagtcactattaattcatatagtaaatgtacaaaaacttactgcacaagttgcaacatgaaattaagaattttcaaaacttacaaccattgagtgttatggtgtgctctcctttaggtggtaggtagcttgttctaccaattgtgaatcacataaattgcagcttcatggagaaagataaagggttacaattacagtaagaaattaattaccatgccaatgaagctctactgaaagagaattttacttcctagcttatccattaaaactgttgcaatgactgatttaaaaaataagtaaaaacgtgaagagacattgaaataattcaacacatgtaaatcttatatctagaagcaaattaaacctttaaaaactattgtctactaaattagatcctgtcatcagaaaattggtaagagataggaccttcaaagataaaattattgaaaacatgaaaataacacaatggtaccagaaacatagaaatgaaacaatatgaaatatccatcaagaatgaaacaattttttttattgaaaatgaatagaagtgaacataacaacccattttgggg

SEQ ID NO: 324352 - DNA, 704 bp, Cannabis indica
agtcaataaaattataatatccttaaacagcatccgcagctcattaaaaataattaacattaattaaataaaccagtcctattggttgaaacaaaattaacattaattaaaaaaattaagaaaataacatttggcttgaaaagaaaaacttatctttgaagcttcttgaaaaatagtttcatcctttattgaagttaaactatttactctaacttttggatctctcttctgaagcaaaaaaatttaaacaataaaactgccttgacgattctatgacctactaacccccaatcgataaatccactcttgccaaaatgtgataagtacaatctattaattatgaagaacttaataaataaataaataaataaataaataaactacattatgaaaaatctcaaattaaacttttaaaggaagacttatttgataaattttatgtgattccttcgtaagagccttaccagtgagatatgtcaaaatgacataatatttctcaccaaagatatcaaaggcaacaaatagtattttacatagaaaacacttgtctttgatatatatggagcgaataaagtgtcactaccacttcacatcatcctgatgataaatccaaaacaagcaccatatatagtaccaaacaagccacactagggacatatatctactatcaaacaaggtacaaaataagtcataacttaaacaaa

SEQ ID NO: 324353 - DNA, 546 bp, Cannabis indica
acaaaaaaatgtaaacagttttgtcataaattggattataattaaactttattttgacaaaaattcaattcagggtcatatttgtacaattttagaaaatagagggtccattttatcatttaataaaacacagggtctaattaataacttttgtaaaacagaaagtccaaaatggtatttaccttaaattagatgtgatttgatttatcttttatgtattttatgtaggcatgggatgagttggcgtgaaggagaggagaagtctcatgcatgaggctgataggtggctggcaaatggtgaagccccgtgtggcgcacacatggagagaggagagagagctgatggaataagaaaaggaggcagcatggctggagaggagaagcgccaagggggcgctagttagattccgtggacgaatcgggagaggccatgtggcgttgacgtggactcctgctgggctgaaggcacattgggccttaattttgggctgcatcttttttttgggctatttacaaaaatatgagaaaataaagataagttttgat

SEQ ID NO: 324354 - DNA, 1612 bp, Cannabis indica
tttgtatcaatgttaaggcattgttcatattgataaactcaattatcatcatcataatacactatattgataaattcacagttatcattttcactaatatatattttaagataacttaaatcgttaactttaatagagagaagaataaaaaaaatgttcaacccaaaattgtgattagatagttatttttatataatatattaactttgtggggtatattcttgtattttgtagatggagcaattagagcatcttcaatgacgtaatataaatgtggtatatatctattttttagtttatatttataaaattgaactccaataattatgtataatgtgatttaaatttagcacatatataaaagttatgccaaattttgacacaaaataagcatgagtaaaattttacaccacaataaatattttttttttatttactctattatcactcgttaatataattaatgaattttatattttcggttatatatttaagatgatttatatatattttcaataaaaatttatatttttgttgacttttttttctacatttttattaaaataaaatctactttactcttaatatgttagagtataagtataaaatttgaaacaaatataatattcacttatgtttttttgaattcaatttaacacaaaatttacacatcatcagtatagattagtcataccttgaaattagggataaaattgagtggaaataagcgggtaatgcacctcccaatcccattctcgttttccatttatgcctcctatcctttctcccatctcacttaatacccgataagttcggagtaagagaatatccattgggtaaggagctcattgggtacccattaagattaaaacaacaataataataatagtgcaaaaataatgtaatataattcaaaataaaaaaaaatataatatatatattgattttaaaataaataaacattctacctattcaaaagtctttactacatagtacttagggaagattaatagtcaattttttaaatataattaataactttaatatgtaataatttgaaaattatataaaaaatttaaaaattatatatctagattgaatataggatggatagtatcactctcactccgaaccggcttcgggtatataaaattgcatcccatttttgcttcataatccattaaagcgggtatttcgcgccccattggaagtggatacttatgggttcccgtccctgcaggtgaaatttcaattttccaccattacttgaaataaataaatcatttgactatttgtgcaatctcacaataatacaataacaattaatattggtcatggtcactcacgtgaagtcataatcataaatataaggtataaaaactgacccaaccacgtacgtacatgagaagctcatatatatcactatatatatataattaaagataataattgatgataatattttgttttgttaccatcaattcaatacaatcaaagtctttgacacattcaaaatatatatatatgcaagcacgtacattttattctttttttgtcattgtcaattctagattgttagagagaaattatacttacatatacttaatatttt

SEQ ID NO: 324355 - DNA, 1125 bp, Cannabis indica
tactgcaacacttcttcaagctcttcaaattcaaaatcctatgtattgatcaataaaaaaaatgagctcagaaataacaaatctatattgcatttcagctacaccgattttactcgcaagcatacatttacagagttgtaaaatgttgacatctaacctccaaaatagtgtctgttccatactcttttctccagtttagcatttcttcccacatttggatcgttttttcaatgttaaagtcccgagctttcaaaaatctgcaaaataagaggtaatcataagcaatcgcaacataaacaaaaaattgttgggatgtaatacaaaatttagacaaaccttaacagagtatagtaatcatcgtgcctagacggtaacaaatccctgtcgaggagtctttggcgcaaatcttgtacagcactctcctctttttcatcccgaacatcctctatcgacactgagggaaccctgtagtcaatttttcttttccctctttttttaagtgaatgagtgaatttattagaagcatttatggctttcttcttgaggttaccgattttcgaacgcctcctctcatcttcagagttttcaaaatctgatcttctatctctaatgtcttcatgagtactcattccttccaagccttcaataacaaatatgaataatgatcaatttttttcccaataaatcttagcaacaaaggtcttcaatgaagtaaacagtacctggcaatgaattcatcttgaaaagacaagactttgaaccagttgactaatcttccaaaggaaaaaacaaattgacagaagaagattctttcacgtacatgtctccatatgctgtcaagaacagaacaaacaaacatcttagaaccggaccacacatgattaagaccccaaactaagaccaaaaaaatatcaaaataataaaatgaatattcatagtatctgttgaaatggtaatctaataaaggattaggattaggattaggattctctaatactgttgactaacatttcagtgagcagctagctactccaactgtatatgcaaacaagttttaagttccaacctccccaaagagaaaggggttaagtatattaaaataatcaaacataaataaataaaaaa

SEQ ID NO: 324356 - DNA, 751 bp, Cannabis indica
tgggctaacacatcaaagaactatccaatcaacctaagttttaataaaaccaataaaatttaatgtatgcccaaataaaagtctaacagtgttatctatttgtttcaagtatacagttaatttattttattagtgattctttataaaagtagtatattcaattatataaatatatatttatataactatgtctccaaaaggtgaacaaatttaattcaaaaccatttcaattattaatatttttaatttcttcttaactttttaatttcttctaccttgcatattaatttctttttatattgtgtcaaaattaagagttttaattagaagataatagagcacagttatctcattttatttgaattatttagaatatctagtttttttttttttttttttattagtttttttttgtaaattatatgaattacattcttaaataactataatgatattttctatacatgtattatttattgttagtttatcattgttatatattattataatatattttattagtgaattagtatatatagctattataagtggtttaaaatgatcattgagagacacgagagatacaagaatatcattgaatctaatgaggatgaaggtgagtgatttattacacttgaaaatatcaatttacatattataacgagacaaagatcaagatttcctactaaccaatttttcattctcttaattcaaaaaaaaaaaaaaaaaacaaaaaaaaaacaaacgaaga

SEQ ID NO: 324357 - DNA, 525 bp, Cannabis indica
gataactaatcagattgtaaagagttttatttagggcataaaacccaacagtatgatgccccgtgtctgttcaacattggcatatcttattgtttgggcttttcggatagcttcttcccaaattatgaagccatcagctcactcaaggaactctttcatgttatttgtagagatcctcctaatatctttccaaaattcactcaacggttggatacctccaaatatggtcgtatatcaaccttcttttgttaggcttttgacattggtggccttggccatgaacctttgaatgtagtctttcaaagactcatcttgcctttgctttattttgacaaggtcctttagttgttaaggtatttgtcttgagactgaaaactatatagaattctcgaaagaattctccccaagagttaaaccttcctggggtcaacttgtagtacaaatgttgggctatttcagatagggttgctggaaagatccgacatcacacatctccagtcatctccagttactttttggagatct

SEQ ID NO: 324358 - DNA, 662 bp, Cannabis indica
tatagtctattaaatttcagggtcagcctgtatccaaataacgaataacatatttttcgtgtcttaaaacaagtctcaaagcttttaatcgaaagttagaaccaattcttgcaattttttctctaccacatcgggtatgaaggagccttcacttgctacaagttgtgataaaaagaatattttgtcaagctattacacccatcaatcaaaatatcgtaaatcaatgagtactgaaattttcctacaatttgttaaacttaacttgctaatagaattcgacatatctcgttaaagatgtcgataagcttcggcaccatggtcaccatgcccctcaccactctcctttacactcaccgccatcaccgtcgtgatctctctgtgacggtgactgtggacaacaggatcatgatccttgaaaactttttgcttgatctacgtatttcttacgcatgggaacaagtacttaaccgttttagaatacatgcaaccagggccagtcctgaaaatatatggcccaagtgttatgggatttgaatccatgaccttagacattataccatccatctcaaccaactaagctatgaatatttattgcttataatacacttaaattttacttaaataaaagcctaataaattttttatttttttattttggaccc

SEQ ID NO: 324359 - DNA, 722 bp, Cannabis indica
aaatcaaatttccctttacttattgtctcaaattactacaatataacagataaaaaaatagactaaaaaattctcttcaatgataaaacagattggagtgtattagaataatccttttaagggacctcaacttagacatggatctcaacctaaacccttaacttgcactcaaatctcactcccaacccttaacccattttgtcttagctaacttaaaaaaaaaaaaaaaaataacgagacatttatatggattttttttatataaaaaattgaaaaataaaaaaagttacggaacacatttttattttttaaaataaaaaaactaaaagagtgtttaactatatcacttaaatattattttcacttttaaaaaataaaaattatttctaaaagccaataggcagagtttgaccaattattttgaaaattaagttatttttttaattaaaaagcaatttttttgatactttctttcacatactcgagcccaggatgaggtcatgtccaaagtttgagttcggggtccaaatccaggttcatgtccatggttgatgcctaagggtcaacactgtggtcagggttcaagtctaggtccttgtccggtttcgagatgggtttgggattgagaccaaattcaaatccataccagggttagggtagggttgaattcgtgtcgaagtgtgtaatattaaaattttttataaagtaaaaaaattaaaaat

SEQ ID NO: 324360 - DNA, 1381 bp, Cannabis indica
ataccataaaaactaaatgtaaaaaaatgccatagaaaagtggcaaacctaaaaatgtcatatttttctaactttgttctgaaatcccatatttcatgtaattttcactagttctaatcaaaactatttctatacttaagtaatgggccttatatgggccactagcccagcccaaaagagatgaaacagcagagtaccttagtacccgatatctgctggagtccccgatcggaacccgaaccgaatccgtccattcagtcggagaacaagaaacccacaacaacatctcctcttcccgattcccattccactcgccaccacgaatcaacaacgatcgtaactcatctacagaaatcccatgaccgccgatccgaaccaacccaaaatccttaaccgaatctcgaatccgatcgtggtcatcgtcacggagatggaggacctgaggaggagtgagatcggggagtggttgaatagaaggtggtaagaagagaccggggacgcgaagagagtggtgtagaaatcgggcgaaggagtcgttggaagcggagcgagagcctttgccggtgggaatgggtgagggaggtggtgttatggggttggtggtgcgtagtagtttgttggtgcgcaggttagccatagaggcgcaatagaagaaattattattgaaaattgaatgaagaagagattatggttgtggtggtggtggtggcgggacataatgaattatatcattcgcacgtcggatatatgcgtgcgcctcacgcttttccaccggccccatgccatgcctggatcgatctctctctacactcatcgtatgaaaagtaacaagtaaattttttgactaactagttacaaaaataagtgttgggggtatcaatgtacgatggtttagactatacttaatttattttcagattgtactatgtagttgttttagggctcgtttgtaacgccgtattaagtcgtattgtattatattgaattgtattttatgcaatatttttatgtaaaactatatgtggtattaacttttatggacacctaaatatataatattttaatataaattaaagtttaacatagtaatatataaaaatatgatatataatccaattcaatataatacaatacaatacgacctaatacgacgttccaaacgagcctttatattaaacttcagtttatttgttaaagaaccaacatgttaattaattagctcgtttttctagttcatatcctgatcagtattttcagtaggggattgtctttggtttgaaagctattttaaaagctaatttgcattaatagttgcaatctttttttttttttgaataaaaagtttcattaaaatcaggcctcagcctgaacaatgtcacac

SEQ ID NO: 324361 - DNA, 1591 bp, Cannabis indica
aatttttttatattttttattaattaaaatgaacatttctatatattttatcactatattatttatatataccaatatctgcgtaaaatttacgtataatgcacatttatatatcttattgcttataacataataaaaataactcaattaaaaaaaccaataatctcccaaattaaatatatatcgtaatattttttttataataaatcataatattaatggtatttaaatttatttattaatttaaaaatgctattcaaactaatataatggaagagaataatttaattccaagcatcaaaattacctttttcaaaagtagttatatatactaaggtaataatatttcaaggttctaccctcaaaataaataaagtaatattttacattactattcctttgctaattatattaacccattctaaatagtagctattaagctataatcttatgatataattttagtaatttaatatatgtttatgtttagtataattttattaaacaatataaatttagtgaattaattgtttagaaatagtgccaaaaagagtgaaaaataatttttaattttgtttagattctgtgaagatcactggatcaatttgcagtcagatcaagtttagtactgtgcttttttggtcaatgataaattcattgaaaaaaaatgttatgatgaagtctaaaaaattataattattttttaaaaaaaattgaggataacatctgtttaaataaattctctattaattcatccatgcatgatgcacatgaatccatgaaaataaaagagtcaaagcatgcaagtttaatgtattgatttatatcgattaattttggttaatttattttaaaaaaatgctaaaaaatacttctggtgtatatacttttctgaagtgtaatattattattgttttattagtacaattcaattcagtatctatcctacttattttattttataaaaaaatataaaaaacagttaattaattataagatgtcattttatagtagtattagacactttggtatcccataacaatattttttaattttaatattaaaattttgattaactataaacctttagttacgactattatattagaatattttatatgaattaacatataattaataaatattactcacgcagtgttattattaaactataatgagatgatcaatttagttaacgatattttgtggcatatggaagtattctaatagttatggattaacccattaaattatagtacactactacaagtattatgagcccaaacatgcttattttatcccttagaatattgggttgagatgcaaaatgaccttaaatttggtaactaagttagtaaatgtccactttttaaaaaaaattaagaaaatggccaaatctaataacttagctaataaaaattataaaaatacatttatcacatattttttttaaaaaaatatatataataacaaaattaagttacataatttttttagtattgcatattattatattgtaacaaaaataaataaatatattagattatttaaatatatacagcagtattagatatatctgttgggttttatg

SEQ ID NO: 324362 - DNA, 1438 bp, Cannabis indica
ttacactgggctcacatgctcaatggaacacatctttatggcaaacgaacaccgggtgccgtttaagaagacgcctccaatgagaaaagataggtccaagagagatcccaataagttctacaaatttcacaaggatatagggcacaccactgaagagtgtacccacctcagaatggatattgaggacctaatccatagggggtacttagggggctaccagacagatgaaagacgccctgaggagagagggagggaggagcaaagacaagaacaccccgccaaggcccttgaggtgaaaagagatgtcagaactatctgcaaaggacttggaatagtaggagacacttagaagggaagagacaggtatgccagagaggccaaacaacaacctatggtgatgaacctggaacaaagactgcccgagaattcgaaaaaggagaggtactctataacattcactgaagaagatgcacgaggagttcactttccccacaacaacccactcgtgttggctgtccaactacctaacgctagggtccattgagtactcgtagtcaacggaagttcggttgacctactctatcagagtgccctagaacaaatggggttgggcatgaaggatttgaagccatgcacaacacccatatatgggttcatatgggactcagtctatcccctaagaatgattgagcttcccctcaccacgggagagcgacctaaacaggtgactgtgatggccacgttcattgtggtggaaagtctgacagctttcaatgcggtgcttgggagaccctcgctctaccgcttgaaggcaaatgtgtccatttatcacctagccatgaagttccaaaatcccaggggagtcacgactgcaagggggagtagaaagaggcgagagagtgctacaacacttcccttagaatggccacgaaaccccgcgagtcaatggctatggttgtttgtgacaaggaggcacactagcaaagaacctgggtagacttggagccacaggtgagggaggaggaggttcatgctgaacccaacaaagaaactgaagaagtgttgatatccgagcatccgttgaaagtgcttaagattgggaaaggactttacgaggacctcaaatgcgagctaaagcaataccttgtggggatggcagatgtcttcgcttggaaacatgaaaatatagtggggataagtcccacaatgatgtctcaccacctaaacatagacccgttggcccgactagtaagacagaagaggcgggcccttgactcggtgcgatatgtggcgttaaaagaggaagtggacaaactcgacatgcaccgctccatacaagaagccttctacccagtgtgggtgtcaaacctcgtcctggtccccaagccaaatgggtaaggtggagggtttgtgtcgacttcactaacttgaataaagc

SEQ ID NO: 324363 - DNA, 604 bp, Cannabis indica
gcatcactttttgctggaagaaaattcttttttccaatcatcctttagttggtacacacgtttcttttgactcatttggtaacatatgtttttttttttgggaagcacataagaaagtatttcttaccttaattggttctcttttgtttgtttgatcttttaacttcatattactcttacaatgaacagtaactgtaaacttcttactttttgccttactgtctactcatgtccttcacaaaatttacttgcctttaaatatggctgaagtattgtttgctttgctagttattagcttgagaattttctgcacatacatattatttaattcttatattgtggaaaggaaaactaattagcacagaatcattaggagaggagatgtatttctagttatattggtttgtttttagatgatgaaaataattgaaaacagaaaaatactgcagcattctacaattggtattatcaaacttgaaatctgcaaaatacaagagctttttgtgtgagttttagttggtgattggtgctgccctatcagcaactgtacatcctaggggtgggcatcatccaatccaatccaattgaaccgaaccgatccaat

SEQ ID NO: 324364 - DNA, 1430 bp, Cannabis indica
ctttttaatcataacataaaaatgataatttatgattaataataacttttctacttttaatcacaaattttattgtgagtaaaaataaaatttttagtagtgttaactaacttcttctactaattaacctcctcacttaacaaactaataacatttaatacttccgcttaatatatgtagcatatatatatgttcactactataagatgcatttttaatatcggttttaaactgatacttattacctatagtgtcagttcatagaatcgacacatattttacaatgacaaaaagtatattaattttttgatttacgtaggatctaaatcgagcctttagagcattaatggtgccagttttaaacagacactcacaggtgtgcaattcatttttgtactatatatgtctcggtttagaactgacaccacaaaaaaaaatcatgttctgatcaaaaattactccgagccaaatctaatatccaaacaataaaatctacattaccaaatctagaaataacaatttctcaaaaaaaaaaaaaatccacaaaataacaatatatagattttaaaaatccaaaataacaaactatatattatcaaaatagaaaataaaatcgatacaatgttttacaatagctgagattaatgaatacaaaattcaatttttttttaaaaaaacactaaaataataagaacaaaacagatccaactttgaccccaagcgcaccatcgtcctccacaaactccaaaccaccgcctctgcccacctgcacaagacaacaagaatatgagcataccctaaacctaaggtgagaatacagaggcccaactggatttttttcattttttttcttaaaaaaataacaataaaataaaaactattatagtatagcttatcacgtatcaaaaatgtgaagtggatgatcggaagaggatggaaaaagtgaacagagaaatttaagtgagaaaactataaagaaaaacaaaaaatggcagcttgtcgaggttaatctgagagagaagagagaacaaaagagggagagtccgagagtgagaatatggctcgttgaggttcacctaggctagtggcgacgatggctagagtggctcgtcgaggttaagccgagagaggaagagaacaggagagtcatgatcccatatgtctggctttgtttggtgccgcaagataagggatgagattagggttttcttaggttaaatattttatttatactatttttttattctaaatcattttttttttatttttttttaaaaaaaagtgtttataagtgtcggtttataactgacaccaaataatcttttagtgtcagttatgaatcgacactattatactcaatatgtatgtatatttttttaaaaaaacactttttcggtttcggttatagttttagtgtcggtttactaatt

SEQ ID NO: 324365 - DNA, 829 bp, Cannabis indica
aaaaaaaaaaaaacatatttttaagtgtaaaaataaaaaaatcctagtataaatattttatatatatacatttacttttattgatcatgatgacgattttgatcttttgatccttatttatgtatacattattatcaacaagcaaagaattgttatgagtatgtctatttatcaatatattattattaacaggaaagaacttatataaatataaatatgtttattggatttttttaatatataaattaataatttaactgcgattaaccttattatttcgcaccacacatattaattttcacttcagcacactttacatattaattaattatattttttatcaattcactgctcaagctatattgtactcatccttaatttcctagttacattaaaagtaaaagaaaaataatattttataaataaatcataatatataatcaatcatttttagtagatgttaaaattacaaaataatctgtcatttaataaaattaaatgttaataaaagtgaaaattacactacattactctttttgccttgatttaaaaaaaaaaaatattttgtctcttagaggttgtttggcaaaattttttaaaaacagttttttaaaaattgagttttaaaaaattagaaaacagaaaacatcaaaatgttgttttcaatttttacaaacaattttttttgtctaacatattatattttatattttgttcatatactcgaatcctagacctgaaaccatactcgaacttggacacggatggattaatgtcatggtatggtgttaaaatattgattttttttcctaagaaaaaaatctaaaaa

SEQ ID NO: 324366 - DNA, 706 bp, Cannabis indica
tcaccaacggggtctttaatatattaaaattcatataaaatcacatatattgaactatataataatataattcctccattatacataattatctagttagggttttgctaatccatttcttaattccggttattacaaggatcaaccgaattagcaggattggtaggatttggaagattggcagaattggtaggaatgccaggattggcaacattagtcagattagtggagcctcctgtggtggggggaacacaaatatctagatctgtcgtcataggatcattcggaagacccgaagaagtggaggtagtggtttttctggtttgaaccatggtgactgattagacttaaaataaatctttcaataaaagcaccaaaatgttgacattgaatttggtcaactgacagcagagccttatttagtactaataatcaccacatgtaaattgtaataacaaataataaaagcgacacacagatttttagaggttctccccccttatttagcgggtaataacctactctcctattagttgtattgattctagagataaaataatgtagactacaagtttaaacattgtaatttctggctatgactctcttgaatagtacagtagtgagaactgagtattatagattcagaacaattgagatttaatgaggaaaatagactaagtgtctagtggagagagagagagagaga

SEQ ID NO: 324367 - DNA, 1031 bp, Cannabis indica
catcgaacaagcacaaatatacttaggcaaaaaaaaattgaagcttcgccaaagtcagaaattaacagctaagtatgtggaaatggcatgcttcaaggtgaacataaaatgcataaacctgtaattaaaggctcccaatcaactacatgttcagaacctaaggaagataaagctaagattaaagacagcctcaccgatcatttgctcaaaaataaaaggccttaaggccatacaagaactaaaaaaaagattgtcgggccggtcatttgttcaaatgcaaaaggcctaagagccatgcaagaacaaaaaagttggttcaaatgcataaggctagggccatacaagaaccgtgcagtctgagaagaaccagacaaacttcctgaagggatctaagtactgggcaggagctttcgataggtctaagcactgggcaaggtctatagctaaaccaaagcacaggcctgagtcctaaatagattataatcctaagaaatgagaatcaagagtttaaaagcttgaagctcaacaatggcagaagcttaaagaatgaaaaagtgagaagaggctaacatttggttgtgcatacctgcacggtaaagagcagatatacaagacagagcaaaaagtccctacccgaccagacattcagatagggacttgggggaaaatattatcccaattttttccacctaatgtggctctccacatggcaaaaaaaaagaaaatatatttaagaaagtaaatactaacctgccaagattagtgccgagtagcctctcaacctctgagattttatgtaggacggtgcacacaagaaaaatggaatccatgaccctaccagcaaggtctttgccggacctatagctggctgaccaagagtgctagcttccaagcaccgggcatccttcaacaagactggccgaccaaaggtgtagaaacacaccaacacttgtgtttttctcacaagccttccaactcgccttcagcattcccacaacttcgtcaacaaataacaaccctattccataggg

SEQ ID NO: 324368 - DNA, 747 bp, Cannabis indica
tgtaacgaagttgtaaaagtgaattgaaactgtcgtccatgctatttgcatgattatatgtgtatatagtttggatttcatatttaaacattcttttgaaattttcatagtcagtactagaaattaataattaagagaaagcacacaattaacagagaccaagaaataaaagcaagtcaaagttaagtatgtaacaatatattgttaaaagtcttgcatggcgaactgcataactttgacatatctagacttttattcaagctgccttttgacctttttcgtctatgtgtttttgatcatttgatccgctagataaaaaaaaaaaaagccaatttgaaggtttctttttctttgttttatcttttaatttagcttaattaattatcttctaggtgcatttgatcaatttgtatcttaaataaagaaattaaagaagataatatttgcgtagttatacgagtagtcacagggcataattaacatttgctgaaaaaataaaacaacatatattttagggttaattgtggcaaaactcttactactttcactttgttagcaattaaccttcaaaatttaaattttagcggcaaaactctcaaaacttatgttttgttagcatttagccattttcattcatctttggcaattaaatggttgtccacgtgtacatagaatattgtccatatgggcacaatatacacgtagcacaatttaattggcccacgtagataaatatttaaaaataaa

SEQ ID NO: 324369 - DNA, 1009 bp, Cannabis indica
attataattagattgaattaatttatgcacacccctatttaataccttaatcaattggtatcttaaattttcaacaaaaataaaatttactaatattttatttttattatttcatatttaaaagtgattagattttattctacctatgtttattttataaatcactttccaaagggtttctaaaataatttacaaagaaactaaattgtatcttaaacaatatcataatttgtaaaatgaaatagtatagtaaatatcatataagttagtttaccaaataaataaataaattacactaattttactaataaactatatggtaactttttgtactttactgcaacttactttctaaaatatgttttcaattaacgtaaacattgataaaatagaaataacatcaaagtatcttaaagaacaataaaataatataatataacctaattttttttttaaaaaaaaaatcataattttagggttaactaatcaaactaaataatcaaatatgtatgagatgaaattagtttgaaagattttttttaggcaaatgtaactattttgatattttttttttattatatgaaataaattccaaaactttttttgaattgtagattgggagaaagtctagtttgaatcatcttcgtatatggagttgtcctgctgaagtaaggatttatgatcctaatttgaaaaattagatctgagaacaatttaatggttttcattaattatcaaatgcactcaaaggggtatcacttttactgtcttacttgttgtacatgaattgttgaatcttaaattgttaaatttcttaaatttgatgttgttgaaaatatttcttctacatctcttgaaacgagagagtcatctaagggaatttttattcttgtgtccttttcaagagatgataataatagcaatcttattcctactccagttgataattgttggaattattttaccaggatctagatttactaacaactatgttttattaacatcctaa

SEQ ID NO: 324370 - DNA, 907 bp, Cannabis indica
cctaagtcacatttccaaaaaaaccaataagtgttgctctaacacttttggggacttaaattgacaactaaaattttccctattgatagatttcatggaaataccctaagtattgagaaaacactcaatctggatcctgagaaaagtcttaagatagacctccaaattctgcctaactcggatggcccgaaactccactataccattttaaaacttgcataactcctgcaattctaagccaaacattacaaaattttacaggttatctaaaaacattacaataaaaattttcatgaagaaaccccaataaaattctcaacaaaaatcaaactaaatggccgtcctaaaactgcctaaataagatggcccgaaacctccatgtccgagtttggaaataccataactcatccactcctgatccaaacgttaccaaattttgtagaaaacctaaaaacatcataattaacatatttcatgaagaaaccttaatcaaattcgcaacagaaatcaaaataaatggccgtcctaaaactgtctaaattggatggcccgaaacctccctgtctgagtttggaaatcccataactcatctaatcctgatccaaacattaccaaattttgtagagcacctaaaaacatcataaagaacatatttcatgaagaaaacttaacccagttcctaacaaaattcaagttataacttttgctacaaccacccaaaacaatcaaaccacttctaaaggatcctaaataaccttaataattatttcataaccttcctaaatttattcaaaatgttctactattaatagccactgaaaactaacaaaaaccctgaatttcagctaggaattgacttttctttttgcttttgactttgctttttctttttggctcctttttattt

SEQ ID NO: 324371 - DNA, 1313 bp, Cannabis indica
actcgaaccagaaaaaactaaaaggaaaagactaaataatcatgtcaaaagacaagactaaataaccatgtcaaaagacaagactaatagaaaaactaaattagcttcaacatataaacacgatcacaacattaaaattaattaaggaatgaactccttataattcgaaccccataaaaatattaattagaattaaactaataatagtaaattaataaatgaaaacaaaatctgaaacggaggatgtcgttgagccgaaccgaaccactctcagacgactgctcttgaacccctcacagaaaaagacgttgatgtgggaatgagaaaaacattttatttatttatacaattaatttcaattaatgatggaaactaaagacgatatatacctcaaattgtggtgctaaataaatgttcacacttgaaagttgtctgatagaaatggataatcataaaaatccaatttttctattagcaagatttgttatattagaataaaaatgaaataaaaaactattagaatatttcataaaaattaaagattaaaatttaaggtgtcattcgattaattgtcattatgaactgcttatgggtacactctttacacatgacatatttttattagtacacttaatattattaaaaattataaaaataaaatattaaaataacataaaaaaatataataaattttaaaataattttatattttttaaataataatattaagtgtactaatataaatttgacacatgcactaaaatgtacacataattagtctatattggcaatgattgtgaaaaatggatgacaccttaaatttgtaagcatttaagtagtttggagggtcttaccgtcaaaatttgagattagagagttaagtgtaagtaaagcgataattgagaaggtttagctgcaaaaaattctaaaaattatgttatgttcttataaaaaatttaaataaataaattagtagcgaaagtatataaattctcaatttgctgtagtttaactactattttagaatagttgaatatgtaaaattgttatttggcaattaaatctttatataaaaataatttaaatggaatttaaaaaagaataataataattcaaactaaaaaaataataaaagctagtactatgagtctatgactatttatgaacctagggctacaactttcattcatttcccaagtcattaatcatcgtggatcaacggcccaagaaacaattgaaatggaaagtacaaagcatactgaagtgttcatacatacatgacattaagaggaaattatactttataccctttt

SEQ ID NO: 324372 - DNA, 1216 bp, Cannabis indica
aaatttttaaaaaaaaaaaaaaattacagcaatgatgttgtaactataacgagcaccactatgaaaaaaatatttcgacaagtgttttcaaatgcgagggtgagaaagaggttgtaataggaggttataattattacctattttatttatttatactaggtgaggctagcacgtgccatgcacgtacctagctattcttcttgttctatttcatttatacttttatctgtttaattttcatttcataactattgtaacaaaaaaattatataatttaatttttgcatcttaattgtagtgcaaattataaaatacatattttattattatattagaaataccagttatgataaacttctaaaatggataagttttttttataaggataaccgttttaggatagagaaaatgccaaaagataatagtgaagagatttcttctatccgaaaaaacttactatctattctaagggcatgctaaatctattcatgggccacaacataatgttgcgacttacataagaaaaagatgccccaaaaaactagacaataaaattttaatattagaaaagaaattcccgaaatgtgtttctgttccaccaacataactacaaaaaagaaaatagataaatcagtatcaaattaagtaaataataaaatatgaaaatttatattataatgtaataattataatttatctgtaaagtcttcactgctaaaagtataaccattatatttaattttttcttagactaaaataaacttgaatcataaaacaccatatatttactcaaaacaatttcttaagaaaatataaacgaaagtactaaaattattattataataaaataaacttatcttggagaaaccctttattggaaatatgttatctgagatcttaaaaataaatctaatacaaaacttgacataaaaccacctcaagtaaaaatctccttaggaaatccaaatctttattggtttaaaggtcaccattatatttgattttgtcttacaatataagatacctaaaacatgaatcatcatacgtactcaattagtttctcaagataataataataaaaataattttttaagaaaaataattgtaataaaatttatctttttgaagtctttgtattcttgaatgaccaagtaattgaactaaaatatctattttgttataaatattattaattatgtggatgtccaaatctttt

SEQ ID NO: 324373 - DNA, 1046 bp, Cannabis indica
aaaaaaaaaaataataaaacacatttgagtaatcttcaaatttattttcaaaattattgagttaatcatgaaactattgaattgtaatctagagtgtacagtaaaatttttattaattgtttttttctaaaacaattttttgttatttgattttatagtaataaaaaattagttggaggtaatacaccttatgtataaatgacaaatattgtgatttaaatatgtaacgtcattattgaaaataaaataagaaaaatgattcttgatgtagatttttcttaaaataatagtttttgcgaaattggacaatctcaaaatttggagcaacttatatacatataggaatagaagaattctcttatatacagtgtttactgtttagttttttgtttttttttgtaacattacaatattttataataaattgtaattaatcccatctattataaatgaagagaatggactctctcttaggggtgttcatcccattcaatccgtatttttttttgtcaaacaacatccaatccacattaggtgcgaattatttcaatctgtataacaatttaaatccaatccaatccaatctctaatagtgcggatttgatcggttattttggatcggttgtttttttttttcatgataaattatataatatttcgttaaaaagaaatttttaaaaaaaactattgtttcttaatctccaataataatctattttcatctctatttatatacaaataaaaccaatacacatatatgtactcatctttagatttacactaatatataaatactcatatttagatttgcactaatatatatatatgtatccattactaaaataaatacactaatatatatttaaatttatgtgtatgtgtctatatatgtaaataagaatattttttttttcgtgttttctattataaaacaaataaaatgtgccaactcaatatattactaaaaaaattaaaaaattaaaagtttagtgttcttttttgtaatattactagaaaattaatgtttattatatattataattttt

SEQ ID NO: 324374 - DNA, 961 bp, Cannabis indica
attaaatatataataatataaaggtatattcttaattgttagttttaaagtcatatatattgtgttatactttggtagaatgtgatatttttaatttatctttttaatttttattgactttgactttgaaactaaaaaaaaaaaacgtttggccggttcgagcgggttaacccgaccaaaccgcccaaaccattggtcgatttacagatttttttttttaaaaaatggccgggttacacttaaattttagcaacccaaactttagattagattagaaaatatatggaataaactgcccacaccctactcacagacaattttcgtttttctaaagatattatgcaatttatactacaatatgtcaataaaataacatataatatatttgatggttattattaaaaatctgttttggaatgagtcaaagatatgaattactagacattatttgtttttttctttttccttctatgttatttttccagctggaaattgatggccgggtaataaaaaaaccggatatatctacaaattaattgagaaaatttcatacaaataagatgcaatattaatgtaattatattggtttttgttttaataaagtaaagacgtatataagtaataacatgatgcaaagaataacatcattatccttttgacaaaatttgcattacttttaccatgcagttggagtgttggactcgtagcttttctttattttatttttattgtatacttttttatttatttatttattaatgaaggaaagatcatagtgtaatactctattagattgatgaggaaaagtctagtcacatttatcatttccatttatgagaaaatgagagactcaaccgacctcaccagtaggggtgttcacaaagtatccgatccaatccaatccgcacgatccaatccaatccaatccgcaaaatgcggatatccgcacttgtgcggattg

SEQ ID NO: 324375 - DNA, 597 bp, Cannabis indica
atatattttatttgtttttttttttaaattttggtaattttacttattagtgggttcttaagaaaaaattccacgtggtttaaaaatcattgtgactcttgtattatagactatatatagattattattttctcctttttattttgtctctaagttagtgttatattattgttttataggtgattaaagaatttaatcttgcctaatcaatttttttagaagaatataacatatatttttgtgtatgtttcttacaatcattaatattgaaaaattaaatttttacaaaaatgccaataattatactaaatttcagtgaaaatgctgttgtagcagtctacagcagcaaaatgtagttttgtcactacaaaatataattttacaaaaacaaaccagaagtaaatagtgtagaatttaaaaatttgacataagagaattatacgtggtatcagtgttcttttaaacactactagtccacggggccacacccagagaatgaaatcaattagtaaagtatcaaagtttacaaaagcaattgacttaaacaaatttagactcagtgatttgtcgcaacccttttgtaatccaccttgctaa

SEQ ID NO: 324376 - DNA, 1178 bp, Cannabis indica
ccatgaagtcagagaagatgttcacgtccatggttcctagttcgagaactccagttgcaccattcatggccgcccatttagctgaattgtgcgtcatgaaattgaatttcctatcaatttttcccagtttacaatcctgcagagattgagccgcctgcttgaaacgatcagctactccagagatgtcgatatccttgtttgtggtgcagttggctgagcaatttgagatcgccacttcattgtcgcaatagaaagtaactttctccatgtgatttgctcttgcaaactctgctgctaaagccagcattgtggcttccactagtgtaggatttgtagcagagatcctctctgaatagatggcctcaattcgatccatatgatctcgaaacacggccaccccgtaagcttggtttgactggattgatacatccgtgcagcaattccaccagcctgcttcaggaatccgcgtgttttctctcacttcagtgcgaattctccatttggacaggtgatctttgtgcagccggttgactgagttgatgatctccctaagagggctgagacttttcccatgtatcacttcatttcgagcttcccaaattttttagaaaatgcagagagcccccgtcataaattcatcaaaggacaagctctgtggtctatgcacccggtcacgaaaccatagcatccaatctaaccaattgaggcagtgcaggtgatcagtccttattccccaaagactgccaaaccaaacagcctttgcaaaataacactcccaaaatagatgtagagttgtttcctctccctctccacagatgggacattctcgagtttgaagagatatgaccattccaagcttgcctctagttggaagggcatctctcatcaattgccaccataacatttttaacctcccatggatcggagagttccagagagacttccaatcccaattgggttgagcttgagagctttggttcatgactagcttataagcagatttaaccgaaaaggtgcccctcggttctccgagccacctccaggagtccggttggagttgtaaagggagaccaatgttgaggatgtttcttgcatccctttcatggaaccactgtctcactctatcttcattccatgtcaagttctcattaataaaatggcttactagatttgctcct

SEQ ID NO: 324377 - DNA, 1581 bp, Cannabis indica
gtaggtcaccaaaccaattatttatttatattactattctttaaaagaaaaatcaaatttttgatttaaaaaaaaacgaattttaataattaaacacaatttagaaataaattttagtatgcaatatctgattttatctcatttagtcaaatattattattattattattattattattattattattattattattattattattaagactaataaactaaattaaattgtttgacatttattttttgttttagaagttgtgttttcaagtcctttgaaaaaaaaaaatattgtgttctcaagtataataagagtagaaaatatttttttgcttttttatttttttaaacaagattataactaatttatttttattaaaaacaaaatttagtgaaaaataatttgaaaagcttaatcaataaatatatggttgtactatatgtgtttctgaaatagctttaaacttgctcaatcaatgaaaagtacaagaccatggccaaaaatgggttgtcatctttaaaggcccaaccatatttactttctcttactttagaggtatgaaattcatcttaatttattttattaaaataaacaaaacaatatatatttatttattttcaagatttataatttatgacttaaaaatgtataatatcaatataggtataaattaatttacaagtgaattatacaatataacaaaaaaaaaataattaatgatcctcatactagtatttagtcttcaacccaatacaatttgcctaaactagaactcatgaagggaagaagtgtagaacctcaataaagtagggagacaagaacaactaataccaccattttaggacgaccatccctacccattatgaggcacaaatacatgtatagacacaatattccataaaagttattacattaaattatatagacctcttaactcagaatttcgttaataataaatgagatattttttatgaattatttactaaatgataaataatagaataattgacacaaaatatttatgtaattctgtagttaaatctacataattcacaagactttatcatttatgggcgatttgtttactgagtacaaaattcaataaatacaaaaaatgatgaatttctctcaaagtgatcacttgataattttgtcgtcgtttgcacgatggtctcctctactagttgtagtatttctaatatgacagttatttttttttgaacttatcttaataattgctcataaactgtggacaattcccacgattcatataattactttacaacgtgtgataaaatgcataattgcctaataattgtcatttgattttatcgaataaataattatttcactgagaagtcttcttacactgtgctactcacaataagtttagcagtccttcataggggtgggcatcatccaatccaatccaattgaaccgaaccgatccaatccaatccaattacaaaaagttggatatccaattacaattggattggattggatgttaaaagttggattctaattggattggatcggttattggatgtcaatctcaaaatctaattaaaaaccgatcc

SEQ ID NO: 324378 - DNA, 2736 bp, Cannabis indica
ttaacctttaattaaaataaataaactttacaaaagtcaggatcccgtatttaagaagttacaaccaaaatacaacatattaataaaaaaaatttgttgcctagcgactaatcaaaatacagcatgttgtctcgaagattgaacactccaggtctagtcgccccgatatgtacaatcttcacctgcttgccctaactgttgttcaaccttagctttacccttacccatacatgaaaacaataactgtgattcgacagactcagtaagaaaaacataatcatatcataacataaacttgattacaactaggcgcccatacaataaatcataaccatttcatgcatcccacgcgtgctgagtctggaatgttcgtacgatattacaattgaccataatatcagtctatactaggtactctagatctaccaatgtgatagcatcaatcagtacttaagccaaacatacatttattgatacccaatataactctatgtatactgatactactatttcaatataatcaaacagacaatcataaacatgcatgctaaatatgtatacacatatacatatcaatatactaatcttacctcgattctgaatttaggtgtgctgatcaacctgagtggaactgctgctcgacggtttgcagacccctaagtcataatatacacaaaattaataagtgatacgctaaatcacttttcggggactttaacctcaaaaataaaagttttcctatcgatatctagcaagaaaaagtcctaagcaccgagaaaacatgagaaaaacaatgaaatgaggaacctgcctaaaaaacggcaggccatttttctaggtcctgcaccagtaaaaatggtaggtcgtttctgttcaaacagcctgctgtttttcacaacagaaaaaaaaagggcccccaaaacgacctaaaaccaaccctaaaacacaccataagctcccaaatacctaaacatgtcataataagcaataaattctcaggaaacacaataattctaaaatagccattattgaaccaagtttgagttcatgaactcaaacttgatcaacaccacaaacaaacacctaattacaacccaataagcttaaacaacctcaaaaaatagcagcaaaacaaatcaaacctaaacaacaactaaaacacaaatatgcatgcttaaacctaactttcaccattaaaagtaaaggaaaagagttctaggttttatcttggatcttagctcccaaaatttcttgaatttttctgaaaataatagagattagtgtgaggaatctcctagggccgaaagaagaaagagaaagggaagtggttgattgtctaaatttatcattttcccaacttaatgttctaagtaaatccataataaaacttaacttaattaactcaaaattttccagctgccaacacaagaaaaggccacctaagccttaaccaaaaatgacaaaaatccccccacttgcatgcttaaatagtaaaatgactttggggcaaaatggttaaaaccataaccccgactaatttcaacattccaaatgtctaatcagctcaccctgctattctaaaaataataaatcgtactaaagtgactctataggtcatacgtcacgttccactattaccggtcataaaaatacaaaaaaaaaacaaaaaatttatatatataacataaatggcacacctagaattcaaatatatctccaaaattataaaaataataattaaaagtatactagtgaaattagacccttattaattactaattctcaaaaataactaagtggtcattacaagtacggttcatagctaggttagtggctaagggctttactcaggtggaaggaattaactatgttaaaatattctcacatgtggtaaaatacatgatgatgagattagtattgtctttggaagcttaaatggagtttgaagttgaataacttgatgttaaaactaccttttggaacaaattcttagatgaagagatctacatgaagtaaccacctaggtttcaagtggaagggaaatgagttgaattagtatgcaagctcaacaggtccttatatggtttgaaaaagtccccaagataatggaataaaagatatgacacgtatatgcaacaaatcgagttcaaacgatccacatatgatcactgcttaaattaccaaaatttggagcaatctacagctgtgtttttatttctatatgctgacgatattctcttcatgagcaaagataaatttgtggtcaaaagtttcaaagtcaagctcaagtgagaatttgatatgaaggagcttggaccagttaaaaagatacttggtattaaagtttttaggaataagaaggaagggacaatgatcttgaaatagtctgagtacttcaagaaagttattcaaaatttcaacatggaagatacaaagagtacatccataccgttaggcaaacaatttgtctcgtcaaaggaacagtgtctgaataatgtggaagaagaaagaagaaatgaaggacgtactttatgcagtggtttaaggatgtttaatgtatgtgatggtgagcatcaaaccgaacatagctcatgctctaagcatcttaagttagtttatgtctaatctatgcattgaactttggaagaccctcaaatggttattaaggtacctaaagggcacttgggattttgtgttgggttttatgccctaataaaactctaattcaatgtaatc

SEQ ID NO: 324379 - DNA, 1011 bp, Cannabis indica
ttttttttttatttttctaataattaatttaatgacggttaatatgatagtccattagtttcctaatttttatgccgttattggctttttgtgaatttactaaaatacccttttttatgaacgttactgttacttacttaccttatttttgagtttaccgttaaattattatgtttatttgtttttatttttttaaaaaactcttttttttttttcttcctcttcttaatttgaacaaaatcgcattttcctaaattattattatttcttttttaaattgggggtaaaactcttaataatttcatttgtttgcaattaactctcaaaattcaaattttaaccgtacaattaccaaaattataatatcgttagcaatttacaatttctatccaaatttaattgttaactgtcacgtaactgattgttaatgtgaacaacagtatatgcaaaattttatagatccacataaataattatattaaaagattaaaataaaaatcattaaaaaaaaactttttttctttttctatattttcctttgttttttctttttcattttctctctgcatcagatctttttttttgtgcttcataattccatgaaatctgagattggttttgctctttatagtccaatgagtaaagggtatccgtgatctgattcgatttttctcttgaagcattgagctttgctctttcatattctgatctgggttctcttgtttttttgttattttttcctttttcttttctgagatcctctgtttcatcagaatttcgacttgtcttagtgtaatgagatcagggactcgaagcattgtagtctgactctgatctctttatctctctctttgttctttatctgtttggtaaattgtctttgaaaaccgaaaaaaaaactagtaatcaattcaatggaagatggtcgagaattgaaacatgcctgtaaattctgccacagagtttccctgtggaagatccttaggtggtcacatgaggtctcacttgacc

SEQ ID NO: 324380 - DNA, 815 bp, Cannabis indica
gctaccttccttccatagcttcgaattaggtcctgacaaatcatgatattatgtgctatatatctaccctttatgaaccctccttgtttaactgatactaaaacagggagaatgttctttaacctagaacagatcaacttggtagcaaccttatatagcacattacaacatgaaataggtctgaagtcactcaccaaattaggactcttgactttgggaatgagagtgatgattgttgaatttatttccttgaggaggttgcctgtttggagaaaggatctaacagcttcacatatctcaggcacaatcaactcccaattgtcttggaagaaatagcttccaaacccatcagggccaggactcttagatccagtaatgtcaaaaatagcttgctttatttcttctctagaatactcagctagtaaacaatcagcttgctccttagtcaccactggcccctctgcaatcactgtctgctttacttttttccttgtcaacatttttgatcctagcagttgtgtatagtattccaagaaagtctcagttatctcctctggtttgtcaattatatcacctctagcattagtaatagaactgattctattttgagacctcctatcccttaggctagcatgatagaaggctatgtttgaatccccatctttgatccaactcactttggatttttgctgcaaaaaagagatataagctttgtgaatctcttgataatttaaaaaattttaaaaatatgaccactttacattaaacccaaaaatacccctctcattttcaaacctcaactctctctctctctc

SEQ ID NO: 324381 - DNA, 686 bp, Cannabis indica
gaatttcaatttgaataagatttttttgtcaatactgctataaattttgtttcgtcgtttttgcgcagtctaaaatttatgatattagcaattggtttcttacattttgtatgaggtaactttcttttaagtctttctgcttgaggttatgtattacccacacttcgctatctgctcttttaatcttattatttacttaaaagactttaagcttttactttctaggaagagcctgtggataagacaataacactggggtgatttggaggaggaagaggaagaagaagaagagaaggaggaagaggaagaaaaccaagttggggaagatgaattaggggatggcattcaatctgtggaaagcttctcgaggtatttaaatttaagctttcttttgatttgtataattattccagtataaactacaatcttattggatggcaaaccgtgcttttgaaaaatgtatcgaactgtgaaattatagatcaagatttatggtacaaaatcgagttaaagcttaaggagggtgtgttagggtttataaaacacttaagaaatatataaatcacagatctaaacatgttcataaagtgctttaatatagaaaaccctaaatcataaatctataaaacctttgttaaattaaagaagaagatgatgataaagatcagcgaagcactaacctgaag

SEQ ID NO: 324382 - DNA, 1000 bp, Cannabis indica
ttttatttaagtcagatctagattcgggtctgaggccggggtcgtggtccatgtctggcattggggtcgaagccgcattccggatcccaaggtcaagattagagtcaaagtctaaaatattaattaagaaaaataaactgtttaaaaaaaattgaaagtgtttttttttaaatttttaaaattttgattctcaattaaaaaattaaaaagcaaaaacagctttacaaaatatatttttactttttaattaaaaaatagaaaattaattaaaaatgtattattattattattattttttttttataaatagtgatttgcgaatgattattggtcataaacgcttacgagttaatatagtaatttgttgcaaagaataaaaaataaggtgatgctactaattataatacttattaattataatttgtagttaattagttctaaaagatattttactaaatatatctcttatatgtgcgtgaaaattcaaagaaaatgtatattcttaaatcttaattctatgattggtatgttggaataggtgttagtatacaattcaattcaaaagtgtttgtaaatggttgttgacgaaggattattagtaataataaaccaacgattagttaatatattagttgggaaaaaataaaaataatttctattgacataaaagatgtgtgatgctacaagttatatttgattagaattataattgatctttcatatactaattaaagatatcttagcaaatatttatactatttatatatagataaccttaattttaaattttacttcatctattttgtcatattgtgtgattaagttattttatctttagtggagagagactcaacactaataacaaatttttttttttttttgggtataatatgaggtagtgttctaaaaaatcattcaatctaattacaactgatcgattcaatcccagctgattaaatataatcggatatccaattataattagatcggatcagatgta

SEQ ID NO: 324383 - DNA, 871 bp, Cannabis indica
gaatttaaacttttgaacatataatcataattatattccactgtgttgacaacactataattacgaacaaatacatatgttctggacttaatataatttatacattaaagataatcatgaaataaatcatgtgaaccatgcaacgtaaaatgtgatttctgatctttattaattagtaaatttgattatattgaaatgagttttatttagggcacaaaacccaacatgaacttcacatcctctagttgacattgttgcacacaactaagaaaatcatcatcaagaaagttgctaacctgatgcccaattctcttttccttcgaaaggatctcattaaaatcccccatcagacaccacttcccatttggagccaactcacaaacaactctccaaagatctctcctctcattgcggctatttgatgcatatatcacagtcaagaaactatcaaatataccatcaatagtcacaattcttatatgcataagttgacttatgcatctaatcatatccactatgaatctcaaaggattccacgctacaacaatcttccctccagcatgccaagcaatgttagaagagaaacaccatcccgcaaaaacattagagtacaagttcccaagcttaggagccttgactcttgtctcaaggaggccaacaaaatcaacattttggagactaataaattgttgggttttatgccctaaataaaactcatttcaatataatcagattgactaattaataaagatcagaaatcattttatgctgcatggttcacatgatttatttcatgattataaattctattaggtccagaacatatgtatttgttcatgattatagtgttttcaacacagtggaatataat

SEQ ID NO: 324384 - DNA, 831 bp, Cannabis indica
tcactaccgctctctcttgagtcgtcttgggaagtaaggggagattcttcatcattgatttcttgttcgagatattcttaacaaatagcaggggacgtgtcatcaatatctccctactcgagttcatctagggaaatagacgaggagtccatttcagtggaggtaataggtgttgattcttcttaactttctagtcaatgttttttcgagactcaggaaatagataggtggtgtaatcagttacttttggttgagcaactcttttgaccttcttgacgacttcttcaagcttaatgaaaccgtcagctctgtctaaaagctcttgaatggtgtatacttatttgagctttaagtctttccacaatggactcattattattagtcaagctatcatttccatgaccttggcatctttattgagcatcttcgtctgcatggtgacctctacgaatcgttgaaagtaatcctttagaggttcgtcttcttgttgcttgatgtagaccaaatcgttgggcttgattggtctgtgccttgatggagagaatttgttataaaatgctttcttaagcgtcttctaggaattgatagatcccgaggagagcttgagatacaactgttgtgctacttttgatggtgtggctggaaagactcgacaatgagaatcatttcaaattcctaacagtttagttttgtacttcaaagttgtggatgtgagagagagggtcttccttttccaatgtatggatgccacactggatttttgaactatgaaaggatctccaaagccttaatttgatttgagagaggagaacaccgctctcgatctaatcc

SEQ ID NO: 324385 - DNA, 1585 bp, Cannabis indica
gtttgaaaccttgtaaatattagagattatttagattctcttattagagaatgctatagtgttagtaaaaaactttttggagtgatgaaattcacttgattcaataaaaaaaaaaaagatatggctctaatacaataatacaaaatataagataaatcttattgaatgagtatcataagatacttgtatgttgtatattgtgaatttaagataatgagagtgggctccttatatagggaaagcccttgataaggaataccaacacaacattctccagatgtaactgaacacctagttgttacaagaagaaaaggaataacaaaactaactaacacctagattctcacttctaatagattgggaattaactgcaggccttggggattcagtagccaaggactatcatggtatggtatatttcaatcattgtgaccgaagagcaatggcacgaggccctgtgctctcagtttgtcgaagagagaaagaaagagtgagctaaagagaaaatgggaagggtagggggaggaacaagagtgagcaaggattttgccttgaggttatttgaggacaagaaaggccatgatggcctttaattaggtcacccatggctaggaaaggctcacttggtcttcggtaccgccccaacagaccatgtgtaagggagaaagagcgagtgattgaaagagagaaaggatttgtttagggatttttaattttagggcttttatcacttcttttgacacccccattctatttttaataataataataattgctgacactaaaaaatgttcaacactcgctcactagattggtgagatgaaataaaaaattgagtagagtaaatagacacataaaatttatagtaatttagtccccttatcccgatggtaatggatctacgtttactttgagtctttatttctcacgagaatttaaagaaaattagctaagtctaaaagctccaatttttggagagggaaactagagaaaaattctctgaccttatggatacttttttaaatgtcaaaaatgagttagaggaactctccttttatagggaatgaggccctattaaaataataataaaatatggaaaatacatttaggctatttttgattgtcgatgatgatttaacggtgaaatttactctagaggtcagtcgttgattttcaaaattggggttgcgtcctcgggacccacttcgggtaagttttagcttaaatttgcaactctcttgaggaggatatttggaggtcataacttcagaattgtgattggagtgtgatgttagacatttatatgtataaactgaaatatatgtatgtatatataaaatgcggaataaacaaatatatacactatataacttaaggatcgaaatacctccagccattgaatctttgagctttagtcccacataagcttgatctgcaaaagaaaccgattgatgtgggtaatcgggcttcctcgctctctcaactctctttagatggattttgctgttatgaacagaatgagtgaagctcggggaccgagaccctatatttataggtgagatactccatcagtatctgcgccaca

SEQ ID NO: 324386 - DNA, 1090 bp, Cannabis indica
aatcactgaataacacgtggacactaacctgggacataacggccaggtacctacggaagttccacactagtgacggaaggtatttttaccgctaaaaataggacttaggtatttatctgctactcggcataaaacttaggtatttatgccgcaaattactctttataatatacgtggattagattggatcgattatttttgcatcttaaacaacatccaacccgtacaagtgcggattttgaagtttccaatctaatccgcacaactgcagacatctgcactttgcggattagattggattgtacgaatttaattgaatcggctattttataaacaccccttgaaacacctaatgtttttttgttccccatttttatttttttatttaaaagcttctagttattttttgtgaaaaaaagacttctagttataggacaagtaaaaccaaccgttctaatcaaaaaaaaaaaaaaaaagtaaaaccaaccgtttcacaaaccggttcgtctccctcattagtcattgtacttaactaaattttgtcgtacttttccattgacttttctcgacttatgttcttcccctattactctttcctttcgactccttccactatttttatttttagttatttaagacgatcaagtaaaaaaaaattattctgattttggtctccaagattgcccactttgttgggatttaaattctgggtttccttctattacaattctcccgaattttatccttttttacttttccgggtactgattctttttggattctgagttaaatatggatgagaaattaagagtttgagacaggaaagtgaatttagagatagtttttgattttgggttttttataaaatgagtaggagaaagaggagaggctcgaatgttgaagaggctctggagttttttaaccatttaatggaggaaaagccttatcttccatttctggttgctttgattttttttgcttggtgtattgaaagatggatattctctttctctaattgggttcctattgttattgctgtttgggcaactattcaggttgagctctctgtcaatgtgatctgtttttattt

SEQ ID NO: 324387 - DNA, 1039 bp, Cannabis indica
tttttttttttttgagtaatattattgggcacatgtaggtagaaataagatgttagaaattagtgtctcatactgtattaaattaattaaaatttaacacttcagctaatctaatttatattacatatgttaactactaatgctagtaacttctagacctaaaatttgttaaaagttattatattaaattacataagatttgatacataattgtactaataatattaatataatatttaaagagagtttctcattttttttttgttataatttaataattgttgtggtataatttaatttaataattattataaaaaaattgataaatatcattttaaatattatgttttgtaaaagttattgatttgattcgatatttaataaattagaattttttttttgatgaaaaaaaaaaaacagtaacctaaactgattttttatcaaaataaaacttaatgataatttgatttagaggtcctataacaagtttggttatattttgtgcatttgttagaaattgtctttaagttggtcatattaaaaaaattgtaaaaaattgagctcaaaatactattttatactattgtgaaacatataaggtctaatttatcatttaacaaaataaataatccaaacggtaacttttacaaaatataggatttaaaataatattaaccccattataaataagtattattataataagggcacctaatagtacttatcaattgtcatatattgcttgtgtgaataatttgtgaaatatatattacacttaataattttcaaatgaagaatttgcacttaaaattaaactctaagggtgatgtataatgtgatcttcggtacatgctaaaatttttataaaatttagcacaaaatataaaatagatcaaatattgtaccacaataactatttgttggattaaacctccacttacactgatattagactcaatacacttaatacaaaggacagaaaaggaattacaagtaaaagccctaagttggccttcggcctctaaaatccctaacagaa

SEQ ID NO: 324388 - DNA, 930 bp, Cannabis indica
tagcttatagcaggaaccctactaaaacattcattaacgagaaatttcagctagagctttttgcaaggcaatggactaacttgtttgcagatcgttttacaaaacgtaaaataacattactaatagaggaaagcaacacacgacaatcatgaactaacaaaccaaactaagaaggaaaagtaagacaactagagatagcttgaacacacacgaggctgtttgtttcaagaataacacgaggccacatatgctctttaacccaactcaaagcctccttaatacccacaatctctgcaaggctgaatttttccaccagcaaaatcgcgtgctacagcacccattgcaaaatgctcctcttgttgaaaattgctccatcaacattaccttcagagaatttactattcatgttaccttcaaagaggtagaaaagaaattacttttaaaacaaaaatattgtaaaaataaacaaaaaaaaattctaatatatcattccctctttgcgagtgaggaaaaaagaaatatttcctacgattgaaatgttcctccactcatatcgaaatttttgaaaaataaaaattctaaaaaacaatataaaatatatcaccaacctcctttgaatttaagggagaaagaaaaaaaagtttctaattgacattttcaatcccaatttcagcgattgagggaagaagaagaaagaattctaccattaaaattttctaattatggaatctatagtgactagtgttgggttgtctgccctaaataaaattcaatttaatataatcagatttactaattaataaaagatcggaaatcattttatgttgcatggttcacatgatttatttcatgattatgtttattatataaaatctattaagtccagaacatatataaaaatatatatttgttcatgattatagtgtcgtc

SEQ ID NO: 324389 - DNA, 804 bp, Cannabis indica
aaggactccaagatactgaaaaggtaaaatgcctttggtataaccctccacaatgtgctgaatctcattattaggcataccggagcaataaacaataattttgctaacattaggacatctccaactagactctaaaatactaattaaatatagtgtagtttcacactatatttacttcaatgagacactaaaactatactcataaatagttttgtctatagtgtcctatcaaatttagtgggacactgtaaaccacactatttttatttaaatttttaataattaaatgatacttttaacaaaaaaaaaactaaataattatatatatttattattaaaatattcttattattttaataaaataatgaataatataattttggtgtaatttttagtattatgattagaattgagaaaaaaaaataatattaaaatagtaacattttagtattttaacttttcccattagagatgacgttagcttaattgaaagcctgaaacttcatagaaacaattaaaagttctaagcataagcttgataaatactccttatattgacaaaaaaaaagaataaatatataatacaaacaaatatatttgctcgaaaaaaaaaatacaaacaaaacattttagataaaatcggcatgcttaactaatagcagatccatgatttaagttgagaaaagaacgtgtatttttgttaggggagttcataaaatagtcgctccaatccaatccgtacgattcaatccaattcaatccgcactttggaaaattcaaaatccgcacttgtgtggattggat

SEQ ID NO: 324390 - DNA, 716 bp, Cannabis indica
aaaacgattgtcgagtctagaaaatatagctataatttttcgagtaaagaggttaaaccgtaacaaacataaaagtataggaaatttggccacaaattacccttttattatctagctcttttcatcactatctttttttactctgtgatgatcttcaccattttatagatttgtaatccgatcgatcgagattattatttttaagagatgaatattgctattaggcattaataatgtttacaccattatagagtatatcaccttaagaataagagcattattataagagactaactagtggtcttttaacaccacctaaaagtaacgtcttgcaattggttagttatattctataaaaaataatacattaaattaaaaaacaacaataaataatgtttcttataataccaaaaaactattataaaaaaatttcataatattttttatgatacaataagaattactataatgttaataatcatgacacactattgattatgttttttatgacttatactaaaattatttaaaacttttttataatactttttaagtattattttaatatattaatatgtttaaatgagcattatttttattattttttataatatattttttatattaaaagtgttattgaataatttacaatacctcttattgagtattattttattacttttataagcttaaaatattattattattttaatttt

SEQ ID NO: 324391 - DNA, 1216 bp, Cannabis indica
caaatttcttatattgataactaatcagattgtaaagggttttatttagggcacaaaactcaacactcctaatcacttaagctatacccttgacagttacgatagaaataatattaactttggtgagataaattacgtataagatagaggtcttcaaattacacaagaacatcttttttctttttaaatttacttttgtccctcccttaaaaaataaaaatttcgcccctcacattaaatcttggagccgccattgagtacaacaataataaatattagaattgatttctctaggaaaaaaaatattaattagaaatatcataatttataattaatttttattttttttattttctatcttttttttttttggtctttggacaatttttttttttggtctttggacaattttttttttttttgttttgcttgtcaaagaactaataagattttatttgggttttgttatttcataatttattacttttattaatatattatttaatattttaccgtggttaactgaatcattttgtactgcacttaaatgcaatgtcgtttgcggttaataccaaaaatattaaccacgtggttaagatttttacttaataagattactatattgtatgagttgggttaaattgtttaccttttttttttttgactatttttctaaaaataaaaagtataattttcagtaataataataaataatttagttacaaataaataattatataaccctttctttttaatttcagataaatgaataatgagaaaattaaactaaaaaaaatgtatatatatgaaatgtgatcaatggtgtatcactgtctgtgaattcacgtttttgaagtactaattttcacacttatttatataaatatttacaatattacttattaactattaactatatgacataaataaagaatatctctcctttaaataaataaatagcacatattttgtaaagttaactacataaaagtaaacattatttactacaataaaaaattatataatataaaaataacattctaaatatatattagcaatttaattatttcatagtgacattgagatatgatgttaatcaaattttatatgtatgccgtttaagattagttttctcattattcactaagtaaaattaaaaataaataaataaataaaactatcaaaaataaaactatttatttatttatttgtaagt

SEQ ID NO: 324392 - DNA, 556 bp, Cannabis indica
acttttcattgtcctcaaagaatactaaaacatatatatgaatatgtattcatctcttttattatatttcagtcagctatatgatgaatattatatttgcataatcttcaggatatatgcaagattttattgaggacgcataatcttcaggatatatacaatattttatcaaggatacataatcttctgaatatatgtataatttatataaattttctctatcaaatcatagataaacagtaagagcggacaatatatatatgaattaaataataaatatatataaaacatatacatacatatataatatatagatatatagataaaaaagaaaaagaaaaaagaatttttaaaattgtattagtcagataagtatatatgtaaatatatatatatatatatctttagtgtatggtgaccttgaaacaatttaaaagctttaacaaaatatttattttgaagcttgaacagggactcgtgctgataaagtgttataaaataaaatagataagaagaaataagaagatgaagagagaaagagaaactgaatgagaat

SEQ ID NO: 324393 - DNA, 1731 bp, Cannabis indica
taatttccaaattaaagttaagccgtctatacagaggtgtagaatcagattgggcagagcctggcccaccataccttgggaatgggtatactcaaggccagccaaccctgggtctaaaacttgtacatggtcggccagccctaagctgggtagggcctggccacctacacttctctacctggctggtggagcttctgcattgacatagggtatatcacaccaattgttggagtttagtggatccaactatctgaagtgattaatttcacttctcaaattattgttctaggtgtttccacccactcccggtcgtcatcagttgaaaaataatctttgggtgactcgctccccttggggagggagtgctcttctttgcccggccatagggacttctggaagagtctagctagccatggggacttctagaggagtctggtcagccatagggacttctcaaggagtctgactggcactggggactcttgcttgtggttggctagccacaggatggacggagggggctgtttttgagcctcaaatccctggctggccccccatgccactggttgccgagatttagtaatttttcgacgtttgacctttgaggtaaggtttgtcctccctctagaaagagaagatctgtcttagttcatgaggaactaggttgattaacatatcaatacacactccctgatctatcaacaagtcttcctttaagtggatctctgatgagatccttgccttttctgtcggttctctagttgaactgtcttattagatcgctagcctctttgttattgagatctaactctgcttagtgagattgaaggatgtcctcttggtcatccatccatctcaggaattcgcgtctctgctgagcgagtacatcataatcagcagtgcatggttcttcaaggaattccatctctgttgagcaaatacatcacagtcaacaacgcgtggttcttcaaggatttcacgtctctgctgagcaaatacatcacagtcagtagcgcgtggttctttaattaggcctggacgacctacagcttccctgagtctggccaactcaaggtcttctcctaagcctacgtgaggctcgccaattcttagcctagtctctcctgcatagtactgggggtgaaactcggtttttgttcttgtggggtgccctctagggattcttccttcactcagaggcaccaatggtgggtctactcttggaggcatgggcctgccacttggatccaccaggatgcctgtattagtttggccattatagagtcctgccaagtaatcctagctactcatagacctacaggggaggtttggccgcccaaggtatgtaggttctagccacctaaggtgtgcaagatctggcaggtcaaggcctgcaagacctggtaggataaggcctactagatctggcaggataaggggctacgagatttgaaaaggtcactatagccctgtcaagaggaggccaggctcgtggtgcctgtatgctgcatgattcaccatattttgcaacgttcatcgggattccagttgtgattgggaacttgagtatgggtcttgagggagacccaaagatgcagatggtgcgacaagatttcttgtgttaaccattgcgtttgatcagatacgatatccacgctctcaatgaaagcaccaaattgctgacctcaaaaagtgatcaaccgacagcgaggtcgtatggatatgatgctt

SEQ ID NO: 324394 - DNA, 788 bp, Cannabis indica
agtatcataggtttaagatcatcaaaactcatggcttgtggtatgcctggtaatttacttactctttcgcaagcatcttacactaataagatgctaaagcactatctaatgactaattctaaaggaaatcacttgatttctaaacatagagtttacttatctaaggaacaacttaaactattctaaaaaagataaaaagtaagaaaataatttcttaagcatcaacaatgataggtcttgtgtatgcttcgttatgcaccagactagacacttgatgttgagagggagtcatgattaggtattagtttaattcagaataggaatattggaagacaatcaaattagtcttaagattaaacaggacctatatgttagtctataaaccctttaggctacaccaactcaattttttagatttgcattaacgctaaaatggctacatttgggatgatgattactcttgggggtggagcagtgacttttggagatgttcaaaaatctatccagagtccctaactccactaatgagattaatattacagtggccttgaaggctacaagagaattattcagaattgggaaagtttgacaaaaattttggcattattttaatcatggattaactactagtgttgcttcacaatagcacagatgtagttgtcaaatagtaaagaatctagaactctaagaggagtaaacatatatatatatatatatgaatatcacaatatcaaagattttgttactaagaaggatgtaatggtagagaaagttgataataaatacaa

SEQ ID NO: 324395 - DNA, 708 bp, Cannabis indica
tttttataaatggggttgaaaaaactgcctctaaagggtaacattgtagtagtgtagtactgttaattaattactaattatatgtattattatttgtttacatggttttttgtcaacttataaaagtaacgaaaactttgaattgattattaccggtcggattaaatattgatgatgaacatagtgagattttcatgttgtttagtgattaaatttacatatgggtttaaatagacacttatagttttgttaaataatcagttggatgctatatttttaaacatggtaaaaatagtatattataagcttaatttttgatatatatatatatattttaataaaactaacatgaagacaaaaattaatatacttagttttgtcatagtacctctacattaatttattattatgttttattttgacaaaaaattgtctcaaaaggcactattttagagaatgtagagtccaaattgatatttaaataaaatagaggacccaatcggtaatatttacaaatactacaaaaaattttactttaagtcacaataaaatttgtgactaaaagtgaaaaatttgtgactaattataaatcatgattcttatgttgtagctaaaaggtcaataactaaaaatattggacacaaaaaactaaaatttaattgtgactaaatgtattttaagtcacaatacttgttgtgactaaaacta

SEQ ID NO: 324396 - DNA, 1482 bp, Cannabis indica
tgcaaaatacaaggttcaaaataatttttacactaattaattttaaagatgtaattgttaagaaattaaaaagagtaaataaacctcaaagaaggaggaagcttgggaaataagtgagggttcctcaaggcttgtggtaaggtaaagagatataagtcatctttccaattaagcttttgttcttcagaaaatacaaaagtgtgtccaaagccttctacttctccaggtctctgccatagcttttccttctcctctatcggcattttgaacaatttttctacctcttctttcattttctctaccacagaattacttacaccatggtttaccaactgcaaattattattattactatttgagaaaattatactaataattcattataaatattaaggatgtataattacggtacaagttcttaaataggttcgtaacatttaagtacttaagttattttattagcgacgaaagcatttaagttaaatatgtagtagaatagaaaaattattctgcaaccgattcagttctaatagctaggtaggttgatataaaagacccgttgtagttgggttccaaatgaatctatgttcatattaaatgacaatatttattaacggcgaaaatttttaaaatactatgtttgtacataaaacttaagtatgtccaagttatattttcggtgcgtcaaatataaaatgttctaatgataactttaatacaaacataacaacttaaatattttcgacactaaaagaataacttaagatgttacaaatttagttataatttaagtattttcaccgctaacataataaatacaagtacttacaaacctaaatacttggttatatattgtcgcccgaaatattattataattaaatacaatatatatatatatatataattacctggaaaaaaccccagtctttgcatgccaagtggagattagtgagttcagaatcacataacaagttttggaaattgataacagggatttcatgagaagaaaaacatgagaattgagaatattggtttgatcattttggatatatttacttggaatagtcaccatattgggatcctttgctaattcttgcacactagttgcaatcacactacagctttcaaactccattgtatgttttcctcttaaaattttggctatatatagcattttgaagaggacatgtatgtatatataaatatacatatatctatctatatttggcacgttttttttagtttacctactctcatcgtagtgtaaaccatatattaatgtacagatatatttctttgtcatttttaatttattgtattgttatgaatcattgactttatatacttgtagattcctctgtttatactaatggctaattagtaatttttctccccgagttttgacatgtactaaattgttcgagggaaattagataaaagttcttaaatttaacaatctcaatagttcgaggaaattttta

SEQ ID NO: 324397 - DNA, 1153 bp, Cannabis indica
taaaggagaatcgagctcaaatcttgatagtactctgtgatagaaaggaacaatggttagagatttgagtggaaggagacatattattctgcagctaccaatgtaaggtttcctaaactttatatgtgtttaattccattaatttagagaatttatatttagggtattaaacaacatacatgttagtaaatttagattttaataaaataattttcagcatgaattgcaccacagatgaatatattaaggtaaatgtaattgcatctttatttaatgatggtcacaagtatggctttgggttggttccacgtgattcaaatgacttcttgattgaagggtgtgctcatttttttcatagcatggttgagtcgattctcgctgaagcaatgagtgtgtgggaggcattgagttggatcaaagaacactagtggccttaagtaacgattgaaactatttttttttgttcaagctttacgaagttctattgttaggtcatataatcaaggattgtaaaattgtactaagttaattgagaaatatttttattgtctttgttaaacgatcaattaatatggtggctcataatttttctagagcttctattttatatcttgatcgtcattttagtttagagtcccaactgatttgttatcagttttgataactaaagtgaaattggttaataaagtttgattattccattaaaaaaaataattatgttattttacaagttattttaaatttactgtaactttttttagaagaaatttaaaatttacatgttttatacttatttatattagagaaatgtaagtaaatggccatatttctaactctatagatagttaatgtcccttttttaaaataataaagcaaatgtccttttttactttttaatacctaaaatacccttcattatataaaaggtattatatgttttattcctttaatagaaattatgaaaaataataaatcaaaacctctctactgaatttttgtcaactattttttcattatataaaaggtattatatattttatttttttagattttgctgcttgttgttgttgtctaatatgttatttaaccatataattaatttttttattaatatatcgtatgatatacaaacaatataccttaaaccaatata

SEQ ID NO: 324398 - DNA, 1083 bp, Cannabis indica
atctttttacaaacaaaaagtttattaatagtaacaatgtagcatctcataatgatagtattttatgacagcattgtattttttttaacaagaattaaatgtattaaatatttagcgtttttagaattaggattgtattaaaaattgggtcaaaattgttagtgttaggaaataaaagtttcagcgctagaagaagaaaaatttagaactagggttaaaattatttggctaaatttgaacttatagaatcaaaagattatttggctaaaattatttgtttttatgaaattagggttatatgttctattttacagtatacattatttaaaattgtcattgtactgtcacaaaccgcgcgaagcgcggatttgtttcctagttaaatatagtttaaagtaacgaaaaagtaacaataaaaaagttgatttcaatgattaagttactaacaagtcttaaaagtaaatgttcaaaaaaaaaaaacttaaaaatactaaacaataaacatgcttttaatgggatttgaaatcatattgacctccaatatatatgtagagtaattaactgatataacaaagcttatatcatgttcattaatatcacttttaattataaatatatggtgtaactaattaaaatacgtacacattttttttcttgatttttttcatgggagcgattccccccacccccggccctgcttgatctgtgtggattcgtccatgcttgaatccaataatattaatagttctgagagaattttaatactctgaaatgttcaagcagcatgatttggtacatgttatgggtgttcataaaaatcgataaaccaaaaccgaccatcaaaccgaccagaccgtaatcgaattttcggttccacgttatcaccgaatttggcggtcggtttcggtttcagttttttggcccagtttcgatttttgaaataaaaaaatggttaaaccaaaaaactgccaaaatcgcaataaaccgcccaaaaactgccaaaaaccgtccaaaactgccaaaccaaaaaaccgccaaaaaccgtacggtcagttttatacggttatacactacaagaaatgt

SEQ ID NO: 324399 - DNA, 1220 bp, Cannabis indica
gaccactctaatctatacattatacatccataaatctagagtttcaattcagcaagtcgtttgatatcaataggataactgtctgactgaagttgagagttataatatctttttacaattaacacactagcagcctctgttaagtggaaagagtcccaaaataagtaggtttttctatcaggacatggacttgctgcagtattacacagacctaaaccatttaatgggcagcagcttttgtttataactttcctttctgaaaacagaaaaaagaaatccatgaatatataaaactacactctaatttttttttatatagatatagttactaatgtcatacttttctcaaactaaatacaacataattaattagacttaaatttgttataataaagaagagaaggaaataaaattaatttcgtacctttaagaactggatcgctagaacctattccaaagtaattgagataaatgaacttggcttttgggtaatggatattgaaatgttcaactaataatataagttcatggttaaaaaattgaactgcttcgttgactttttctgcgcaggtgcacccattccttgaccctgtcttttttgccaatgaatttatagcaaatggggtgcacccaagtgctcctattccattgagggcaaattttcttgcaccattgttgtataatctctggcaaatttttaaaattgaaaataaattagtaccaaatatataggatagctgtctcacgtttcttacaccttaataagtatcttaattcttctttttttattttatatacgatgttgcacatatgatatagcaactcttttattagttttcaaaaaatgtaaataatttgtgctgcattaattaaagttcaaaacaatttgtttcacactcataatataaagaaaagatatgattgtgtgaaaaaacattcttttaatactattaccagcataatttattggaaaatttataaaaatactagaatttgggttgacttttacaaaaatactgtcacacgaaaaagttttaaaaaatactgtgtttttataaaacactagtaaaacacaaaatagaacaactcaaaacaacagtagaacaactaaaaaacacaagtagaacaccagtgaaaacttaacacaatatactgctgtataaaacttataaaaaaatacagtaaaaaaataaaaataccgcataacagtatttttgtaa

SEQ ID NO: 324400 - DNA, 741 bp, Cannabis indica
aaaaaaaaaaaaagttggtagttttaacaaatttaaaactatagtcatccaatataaaacgaacacttggagatcctaccaccataagatcgtataattccattataaataggaaaagtcaagccaaataaaaagaacctgatcaaagaaagctctcttttcatcgtcatcaacccctggttccgcccaatgcttgaacaaatgagtctgtcccaactccaacaacgtcttggcaagctcaacctggcaaaaaaccgcaaatttacagaatagaaaccaatcatctccgaaacttcacaaaaaaaatcataatcatttcactaaagaaaaacaaagaacaataaagtgtggcggtacctggtgaggagaaagaaggtggagattcttctgaagattaggcgcagaagattcgaaatcaccagtgatatggaggttggtaagagcttgagcggtggaagccatggatgaagatctgattaatggatgaaagcttaagcttttacgagggagtatatatatatgaattttgaattgtggatctgaaatatgaaattgagtttgatttgtttatgggaaaagttccgttgttgcatatcagtagaagtttgagtacaaggacaatccaccgttctctttcttcattgacaccttagattctctaaatcctattttttttataattatatggtactttttatacgtaattatatgacaccaaacttcaaaaaaaaaaaaaaaaaa

SEQ ID NO: 324401 - DNA, 1335 bp, Cannabis indica
agatattagtagcccagaagatctctctctgcttataacgttttttttcattttttctgggtcattactataaacactaccgagcaggaatcatatcctaataatttattaaatatatcatatgtcaatttgcaaatgttactgtgctctataacatatacaagctgagcgaaaaatataaaagtagtgagtgtgagtgtgagtgtatatatggctagagggatcaatgaagagaatttaaatatatattatgatgtcaaaatcataatcattcggcggcaatgagataattatggcttcatgaagtcgtacgatgtacactacacacacccatatatatcgatctgtaaattaatttacatgaggggggtatcgcatccctagataaaattttaataaagttgatcgattttgctaggtggggtctcactgtctctacaaggatgtccaaaaagagaattaataatggaaaaaaggttgtggacataacccgttgtgtactattgtcaacaattaaaaagtgtttatagcagagaaaagaaatatgagaaaagcgctctctattgattagtttaggtgttgcactttgaatttgattctaattaatccaaaaaaaaaaaaaaaaaacaaccttccatatagatgtatatataatataagcgacaattataattagtctcattttgttccgcagggacatttttctttttgtcatttagagaaaggtataagtataactctatttttttttttttatatgatgattattacattatattatagtagctatattctactctatttcaaaaaattctaatttataaagttagaaacagagtttaaaaatagttacttacaccgtaaataaagatttttacacccaaatttttatatgtattaaattatacatttcgaactttttagggcgttacgattttaaattctcctgaactattaggattgttaaattttagaatttttgtcctattttactaaaggaaacttgatgatgatgaaagtttagggacacaattttgtagatatcaaagtttgagtgcatgatatggtacatacatagacaattgtcgcattagtaaaattaaacgaaactggacaaacgtccttgaatccaactatctcccaatagttcggaagaatttttaacgatctaaaaaagttaggggaaataaatcatttgtccaactatatatttgaaccgtgtttttgatgttgtacataattctaatttttttaaaacaaatatatatatttgagtaaaaatcataaaattaataaattaataaattcgttcaaaacagtagaacgcacttcaga

SEQ ID NO: 324402 - DNA, 976 bp, Cannabis indica
ataaaagaggttatcaagaagacataaacattgttaaagccaatccctgggtctcatagtgaaagtccccgagtcccataatcaagttccccgggttccacgacaaaggtcctcgggtcctatgaccaaagtccttaggactcatgatcaaagtcctcgaaactcatgaccaaagtcctcaggactcatgaccaaagtccacgggactcatagccaaagtcaccgtgactcatgaccaaagtcctcaagattggtgaccagagtctccaagactggtgaccaaagtcctcagggctggtgaccaaagttctcaggactggtgaccaaagtcctcaagactcatgaccaaagtccccaagactcatgactgaagtcctctggactcttgacaaaagtcctcatgattcatgaccaaagtccccgggactcatgaccaaagtcctaaggactcatgaccaacgttccacgggtaccatgacgggtcagaagggctgaccccctaagctcatcactaggccgacccttaagggcctcactgctagggcggcccccaaaggcctttccactgggtcgaccttcaaagttcagtaagaccgctctcgtggacttgggtccaaatttaaatgcactctcatgctagacacgtgccatcaaagctattctgaaatatctacaacaaagttatctattttcaaagatatttattctggaatgttattttattattattttatattttaaacttaactctagttaggaaaaaagatatatcaggttaagaaaccttaagccctatgatgtaagactatataaaggttatgaagttaattgtaaatggactatctcgcttacactctttcactttataaaatctcttgagaactgaactcttgtagaatataattttagagaactcttcttgagcattgggatcaataaaattacaagtggactagcctattaccaccgaaagggg

SEQ ID NO: 324403 - DNA, 1342 bp, Cannabis indica
gtactctgtgtgcaggtaaaggaaaaactaaacagtgaggatggtgaactcgaggtgtggattacatgttaggggattatcacgatgttttggtttagaaatatatatttcgttaaagattatgactcgattacttttgtaagagttaacgtttaaaatttaatgaataaatcaagtgtttttgttttaaaataatgagatcccatgcttttgttattttcaataaattagattattgtttttgttataaatggttttaaacgaactagcgagtgtgacgtctcgggaaattggggcattacaataattctataattactaagagttcaattacatatatgtactagagtaatcatagaattaaatcattaataaacaagattatttggttgatgagactcaataaataatttagtttattcgagtttaaaattataagtttatggttactgaaaatacagaaaattatgtactaatagcaaagatttattctccattaggtaggtggaaggatgcaaaaaaacttgagactaattatgagtgagattgggtaaagaaaatcaccagctcatagtttgattgaacttagaaatatgtgaattgacttttggtaacttagttaataataggcatatatttcttttgtattttcattaagaatatacatgattaaacagttttgaaatctcttatttatctcttgagtttcacatttgtatttgaattttactacagcaaccaaaacaatagtattgcactattacagagaaatttggcaccaccagatttttttttttttcctaactaaaataaatgaatttcatatatatatctttttctcttttcaataagatggctcaagccacgaaaagtgattctcaactatgaaattatggagcccttaataatttaatataaaattttgtaggcaaaattatgggggccataataactttatatgaaattttgtaagtgtctcattgtaaaaaaaaaaaattaagtttagtagaaaaagttctattgtaatatacaattcatggtcttttcttttaattttaatggagaataaaattaaaataaaataatgtagtgaccgagattcaaacctacggtcgagaaagaacaagggactttcaacaagtgtagttaccactacactagttgaatactttattttgtattattatttattaagttttatcatgtaaaaaagaattgacttatttttttggggctcacatattatttttttttttgctaacatattacattattgctcacatactcagatcctagacttggaaccaaaattcaacatggacccggataggttcatgtcatg

SEQ ID NO: 324404 - DNA, 1721 bp, Cannabis indica
tttatgattgtacccttctcatttaacgattttttttttcagatctgaaattgtaccttggttgagaacaaaaatggaggagatggggaaattctggtgcggctggaaacgaaggagaaagaggaagaaggggactgttttgctcagtccgtatttttgaaaaaaaaaattttgtctttccttttgtgtttatttttttctatactaagataaaaatgtaaattttggatctaaaaagcctattaaggaaaatatcccttgttgttatatatgtgatcttagtgattaattaatgttttatacatacatttttttttatttactgattagaattatttatgaatttatgacgcagacgttcgataccggcactggaacctactcgaatcaggatagctcatcatttaactgcagaacatgctttgccaagccatgggccgctaaattctcagagcgagccacctgtccccgaaaatttagacaataaagctgtaacatcttcaaacaacgctcttaactcgttaaaatacatctttcccttgttgatggtcgtcaccaaagctcacaaatctgaataaattgcatgaattgaaagaccacacatatgagcctaattgagaccaaccaacagggctaaagtttcagcctgtaacactgaaattccacctgaaaaaacatcagaaaatcagaaaaaaatttacttaaaaaattatcaagctgatcaaaatcaatcaaacaccaaaaactaaacaactagaccccctataaaaatactagaattagccaaagagaatactttttggctagtagcaactaaactcttgcattttacttcataatcatcttaggatcactatccttactagaccctaagacctaaaaaagattttgatatgtaatctagtaacaacaaataagcccttcaatgctcccataacctaggatatcaaaaagtttcctttggaaataaacaaaataatgaaataagcaacgataatatttttaatgtactcactatgattaacctttgaggggtttgctcaacgcaccgtgggctatattatcttctgacaatataacaacacctaatccaactaagtttgtggtgttcaataccgctgcatccaccataagtttagagtgtaaactctctttttgggcacctctagacgttctagccaaagctcctctccttccattagtttggagaccttttttggagccatctttcattgaaatgatcgaatcataataactaattatccactcaaccacattttatgattatcttttctgttggccatgggtaatcttattccttttcgtccatattatgtaagaacacataattaattttgattgcctgaaaatatataaatgccaaggcgacctaaatttatggagcctcttattttattttattttttaattcgagaaaaagaagtagaggaacttgcatttgcatagccaattgccactatgctagagttacttattattttatgggtaaatggtggcaaaactcctaatacttttgttttggtttcgttaaactcatacaacccgaatttctgcgggtaaccccaaaaccagaaactgttagcaatttaacacttccgtccaaatttagtgttaactgccaggttggattgtccacgtggacacaataaacacgtgacacaattttatggtccacgtaaaaaaatatttaaaaaaataaa

SEQ ID NO: 324405 - DNA, 530 bp, Cannabis indica
ttggacacaaaattgctccaatagaacactaaatgctattctataaacgtgggagtgtatagtgtcctactatttttagtagaacactatagattatagcaagttttttttttaaacattgaaataatatgtttatgattaaaattttatatttatatacatattacagtgtgagataatttaataaaataatataataataaaaaatatatttttttagtgttatagttggaattggaaaaaaatttagtattaaaatagtatctttttagtgttaatgtaacactaaatttgagtatccccattagagttgccctaagctaaatttaaattctaaaagaaacataatgtagaaaaaaaaaatcttattttgttttattattattttttttttttggtcaaaatagattgctaattagtcaattcatatatggggccaccaacttgagaaagaactaaagccagaaaatgaaaccttttatgacaataaatggccaccaactttttttttttaagggaatggccaccaa

SEQ ID NO: 324406 - DNA, 1489 bp, Cannabis indica
attttttaattttttttttctagtgtaactctttttagttataacctctcaactagaatataatttacttggtcccaagtgtattcttggatagagattctactgcattttgatattagagactttaagaactattggaggatcattgaatcttacagataattttttcttattattttaattgttgtatttaaattttactttttttgatttaatttattttgtaaaagttaaatccttacaccatttatctttttttggtgtgtttttgtaagttgttcatctagtcttcaaaagagaaaagttcacattcatgcataagatctaaacttaatagtaacttttcagtcgttcaagtagaaacattagcattaatggtaatgctgaattagtctcacaggcttggtcttcctctttattttgtggagtctgattctttagttttagtttttgctttttcaaagcattcatacttttgtaatgagttgggttctttgttagatgattttgttagtttgctttctaattttcttgaggcatctctagttcatattcatcgtatgactaataaggcagctcatgaattagttgtgcatgcacttaggtggatagtgaaagaaagtttgagttaccatacttaaatgtgaagcatggtccctaaatatgccactacacaaaacatcaaagaaaatatggtggtgtgtttatttagttccgattatacactttaaataataaaacaaaactcatcttaacaattttttttctccctctctctagaaagtcacacacacgccagaccaaaaaatatgctattatgtgtatagtttgtttttaatagatttacacatttgtgtttgtgttttgttgattttttttgccaaaaatagaattttgaatttttttgtatttttttgtgtttttgtctctagttctcaagttttttgcgataatttgcgatatgtagcgatgtatttataatgatagactcaaattgatgttaagaatgaagtttagcgatgattaataatattttgcgatatttgactaaaataaatgtttgcgtatttagtgatgttcagcaatagcttttgtgatgtatttacgatatgagactaaaaactgcaaaacacatgctaaatgtcgctacattacactcaagttttcacgatgattaatgatgattagcgacatactttatatttttttagtctcatatcacaaatactagggctgtacaaaaaagtttgtaaaccgcctaaaccgaataactagcccaaaccgaaccgaaaaaaccgataaaaattacaaaccgaaatatcccgaaaaaattacaaaccgcccaatctgttaattgggcgggttgaaaataggtccaacccgcccaattaaactgaccaacccgaccaacccgattttgcaccttattttttttttaaactttttagtttttattatatataatataaatgattaaatatataataat

SEQ ID NO: 324407 - DNA, 1981 bp, Cannabis indica
atgtaattattccaaaaaagaaatcctaaaatgtaccagtagtgtctagcaccctcttatgtgtcaatatcgctattggtctaattaagtatcggatctcatatagtttaatgcaataacttttaagaaatatcgttagtcaatcgcaaaacaacatatctataggtgctaggcaccactagtgcccaataacaatgctctttaagaaaaactatattctaatattctaaaaagtgtgctaaatttgagcattgagtcaaatttaactcacaataaatactacttttttttatctcttataatgccactaattattataattcggacataattttactaaactttatattcattatttaccgtattaccattatttaaataataaaagaataaaaaataatattttttgtatgctctcaataaaataggaaatgactatcaatataattaattattttttctttattttacatcttgtacattggagtacaattgtaaataatgggccaaatataacacactcatcttttgtaccaaatttagcacaaattttagatctttcattagaaatggtataatgtattattgtttatttttctttagcaaagaaataaaaaaccaaatcataactatttttcttcttttttttatagtctgttttatcaggttgtagtgatgaggaatgcatgaagattttgaagaattgtagagaagcaatttcaaggaatggtggaggaaaggttctcataatagacaataatgtaatagatagcaaaaaagatgaacatcaagaaatggaagctaagctctactttgatatgttaatgatgagtgctctgactgggagagagagaaccaaaaaagattgggaaaaaatcttctttgaagctggtttcactcattgtaaaattacacacatgtttggtttaaagtcactaattgaggtttttccttaattaatgatggaataattaaacaaaatgagtatgtgtgtcacccttgaaataaacatatgatgattactattgtgactataattgaacacaagaaaatcatcaatatgcaaatgtatcaccaagggaaataaatatctactagttctttatttatttatttatttattttgtgggcttgggattaaaattgaatgtattaattattttcatattattgctactattggattaccattgttattggacatcagatgataattcttaaaagttattacattaaattatatgagaccaaatatttagttggaccaatagcgatattaatacataaaatagtctaaataccactagtactttttagtatctttttattaaaatttgtgtcatcaactatataattaataatgttattaattaattaacattatttatggagcgagatgctctattcaaaattgatgtctattttcctatctaattaatgaaaagagtacattacatgtcattaaatgaattaacagcagtaatctaacttatatcatctttatattttaatacataataaatgagattgtttttatccaatttttttatttgttttctattgacaaaaagttttttttgtaagaaaagcgtgctgttatataacataaaaatagttagatctcgcggtcgttacagaataagttatcgggcaaagaggatagttgcacagaaccaaacctctgaagagaaaaagtccacttagccacattatgtgctacaaaattacattgtctactaacatgctgaaagctataatttcttttacaaaatgagacatagttctcaagctcccaacgggactccttcccattaagagcattgatcgctaccctcgaatcactctcaacaatgataaatttaaatcctcgtgctttagcttcctccatggccaaacagcaagtcgtcgcttccccacatagagcatcagcaaactccagtttagacatagttctcaagttccttattattattattattat

SEQ ID NO: 324408 - DNA, 1622 bp, Cannabis indica
aaaaagtaaggttctcgaaattgccccaaccggtagaccggtttccaaccggaatttcagttctgtggggtttcctggggaccaactggaatttcggttcctacaggtccctctgaaccggaattttgattcagctcaggaaaccttcaaaaattcgccacgaccccaaatcaactccaaacactacaaaaacttccagacctgctatttatagcccatagaataaaatcaaagcaataaaacacttctataagctcagaatcacaatccaccattagagctccaagtttgagttcaaaaactcaaaacttgattaaactaaccaacaaccattaaaacaagcttaaaccaacatagccaaacatataaaagcttctgaaaacaaatccaaacacaaacagcagctacttaacccaattccttaaaatcatgcaaaattcctaactataactcaagaaaaccaagaaggagttactagaagcttacctaaagcttatacccaccaactccttgtgaatttagcttgaatttcagaaagaaaccaaaccctagctgcttctatggggttcgaacagagagaggatggagagataaacttgatttttacttctattttgatttttagtaaaaagtgagtataacataagggttttattaaatactagtagaagaagcacatgcaaggcatgtggtgcggttgggtttttttaaaaggttatataaggttaaaaaatagattaatctttgtttaaataatataaagtcaaactgactaattatatatatatatatcttactctaaaattacataacacagtaagtgtaaaataagaaaagattaaaggtaaactgagacaaatatacaaaagaactgttccaaggtagtacttgctataatatatacattccaaaaatatattagagagaagtaacctttttaaaagtgaaaagttatcagctgctattataatttattctaaaattattgtagcagctgatgtaaaagtaacaaaaggttaaagctaactgagacaagtgtttctcactctatacaaaagaactactacaaattggtagttcctataatatatacattccaaaagtatattacagagaagcaactattttagaaatggaagagtcatggaactaaattggtggaagtacttggatgttatcaaggagttgttcgacaatgtacttctgctccattttgtggcgaaattcatatttggaagtcttatcttgatgatatacttctttgtggtggatatgttgataagattttcaacactcaatattccatccttttataaagtagattataaatgttaggataatttagatattcacttagtaaaggtaataattaaataataagcactatatcataatatatagtaataccttagtggtttcatccatcagcttttttgcggtacattctaagaaagtttcagcaatttctccaaatattgtagcaggtaatgtggcagttgagtcatgcatattgatctggatgcaacatctagaatagggaaaaaaataagctggtatgtataagaaagtatttttttttttgcagttaagtgtgtttaataccttgctactgctttttgttt

SEQ ID NO: 324409 - DNA, 702 bp, Cannabis indica
ctctctctctctctcgcccaaacacacggcgcctcaaccaaagaccacggcttcacctccacgacctccgacgaccaccgacgaccacccacaacctccgacaacaccccatgaccacgcacgaccacgaccaaggacccacagccctgacaatgtcgaaggttagttttacctcattttgtctattaatttatttttttgcatgatttagggctaaattgtaagagattatttatttttttgcatgatatggtgtccgatgttgttttgtgatttttcagatttgatgtcgtccgattgaggtccaatggtatagggggttaggtccgatggtgttagatttttcattttgagggagtggtccgatgccgtccgattggggtccgatggtctagggggttaggtccgatgttggtagttttccatttttgagagtcgggtccgatgcccccgatggacccccgatgtggggtccgatgcatcggatcatttttaaaaattgagagtcaagtatttattttttattgtttgattttttattgttttatttattattgttttattttttattgtattatttattattgtttggttttttgttgttttatttattattgtatttattgtatttttattattattttttgtatcttatttgtatttatttatttttattttatttgtatcttatttgtatttatt

SEQ ID NO: 324410 - DNA, 1568 bp, Cannabis indica
atttttttattaaaaatattttcaaattttgatatttagaattagttaaattttaaatgttattttaaattaaatttgaatattttgatagtttaaccagatgagcattttcattaattgcgaagataaatttaggacgaataataattttttttaattactattacaaagtataatagtaatttttgtttttattccaatcactattatgctttcaaatttcaatgattatcactacattgaatattattaattttaaaattatgatattaaaaaatctaaaaactaaaataaaattaacatacgtgacttggcacgtaacatctatctagtttaattgttaaatgcataaaacaatcaaagtaaccaaatgactggaaacattaataagcattaagcaacacccaatgccttgtcaaggtcgcaagtatttagggtgtgtatggctgggggtaatgaaatggaaatgaatcaatttttatttcattcttttgtttggttgagcattagaacgtcatctaattaaacaaatcaccattttactagagtaactttcattcaaaaatggaaggaaagaccatttcaatataagatgagaataataaaaataataattttttgatcacttttatatgcattttaaattttatttgattctattcctattctcattcttatttttgtattttcatttctccgaaccaaacaaacctgaattgcttgatttgcctcctctggtaatttcttttgtccacgccgtacacgtagcttccatatcttgcagctcttgattcaaatttgcacattcaacctaattacatacaacgttttaccacaaactagacaacattgattactaggaaaggaaaacaaagaaatataagaattatagtgattttgattacctcaagcaaagccactttttgctcaagctcagctgccttcgcagtcctctcatcagctgtcctctgttgtaacaaagccagtacacaagcaatcattacaagtagcaggcacatttagctggttatttatttatcacgacattaagtgacaaacataaagagttcttacattacctgtatccttgcaagagcagtggatgcatctaaggctctatgttccaattccacctccctttccataaaagcctgttcaataaaaagttaagcaatagaacttaaatgaaatgaaaactaaattaaaaccaatagtaatgtctgatacaaaccatttttgttgcattgtgtgcagcacgctcttcttccgctcttcgttctacagaagctagctcctctcgtaaagcctaatatatacattcccatttctttcacaatctcataataaaagcagtacgggcaagagtataaatgaaaataatttcatgtgacagaaagaatcacactgacctgcatcattctcgtttcagtaagctccctatttctcataatagattccatatttgcctggcaaaacaatatcaggctgttatcaaaacttcaagttgtcaaaactagaaatcaggaacaatctgaactatctgttctatggagagagagagagagaga

SEQ ID NO: 324411 - DNA, 1203 bp, Cannabis indica
aacctgattatgaactgaaaaaacaataaaaataattaacagtgaacccaaccctaaccccaacgccaaccccaaccccaatcccaaacccaaccccaaccactacctgcgaacctaaaccccaaccccgaccactgcctacgaacccaaaatccgcccagcgctaccccaaaaaccacctatgataacgccgatgaactgagacctgtagagagagagagaaaaatataattcgaattaaagtcaaatctaaaaaaaagatccaagaagacaagaaaacacaacaaaatagggtctcaatatctctagcttcggcaaccatagagctgaggacgactctagcaaccacccacagcaaaagccccccttaaccgtcgacctgcataggagagagcgagagcgagatagagctagtttaaaaaaaaacccaacgtttacctgggctttgaggggccagagatcgcaatgccacctgttgccagttgttggaccgtatgggctatgcagtactttttatgttgcgtcgctgggacttgggaggctgggaatggcaatcgactgggagttagaaggtttctctcgtgcaagagctcagttaaaagcgcaagggggagattaagaagaaagaggaatatttgtgttgtcgagcaaatttcacaacaccaaaaatgaataataataataataagaagaacaatatgatgaacaagtgcgagtattcaacctagaacggcgagtactcgaactgggaacgtaaatgcttaatgaaaactggaaatatcaagaaaacaagggaatatagtggttcagtcagatcacggtctgcttagtccactgttgcaaggatttcgtaggtgttcatttcacggcggatcacccctttatatacaaagcaagtgtccaattatttacaaggattgcattcattgccaatccgttcatacattgatttacaataattaagctaaaacgtaaacattaataaatgaagaacagtttctattcactaaatacagcaacatatgcgacttttgatgtgcgagttggctgttcatattctggtgtaagctcgcgggcgttaggatacacctaacatttagttaagtctggaatgtctgcgttcttgtatagtctcaacttcggaacatcgtataacgagctaataaaacctaagacacgcgagtctgtattggtttatcgagg

SEQ ID NO: 324412 - DNA, 1021 bp, Cannabis indica
atcatgattatattccactgtgctgacgacactataatcatgaacaaatatatatatatatatatatttatatatgttatggacttaaattgaacttatacaatcaacataatcatgaaacagatcatgtgaaccatgtaacatagaataatttctaatcttatattaattactaaaattgattatattgaaatgggttttatttagggcacaaaagccaacaactttagcctttcttcatgaaagccaaagtctgccacataaaatttaacatgattcttacaggcacatggtttttctgtttatgaaagatcactgagggttcgatacgtcttcaacactccttcttagaagagaaggattgcttgaagactttcatacacccattgatgtttcacaccctttggtcttttaacgtaaaatcgtcccttgaattttagtgggaccttagcctttcttcacggaatctaaagtctgccacataaaattaaacattattcttgcaggcaagttgtttttcagtgcatgaaatatcactgggtgttcaatatgtcttcaaccctccttcctagaagagaaggactgcttgaagtctgtaacacgcccattgatgtttcgcaacctttggtcttttaacgggaaattgtcgcataaattttaatgcgattttatgttggaattattttaccaggatcttagatctactcacaagtatgttgattaacaacctaaatatgaacttctaaaatgaatttaattaaaacacatataaagtatgagaaaccttacattgggtgcagcggaataaaatgtctcctcccactcagatctctaacccttgattcatttctgtcgtagagtataatcaagatttgagcccgaatgtcctctttgttgctctatcacttagagggatttcgaaaaacaaagaagaaagagagagagagagagagtggcggctcaggagtgtttgtgtgaaagaaaagaatgcagtaatgtgtgtgtgaatcctgaagccttt

SEQ ID NO: 324413 - DNA, 679 bp, Cannabis indica
aatatttatgctctataggaaagtttacatattacctttgtgaattgtaaaatattattacaaattaaggtttgaagttatgatcaactattctagagtttgtaatttgaagttttgattgaaatttattgcgtgtgcggaacgctaatttaacataatttcatttgatgcatttttttttcaatcaaactttattaaactttaaactctactactaaataagtgaccaaactaattggaatatccctcatatgaaaaataccacaagaatataaaaagttcttgcaaaggaatgaactactacatttgttgaatgcttaataaacagaatagaaatatatttcaagagacacgattttgtcccgttagtgtactttaagaaatttattctgtgatgtacggcagtcattggatagagtggttttttgatctgagggttggagttgatgtagaggtatttagaattaaaaaaaataataacctattatatatgtttttgaaattaaaaattaataaatttgaaaaagttgaaactgacacgacctcatatcaaccgtcctccactcttctactaccttcttcactttctttctttttcattttccatttttcgttttccatttttcatttttcgtttcaactttgggcaaaactctcattttccattttcgtttcagct

SEQ ID NO: 324414 - DNA, 1176 bp, Cannabis indica
aaaaataataaaaaaaaaactcttaagttggtttggacgattaatctgaccaaactgtcactggggtagggttaatttttttttttaaaaaaattgagcaggttggacttcaaattttataattcgatgtttatattaagttaaaaaatatgtagtataaactaaccaaactaaccgatctatagccctactgataattaccacctttcaacttaatttgatacctcatacaaatgttccctttaaaaaagtgacaattaattaatgtaacacattcaaaattcaaatggttgaggtaattgattaattaatttggttcaatatgcaataaataatcttataataataataaataactttaattgttcaaataaataaaataaaaatttaatttattagtatgacaatcattcaaagcaagctttgcaaactcattcttaggtataagagccaaaaaaagtcatatttattaattaatgtacttcacaaaattccctgcaaaatagaaaaattcttgttagactgaaaataaatcaacttttttttgtttggttgtaatgactattttatttaaaattaagagaaactattccaacaaaataaatataatattattttatcaattttttaattcatatattaaattttattttatatattcgtatttttattatcatttttgtattttctattctctttaactaaattaaaagaagtattaattactttataataataataatatatcattaaataaacttgtgtttggttaaatgatttgaacgcccaccaatattattttttttatttttagaaacagtaccaatatttatttatttccctacatatacctatatattcaatgttcaatttttgttaaaagttatagaaaatccaatttaataatgtgtcacatgatcatgtattatattgcaactgtatatttttatatatatttgcactttaaaaaacttgtgtgtgaatatatatttaggtacgtgattgacttagtaataataataataataataatattttgaatttgatatggcgttataatgattgatcaacattattgtgtgccttgaatatatcaacaactaattaaatccagtagtactaattaatataaattatagggatacgattttgtcccgtgatgtactttcacggaat

SEQ ID NO: 324415 - DNA, 869 bp, Cannabis indica
aaacccaacagtttcttcatcacaagagggtcgtcgcgccaacttctcaaattcacacaacaacagactttttagagcagtaccaacaaaacaacagacatcaaagctccttggagactcctctggcgtctgcaactttggacagcgaaactcccccaatttttcgactgaaactctcagtcgatgctgcccagaatgcaacaaccaacaaaacaggtcttggcttggctctatacaacaatcatggggacttggttttgactgtggcgtcaccttgggacggaattcaatcagccctgttaatggaagcgcatgcactctatcatgctctatcttggtgccaaaaacacaacataactccagattatattgtatcttattgtataactcttgtggattatatttgtaatgatgctacacatcatattctcttgaataggtatgcaacaaatatcagaagcttgctgtcttttctccctaatgttactttcaggcacatcccaagacgggataatgaagatgttcatcgccttgcaatgtatgcattaggcttagatcaggaagctagttggaaagctcaaaatttttctctgtaatttgtatcctgtactctattgttctttctgcaatggatacatctctttatttaaaaaaaaaaaaattgcacaaagtacactattaacgctagaaaacggtcattgactgatagtatcatctgatgagagacaatgaacaccagatttttatatttttattaggggtgttcataaaaaccgaaaaaccgaaaccgaccatcaaactggccagaccgtagccgaatttcggttccacgtcgtcatcaaatttggcggtcggtttctgttttttgt

SEQ ID NO: 324416 - DNA, 505 bp, Cannabis indica
ggaatggggtcacgggttggagggagttattgtgcaacattatagttctctctttttaacttctggagcagactttgatgaggtgatagattgtatacagacaagggtctcagaccatatgaatgaagagttgaatcaaccagtttctgaggtgaagaaagctgtttttgatatgcatcttgataagagtcctggatttgatgggatgacaccagccttttatcaaaaatgttggggcattgttagtaaggaagttgtctgcttagtccaacagttctttaccacgggggagtttgcaccaggttgttgtgaagcaaatgtggtactgattccaaagaaaaagagacctgaaagtatggctgaccttctgtcacgacccgagccctaggctgtggcagatgtgtaatatccataacttaggtggtcaaaagtcacactttgactcttgtaggaaaataaagcttataaatgatccttttatatatatattacaaaatactaattt

SEQ ID NO: 324417 - DNA, 1086 bp, Cannabis indica
ttaccaacgcatcactatctcgtgctagatctaattgagcctcacaataacatcctctcagcctctcagcgtaagcgaaatcatttcgttaagaattattgctaaaaaaaaggtggtaagaaatcaatggtgcatcccttccaaaatgagagtatgataaaataatattgtggtaacttgcattttcaataatccttatatgatattttatatttatacatatttaatactctaaactcatatttaattaaattatatttatacaatcaaaaagttttttgttatacgagatttagttaaattaataaaattttatttaaaaatattaaatatgaacaatttcaaaatacaaaataccaaaagagtattatcgtaacaaaattatatttgaaaaagataaatgctccattaagagagagaacatattaatattgttaaccaatcgcaagcttgtattaacatcactggtgtcttttagtaaaccctcttccaaaaaagaatactaagcgacacatttaggtgccaagtgacaaacaactattaatacatttcaatatcgagtcttgttagaacatatttatgaattattataaaataaaaaagtgcattttgaattccttagaggactagtcccatattgcttggaaatatttatttataagtgtatatataggttagatatgagcaattaggttggtctccaagaggtacacacttttgtagaagaggagggagtcatacaaagactcacctgaaaaccacacaagcgcgtgttgccaccgtctgaccgaccttggctagtgtggtgtgcaccttatttggagaaaattaatttataaatacctaagtttaactaataattctaaacttaagtatttatgtcgtaaattactttattatttaattaattaaagggataattacattatgttagactttttatttgggcttacattaaattttattggttttattaaaacttgggttgattggatagttctttgctgtgttagcccatgttgttggtgatcaattgttaatgggctcagcatctgtgtgtaaagtctaggtgaagcagaattgtgg

SEQ ID NO: 324418 - DNA, 518 bp, Cannabis indica
ccagactagtttagaattttaagttgtcagtttggcgagattaattagaaaatgaccataatgccgttaagttatgttttagcttagtgtgtggtgaaggggtagaatagtcatttcataagttaaatgttattttgtcttatttgggtgattagagctgaaacttaggattaatatttatttttattttattttcttaagttagtaaattggaagataagaagaaaaacataaagattagaaaacctctcaagcgttctctctctctcctcttttcgaccattgaagaacactagaggaaatcaagttttcatctcaatttagctcagttcttgcaagaaatctatacatgttgctgtcgaaaatcttgaggtaagtttttcttctagtttttagtaaattcaaggtttagattgagtttttttgtgatttcggggctgtgtgattagcttaagtacagagcttgttctaggtttaatttaaggattgtttaggttctaattggttgaatttcatgg

SEQ ID NO: 324419 - DNA, 698 bp, Cannabis indica
cttaccacgttctcagatctgaggactgaggactgaggagtacgtggaggagtaactgacattccttagataatgaactcgagctatttgttattagctttcatataataaaaaaagcgaagtctgatcgaatatcttctttcaggattgacttctttgtgaactgtttttttttttgtcttttgctgaagaattgtgtgaaatgttaagttcatattgaatttaattcttaaattaaattacctgttcataaaaaaaaaacacaaactagtttactaattagtctttttcaaatataaattattgtagaaaagtttactaattagtcttcttcaaatataaattattgtagaaaaggagtgatgatttaatatcattagcaaaaacatgatgaaaagtgacaatgagaaacaactatgtaattttgagtaaaatcattaatctaaaagtgtctatcttttttgagagttatgctctgtccctcttttgagtgtgcctgctacgtttaaagttcttttttgtttttactgattttgtcccaatctgtcgtgtgtgcttcgtgaatctctgttgtggccagtatcgttgtgacttgttatggcttcaagcagtattaatgtggctaacatagaggaaggttggaagaatatccaacttgaagaggaagaatcagaggagactttttatgaagaaaatga

SEQ ID NO: 324420 - DNA, 1119 bp, Cannabis indica
attccactatcagagtcatccaaattggttgcgtatctatatttttgacctccttatcatttttctaaaaaatgcttaggtgttgcaatatctcgattggcactatattggatctatcatttttaagttacatggctaattttgctaaagcatcaatatttgaattccgatctcttgagacctactcaattttgaagtaatctaacttgcccaagtaatggaattcgaatattgtaactccaattgacttagtacagcgagtgaaatggctcatcaaaaatagaaaatctatggtgatgccaaatcatgtaaaggatgaagatatagaatgatttaatactttatagttttgtaaatttgtcaactaagctgtatagattataataggccttcccattgaaggtgctattaggatgtatcaattgtttgtggagtaataaaaatactgttggttcatcaaaaaaaaaaaaataagtggacgaataagaagaatatttttgaaagagatttgtttcccttaaacctgagactaatgaagaaaaaaaaaaaaaaaaggaagtttctttctttttttaactgcatttttgaatataaaacacaaactaaaatgcttttctggattttactattggagtttttttttcttcatatattaatggctctaaaagaggtgaaatttttttcctttttttttttcatagcatcacccagtttcaagattttaactttgaccatcaatttcatgctaaagtattgggcagcgcagagaggaagaagaagaaaaagaaaagaaaataaataatttagttattttttaaaaattttaaattattttaaatttaaaatttaagattgtaaccaattatttgtcaacacgtgacattgtgagatagtagatccgttagaaaaaagaaaacagacttataaatatggtgaccttatggactattaccgtcaatttttgaagttagaaacttatctgcatcaaattgatctgttaaggaacttatgccgtaatttttcctttttctattacatactttccaattcagccctgcttaagtcacaacaaaaaattttacttttagtcacaacaaaacttgtgactaaaagttaaaa

SEQ ID NO: 324421 - DNA, 2242 bp, Cannabis indica
atattttggatttaacataaattatatattagaaccacaaacatgaatcttacatgtaaacataaatgacttttaatcttctagtgatagaaaataagattatattgaaatgagttttatttagggcataaaatctcaacatagggttcttgaactttggcaagagcattcttatgtaaaaaaaatactctctaccttttcaagcttaataattgactcgtggactaaagctcattaatgccccaacgacataaaattcttgtagcattatccttaatttattcttctttaagcttaatctattttttaatcagttttcaaaaaatctcaggaaatattttggtgatttcattaagaactagaagaaattttaccatagttgtcatttacaacaatggttgcaacccgaaaagcaatggtcaaaccacctgctctataaggtagagataatgctgccaacaacaatgagaaccagctcccccgacaaatgttgaggcgggtgtcgtaggggcagggaagcattagaggtaggtagtcatccgcatcgtggggaccaacacaacaaacaacacgttgatgatgactccatagacgaagatgagtaggaaggtcatgagaatgaccctaggaaaaattacaacaaggattatgactttgtaagattttttaacaagggcccaaggttttattaatttggaagatgcttatactcaagcttttggggtggcttcgacaccttcaatcaatgtcagtaattttgcatatgcactgcatctttcgattccgtctatcatacctcgcaaaacctagtatacaactctaactatctatagacccgctgcctcatggtattcaccttcacagaaaaatttctccaattttggagtgacataaatcggatgcaatgtcactcctgaatagacacagacaaaccaacagttggtttttatggtattaaatcaggtacacaatagaagagttcatattatctgattatcattatatcatagccaatagatctctagatgtgtatacattaaatctgaacataaaatataagttaagaatatatgcctcttagtgactattagggtatcctcaaaacttctcatatgttgtattctttaatccaaataataaggatgatgcaaattaactcgcaccattatcttccaaattgatccaccacacacatggaatagtgtgggctattaggataaagtgtataatgctttcttgttaaaatttgcaacacattaatcagaataattttgagagagaaaactattttctttttctcatgtaattttgaaaattcctattgaatattattatctaatttctcaaatcagacttctatttgtagtagttaaatccttattaattaagtcatatttaattatttaaataaatatatataaccaaatttggtttacgacatttatgaaggaatctctcaattacttaagagaatatctcaactactttgaaatatttttaactacttttcaaatttatctaattgaattaactaattaattaattaaccgaaaaagataaaaccaataaggacaccctacaatagaggtagacgcctacaatgtcttatttaggacaagagtgatgtcttttgtcataacaacttttttctcaataaatattgtcttgacaaattttatcttaacaacttttgtctttttcctatttaattaatttgaaaaattatttatttattacaaaaataaataattactattttgctaaccgaacaacattatacaactctttatccttccctcgacattgtttcaaggtggtgatttgaggaccatggacctataattttgagctccaatgaactagattatttattgagtctcatcaaccaaataatttttgtttattaattccatgattactccactataaatatgaaattgaactattagtaattatagaattatatttactgagtttaactgtagtgtccatcgatataatcaattctagtgattaaccatctatgtgttggttcgtaattagttttggtcattttattattttacccttataattacctctttatcctttagtaccattaattcactagtggaagtataatttagatcccatctaaatttgtgcacaactttacatttctaaaattaacacttaaagagaactaacatttgatctgttagaaaggtcaggattccataattttagatcatgttcccaacca

SEQ ID NO: 324422 - DNA, 1747 bp, Cannabis indica
ggcggtttcaaaatgtatgtgttttgttattatataaataatataatagcaaaaaaaacataatacaataaataataaataaataagatgataagaaactcttaaattaacatctcattctctctcaccctttattaccgcctccttctcactctctttgaaaatctctcaagctctcaatgtgaaatggaagatggtctgaaacagtgggtacgaccgccatgaacgaccgtttcttgatgccagtgagtcaaacagaggtcacaaaggcctctccgctacttgatatctcatcctccattcctcatgacccaaaaacatcatctgttctatctccctctggcgattctcgctcagacacgaatcgacccattcaactctctgttcctccatcatcagtttgcttccccctcttcgacttctttgagatcgtctatctcctcttctgttcttattttttttctttttataatgatttgtgttttaggtcagcgacgattaggggtttgctttgcacctagatgttcttgcatcgtcgaggttttgagttcgcaagtggttgttcttgcattgtcagggttcacaggtggctagttctgtcatagaggttttgtagatcttttgggcatttggatgggattaggagctcgccaaagtgaaaattttatcacatttatttggtatctcacgaatttggttctgatttagtaatggctctaataatctttacaatttttttctttcattttgggattagtttatctccgattatatagcaataatgtaactttgtttttgttttagtgttaatgtataatgatgatgtatatgtttgtatactaataatttatctctaatttggatataatgtttgtatgttgttatggaagaatttgtctatttatattgtgactgcaaattaatttaggcttttattttaataaaatacattttttatcaaaaagaaaataaaacttctatttcctaaaaatataaatgcattaatgtaataacgggttaccaaaataaaaaatacattttaaaaatcataataaaaataaaaaagtttagcatacaacttcctttttgtacggacgaaaaataataaaaaaaatagatatagccacctacaaagtaggtggttgttatctttacagttttgaaaagtgagactctaaaagtttacaatgacgcacattgagtgattctaaaaggttttagtgacccgcactaatgggtcactaaatattactttttcagtcacccacattagtgacccgtagtgaaagattactaaaaatattcattgtcactccaagtgggtcattgaagctcatttttatagtagtgggtgcataactgagtgtttaatacgagaagatacataatgtagtgtgtaatatgagaagatgcacagttgaacgtgtattacaaggaaatgcataactcagcatgtacaatatgagaagatgcattgctgactacgtaatatgagatgtattgctgactgtgtaatacaaggagatgcaagatccttgtatttacgatcagacaaaagatcattgttgtaacaccctaatctataggattgccacgtgtgtgattttataaaactagtttaatactaatataataattaattattagaaactgtgaggataataaaaacttgactaaaataaaacactaaaaacggacattataacggcagtaaaaaggagtttcagggatccctgttataaaagat

SEQ ID NO: 324423 - DNA, 989 bp, Cannabis indica
aacattactttttatattgtaaattattctgaatttttcaaagttttgcaggatgtcttaagcaattataacttacacgactataaaaaaacttggagtaaaagtttttctgaataccaagacaaatacaagtgcatcaatgcacccattttaaggagaggtgcatgcataacaccctcaattatacatatatatttgagaaatttgtggctaaaccccttatgtttcatttatttaacacttaaccctcttttctttatttttggagggaaaatttcctttagtcctgttcagttggaaaattcagtgtttttttccatcccatcccatttgttgggtctacccggcccttttgttgggctcggaccaataagggcttaaggcccatttgtttgattcaattaaaagaaaaaaaaatggcagcaagcaggggtgtgtgcttcgtgagcatcaaggcagccaaaaagaaaaagagagggaaaggagagaaagaaagctagagagagaaagggattttgccattttgctttgaagatcaagtggtggattctcatgcattttagctcaaatttggggtggtgaatccttgcaaggtgctcttgaaatctaccggttccgatttggtgattgtcctctctaaggtgctcttctacaatacccacttagtgagacccaaactttttctatttgtgtatccatcttttgagatgatgatgatgattgtattggtgatccaagattgtttaatcttgatgttgttgtgagcctctagttttgctagagaagaactttgtaatcccattattaagctttggtgatagtggatgatttgagcggactacggtcccgtggttttttcccgcattgagtttccacgtaaaaatcttggtgtctcacttttatgcttgatttgtgtatttatattgtttgtggtgctttgggtaatatttgatattgcttattgtggtgtttgataagtatctcatttt

SEQ ID NO: 324424 - DNA, 593 bp, Cannabis indica
ataatggttaatttttttaaaaaataattttaaatatttaaatttaatttaaaatatcaacaacattaaataattattattaaagttgtagaattctttattatgtatattaatcgtaattaatatgtatatatactgcatgttagatactataataattctccatatataacaatacttccctaaaatggaattaacgtaaaacatatattttcaatagtattaataatgtatgaagcaagttactaacagttaatttagcttagaagaaacattcaaatcatgagaattaaaaatcatgtcctagtcatgtaaattcctttcgtgacatgaaaaaagtttacaacagactccttttaaatctcaataaagtcaacgaagatgttgatttatgacatgcacgatatgtttgttcaataatatctactacaaatttttttacttttaatgacaataaaatttataactaaagtaaaaaaaatataactaatggtaatttttttttttttggaaaataaaccttatatatattagaaggaaacaaatagtcagacctcacggtcattatagaaaatattactcggaatagtaga

SEQ ID NO: 324425 - DNA, 583 bp, Cannabis indica
agagagagagagagagatgttgaaggatatcattaaggcaatctccggtgacaatgaggaggaggggaagaagatcagaggaagtgtggttctgatgaagaaaaatgtgttggatttcaatgacttcaacgcctccattctggatcgttttcatgagctagtaggcaaaggagtctctattcaacttattagctctgttcatggcgaccctggtttgtttaattgtttcctaacttccttctcttattttctctctcttctcttctctgtttcattcttatttttgtcgtttgcttttatgggaagttgggaatctcttttcctatgtcgtttgctttgccctttatatatatttacttttattattattattttatgaaatgagaatgattttcattaaatcaacaaaccaaattacaaattacaaatttcaaccccccaccccaaaaaaacaccaaattacgaacaaacctcacaagaagctcaacacatcccagatgtattatattttttattagggttgtaaatttatgtatactatgttaatatgtttgtctttgggaattatttcacaaatacaaaa

SEQ ID NO: 324426 - DNA, 520 bp, Cannabis indica
taaaatagagattaccttcaccgggaatatgcaatacgaaggtgcgtcggcggcggctcgggcagcatgtggccggaggtgagcgggctcggtgaaaagtttaggggggaaaaatttttggaataaaaatgagaaaaaaatgaaaaaaaaaataacaaacaaataaatattaggggtggtgctcggttaaaataccacaaaatgatgatatttgagatgaaaaaggggcggccgacgacagtgctcggagaagacgcagagaggaaatggagaggaagagagagaagaaaacaaaaaaaaatgggggaaaggggtgcgtcccaggctttattcaacctggacttttgccggtgcaatttgatgcgccggcaaaagtcttagctgagtaaaaattaaatgaaacgcagcgcttcatttaagttggtacttttgctggcgcaattggatgcgccggtaaaagtttcccacctaatttttctcacgttttcacttgggtgggatgttgaccgccaattttttt

SEQ ID NO: 324427 - DNA, 1097 bp, Cannabis indica
aaaaaaaaaaaaaagattgattacatacatcaacgaggcggtgaagaaagagcagaatgctagcagcattgcagttctgccgtgaagcagccattaagtaaacattgttatgttgaataaacatgtatgtaacgccattatcgtatactaccggatcctgagactgtgggtctccctgtaagtgtaaccacatatcatatcatatccaacaatgcccaaaatcataaaatcgaaagccatcaatggtctaacttaaaatttcgtaattcattaactccaattggtataagaaagagagaaataagcaaaaacctccttatcgatgagcttggtgaagaatcgctcggcctgaacagaagtaacatcgcctcggtagtcacgccagatcagaaccctgcctttgatatctaacaggaagagcgccgaggcggcgccagccatgccgatgaggccgagagcttacggtgacgatgatcggtgagtttagtgaatttcgattctcctggatcagtatttttggtaattaaaaaacaaaacaaatcggatatgtttgtagctaaagatacgaagaatcgaaactcgggaaaaaagaaagtttgggttatggtgtgtatatatgagatctcgtttgttcgagcttttctggtttaggggaagaaatgaattgaagaaatgtttgttcttctgccaagcgaagcacgtgctggtgtgctccagcctccacctccacattagtctctctctccctccacgcacgtgctgaagatacgacaatcgaaaatttgaaacgacatagttttctcatttgtaaattttctttttgaacaatgtgaaagtcttaattattcaagctaagtaattgattttatgtatgaatcttgaccaattaaagctaaagataaatctcaacataaaaaatttagaaatttttccagtatgaaacacattttaaccgggtagtgtttgggtctataaacaccgaataaagtaacatttattataaaatcattcataatatattcaccagttttgattaatttgaatttttatgcttacattgctttaaattttttctctaaacttatacttactaatat

SEQ ID NO: 324428 - DNA, 632 bp, Cannabis indica
taacataaaaaaaaattagcataaaatttagtatacgtgcctcgcacgtagtttttgctagtatattgatatatacatatatatatatttatatatgtatattatattctacacaattaggtgaaaaattatatatattggcttattggaccacatgcaatgcccatattttcatgttgtggtcctatatatatgtatatgaatatacgaagtatatatattggtctaaaaatagctaaaaaagtcaatgaattaatatcaaaatttgaattggtcaatcttaatattgtttatagaaaaagaaaaaaaatatatatttatgaatttcgatgaagtggtttgcagaaacatcctcttttcgatcattattatatttctatgtataaaatgaaattagtggttaaattagtaatacttagtatggcaaaattaagaagagatttttacacctcatgtcaaaattgacacctttttttacatttttatccatacacggttttttaaacttttcaattttcattttactttcaaaagtttatatacatttactttccttcttccttacacacgtacacgcacgccacctcataactcctttcttattttttttttttgaattttttcattttatc

SEQ ID NO: 324429 - DNA, 1966 bp, Cannabis indica
tcatcatcatcatcatcatcatcttcatcatcttcaccattatcatgtaattttgattcttctctttcttccactaattcttcatcatcaccattttcttgagcttttccttcatgatcatcatcaatatcatcttctctagaatcaattttcagtgataaattataatcaatctccataatattgatctctttgtcttttccttttcccatttgaattagaagagatatcacaaattttatcagaatctctcttctctttcaatttctctttttctttctctctctttatgtacttatagcttagaaacgctacttttgaggcaccaaagtcaattccctcgtctcaacgatgcatataaatttagatacacatctattgtctgactttaaatattgtactaatgcacttaattaaataatttgaaacaataataattattagttatttaaacaatcgaaactatatagtaatttaatcgttacaccaatgactttgggcaactatacattattttttatttacatatagattacatatatttaattttagcgtataagactacatgattactcacctttttttattgtaaatgccaatattatcctttgaagtatatgtttatctaaaaaaaaggttatgtcattttggccttttcataaatgtgtatagttgataattaattattcaatagttattaattaagcctttaatgaacgtaaaatttgtatacagagaccggcttaatctattaataaaaataacttttgtgtagttatatcgtatactctaaaattaaataataaaaatcgttaatatatatataattatttagggtttggaaagtcgttttaggttggataaaataataatatttaacatactactgttaattgtaaaaataaaggacataatatatagctgtcatattatcattgatcaatttctagagataagttgaaattcaggtaataaagcgcgttggacttaattaccacaattagcattgtttagtgcaaaggaaaaaagaagaagaaaaacttaattataacagaaaagacaaaattcaatgattgaactaatttaactctcaaattcttcataataaaataattaattcttttataagtactcgttaatatatatccagttggctctagactgcacagacggcaatatatatatatatatatatatatataaatatatacatgagtaggttaatgtttcatcaataacagaatttgtatgaataataatttagtattagagagcggtcactattaatgtatacatatatgtatattatatccatatattagatctcagtattctgttagtgtaagcaaacatatatataaatatgaacatacatctaagttgacttcctaaatgaaacattagtaatattcattattatatgttatattttcagtgtatcattaatctagatatggttgttaaaaagtgagatgtttatgtcattatatgtatgtatatatatagaaatctttccatatctataatatatataattttagagaggatgtgtttttctttttcttaatttcaatgctagctcgcgtttgaataaattctctaatagcaaattaataaggatttctaattcaaaatcaatcagtaaaagtctgagatataaatgtattaatgtaattctcatatatatattttgtagaatgctactcttctattatatattccatattaatcttttgtgtggatatgttatagctatgtattttcatcaatatattaaattagaaaaaacaaaaggcagtggtgataaatgatttaaaaagattgaagagaatctgtatttattagttttgatacatatggatatatatagtgatttttaatccaatattataatggaagtttttggtgttgtagtggtaactatatatatgtatcacgtgatgatattattatatatatatatata

SEQ ID NO: 324430 - DNA, 538 bp, Cannabis indica
agatttttttaattaaatagaaaaattaaacataaaaactcaaaattttctaattttattcattacccattaataagagtgcacccatatatgtatatatgttgccgatttaataaaaaccctataaataagtacttaaataaaattcagtattatttcgcgatatttagtatcaaaaaaatatgttagtactacgtatagttatctataaattaactattaggtacatgtgtattttgagttacgtacctttctcttacagtcaaatttattgatgggtgaattattaataagtgattgtaagtttgtaacattatttttgttttgacatggcactatatgtataaatatatgtatatatcaattattagaataggctaacataattcaaaattattgtagtgaaaagggcctatcttcaacacatatataatagaacataattggttgcttattaatttctagatataattgtaacatccccgcttcaagcctctattgggtccttacactcacggaatgaatgactcttatacac

SEQ ID NO: 324431 - DNA, 1551 bp, Cannabis indica
tgccttagaatttttttagataagctttgcccgacggtatgatttccacagaatccgttgtgaactttagataggagtcgtgcagcttctatctgaagtacataactccctctactatgataaaccttgccgctttccttctcattttctgagcttcattctgattatctgggagtttcccagagtcgaggtaggctgctattgctgtcatccagtttggggttgtatcaatcatttcaatttcttccgtgccagtgatgctaggttcttcgaggaactggataggaaccaagttcgcctaatcacttacattgctgcttgccaatcaagccaatgcgtcagcagttgtattttcttctcttggaatttgtctgagaccgtagcttttgaattgtgtgagcagatcatgtattttgctcaaatatgatatcatcttttctccccgagcctcatattctctggatacatgatttaccaccagctgtgattccaaacagcccagtatattgtttgattcgtgtttttgtttgataggtttgtatttatgtttaataattgttgtaatatatacagtccaagtgatgaggtgagatcgatgttgttgtcgtttggtactatactacagatcgagaagttaatttgttggtatcatctcttaatgatgctgctattatgttaaataataatttatattatcaacgaccattttaaacagtagcttatagtataagtgacagttttgcaccgtagaccatatttcaaattataaggaacgatgattacttgttgataaatcatttgactgacattgcctactccactaattttgtaacgatagaataagtaacaattttagaaatcgattgcaatacattagtcgattatttaatactttcgagaaaacacaatttttgtagtagtgtaaacagattatatgaatgtaaacaaggactgtaaataagcatattcttttatgtatagtgccctcttggtccctaattaaagtccacggttactagaaataccagccatgtaaaaagaaagttaaagaaattattacctaaaatgtataaattgacactttatttataaaagtaccttcataaggtgtagataatatttatactttttatgtaattttaattaccaaaatacctcttacactatcacttacacaatcaaatgatagttgtatggtggttactgcgtggttgcgtgattgttgcatcaaacgaaggtttcaatcagacgatggttgtagagtggtttctgggtggttggctgaaggctgcaacagatgaaggtttcactcagatgaaaatttctggatggttgctaggtggttggccgaaggttgcatcagaggaaggtttcaattagacaaaataactcttagcaaaatgtttatgcaactgttatgagacattaaaaatcagaacagtgtttcgacatatgtaactctatctacatgtctctttatgattgaatatgaacaaattcactattagaaatttagaaaataaaaaaatacactaggataaatattttact

SEQ ID NO: 324432 - DNA, 822 bp, Cannabis indica
ttgaacaaggtattacacgtttgtccaaaaacttttattgtcacaaaatgagcactttagacatttatttatagtgtttgaggatcactttagaaaatcaaattcctttcacctcatggctattaccagcactttaataggaaaaaaagtcaggaaagagagctagaaacgtgctcaataaattcatgcactttcatagacgttatttcaaaattggctccaggtgattaaaataaccataaaacaatagattatcaaccataaaacaataatttccagaaaattcaattttgagttttatatctcctctctcagctacataaattctcaacggtttgatacatcataatctgatatttaaatgtgtttatcttcttccaacaactataattttataacattgaatttccataacatatatacaatttactcacttaaattaagcatttatgtttatgatcctaagttacaaaacaattattgttttgaattcttatttatgttacaatatttaatttataatagactataatttatataatgtattcatcaaatactataatataacaatctctcactaaatcaaaatttgtaacacactattgtaatatttatttagtcaatcaaataaatattatattaaaatataacattcctcaactttaattggataaatatacactttatagaagtcttgtttaggtgcattaggtaaaatatatttcgacttggattttaccttagtatatttactataaagtttgatgaaattttggttaccgtaacattgaaccactattcttttagtacaaaccggtgata

SEQ ID NO: 324433 - DNA, 899 bp, Cannabis indica
gaaaagcaaccataactgacagagaaaaaatctgcagaaaaactggtatgaaacatgtctggtacttgaaagcatgtctggtaccacgagactggagggacaagatagtgtgttcccagaccaccaataccccgaccaaatacgtgaaaaagggtactgcattttatctaggaattaaataaaggttagaggtgttatcttcttgcattctagacatataggttctatctggggttgctgagacattgcctgaagcccgaccagctctgtaggctaagggagttgttgttgctgagtttgtcgtgactattgcaagacataccgctaaatcaaagcccccgtccaaacgtagaatgatggcaaaaacaaagtagaccatgagaaaggcttcagtgactggccctcattttgctcaactgtttgctgcagcagaagtaggacaagctaagactttgagcgaggaacaaattagtgttaatggggatgttaaggtccatgaagtggaagactagggcgaggtccgtcctgccacccctctcaaggctgaaggagaaggaaaaaagaaagaagaggaagtttgggtacttcattttgatggtttcaatgaggatggagaacctgtctccgaggatagtgaagttctagtggctagtcgtgattatgttgaagagaaattccctaaggctcgacctataaataatcgaggtccaaagggtgctcgttgggtctcaccaccatccgtcttagcctttaagagattgaccaatctctacaaagaacgtcttctcgagaaagttgaagcctttttccctagtcccggattgctggcgataaattctagaagtggattttgtgtgtggttggggctgttgggttttgtgccctaaataaaacccttt

SEQ ID NO: 324434 - DNA, 1573 bp, Cannabis indica
gtagatctagatcctggtaaaatatttccaatagatttccaccaatatcttgccatcaaactttccatttccctagtagtttcaagtgggagtaggaaaatattcatatcatagcttgggagtgactgagcgacaacttttatcaatacttcattttcgccacgagagatgaactttgttccccacccttgaagtcgttttcgaaccttttccttcagatatcccaaagccgcatgcttattacaactcattgaactcggcagccccaaatagaaacttccctcaggaggaatacccatagccaaattattgctaagcagttgtctcactctctcctcagtattagagctaaaaaatatggacgatttagtaaaattgactttttgacctgaggcggcttcaaacttttgaagatttccttgattcgagaggcttcatttttcagttgctttacaatacaagtagctatcatcggcaaacaacatatgtgagatccttggcgctccatttgcaactttacacccatgaatccaacctttttgctcatactttctaagtattgtcgataacccctccgcacaaagaataaaaagataaggtgaaaaaggatccccttgttaaattcctcttgttagaatgattggaccaacctcatgattaccatggatgactttgtatcttgccgaagtgacacaacgcaacacaagttgaacccaattctcctggaaacccatcttgcggagcatagcttcaagaaaaacccattcgactcagtcatatgccttgctcatgtcaagtttaagagccatgtatccatctttaccttttctcttcctttttagataatgtaaaatttcaaaggagaccagaacattatctgaaattaaccgtcccggaataaaggcactttgattttttgagattaaagaatccataaaaggcttcatcctattcaccataaccttagtaataatcttgtacgttacattacacagggctataggatgcaaatcaactatggactctgggttcttcttcttcggaataaggacaacattagctttactacatccatcttctagaacaccattttcctaaaattgacgaacataatgaaccacatccccttttacaataggccagcacctttgataaaatgcatgggtcatcccatccggacccgggctcttgtctggatgcatctggaataaagcttttttaacttcttcctccattattggatggcctaattccatattcacctagtccggaacaacattcgaaacacagtcaattatctcattgcaacaagtatttgccgaagtgaacaagccatggaaataatgagacaccacttgagataagatgatctcccaagtcacccaattaccataatcatctttcaaagcactgatttgattgttccgtttcttgttaatagttgctttatggaaataagtgctattttgatcaccctcccaaaaccagaactgcttggatcattgcttccaataacattcacgctgatctatggctttaaaaagcttatcctttacttctttatactgttgta

SEQ ID NO: 324435 - DNA, 2407 bp, Cannabis indica
tatatatatatatactagcttaatactaagtgcaatacacatatacttatttatattcttagtttagattttagttatatatttttagttgtataattctatttttatgatattattcaataaataatattatttttttattaaaaatatttaatataaatgatatttataaaaaataaacataataatactgaaaatttgttatttattataattttattttaaccgttttaattttataatactttacatttttattgaaatatcatatactttttctattctctcaaaaaagaaaatgaaaagatatttttttgtaactttaaaaggtaaggcgttacaacaatgattccttaagaaaattaatatttttttctattttgttgtttaaaaagaaaatgatagtagaaagattttttttagatatgtggattgagtaaaaaaaaaataataatagaaatatatattttagatatgtgtaatgggtttaaatttgaaatgcactgttaaaaaaaaaaatactttgttatatagttacatttaagataagataaaagataagagaaagatcatatgtgtacttagtttaaatttaaattgtaatattttaaaaagaataatttacaattttgcctcctgacttgacaatattgattttgggtcctaaaatatacggcttgttaagaatcccccctgaactgttacatttacaaaaatttagtcctcttgttagattctgttctattattccgtttaaatgatgatgtgtcattctcatttaaaaattttgctccctaaactttgacaactatcaaatcataccatctcaaaataaaaataagacagattcaacatttttttaataaaatcttaaaaaatcttaataaaataaaattatttttttaagaacaattattttgaatgaataagaaaattaaaaaaataaaattaaaattttacaactaatcaagcaatataaaaaattattgattttttattagaaactttatttagatattaaaattttaatttataaatactaaatttacaggaacaaatttgagtatattttattttcattcaaaaatgtagatttgtttatgtaaacataatattttttttagtttaatttataactttttctcaaaataattttatatttttattggattttttaattatttttctttatttgttaatatatgagtttataaatataaataagtttgattttttcttcaaaatatcttagtttatttaaattatttattaaattctcagtaattttgatttattttttacaatacgttttgatgaataaaaaaaaagtttgtaaaatattttttaagtaaaattaatattttttatttaatttagtattttatcctatttttaataatttttattaatttttataaattaatagaaaattataattgttttaaaatagaatattataatttttaaaattattttctttaataaaatgagaaaaaattttgtattggtcaaagtttaggtgataaaaatactaatttttaatggtaaaagaaacgaaacctaacaaaatgaacaaaattatgtaactgttatattttaggggaaattcttaacaagacgtatattttttaaggtaaaatcaaagagtgctgaaagtttagaggacaaaaattcaattattcttttaaaaaagaacaatactttttatcatatcgcttaatataacataaaaatttatgctcttttttttaataaaaatatttatgcttcttgaagctccttttagtgaaaaatataaaacagtgacaaaattatagtaaatttagattttttaaataatgtttattaatttgtaaagttttattacaattttatcaacttttacaaatatgtaaacattattataattattatatttttataattaatttttatcactttatctatattttttttaataaaaaataggttatttcataattttttcaatttgattcatgaaaaatctgtgttttaactttctaatctcttttaaacgtggccaagacaatgactaccccttctcatttttctctcttcttagaccatctccaatggatggtgtatatttggcccaaaatatactataaagttataatcagcccaatttttgtatttgtgctccaatgcacaaagtataaattagttataaaagtcaacattactattaatattcattgaaaatatacaaataattaactttatttattttattttaataacttataaatacaataatatacaaaaatatttttttattaatgaatagtattactgagtggtaaatagataattaaaaaatggataattacactacatactgaaattttcaacttttttacttttatactgtggggcggaatttttt

SEQ ID NO: 324436 - DNA, 1096 bp, Cannabis indica
aattaaaaaaaattatattttctcctttttgaatggagtactcatctctaataaattgttgtatatccagatgagctttttttaacttcaattatttttttttcaataacaactgttatttaccggggctatatatatagttccaccatttctttttcttgactttaatcttatcaacactctgaccaattctctatactaaacacaagcattggaagctaaagtgttagttgaatgtttatctttctattgattaaagtaaaacaatgctgcaaccaccatgctatttgcaacaaaacttttactatgtcacaccaacccattacgagcttgccaaagagattaacaaatcatggttacttacacaccttcgacttagaaaacctccccgaaacttgatgaaactaattttagaaatcaaatgttgaaagaagccataacgcctcatcaatcctctgcgaacacgcttctgctaatgggcaatcaactaaaatgtgaagaattgattcagccctatcattacacactagacagcaagtaacaaaaacatccacatacttataccctttagcttagacaaggttggtagacacccaaaacaagctctccaaagtaaatttttttcagcgggattttgagattccataaggctctccaaaagccagagttactattttccgactatctgtcatgcaacaattgaagatacttatacacactcttaacactataaatctcagaagtaacctgaaaccaataccaatgatccggatcttgattatcattcaaaataatatttttaattagatgatgattaactgcattgaataaatcattaagaattttgtcatcccactctcttgccccgaccaccatgattttttgaaccttcactccctctaaactcgaatgggaggaggaaacgaatgactgctcctcactaggaaaccatagctctcccaaaatatcaatggaagagccatcaacaacacaccacctacaccttgcttttaatagctcctaagcaggcagacataacttgggttagaccccaactaagacgtcaacaaagttccatgaggataatatcgtgcct

SEQ ID NO: 324437 - DNA, 945 bp, Cannabis indica
aaatgggggtgatgtaaatagggagtattttaggaatatcataaaagttgtcatatcctacaaatattagttattattgtttaggaaatttttttaaccaaatgtaagcataaaaaatcaaattttccttatatattattgtgccctcgagttttttagtaggttaaaaatagtctctgaattatttctaatattgtatagtagtttttttttgtcaaattttgtcacacgtgttaataaaatgatgaaataactgtttagatacagttgttatattaacactacgtgtataatttaaaattaaagtatgtaattttaaaaattattaagctaaaattatattaaaattttttaaatattatttttcaaattaaatacaacaattttctaaacagtcatatcatcattctgtttgtcacgtgtgacaaaacttgacagaaaaactaatttataatattgtgaatagttcaaggatatttttaattgactaaaaaatttaaagatacaataatatatatgttatagttcgggtcaaaaattctaaatatcttatatatattgtaagtttatatataggctatttagtttggggtttatatataggctatttagattggggtttatgtataatgtaatgtcattttcttacacattttttttttcttttaatctttgtagagtgtagtctcttgtataaagagaggattaaggcaaattaataatggacggttcattttagattggggtttatatgagtggcgaatctagaatttaaagtgaggggcgtaaatttttttttttaatataaaagcaaggagggcaaaaataatttgtttttttttttaaaataaagtgtagttagtgggatttaaacatttatcctctatgtcgaagcttaacaagctaacaacaatggtaaaaaccaagaacaagtaaaaactttag

SEQ ID NO: 324438 - DNA, 1213 bp, Cannabis indica
ttttcaccatatattcccctttctttgttgaatatcacaaacttgtgctctgtaccatcgattttgaaagtgcatctgaaaactgtttcaccaaaaacatttgttttaaacttgaatttcatagagttgctgtaagggatgagtgtcactggaccgattgtatcatcacttgatgcacatgttgccacaactgaaatttccttatctccgatttcgcttttcaccaaatgacttttaattcttactaatttattttcagacccaactccctcacaactagtattggatgaaagagacataccaaaaattagcatcataataattacaattatctctctaaaacccattctttctttctttctttcaatattaatagtttcctactttgagacgagagtctcattatatatatatttataagataaaagagccaaacaaaatcacacaataaatggtataaattaaatatcttaattaccatatataacatattaatattgctactaattttgtttatgatctttgcatttaatttcataaccttatttttgcgtttttttttaagggattttctattactgtatgtaatttcaattttattagagaaaaaaatacatgtataatgaaatgaaaaaaggtgtctattatctcagtaattgcattttattgcaatgtactatattaaagatatatattaaaagagtttttaataggtaaaatttatttcataacagctgttataaaaaaaattattactattagtaactacgttttcttttttttttttcttaaaaaaaataaaaactgcgtattctttttaattttataaaagaaataatttaattattataattatattgaagaaacgcatgaaatattgtgatggcaggcatcatgatgaacatatttttaagagatgtaataaagaccatatatcaagcaaggaaatgttagatttggtagataatccttgtaaggctattgggaaattaagtccttgtttaaatttttctgaatcccgtgacaagcagagcttttgcaactttacttctcaccaaatttcttgttcctgcaaattggttgctactatattacaaagcatgatggagaatgttaggtccttttttttggtaatttagttgtcaaaatatttcttaattaatgtgcattttattgagcattcaatttgtttttatcaactctagaccctttt

SEQ ID NO: 324439 - DNA, 866 bp, Cannabis indica
aggtgaaaatcctagaatggtgactatgactacacttgatatgtgagtgcaaatccacgacttgaagccgggattcaagactgactgggctcttcgtgaagcagcccgatacattggtactttcgtcacttttgatctgaacaacttccaaggggtgtggcgagattatctacgtgtgtgtgtaaatgttaatgttactgaaccacttcaaagacgtatgaagtttgaaagtcgtaatggtgaagctttttatgcgtatttcaagtatgaacgggtgccaactttctgtttcatttgtggaatcatgggccatgccgagaaattttgtgataaggtttatgacatacctgctgatcagattgtaaaaccatatagcttagatatgaaagctcctatgaggcggcagagtttcttgactacttctccatggcttcgctccggcaaggaagaccgacgtgaggcacaccccagaagcaaatccgacagctgcaacagcatcctttgaggttaatgcaatgccaaaaaatcagtccaagatgccaattgtgatcccatgattactcaatcccgaaaatctgggaactagattatgcctcttaatgaccatattatcttggtcaatgaaaatacagccaattattcaactgaggagatagttgaaatagctgatttgaaaagaaaaaggatggggtctattacttctagggggcctgtgatattgacaaaagaaggtatggaaactgatgttggtaataaccaaaacaattctgcaaatgtgacaatttcaaaaaacttggacaaggtgggtcttggtctccaagcccaccaaacattataagtacaatcagttggaattgccgtgggct

SEQ ID NO: 324440 - DNA, 2672 bp, Cannabis indica
atatgcttcctcttactcatactagcaataaatacacttggaagcatggtagcctccttgaacgccttgtctggtgtgtggctaacaattcatggcattccctcttcccttttgtttctctatttcatttagggttctatggctctattcatagagccattaaaaccatattagaggaagacatcagaggtcctaggaccagcaacaatttcatttttgaaaatcattggctctctgatgaaaaaaattcagagtggttagttcttctcgacaatattccaaccaacaaaaaaccaccaagactatctgatttcatctctaatcaaaataattgtgttgctaacataaaaaattagagcactagccaaaattccttgaagcatgacatctctaacacccaggacgctttggctaaattatttcaatctgatatccctagtgaacacgacatttttaaggccaaaacttttcaatctaccatggaaacccttctacacaaaaatgaaatatattgagaaaaagatctcatattgattggctcaaatatggggacaaaaacacaaaaattttccaccataaagcctctgccagaaaaaagaacaactccattagagccattacccttgaggatggttccactgctagaggaactctctctattctacccctttttgctgatttctactcccatctctttacagctcagggggaggatcaagccttcatttccaacatcttgattggtgtctccaatcacctctcccccagtcaatcctctgacctggctagctcctagctccttcactgctgatgagatcaaaaatactctttttaccctttctggtgacaaagctcctagctctgatggccttaatgcccatttctaccaaaagaattggaatgtccttggcaaggaactctgcactgcccttcttgatgttctaaacaaccattctgatctctcctctatcaatttaatctcttagaaaaagaatgcatccactcttcgtgattttagatcgataagtcaatgctcttgtagctttcatggatcacgtgaatcgagtgttcaacgatttccttgataaatgtgttatagtgtttattgatgatattcttgtatactttcaataagaagtaaaacatgagcaatatttacgaatggtcttacaaagactgaggggagcattttccaagatctccacacctttaacaaagttaaccaagaaaaaatcaacagtttgtgtgggcatataagtgtgaagctagtttccaagagttgaagaagtgattaattacaaccttagttttaggtttgccatcaaattgagaaaattttgttatttaatgtgatgactccaaacaaggtctagggtgtattctgatgcaagctgacatggtcattgcttatgcttctcattagttaaaggagtatgaggaacgttacccaacacatgacctacaacttgtcgcagtggtgtttgcactaaagatatggcgacattacctctatggatagaaatgtgaaatctatacagaccacaagagtctcacatatttatttacttagaaatccttgaacatgagacaaagacagtggttggagtttgtcaaggattacaattttgagattctttatcatctcgagaaagccaacgttacccaggcaagtttttagtaagaagttaatccatttttgctagcagccgagatggttagggctagtattgagtttgtggttggaaaactaagaaatttaacatttcagtctaatctgttagaaaggattagaaatgatcaaatggaataccctgagttagttaaatctcatgaagaagttttagctggttagactaaggacttctctatttcagatagtggaatactacagcataagaatcgggtttgtgttccagatagtattaagctcaagaaaaaaaaatactaggtgaagctcacaccactccttattttttacatccaggtaccaccaagatgtaccaggacatgaaacccttctattggtggtggggtatgaaaaaggatgtgttcgactatgtatctaaatgtttgacatgctagtagataaaggctgaacatcagagacttacaagtttattgcagcctatagcccttcccaagttaagtgggaggacgttaccatagactttgtggttggttaattagaaccataggtttgtatgattcagtctgagtaataaaagatcatttcactaagccaatgccttttctaccagtgaaaataacctatgtagtggatcattatgtagagttatacgtgaagcagatagtttgcctccatggggctttgaagtccattgtatcagacagagatcctaaatttacttcatgtttgggagagtctctagaaagccatgggtataaagctaaagttcagtacaacttttcacccccagatgatcagtccaagaggataattcagatactggaggatgtgttacgagtttgtgtgatggactttgagggttcttggaataaatctttgccattgatagaattctcctataataatagttatcaagctacaatagggatgactccctatgagatgttgtatggtatgaagtttcattctctgattcactaggatgaaaccagggaaagaaagtattgttggattttatgcccta

SEQ ID NO: 324441 - DNA, 1098 bp, Cannabis indica
ctattgcgcgaaacaccagtcccttcaaagaaactcaccataacacctgttctagtaacttcctcatttagttcgaagtccggttcaagttctaaggtcatggagttgaaaaaatcctgacgcattaattccatatcatcttcttctcccacgtttcctgctggctcaccctgtttctgagaagcatttacactaccatcatgcattggttcagactcccgtgcattaactccctttggtatatctgagtcgttaggcattgactcattcataccgtcagaaatattctcattaatgtcaccaccaacttccattgctttccctcccagggtactattcacaactgcattgtcaacaccttcgcccatattttccacgttttccatgagaagcccaggaaacaaaacaaaggaacacttttaaacaatcgcacaaagagaaaaggttgaaaagaaggttaaggaatgtagaaggttttggacaagaaaagtcaagttggaataaccaacactctcatactgagagagaaaagtcatgtggtcccagcagtcctgttttgcagtctagttgatgaaatattctatagaagtatataatttaattcttttaaacaaacattaagtttgtataaatattcaaaattactttttataggaacttacttcgccaatttatctaaaatgtcacgaaaaagttatcaataaaaaaatagatctaaggcaacaaaaaattaaaagaattagaaaaaataaaaaacgtaaaatataaatatttcactattctcttaggcgacaaaaaattaaaagaatcatctgtatctaccatcagtaataaaagaacatcaactataatgtttttttttttgataaatcaggaattcattgcacaaacaattatttttacatcctaagagcatcaccaaggagacttcatatttggtgatgccgtggaattgtccctccaacatagctgcaaacattacactaaattgccgtgtgtgctacagtgcacggcatatatgttgtgcactgttcacacggcatactttttttatatatatatataattaattttgtatatgtttatattattaattgt

SEQ ID NO: 324442 - DNA, 913 bp, Cannabis indica
tttttttttttttatatttaaaaaaatgtaatgcatatattttgtacttaggttcctagaatgaatgattttcttttctttcttttttcatcacctctaatgatgaaaactacatgtttactacacaatattcagaatcataataaattaatggagagatgtaacttaataaatgaaaaataatcttaatcgatatttgtaatatggaatgataataatttatcttgtttactttatcagaaaatataattagaatgtttaaattaactaaattatcattttgagttaaactataatatatggtgattattttgtaagaatattttaaaggacacaatttttattatatatttaattttaaaaataaaataaatagaagttattatccttaataacatctcttagaaaattagtggggaaagtattctttcattttataatttatttaattaagttcttccatctttaatttaaataaattaaagtaaataaatataatagaatttattttattgttgatttttattatttattagtcgtacttaaatggtttacaattgacaatcatttaaggttgtaaccaaatttaagtcgttacaattaggtaaaagcatttagattcattattttatttttaaaaagaaactaaaaaaagaaaagaaattagttaaataatccatctaccttttaccaaattaatcaattttagaaaacttagaaagtaacaaaaatccattattggaaaattaaattattattttttttaaaaaaaaaaactaagacaaaataattaattaaacaatccattgacttcaatatatttttttagggcttttttatttttactactttaaaataagttttttttttttttttttttagtttattttttattggtaattttatatagaaa

SEQ ID NO: 324443 - DNA, 648 bp, Cannabis indica
ctcaaaaacttgaaatttggagagacaatcggacaaaccatcgggcctacaacgagccctatatctgaccttcatcttcaacctaaatccatctttaacattaggatgcatcgggcctacatcaggcctgactaaaattatagtttctcacctaaaactcacaaataacaaatattctaaccccaaatctaacccaaaactcacaaatcacacactctaaatctatcaataaacaatattttaatcctaaatcaataataaaaacattgaaaaataccataggtacgaaatcttaccatggctgacattgtgtggtagtggttcgaagttttgtggtcgtcttcgtggtctgagagcgagggagacgacaggggtgggtcgagtgggtcttcgtgagatggtgggttcggttgagtgggtccttgtgctcacatgggttcgagagagagaatgggttcgagagaaagagcgagacgggaggaagagagagaatcagttgttcaaatgggaggggtagaatggagttttaggaaacaaattacctattctaccaatattgaatagcttaggtttaggggactaattttggcccaatgaatgcatacatattcaaattttccttttctaactattaatattttttacttt

SEQ ID NO: 324444 - DNA, 532 bp, Cannabis indica
tccaaataaaatatttttaaaaacatatagctaatttgtcaatcccgaaaggtgttttgttgaatgattgttgagtttgaaagggagttctcatatgactatcatgtccactctggatcgagtattcaagaaagctagcctcactacaagatggagttttagttggctagttgtctctcctagaatgatagttttggatagtcgactccaggatgctcaatcctatctggtagcatcaccagcgaatgtccttggtccttgagtccagaagctcttatatgctcccagaagccctgatacttaagctgacgtggaggcttcactcaaagaggagttggttaagttagttatttctaactaacttaacaacctcatatcttgtcgttactaactttaggatcttgattctaagcttataaataccaccttcatcaggttagtgatgacttgttatttcgacacgagtttgagaaatcagttcagatgaaattgagagtttaagagagaaaagattgagaggtgtagagagaga

SEQ ID NO: 324445 - DNA, 774 bp, Cannabis indica
ttttttatttcaaaaaaaccgaccgccatgtcagaaaaactgaaatcgaaaccgaccgccaaatttggtgatggtgtggaaccaaaaattcagttacggtctagtcagtttgatggtcgatttcagtttatcggtttttatgaacacccccacctggttctaactttttgtaccattcttcagcggatccacctaatgttagtggaaaacataaacattttgcatcattactgaccctcatgtctgtcattactcaattgaatcgagacaagtgatcactatggtccaaatctccggcgtatatcatcatttcgggcattgtaaaatttttagtgagctccgcctccagactgtttttttaacccagggctcctggtcttcacaatcagacttcaaatcatcccctttttgcctacgtgagaccttggtaatgtcttttcataggattgctggttcagttaggatcccttcactcaagacaccctccgacatcggtacctcttgtttctttttctccaaatgattcctgaggtcaccacgtctattattgatcgttttccttaagtcagcacggggattcttgtgatgtttcctacctctttccccaggctcttggccgtagatacactttttgatcctcccggtcttgagtgccagtgctctctctggggagcctgcccctctgcagaccatttctttttgggaaatcggagcatactttttgcaaatcttgagccttattattctttttagggaaagatgtaggatttttct

SEQ ID NO: 324446 - DNA, 566 bp, Cannabis indica
tttttttaatatttgaaatcgggccgggccgggctcgacccgaaataatttgtaccgggccgggccgggccgggccagaagcccgataagagcccgaataattcgggccacagtcggcccgttgggccgggggcccggcccggcccgcgaaaatggcccagattgacattcctagtaccatacatgttatttataaaaattgatactttcatattttatgtccgataacactagaaattcgatgatttgaccattagtgtcactttgatacggtttagtatcttaaatttaatgggacaaaatttatgaacagttagaatatcaagattatgtggagtatttgattatgactattttacccctagttatcaagattacttaatggtgaagtaaggagattatgataattttcaatataagtttagtcatccaacttagtggattttttttagaaagataagggatatattttaaatttaattagaagaaacaagaaggagttaagaaagacttcaagaaataagcttttcacaaacacattctctccctgttgggttttatgccct

SEQ ID NO: 324447 - DNA, 379 bp, Cannabis indica
atttattttaatttaaaaataatggataaaaattttaaattaaataatattaaaaaaaataaaattaacttataaagctacataagtgcattattgtgctgataaaagtcaaatattcatctatcaaaaatgacttttgttagcgcgttaatgaactcgtaaaagtaagatagttttcagtgtacatttttgctagcaaaagttagatttttttgccagcacggtaatgtgctagtaaaattctaacttttcctagtgcacatttgcgctagcaaaattctaatttttactagtacatttacgcattaagaaaagttatttttactagagcttcttatttataccagaaaaagttctaataccaataacgatttgttaa

SEQ ID NO: 324448 - DNA, 1294 bp, Cannabis indica
tttttcatttttttttaaaacttaactatacatggtctctatatttttatttctaaatttttgagtatattgatatatatacatagattaattgacatagaaaacatacaacaccacatagagtttttgctacaaatgcaacaaaataaaccaactttagaatttaaatacaataaaatgaacactacataagaatttatgccatacaaattttcgaatttatattacatttatcccaattaaatctacaataataaagttggacttggagtagatatcacggccaatttatgtacaaataatggataagattagattagattgtgtaatgagattattttcctctatatcccaaagtgatatataattcagagttgtgaagagagagagaagacaattactttgccccaaacaaagggccatccatgataagatgaaatgtcctatagttaaaagacagtcttctccttaccttcattcatcaactaaataattaatcaaagttttcttttgcatgcaccacttttgtcaaactaagtgtgaaatcaattaatactccactccatctattatccatgatgggtttatcttaatgatctaaataggaaaatgatcaagttataaatgaaaggataatatatattggttttgtttggtgagtggtatcactaccaatatataatacaaatgaaaggataatataatgctcaatatcgttttatttattttttttaaaaaataattatacaacttttattaatttgttaaatcaatcaaaagataagtttgtatctcgaataagaatatcacctttgttgaacacttgatttgagaaagaataagatgctctagcaagactatgagcaaccatgttagcagatcgtttaataaaaaataaagaaatattgtttaaaaatgcaagaagtttacaacaatcttctataataaccacaaaagaagaaaacataggtaatgagtttcgaatagcttggactgctaccaagcaatttgactccaactctactttctgccatggttgagttttaatccaacttagcgcttcctttataccaattattttagctaaatttggagcgcctataccaataaaattactcgacttagccatcacttcttccccttaagagtcttagagcgactatgtcataaccaaacgttgctcgatcgtgaaaaatagcagcatcaacagttactttgattgtattttcctgcggtttaacccaaaattcaactctatcaccagctttaaaaactggaaaagaagcctttgaac

SEQ ID NO: 324449 - DNA, 1069 bp, Cannabis indica
ttatcgatcctgaaaattttattaaactctaagagtgttatttatgctaaatatgaaatatgtaatttttatgatttgtgcttggcgacgatggaaaatgcgatggatggccattagagttacatgggtaagtttagaacctatttcttagtgggacaaacgtaagtgatattttaaatatcgagtttaggcggggttatagttttggaccattttacacctaggcctataagtttcttaagttggaagtaagggcaattttagaattttgccctaagtttctagcttattttattgttagatattattagtaatattctaatttttaatagttattagtagataaggattaaattgtttaataaagattttattttgaaggaaaacgtccatctctctctttccccttttctcttgctgttcgaacccaaaggaaccttaggttccacttctgatttttctactgatctagctggaattcagagtgtgattcagtagcttatggaaggattttaacaagagcatccattcaacgcgagatttttatttaggttgaccagcacacttgaatttaaaaacgagataagattagtatatattgtgtatacgtatatgtgtacgtatgtaaattgcatgttgtgtatgtgactcgtgtactaccaacactagtgtagtatcagtacaaaattcattggtacggtataaagttatgaattgacatcatagcagcacaactattatgtcgggtcagcagtacgagcatagtactgggtttgattgatattcgattccaggaagtattaattggtgttatcatagtggtacgagcatagtaccgggtcagcagtacgagtatagtaacgggtcagtagtatgagcatagtactagttaagagtgatattatggtcaattttacttttgggtattattgatgctatcatagcagtacgaacatagtaccaggcccgcaacgcgatcatagtgctggtagtggttgatatcatggtcgatagtataccaaatattaagaacattcttaataatctgttaagccttgtaaataggtgt

SEQ ID NO: 324450 - DNA, 2141 bp, Cannabis indica
ataattaaagcatacaacttatcactttagactttcatttttttatttatttattttgagcaaataataataataataaattatgtaaacaagttacggatcattttgtcttatttatatgttgttatattttctaattaattaattaataaataacatataatgtacgaggataaataaaatttcaaatatatatagtcttcttttgtggttataattattaatctatctatatataagtacaaacatatatttgtcacctttgtagttgtatatatatatggaaggaaataatactaattaattttgcctaaataactttaatataaatatatatataaacatatatttgtcaccttgtatagctgtatatatgtatatatagtcgatagaagaaaaggataagaggaaatatttgtagcatatatatacttgagcaaaattcatttttattttaattctaccatgagatcgatattcaacgagtcattacaggaaaccctactacttacaattgcaagcaacttatcattgaatgtctgaaaataggggacattcctaagactgttgcactaaacaaggttgacatgtgggttcaaatccatgatcttcaatcacgattcaagactaaacatgtcgttcatgaggctagcaattatatatatagatgcttatattgattcatgtgtgaataatttcacgattatttgttaggaatacctaagagtgtgtgcatattgatattgatgttccccttaagagatgaatgaagttttgatgttgaggaagtgaagcttcttatgctaatttcaaataagaaaaagtttccacattctgcttatttgtggtattatatgggtcatttccaacgattctgtgggaattgatacgatggattatgtgctatgattttatctctgcccacagaagtataaaaatgtacaatgaaaactccatgagctaataggaacatcttgcatgatagggtgacttacctctgttgatacaatcccccaaatcttgcatgataccaatctaattaagaagaaatggttgtgaaagggcattcgtagtcgctcaaggtcatggaactcgagccacatgacactcaatttacgtgatctcgagaaatcaagcgacttgtcctctgtgtcagaccacataaagactcacaacagaaaggaaatcacattgttttcccaatgtccactactctaacatcctcgatctctccaaaccaatgcacacacacacacacctatctctgtcaacagtgtgtccatctacggataatggttaccaagacacggggcctcacctaactagtccaatagtaaatatttaattatatttaccccataagtgagcttattttatatgcaaaaatcctaatagatacgggtcaaccagatccattagtcggatagcctataaataaggctctacccctccatagccaagagcttaataatattgactcgtgaactaagactcattaacgccttaatcatgtaaaaatctcttcttattcattttttaaatacgttttctttagcttaatcttcttttaattcagtttatgaaaaactcgataaataaaagcatttgcaagaatgagagattttagcacccctccagctaaatcgcccccggtttgcccctttagcagttcttcattctcttattcagaatcggagaacccaatcatcataatctgtgtaggtttggccaaggattttttttagaattgggtcatccgacgaaggacccaatttcttcgaagcgctagcttgcttgcttgcttccccactacaaaaaatcttacttttagtgacaataaaatttgtgactaaaagttaaaaagttttgactaattataaattatcattcttatgttgtgactaaaattttcgtgactaaaagtatttgtcacaaaaatcacaatttgttgtgactaaatgtgttataagtcataatagttcacctaacagtgcatttagtgaaagaggagaagttgtgtggacctatgtattcgagatggatgtacacatttaaacgatacatgaaaatcttgaagtgctatgtgagaagtagaagtatttaatcatacatgagtcgagctgatcgtgacaaagcgcatc

SEQ ID NO: 324451 - DNA, 676 bp, Cannabis indica
aaaaaaaaacaattaaggagactaatttgacaaaaataattaagggcagtactaagttgggaatcagctgccacacaaataaaacgaaatgaaatcctcataatacaatcgtacacactgatgttatgtttacccatttaacaaacaaaaaccaacttttttctttgcttattatttttcttgaatgatgatcctttcaatgaaattaattagggcatgttaaatgagggtagtttgaaagaaagagagtgggatcaaaagtgggtgaggtggatgagagagagtgaaaattttgtgagattgtagtagatactggtaagttacgtaattttaagaaattttttattagtttaaaatattaaatgggtccaccattgcaattataagagtactttgcattggtgaccttacataaatgaatgatggaaaatattcatttacataaatacaagcacaactatttctcaacaataaatgtaaattaggggcacttaaaaaaactagacaacgtaacaaattaaagaaaagatcttctactgtgaaatcttttcttagattttgtttctcttatggcattaattttgaatttcacaaagtatatttaatttgttttcctcatgttataattatagtttttgaagtatatatgatagtattattatatattttttgcaat

SEQ ID NO: 324452 - DNA, 778 bp, Cannabis indica
tttttatttttgaaagaataacaaaatgttaatgagtttgttgttcataaaaaaaaaaattaatgtctagtaaaggctaattatgtaattcacatagtagaagtccacagacattctcacttttataaaaattatagatataatatttcgaatataattttatatataaatattatattgataagttgagtagatagaataaagaaaacttttcaagtggaagaaaatatttatttttccactataattattcggctgataagaaaaaaattagattattttgaactaacagttttactgttatattggtgtttaaattactactaaaaaaacatattagtaattaaatattgttaataatttaaaaaagttttttcacttaatttttttccatataaaaagaattgtatagaaaaaaaaaatttgattcaacaaaaattttcatatcaaataattattatttttttattattattttccacatttttttctttaccactttccttccccactaaaatctaacttcaaaatataccactaacaaaactacatttaatataatattgcggtaatatgataataatattattttcttttttaaaaatctcaaaatgataaaaagaaatttcgtaaaaacattaaaaaaaatagataatttgtgtaatttttttttgttgggctatttcaaaaatatgagaaaaattattaagattatgataaatatggtataaaaagtaaatgccactaaatatgtgattatttaaccaatcaaactaaa

SEQ ID NO: 324453 - DNA, 703 bp, Cannabis indica
tttattttttgtattttatttcaagcgagtctaagttcgggatcggattttaggtcagaggtcgggttcaacgccaaggccgtggggaggaatttaggtccgagtttggttagaatctaaaatattaattaagaaaaaaaaactgtttaaaaaaaattgaaagtgattttgttttgtttttaaagttttgatttttaatcaaaaaattaaaaagtgaaaacaggtttatagaacatgtttttgaaaaatatttttatttttttaattttaaaaacaaaaactgattaaaaaagtgttactaaatgcagcctatataaactaaataattaaaccacgcttgttgcttaatatttttattaatattaattaagtggtataacaataggaaatatgatattgtgatattataatttaaaaaaaaagtaacatgttacaattttaaaaatacaatttagtattttacaaaatatatagaaactagaaagatatggttatttttaacaaataaaaaaatagaattaacatagaaattatgtgtattaatttaaaattaattagaagaaaaagataacaattcaaccaaaatttagaaaaagaaaaaaaactattaattagctacttgtgaacaaattttaactataaatattaattttaaaaatattaaatcattagattttggcccgatagcaaataataaaagaga

SEQ ID NO: 324454 - DNA, 625 bp, Cannabis indica
agataaaagcaataatgtaaacaatgataccagaaatatagtagttcagcatagctcagtctgcctagtcacaactaaaaaactccctttgtcttcgctttttgtattttttttttatgaataaggaaattgtattgctcaaactatcaaattacacttccagtgtacatatccgagtgctgtagctatttcatctacttaccgtaattacaaaaaaattacaaattgctcaaccattgtctatctatattctttgttttgcttggcattacccctgttaatctctttttaccccctattttactctatttgcaatgacacttacttgccattgcttttgattccacaaaacatcattccttgcctcccatatctggtatactaaagcagctagtattgtcttcagcatgcttcttctaactgctgtcacatgtttgatcttgctggaaagttgcgagtaatttctgcaattttgactgctggtgtcccccagttcaaatctctcttcacttccatcagacacttccttctgtattcacagttaaaaaataaatgctcaacagtttctttttctttcccacatagtagacaggttgtgtaacgccctaatgctaaggcacgctac

SEQ ID NO: 324455 - DNA, 1031 bp, Cannabis indica
gaatggaataaaattatttcctttccattccattccattttattacctccaaccaaacgccacctaaatgctctgctcgttcttttaccagagagcgactgtgttggtagaagaatgtggctgataaggatgttcatccacctcactcaccacactacataaaaaatgggagtttgaaattttttgctatgccattgtagtttacatttttactaatgcaatttataatttataattgtaattcaaaccacaatgtatcattatatattataaaaattaatgtttatttttccaatgaacaactcatatatttacaaaatccgaatcatacaattaattttttaaaaaaaaaaaacatccgtataaattattcttatttttattaagataattacggtctccaaaaagtttattttgatacaaataaattcctgtttaccgaaatttttggaaactaagaggttgtttggctttacagtttaaaaactgtaatctgttttttaaaattcctgaaaacagtttttaaaaagttactttgtgtttctcttaaagaggaaagcttggagcaattttagtagagtttcagctatctatgttgtgatccccacttcgtatggaaatataagggtatttataggtagtgagacgggtatggacatgcccatgacccgcctagggtttctgctcaaagccaactaatagggtaaattacatgcaaaaagagctgactattggggcccttggaagaaattgggctcatgtgttgcagcagctggacaaaaggggaccattgtacgtagtggacacatgtcgccaaaaggtttcaccttgaaaagtaaaggtctggaataactgtctggcaaaaaggtgtatgcagtacgcactgccatgtctggacacaggggagaagatctgattatgtgtcagaaaaaataataaccgtcgctaggagttccgggtttgtgttcaagatagacatctgcgatagttttgggtgatcagcattcgcgataagccctttgagtacccat

SEQ ID NO: 324456 - DNA, 1183 bp, Cannabis indica
atgataaataatctaattcaatataatacaatacaatacaatacaatacaacttaatacgatatttcaaacgagcccttaaagaaaaataagacaccttaaagcacttacaaggctcgtgaagagaaatggctccatgtggccacccactacaaaaaatcttacttttattcacaacaaaatttgtgactaaagataaaaaggctaattataaattatcattattgtattgtaactaaaaggtctgtggctaaaagtattagtcacaaaaattacgatttgttgtgactaaatatgtttttagtcacaatatatttgttgtgactaaaactaaattagtaataacttgtaactaaattaatactatggtttagtcacaagtaatattttattgtgactaaaagtcacatttagtcacaaaaaatttatgttgtcactaaaaggttgtcactaaacgtagtagttttttgtagtgaccatattgtactagggccaattagcttcgaactaatgcattgtttttgtttctatttcaaacttgtttaaaaaaataaaatattgatactcataatattttctttgtgccttgttgtccattagatttttctagaacaattctttcctcgccttttgggaaaaccctgatatacttgtcacaatctcaataataaggaatatttttgtgttagagattttttcattaatccttgtatataaaaggcatgtactgtaccaattgtattgtaccaaaatattcaatacagagaaaatacagagcatttctttttggtttttctttcctttattttttgtcttggtatcaaagctgataactctgggttctggcgcaaactgtggcatctaaagatccccccaaaggttaagaactttctgaggcgtgctacttctgattgcctcccaacatgcctccaacttgtgtcaaaacatgtgagaatctcatcctcttgcccgatatgtaaatcccatcctgaaacgactgtccatgctttattaaactgtcaacttgctttgcattgctggtcaacattggggattactttgaacatggctttatcatcctcatttggtaattggctccaagaagctttcttaaaacttgatgaggatcaagtatgtcgtgctgcgatgctatgttgggccttgtggaaagcaagaaatgctac

SEQ ID NO: 324457 - DNA, 698 bp, Cannabis indica
aagagggtttggtgaggaatatatattgggaagtggtaggtgaaagttagggtttgccaaagttagttgttgagagctactactatgccttttcacacacactatatatatatatatatatatatatatatttattcactaattaatattaataatatgtatataattacataattaattaaatatgattatatatatatgtattaatttaattactatatgatgacgccttctatacctttgcatgatgcagcctataatatatatgatgatggcatttccaccctaatattaattatatatataaatatcattttcattttggccttcttttttttttccaatgctaattaatattcaaactacatggtctaattcttaagaaaattaaattaattaattattattatttctctcatagggtcatttaagtaaattacatgtttgaggaactactacggtaggtataatagagtttttgtatattgtatgtatattaaagtcaaatttctaaagaaaacaaaagtcaattttttctcaatgaatataaatcaaatattctaattttgacatatatatataaaactactaatatggtcctcaactatataataatgaaggctaattagtaatttttcttcttgaattttgacacgtagtaaatcgtgttttctgaatttttttggctgttaaaaatt

SEQ ID NO: 324458 - DNA, 829 bp, Cannabis indica
taactaaaaaagtgggataaaatcccctttcttgtagtgactcatcatctcaccattcacaagacaaaccttagttgtactctctttcttgcacacacttccctagatatacttcagtcattgctcacctaattaaccttggttcgttaacatattcctctaaagtcatttatagtcttacagagacactcaaagagatctccactaaagttcttactcattctaatctcccaaatatattattgagaacatcaatttggtgtatttgggtatattaataaaatgacaagtggagtagtctattactgacaatcaaagtggtgaactactataaaattattgtatctttatttaaagcgacttattttttgacaattattgtcctagtccagtatctttatttttatgacctcctaagatcaggttgacaaaaaatcgcatcaataataacaaatgaacatatttagatgagcattattacagaatagcttttgttagttttattttgttatttttctgttttcttttgtcagagttagttacatttgtaactgttgtaacaactctccctctgtactctctttgcctataaataaagatcatgagctcattttcatggctcaagcttttgcaagactttgtactcaaatattttctttgtgttcattgatagccttgtattgataagcttccacatggtattagattgccatcgacattgttagtctcccatggatcctggtgttcttgaaaacccctctgctactgttggaaattattttaccaagatcttagatctactcacaagtatgttgattaacaccctaaa

SEQ ID NO: 324459 - DNA, 1283 bp, Cannabis indica
ccccccctcaagttggagcatatatatcagatatggacatcttggatagatgagtgttgatgactgtggatgatagaggtttggtaaaagtgtcagctagttgatgagtacccgagattggaatgaggcgaatggttgagtttttgattttgtcccgaacaaaatgacagtctaactcaatgtgttttgtcctttcgtgaaaggttggattgttggcaatatggattgcgaactgattgtcacaataaatgaacgctggatggggctgtggtatctgaaaatcgtggagaaggtactgtaaccaagtgatttcacttgctgtggcagccaatgcacggtactctgcttcagcagagctcttagaaattgtaggctgcttcttagttttccaggatatgagattatcactaagaaaaacacagtatccagttgtggaacgtcgagtaatcgggcatgatgcccagtcagaatccgagaaaccccgaagtgttaaggctgatgtggatgaatagaaaagaccttggccaggttttcccttgagatatcttagtaggtgatgaacagcttgtaaatgaggagtccttggtgtggccatgaattggctgagacaattcacggcgaaggtaatgtctggtctggatagagtaaggtagagcaacttcccaatcaattgtcgataatgtgatgggttatcaagtggttcaccgtgttcattgtcgagtttttgtttgggatccatgggggttttagtaggtttgctgcctacataacccgtgtcatcgagaagctgaagtgtgtattgtctttgagagatgaatagaccttgtttggcacgggtaatctcaaaaccgagaaagtacttgagatttccaagtgccttacgcttaaatttttggtgtagggtgtctcgtagttgacggagaagagaaagattgggccctgtaatgacaatgtcgtcgacataaactagaagggcaatgaaagtatccttggtgcctcttgtgaacaatgtatagtcagcttgagactgctgaaatccttcatggaggagtgcatccgagagcttcttgtaccactgtcgagaagactgcttaagaccgtatatggatttgtgtagcttgcatactaaattggattctgcattaagagaggaagggagtgttagtcctttaggaagagtcatatagacttcttcgttgagatcaccttttaaaaatgcattatcaatatcaagttgtaggatcggccattgttgaatagtagagtgttgggttttatgccct

SEQ ID NO: 324460 - DNA, 1004 bp, Cannabis indica
tttatttagtaggtgaagtaagtgattaataaaattgaatttccattaagaaaaataaaaaataaatataaaatagcattagctgtaattataatttagtaattaaaatcatggtctcccgacatttatgtcacatcgagctcccgtagatcagatgtgatgactgagctgagtacattattattttgtcgaaaaattataaatgtgtacatccactacccactgacttcatgccacgtgcacattttaaatgaattgtgtattgggctctcgagacgtggcagttttccactggctagacggaagattctattacattgatttcaaccatgaagatgaaactttggcgatttgtttgtcttatttatattccccgtttgattggtactcctcctcttctcactttctattctttataaattataatgccttatttttgttggtgttgcaaaatacaaaagaaaaaaaaggttattacataaaaattcaaaagctaacccccctatacttgggttttattggtcttgattggccacgtgttcatttttctatccattttttaagcctcctttcaaaaaaaaaaaaaaaaaaacatccattttagctttattatgcaataatttaattatggggtaccataatgaagtgaagagtttgaaatacaacgtcaactcttttcggtagcagaaaagagctttgaattttgttatatatatatatttatatataacataattttttaaataaaaaacattctgcatgttttcttagaagaaaatttaatgtgataagcttggttaattaagcttcatccgatcaatctaaatctaatgatagagtgcatatatatctctttataatgtgactaaatattctaatccctatcatttttttttttaaaaaaaatgactgtatctattatatacatagttttatatatatatacatatatatatatatagagagagagagagagaggggagggggggggggaggggggaggg

SEQ ID NO: 324461 - DNA, 1723 bp, Cannabis indica
agaaaaaatctcaaataactatgtcaatccatgataccaatttcacaccccaacaaccccctcctctcaaaaagatttgatcactcaatagaaattccaatgtgataatcagagttgcagaagaatcagtcagtattaacaggtatatagacaactgtttcctatcactacagatatatgagattaaccgcaaaaagcaactgaaaagtagaaaataaagtttttgaaaaaaacctacaacatcatagagctgtcgccaaacatggagtactctgaccacacaagattctaaacaataggaatcatgaaataacataccgcataagagaacaggtcatcattcccagtagacttcacactactatagtaaataagaaaatggaatatccagagagatatagatcttggatcagcctccagagcccgagatataatgtgaagagcctgcaaaactcaacttaaaatgataagtagtgaagcttctgaaggtgattctatagacttacgagttatgatgcagataaaattctaacaacgcacactaaataaattacctctttcaaagcttcaaatttgtctacctcctgattgaaaattaaagtagccgtttccagggcttgctcattatcagtcaaatactgtttgtgttcattctaagcatacatcatgccaagaaaaaaattagcacatccagagatagtgatcagagaacaaacaaagaaaaatacttaactcttgtatgaatctaagaacttgaaaatagggggattcaaaacaggaagcgccaataaagctcaccacacaattttatcagagacctcgtctattaaccaaaatcaaaccaataacgagaacatcccaagcaattgcactggaacgagtatgtgttcacgaaaaacagataattgatcccaaatttttagtgtttctaaatcctaaatcaatcaagttatttattccttaattataagatgcatcaatatactaataagattgtagttgctattagcatcaaatttcttttataaagtgttttacaaccacacaaatgacccaagaatagtttcaaactaaataacagataatagaaagaccaaagtttgcgtgaatacaaccaagaagataattcactaaacatgtattcaatttttgtgaaggacagtaaacagatatgcaagattacaatgatgcaaaaaaaaaaaaatcacatgtaacctataaaaagaagttctaaaaatcgcacttatcatgtaaagtgtaaactgataacacatagataaaatgcaacaaacaagaaacaaaaaagaagaagaatagatatctgggttaaaataaggaaagaggaacagaattaatacacaaaccattctgctagttctactcagaatatatgacgattgcctactccagcttccacagacttctatgcggccatcactaccatgtgcgagaggcccatgtgcaggcaaaccatttgacaacaaacttgataaagttaaggataaactgaaacatttctgccagcaatgactatttctccatgctaaaacagattggtatgagttcagatcagctttcagggtatctaagccaactagatatgttggggacatcataacatcatagtacttgggaacttttgctgcatcacaataaatattttagaagtaatataaattgaactaggcagtatgagaaaacattagtcaaaaaaaaaaaaaaa

SEQ ID NO: 324462 - DNA, 2092 bp, Cannabis indica
ggcataaaacccaacagttattgttactagaggctcgacttcggtccacttggtgaagtaatccactgcgaccactgcatattgtactccatctttaccttagggtaattgttcgatcaagtttattccccatttagcaaagggctagggactttgcatctgtattagctcatttgggggtgctcgatgaatctttgaaaatctttggcattttcacacttcatcacatgggcctttgaatcttcaatcatagttggctagaaatatcattgccttaatattatcttagattaacttttccccccagaataattaccacaaaatccttcatgttctttggataggagtcgtgtagcttcttcttttgttacacaccgtaacagtggcatggagaaacctctttgatacattacaccttccactatgatgtgtcgtgcatccttcctcataatttttcgagcctcattcctgttgcttggaagttctccagtgttgagataagctactatgtgagtcatccaatttggtgtagtgtctatcattttgacttcttctgcacaggtgatactgggttctttcaaaaattagattggaaccaggttggccttatctgttactatgctgctcgtaagccatgctaaagtattaacaattacattttcttcctttagaatacgcttaaaggcataacccttgaattgtgtgagcatgtcatgggtcttattgagataagccaccatatattcccctgaaatgtgatttaccactgactgtgagtcactgtagacttcaatgtattaggcatgtacctctcgagcaagctttagcctaactatgagcgcttcatattctgcttcattgttggaggctttgaatctaaatttaattgctccatgcagaggttacccccaggtgtgatgagagaaaatcttgcaccaaaacgctgaccagtggctgatccatctacatgtaacttccaaataagtttatcttcattttcttcttgtggggactcctcttctggtcttttgtctagctcggggtcatcttttggactgtctgcttctttgcccgtgcattcggccacaaagtctaccaaagcttgcccttttattgttgtgcagggttgaaaaattatttcgtccagaagcatcaggcttttgtagaacttgtcttaagggttggttggtatacacctaaacaggatgagcctggaagtagggccttaactttcttgtagctaagatcacatagtaagttagcttttcaattaaagggtagtgaccttctgcctcaactagtctcttgctgatatagtagactggatgttagacattgttctcttctcttatcagcacggtgcttatagcatatttagtgactaataggtatattcctaattcttctctgtccaaaggtttttgagagtacgaaaggctttgcagttgcttttttagttcttggaaagcattttaacattattttatccattcaaacttcttgttacctcggaggatattcaacaaaggaacacacttgtttgtcaattttgaaataaatttgttgagtgcgaccacccgaccagttaggctttgtacttcctttaattttttggtgatttcatatctaggagggcttgtattttctctaggttgacttttattcctcgagcattaacaatgaatctaagaaacttactcgagctgacctcgaagaaacactttaagggattgagtttcatattgtattttctaaggattttgaagcattcatctagatcctctatgtgctctccatccttccttaatttgacaagcatgtcatccacatatacttacatgttcggtctgattttgtctttgaacattttgttaactaacctttggtaggtatttccagtttttttaagaccaaacaacattactttatagtagtgtagacccatgtctgtttagaagcttgtgtgttcttgatcaggtggatgcattcttatctggttgtacctattgggttttattccctaaataaaacccatttcaatataatcagattgactaattaataaagatcagaaatcacattttatgttgca

SEQ ID NO: 324463 - DNA, 1160 bp, Cannabis indica
aaaaattttagtacttttattttgcttttatttaattttcttaactcaaaatttaacagtaaaattctcaatactcctgttcgtaatttaatattttcatctattttaagtgttaagtgtcgttgacttttttttacgtgtacatcgaagatagtatacacatgacacaattttattaatctactaaataattattaataaaattaaaacattaaaaaaattaaaataaaattgaaatattgtaaagtaaaaaaacaatttttttcttttttttatttaaaaaaaacacaattagaaaccctaattggaaaattatacaaatcctaattggaaatcttaatttcatttctcgacagccaccttctctctttagtcttttctctgtgtttgtgcggcggctactggaacggcgggagctctgtgctccgaattcacccaaaagtgggagaagaattcgaataaaaattgtgaattttgaaactttaacttggcccacatttcaggccgagccgtatcactatatgagtactgaattttgttcacttttgcaatcaattcactataataactgaatatcacaattttcttcaagtcacttttatcaatctatttcagattcagttatgctccccacttaatacttctacatttctggtttcttatgatctattgatatgcacatatcaataatggcttataggaccatattttccccaaagttgaaggaaatctattaattggtaactgtcgatttcaattcaagtgcttctttcaaccattttgaaaagtgtagtaattcactgcgagactacttatattttattttttataactttttatttattttttttagcaaaacccgttatattacttgttttacaaatttaaaatgctagttaaatatcactattaaattattaactaaatgacaataattaagttgatatttaaagataatatctaactaaaccttcaaatttacaaataaaataaaataaaaaagtaagagaaattttgccacatataagaaaaattaaaatgtttaaatccaaaatgtatgagggtttcactgccaataattcttaaaacataaacaaaatcatatagaactgaagaacactttaagatataacttttggattcaatataaacaatattct

SEQ ID NO: 324464 - DNA, 473 bp, Cannabis indica
ggttgggcggtttacaaaaatttatgtacaaccctaatcaattctaaacacaaaccataacttaattaacgcaactacaaaaccactattaaagttcaaacttgagttccatgaactcaaacttgaaactttccaccaacagcagcttagaaactctaaataactcacataataaaacaattgaagctcaaaaactgatttaaacacaaacctaaatacacagaactgaattcatgaaaaattacatttaaaaccatgtttttcttccaaaatttaaagagaaactaagatggcatttagttagaggtaataaaatggaatggaaaggaaaggaaacaatcttcattccactcatttatttggttacatattaaagtgttggaatgtcattctaatagaatggtctttccaccattttcgtgaaatgacaattccattttataatggaaggaaagaccattctaatgcatgat

SEQ ID NO: 324465 - DNA, 884 bp, Cannabis indica
tatttttattaatcatgtaaaaaagataaagatataagaggagtgctcctaatttttcgtaagaaagagaaagagcgttaaaaaatataagaaaaaatgtctaagaaaagaatgttattggtaaacgataaaaaaattaattaagatacttttataacatgtgattaattagtgaaaattagtatgaaatagtttgaatgtgtgtagtaagaaaatgtaaaagagagaaaaaaatatagaataagtgcttgtaatttttttttacaaaaataacgtcatagagtgaaaaaagtgttaaaaaaggtggtgtaaagagctatacttattatatttatatgagtattcaatggttacaataaaaatgtaaccataatggttacatttttatatgacctgctatagcaggttactaacaggtaattttttttagacttaaattaattatatatcttaataaattaattttttaattaaaatatttaataaaacttttttagaaatatatatttatatatatttcttattttaaagaacgggagattgtgagcaaatatgggatgaaatgagaaaggaggatcgcgattctaggaatggggttgttgattgtgtcgtctcctgagcttgcaggtgacgggatgcagctccatcgggactagtagggatgccgcaccatgagggaactgagaactatggcggttgagaaatagatgaaaagttttttgggttttatttttatgatttttggtaggcgtgttcgcggtgcggtttttgactttttttaaaaccatcccgcatatgcggtttttccaatttcccaaaccgcacctgcaccgcgaaattaaaaaaccgcaaaaactgtgctgtaaaaaatggtgcggtgcggt

SEQ ID NO: 324466 - DNA, 1124 bp, Cannabis indica
ttttatttattttaatgtgttatatattagaaatataaaataattataatttgttttattttgttaaaaaaatatttttctcataaatattagataatttaatattaaaaaaagtaaccaatctaaaataatcaatccaatgtatacttttgtaaattggattgaatttaaatagagtattcttacgtagagatttttctgtacttagaaattagaatatagttggtagagacgttaagattttccgagactattttaccataaaagcactgccctttcaattacttgtgctatacgtactaactttgaagtcggcagcgctttctattctattaaccatatacctacaaatttatacgtgatgatgagtagttcggaggcaaaagtaaccccacatcaattttttttttctttgagaaattttgtgtatttaaatttataagaatacttattaaatccatctcttttaaataaatatttcatttgaacatattaagcttaaagacatgacgtctttgacagatatatatataaatttatgtatttagcatgtaaagttcagatggcattataacttaacggcatgaatattataaacatatatgatcatgttttttttttttaacatcatatgatcatgttatttatttattatgttatttaatgaattcattttccttcttgtaacttctggaagactggaccacgtaatcagtccaaaacaattcattatatctggtttccatatgaaatactggacacctttaaaggctctcaaaaatattttctttagcaatacacctgtgtagttactgctttttcggataaaatttaaaaaattccctaatatccttcttggtaggttttttatttatttcgatatttattttttaaaaataatcattacatattttataattatttaagatcatttgtaaatttgtaaatttttttaaataatttattatatcaaaaattatatttaaagaattactttaatgtatataaaattaggggtgttcattggatcacatccaatgaatttggacccatccaatccaatccaattatttattagatattgaatttttccatccgatccaatccaattgaattgagtcatc

SEQ ID NO: 324467 - DNA, 683 bp, Cannabis indica
aattcttatttctatttgacaataaaataaataaattttaaaactaaacaatctaactaaaaatgaaataactaaacgataaacaagatttaatcaagaatgaaatatagggaaattaacttcaattgcatccatttcctatttcaataatgcaaatcaatttttcttcttctatctaacatgatagcgaattattatttcacaaaaattctttttagacattagggtactaaattgtaagaataattattgcatgcgttaagcaatcttaataattctcttattttctttctttcttactgaacatagtgttaagtaccatgtcataagggttttgttttgaaaattttattaggacattattggcagatgaagatgattgataaaatgtcacagtttattaaatagatgattaattcttaaaataaatgaaggtctataagcttaagtattaattttacatgcacaaaaatactctaattttcaattactattattaatttacatatgaattacaaacaattatcaccgctcaagtttcctcatctagtgggccttcgaattagaaacacaagcataccgatgagatttgtccaatttgttctgcttgtaagaatatttttatttaaggaaatatattttatttaaagaaatcaatttctatttaaggaaataaataaata

SEQ ID NO: 324468 - DNA, 864 bp, Cannabis indica
ctataaaaggagagctccataagctcatttttacgtttagaaaagcaaccataagatcaaagcatctctttctagaaattagagtatccatacttagccatttttctgtaatccatcttgtgagaaataaaactcggagtagacatagctccattactatcttaatacagggagtgaactattataaattccgtgtctctcatatatatacttaacttataattcattctcgttaatttagcgaacatgtgtggcttaaagatctgtgtccaaatttccacctcaacataaatattcctccaatacataataaaaatttacaatgtaaattgacataataattaaaggttttgaaaaatattaatggcaatattataattaaaaaggtgcatttataagaccatactataaataaaaaaggcacattaaatcaatattgtgccatatttaacacatttttttaccacattgaagaaaataatttttacaataatagtatagtattacatcaatgactgactttagtggggtcgacaaaatgagtccaacacgataataagagtcgaaacccacacgaaacttgagacctagactaggactctagatccgaactctgatactaggaccagggctcaggcgcggactcagaccaagacccaaacacggactcatacctggacccatatactggtcacgagtcataagtatgagttcggattccaaggttcgggctctgagtctaagtcaaggtcttggtatcggggtggggttgggttcaagtcatggtatgatgtagaatattgaagtttttttagtgaaaaaaatctaaaaacaattttttttacaaaatattagccaaacacc

SEQ ID NO: 324469 - DNA, 884 bp, Cannabis indica
atgattatttttcactatgttgacaatactataatcacgaataacaatatgttcagaatttaatagaatttatatattgaacatataatcatgaaagtaatcgtgtaaaccatgaacataaaatgatttctaatcttttattaaatagtaaatgagattatattgaaacaagttttatttggggcataaaatctcaacatatgtatacatatattgctaaggataaaaattattctatctttttcttttcatttcaaaaacaaatattctaaactaaaattactttataacaaaagtatctattattattagtgtttttggtaaggtgacaggtgtaattccaagtattcttagtcaacttatgggcccattcactaagcccaagcgaatcgatggattgacccagaaacaaagccaaacaagaagttcagaaccaacctcaactcttccatgagtaagccagatgtatagatccaaaaagatgattttattcaaaattaataagtaatcaaagaaatgaagacggatgccctcaaaggtcatttggagagagtagtcgaaagggtgttgtcagggagcaccgaccgtctgggatcaatcttacatggaacatccccaaaaagaatctaaagaatcagggggttgtcccttgtgtcagaccttggaaaagtgcacaccaaaaaggaaaccacctttttgccaatgtcatctactttgacatccactcctcacggccgatagctcatgctttgattgtttatttattttattttttttttggttttagcgttgtttttacggttatttttcattaatttatttttttaaggtgtgtggtttttttatgtttttctaagtgacagtataatatatatatatatata

SEQ ID NO: 324470 - DNA, 1387 bp, Cannabis indica
atatatctatgttataatagttcaatcacaattatataatattttgtctgtgattatatattagagttggtgattgggacatttgtggactaaaatcatgagatgttatatggtataattatatgtacggataaatttccataataatactttgttcaaagatatgcttctattggaaatttttgtgatgaggggcaactcacacccacaattcttttgctacatgaagaataagatatttatcaagagagacatatatatacacacacatgtaaatactaattagcttataacatatgcttttctagactactttgattatttaaaaaatattaagagtttggttttgtcaacaagaattaataattttactttaatataaattaaaagatgaattaaaatgaaaaaaaaattaccccatatattatttttttaatttttttttcttcaaatttactgtttgagttgctctggtagttgctctggtagtttttatgtgagttgttatttgaattttaattgtaatttaagttcgttagttgttatgtgaattttcataaaattaaaaaaaaaaaaaaaaaaaaagaagaaaaaaactttcaaatgtaaaaataaaaaaatgcccaaaaaaaattatgctctaatttagtattacttttaaatctaatagacgtgtgaaatttggtaccaattttggtgtatttttagaatgaaataatgtgaagattttacactgaagtaaatgatgcattaaggatgctctaagcaataaaagtgatttgtagagagagacatggagagaagcacatgtatagaacacaaggtatttatgctttggtttgtgggtgtaataaactatagtaatttagatctagaggaccctttttctttttcataacatatatatatatatatatacattatatttacttttcttttaattataatatagttttgctcctttaattatagttattttttaactgttcttttctgcaaaatctgaaatgattaattaataaccatcagacacttgaacatgcttaagttaaggattctacatgttttttgtttagatgtaaaacaagcttcctcattattgcttcattataataataataataataataataataataataataataataataataataataataataataataataaaattaaaacattaatttatgcttcattactcaacatatataacacttacaaaaaagaaaaaagaaataacataacactttaattaatcatataatctatattatcatgataattaacatttttgtgtatacataattttgaataatctactttgttccgattgatgttgtgcagtgattaccagtggcggaactagacaaagactcaa

SEQ ID NO: 324471 - DNA, 1942 bp, Cannabis indica
tgataggcgtcggttgcgaatttcgcgaaaaccgacgcctaaagggcttaaaaactgcctctaaaaggggtgttttttgtagtagtgaattggaaaacaattagtgatgcttggtgtaatgaccgcatagttaaattatgagaattagtagataaataagaattaatcattttatgatttatgtgtttcttgatagaaagttatggcttattatcagaaataggccttagaaaaaaaatttctcaattacagagacatatttaaattctagaggtatatatactgtgtatgaattttataattttcatattttgtgttcggtaacagtagaatgtgatggtttggccaatagagttacttagatacggttgagtatattaacaaagctagataattagatatttaaaatgtcgagattattcaggattatacttttggactattttacccctaagtgtgtaaattacctttttagtatagttgggtaaaaatgtcttttccttcttcttgtcttaagtgacttagagggatttttagtgattgtctctttatcttttagataataagctgaaaaggattaattattttagtctttatcttcataattcaaaaaattagaaaatttcaagacctttctctctctgtttaaggtcggccgcaccaagaaaattaagggagtttaggattttctagtagtttagatcaagttaagagttatttgagtaggattttaaagtttaacttaaggtaattcttgttcctcatcttcttttttattttaagtgtaaaagttaggttttaacgtataattttgattttggccactgttgggttttggtagtgttagaatttagttcttaaaattgaattaggtttgtttgagctattttagagttttttggtgggctgtagcaagtttgaactaggtttgagcttttaaagctcaaatttagctctttaatgatggatttgaattctgagctttgttgatgcttttaattgtgaattatgattattggacctaatttaggtattcccaaaagtttagaaagatttggtttcgaattgtggtagttttgaggtttggggaaaaatctgctgtgaaaatgacagactgtttctgggaaaatggcctaccatttttccaggcagaaaacccaaaaaaacggtctatcattttcacagaaatggcctgccatttcgttagggtactcttcctgaaaccttttttttttcttgttaagtagggtttagtcacgctatttatcaataaagaaaaaagaaacttttagtttcaagtttaagtccctcaaaagtgatttagcggatcacttaccagttttacgtaattgtgacttagggccttaaatcgtcgagcaacagttgtcactcaaagttaccgacacacttgcattcagaattaagaaaatattagtataatgatatgcatatatgattacatatttagcgtgcatgttaatgaattcctgttagttaacatattaaaatagtagtattagtgtacatagagttgcactgaataccgatagttatatgtttggtagagtactaattgacgctatcacatcggtacgactagagtaccgagtatagactaatattatggtcaatagtactatcatatgaacattctagactcagtttgcgtgggacatgtgatagggttataattgggtgtatggacgcctagttataattcggtgtaagtttatgtcatgattatacttttcttactgagtctttcgactcacagttattacgtgtgtgtgcaggtataagctagaaccgaattgggatgagtctaaagctaatggtgaagattatacatatcaagatggttagacctggagcgttcatggtcttcgggacaatttaggctcacctttttaatagtcagttaatgtaagtattatgtagactt

SEQ ID NO: 324472 - DNA, 522 bp, Cannabis indica
aactatataatattccataaaattcaaatcttgaccaaaggtcgacatgcctttcttgacagaaataataataataaaaaaaaaaaatacataggttttgatcgtaatatttcttgtccaaatgtcaaccatgtgatttgattttttaatttttaattttctttaggttatataagagattatttattgacccatgtgaactgatatttctaggcctatcaaagtttgcttttgttatttttgctttttttctttctttatacatttctagctaaaaaaatggtgttttattttgacatgcatacaaatatgacattgtcaaaacatattagccttttatcaagtgagtaattttacttgttataggacacaatgaaaggtcaatttgtttggagctgtcgaactatattttgataggaatcatctaccacttttctttttgttgtaactaataatggagttatatatatatatatatatatatatatgggacacttacttaatgggtaatacccattgatg

SEQ ID NO: 324473 - DNA, 985 bp, Cannabis indica
tatttataattataaggtaaactattaggatttttttttttgaatcaaagatgattttattcataaactttcagcataaacaatagctttaaagcaagaggagcatcatgctcactgaaagtacaatctgacttcaaacaagaccctctagcaacacagtgagcgggcttattagcagatcgtttaacgaaaattacagaaatgttatttaatgacaatactaactcctgacaatcacgaacaagcaatccaaactgggaaggcatagcaattgaacttttaagagcttgaacagcaatcaaggaatcagtttcaagcaccacatcaatccattgctttctcttgatccaacttaaagcctctttgataccaattatctctgcaacttcaggcttcaccaccccagatcggcttcctgaaattgcttcaataagtgtacctttgtaatcccgagctacacaaccaaaaccaaacttattctccgattggaaaatagcgccatcaacattgaccttaaccgtatttgccattggtttccgccagtgctctctaacattgttaatatcatctactaacaatgccccctttttttgtgattgagcactactccattagtcaagggtaatactagccgatcgcaccacttctaaggcagaacaagatttgctattccacacaacatcattccgcacagcccaaattttccaacttaccatagcagcttcttggataacttctacaggttgagaatcaatcaatctaaagaaccaaagcttgaaatcattctcttgtatagtagcagtactaacacaagataaattccaacaagctttactaaatgcacaacccaatagaatatggaagatggtctcctcggctaagctacataagggacacgaagtttcaacattaacatgcttcgtatttaactattaggatttatttacatatactttgatttattttcttagattaaagtgatgat

SEQ ID NO: 324474 - DNA, 779 bp, Cannabis indica
atttagagatttaaagagaaagacttacttgatagtattgcactatcaaattgcggtaattaattattatagatcaataaagtacgcatatactttattattgtatattgttattgtgttttatattatatacaaatagaagatttattgttaatttatcttacaaccattacatatatattaatacaaatatgaaaaatgttgcaattagtaaatacattatttatttagagagttttactgtcaaaatttaaacttaaaaaattaagtgtaagtaaaatgataattgaaaaaatttaaccataaaaaattgaagttttatttttatttatctaataaaatagaaaaactccaagttctatattcaatttaaggtggtaaatttcacccaaccaaaaaaaagtggtaaatttcagaaaaagtggcgcaaaatagcaagaaatataggcgttggtacgtggtgtagttttaaaaaccaagggggatgcatccatagttatagcgggcttaacctacgcactcctaaaacaatagtttatataccacatgtctttattgggcggtgttttcacgcgctgtttgaatgtggggacaataaatgaaaattctacaatggatcgtgatggagtattatctgtttcggtatttttaagaaatttaaaaataattaacacatatgtgaaatagactatttaaatattaaataagagaattactccatatattatttttttaattttttttttcaaaatttacagtttgtgtttctaaagtggttg

SEQ ID NO: 324475 - DNA, 537 bp, Cannabis indica
tttttgtaaaaatttccgtgtgacagtatttttgtaaaagttaacccaaattccagtattattgtaagtttttctatttctaatatagtattatgttttgtattaacttgtacgtgtatatatattttgacatataaaaaaaaaatttaataatgttatacaaaattttcaaatatcaatattatttgaattaataatttttattttttatatattataaaaaaaaattaattaagagacaagtaatatttgctatatctatttaaccgcgtggatttggtaattagataaattgtttctttgtgtgattgaaaaagcaaacatatttgttatattgtactagttattatttacttttacaacttctacaaatatttattagtcatctgtgttaatcgattgccatcaaatattgagaaaattatactttataatattttatattgtcctattttatttttacctatcttttttaaagtctgttatttttacctttttttttaaattattgtattaattttgtccctatcacttcaa

SEQ ID NO: 324476 - DNA, 1549 bp, Cannabis indica
ttattagctaataactgacgccataggggtacatatggcgtcggttcatataaaccctttagcgtcgccctgatcagcgtcggtagcgaatttcgcaaaaactgacgctgaaagggcttaaaaactgacgctgaagggggtttttgtagtagtggacgctgctcatactctacgtggtaacaactgtcttacctgttttctagcaatagaaagagattctgaatccccaggtgctcatgatcaggtgtctgtaatcctagtcacacaaatctgggataattcacacttacggttaacccctgactttcaactcataaaaattcaagcatggcatttataactcagataatcatacagagctcggaatgagctttccaacgatataaagaactcccaaatcagagttcgaaatcaaaagttatgcattttcgaaaattcaacagaaactgcccaaaaacacgagcgcgggccgcggcatgcccaaaccatgccacggcacctgggactaattcccaggtccactcagaggagcgggccgcggcatgctccagagcatgccgcgggatctgggtgcggaacccagaaaccagcacctccaacacgaattttcagcaagaactgtactattttcaccccaaaatcataaccaaactaacaatataacaattaggatcactagcaaattaatagatgcacaacaaacatatttcaagcatcaaaatcccatactaaaccaagaattcaggtcgcatgacacacaaacacatgcttcaaacatgcaaccctcaagctcaagaactttgagttgaaacccaatactcacacatattttccagcagcaaccaaccacaaatatcaaataaataatcaaattcaagcttgaaaacatccatgaattattctctaagctcaatccacacaaatcaagagattaacatacaaactaacaagattaagcatccctttcacaacacatgcataaccaaaatcaaataacctaaacatctttctaccacaatatttcagcaagcaaatccatttaaaattcagtaaggaatctacctcacttccaaattcaaagccaattcaagcaatcccaagcatcaagcctcaaaatccccaaaactcccaagcttttcctcaaaataccaagttgcaaatcaaaagagtaagagagggagagggagagggtgagggataaacacaaccagaaaattaatccctttttccccaaaaaccacttttaatcaatgtaaatcaaatatggtcaaatgaccattttgccaccatggcttaaattcacacatacacccccacaaagggtaatttagtcatttcatgcataaataattcacaattaatttcagattatcactcatcaaataaaatgccaattaaatcaatccaatttgcatttcgggcccgaacccgattcggcccgaaattcccagttgtgactataccgcgccaacttgtcaaaacacacctgaaaagacaacagaggcatactatataataatatagttctattaagcacgtaattaaatta

SEQ ID NO: 324477 - DNA, 689 bp, Cannabis indica
tatatatatatatggaaattaataaccactactatgtataactctactagtttaaactactgcaagagtagtttttcttttagttttatgcagaagatatatagatgtacaatatattatctcttaagtaaactgtctttatataatggatctatctagctagagagaaaagtagtacattataattgcttctaattgttaatgaagttcttaataatataaggtaaatgtatagaaagtcaaatatatagtaccgtaagataagtaatatgaattccatgatatttgtataattagaagcaaccataaatgactagtctttattataagatataatttatacattctaataaccagcagtatatataattataataataataataattaattaacctgtggaaacaattctaagcagaatgtttcacgctggaatattcatgagctatatatataaaaaatatatactctcaatcggttatcaaccgaaataattatattttagttacaatttcaaactataattttaaaaaattaattaattataagtatgcaacttaacattaaggaaataagagacttgaaaaaatgatcataatcaaaatgaagattagaagatatcttaactatatgtctttgaaaatgaatggactagcttaactttgcaccattgcataagggtatgttat

SEQ ID NO: 324478 - DNA, 1245 bp, Cannabis indica
taatacttcctttaaaatacaaataaaaagcagctgaagtcatcacccataagattttgccaaatataaaaatgaacaaatggtattattactaatatgtgatcaatactataatgtatattttatatgttcgcgagagaattcttaatttttaaatgataaattaattacatatcaattaacttggtggcaacagagatactaatacatttttgttacgtataaccgtcttcctctggtccaataaaactgaaaaatctttgaattgcatagcttttttttagagaaatgctaaagagctggtgcctaacaccttcctatatgtcaatatcgttattggtccaactaagaaccgagtcccatataatttaatagattagtttttaaggagtatcgttaaccaatcgcaacgtgacatgtcgagaggctgctaggcactactggtacctaatagaatgctcttttttttattattattattatttagtagtgtcagtaatgcatagcttggtttcgtgttgttttagggataggctttgatgattattattattttagggctagactttgatgattattttagaaatttcataattagaattcaaattatatcaaaagcttttctttctttttttcgaaaaaaatatcaagagagcttaaaatctatatatgcctaaaatatacacagcataatatgtcattaaacaaaagccggttcatcaacacaaaaatcatcaattatcttagaagatctatatcgctaacatggcaaaacatgtagaatcgaatcaattagacccttaataaaaatacagttcggggaatgaacaattttcatgacaacaaaattagttatatgtcaagagcaattagagttcaaagacattaacgtacaaaaagaatccaaatacaaaattattatggaaacattaggtaagatttcaaactcatgaaacaacttcaaacatcaaatgtgctccatagaaaattgaatccacataaaatcacaaaaaacttcaaacgtcaactgtgcatccccaaaagtgtggtcaaataacatgacagtgtcaccgatacgttcaacaaagccattcagaaacagaatgatatcaccacccctcaaaataaagtttgaccaaagagaacatcaccaccaaacgaatgtcaattcactagtttttctataaatatataactcccctcagcatttgatgatagaatctcagagagaaatgcagcttgaag

SEQ ID NO: 324479 - DNA, 2009 bp, Cannabis indica
cgttcaagaattgtttttttacatttttacagttttaccaaaaataacaacgaaacaacataaaatacaacaagaaaactacaataaagtaacatagaaataacatacaaataacgacaaaaataacatacagataacaataatcaacaacaaattaacaagattacaacattaaaagactgtatttctagtaataaaattaaaaatacgtaaaatattaaagttccattaaaccgttttttttttttttaattttttgttgtttttatgtttttgtgaaataataatattacaagtacttaagtactacaaatgatatattttaggtaaataaaaatctctaaataaaaaagataaaaagagaattctctctcaatttttgctcaatttttatctctagtcactttcatatttatttatttatttatttattttttattttatattttactccttggtgagatgttgagcattcaactttactagttcttagtagatactttcagttttatatttcagttctccgtggtagaagtttgacatggcggatgcaagagagagtcaaggtacagacttgaggtctgagcaaacaatggataatccattaccgaaggaaggtgaaccacagatgatggatatggcccaggaagcaagggtggtggacgaaacccttgaactgaatactcaggaaggcacgaataacgatgacgaagaagacaacccagagatggaggaaatacgacagcagtttctggattccatgaccatggaactagaagcggatttccaactgaatgctgaggttgtgaagaaaggcgttctggcgaaagtgtttggaagaagaagcctctccaagaacaaggttaaggaaatattggaagggatatggaggatgaaaaggaactggaagatgaaaactttaaatgctcgagatggtatatgggggatattctttgaccatgaagatgacaagagatttgttctcaaacagagaccatggttagttaatggtgctctgctgaatatcagggactggccagtcaatggtgaatggcaggaagttaacatggcagaagcaagatactgggtagaagctcacggattacccactccgtatcttacttgggaaaacacagatgtagtggctcggaaggttggtgtctatatcgatttcgatcgcgcgtctcgaactacgattgccagaagaggatttctcaagtttttggttgatttgcggattgatcaaaagctagtagccggtttttacctaaatatttctagagatcggaaagagtggattcaatttaaataccataaattggctgcaatttgtttcaactgtggattgatagctcacacatacaaatgtgaaaatcctactgagtttgcattcccaccaatcgaaaaggctgtccctctgtatggagcatggataaaagccggtgtccctattcgaagttgcttcgattcttcgctgcccctgttacggagaagcgaccggagtttttcccaagaaacctgctccggccatttcaaatagtgataagggcaaaaaggtaattgtagatgatgatggagacccctcggtagaggcaggagaaggtactgatatgcaggtgaacgttaggggtgttaccaacttgagaggagtaagcccagcagggaaattgcagatgagaaaaaaagatgttggaagactaagctcagatggttgctcctatttgagaaacgagggtacgttgcatggtttagctaggggaatcagacctatggcccacccaatgaatcagatcaataacaggcagagggataaaggtgttatcatgagctttatggcagacattggccccactagagatcaaatggtagaaataccacatgaaaaggtttgtaaatctagaaagccccatagctttctgttaggctatttttagcctatgttttggatccaatttatgtgcatttttagctgtgttgggacggaattacgcttgttttctatgttttca

SEQ ID NO: 324480 - DNA, 1352 bp, Cannabis indica
cttgtgcaatggtccaagctgccgaaagcttgggccagccctgtagagatcattaggagttttatttacttattgttctgtatatttacacctaactaataatattcttaactaatcttttaaaatattttaactaatgattgttttatttttaattaaataaatatgtagtttcaaaatgtgtatataataatttttatttttaaaaattaaatgatcatatagtttcaaaaatatatatcaaaatttttttatttaattttaaatatcaaacattttttaaaaaatgtcaaatgttttttaaggatcttttatttaatatatattaaagcctaatttattgtaatcctatccctatattctttagttttttttttcgtttctttttgcctatcaaacattttttaaggaatttttttatttaatatataatacatttttttttctttcaaaatttaattccaatgataagttcttagtagtattgtgatgatagcgagtagcgactacaagtaaaagtttttaaatcatatgataagttttctatataaatttattgatttttttttttttataaatttctattttgtgtgaaaattttaaattgctaatattatcttagctataattattttgaatattgtggtggtgactaaaagtgacaaacaatgatgatattggttttaaaattatatgacttgtgtttttttatacattaattatcaagtattttttatgaattgataatgacttcggttttttaatttatatttttttagatatctctttgattaaataattattaaagattaaataaataaattaaaaatatgtaactcatatactatttaaatttaaatttgattagctaggtataattgtatctactttctcattattaattagtggaatttatttagtatatttgagtagttaattcactatttttttatatagagagcaaactcattttttttatgtgagagagcaagcctattgaaaagaaaagtgaggactacgagatacaatgattaccattaggggtgcacataatatgggccaaaccattcaactcagtcaactcaacctattttttatagtagagagttatgttaaaagtgataggtcatgtaattatgggttagttatgagttggacacattttaactcgatataactcaaaccaactcatttcttaaaagatgttccaaatttgagataattactttcatacataaaatatattttacattcacaaaatatatacaaatatatattttacattttcatacatatataaattatattatgataactatataaagtaaattaaccaaaacacatcactaaca

SEQ ID NO: 324481 - DNA, 1095 bp, Cannabis indica
tagttattttccttctttattatcatatttagaatagaattacgcttgttttctttggtttcaggtttcacacttggaatgtataaattgatcaaatttcggaaaacaacaatctatagaatagagaaaattctacaagaaaataaagctgaaacttcaagtttaaatttgactatgttctgttcagattttggaaaaagtcaaagcatagaagttttatatttctttttcttctttccaacgcatcttgaatcaactcatttggagtttgtatgtgaaagttatgcacattttactcaaagatgctgaagttgtcaaatttgcttcaatagtcaaatttgaaagttataactatcattttaagtaatgtattttgttagttatagtctgactaaagtcttttccaccagctataaactgtcatttaaagtggcttttttcaatggttataaactgtcatctaaagagatgttttccatcagttactacctgatggaagtctttcccaatggttataaaccatcatttaaagtgacattttccaatatttcttaaccgtcatttaaagtaactttttaccatagttataaaccgtcatttaaagttccgtatttttataacacccacatagccaacggttttaggaactgttgggaaatagcataaaagacagttataaactgttgggaaaagccaattttgtagtagtgacacaagttagtaaaagatgttgaatgtaaaagtagtccttgattggaagtgccattaagatattttaatattttatatgttgcagtaagttgaggagctctagtattagataaaaattgacttaacttggagttgtgggttggcgagagtccgagatggtggttttttggggttggagtgatgttcgtggtggttttttgggttggggcaattcggttcagttcgagcgaggcaagagcacgagagagaaggaacgagagggaaagagagagtgcataaatattttgaaatgaagagggtgttgggttttatgccctaaataaaacttatttcaatgtaatcaaatttacttattaatatagatcagaaataacatttaatgtt

SEQ ID NO: 324482 - DNA, 775 bp, Cannabis indica
ttgtgatcagagtaaatagaagctcattaaaaatacaataaaaataagaagctcgtactaagaaataagtcattttattaacagaacgtttaataaaaagtaataaaacacttgttgctaaatattaaagaaatcagacttacatagaaactcattttcattaaaaatggcatgcctcaaaatgtaaagcctacctatactgctaaggcacttataacccttatgtgcatcattgtagcctacactactaaaaaaaggattttttgactgttaaaaacagtcaggtatatatgatattaccgtcagtctctatgtccgacacatttaatcgtcgcaaaattggatggaatgggtgtcagtggaaaatagtcgggtatgccattcctatcctatagagattgaaacttgttctcatttattctttcaattttgttacagaaatgctatcttgggaaggttttgttataatttttgcacaaagtatacatgtgactaaaacaaaaagaggtaaagtatacttgtatactttagtcacaagtatactttacctcttttggtgctattttgttaattaatataaaaatttatactcgatcaagggttcatttttttcttctcattacaaaataaaatattaaagaataatcaaaaaattattattatatcaattaatactgtcaaaaatatgtctataataataataatcatcgaagcatcttaagactaaattaaaaaaaaaaacaaaaacatgataacaatattttgaataatacaa

SEQ ID NO: 324483 - DNA, 961 bp, Cannabis indica
tcgcttatcaaaaagactcattgtcgttggataaaagcgaagtcaacactagccatctcaagctcaacaacacaagctgcttacaactcaagaaaagtcaaactcagaaaagtcatatcaattttggaggaattttttgaggcactagaaaagtgttttggagttttgaaagtttagcaaaattatttcaaaggtttttggggagtctaaaaatccttggagtaagaccaacaaatgaggagaagaagaaaaaaaaatgtgtttttctaccttagaatgaaggattcttgaaggcttgatgaagatgagattccaaagtgctctctaaaggctataggcgtgtggagtatgaatgaggaagtgtgaaaatttgattgtcacactactacaaatatagcctttagtgacactctttagtgacgcgcttaaaggtgagggtcagtaaatgtatagaataatttttagtgacactcattattttacactaaacatttaactttatgtcccaaaatgcacaactctaaaacatataaagagtcactaaaagttatttaattatttaattatttttgaaaaaataattagtttgcacatcactccacgcgtgactagaatagcttttgcagtcatgcatagagtgacgctatacacaaaggatattaaaaaataatcaatttataaatattacttctcttggttgcatcaaaagttaaaataatgttttaatttgctaaaaaagattaaaagcaatataaataaaaggagttttcttttgagaagttaaaaggtcggttgaaaccctaaaattgtgttaaagtctattcatctcttaacagcccttctctctcatgccaacagatggttaaagaagaatcatcttctacacagacggtgagcaagaggaatcttcttctacatagacggtgagttggtcccgatttcccaacccagatggaagaac

SEQ ID NO: 324484 - DNA, 814 bp, Cannabis indica
ttatttttaattgtaatgatttttttttaaattttgaaataggattaagattttgataattgagaattttttttgggctatatttgatttcgggagtgaattattgtgtgccttaattgaaattgtcccttattttaatttgaaattaaatcaataaaattaaaaatatttacaatattttaagtattttaaatttaaattaaaatttttataaaaaatatctgtatatatatatatttttttttattttaattgaaagttaaactaataaaattaaaaatatctataataattatgttaaataattacatccttaaagtaagaatttcagacataacctactcacgaaaaaaatgaaagaaaaaggttgactcgaaaatttttagaagtaatatgaaaattcttactttgtatggactttggattttaaaagaaaaataaaactcaaggaattatattttctcatatttgaatgaatcattaagatttttgtttttatatagaaaatgttttatatctattttttcccttataaatttttgtttgacctttgtaagaagatctttcaaaggagaaaaggaatgaaaacataaaatctgttataaaatattagtattatgtaatattataatttagagaaagaaaataaagaagagatgataattttctgagtgttttattccaataggtgatctcctatttatacacatacaagagtcaaatattaagaaactaagagaaagggaaactaagaaaaagggaatgttgattacattaatggtaataaataaaagatttggacatccacataatt

SEQ ID NO: 324485 - DNA, 1302 bp, Cannabis indica
ttaacggttttttatattatttattaaattagaatataaatcacaacaataataataagatggtgaaatttaattcagataccagtggtggcatatatataaataatatatatatttgtgtcattcgaagtacatatacggacgtagggtggcatatatctcttatttttctgagaagcttatgttcagaccaatttgaccactgtaccaaaacagaaaaatgtaaataaattccaactgatccctcgtgcgtggttaaatttgaattaggtaatcaactaactaacagtagttagtaacattttgtactgagtatcttacttatataacacattttattttaattaagtagtatatataattgaactttttatcggtctgtacataatatattactacgtacgtatcatggtcagttaatcagcacttataattatatgtttactgatttgtatgatgaggttaatattattaattatactttagcgcatgaattgatcttatttatgtattatattaatatagatatgcaatatataatttaagctaattttggcttttcaatagtaattgcattacactctcaattcctatacatataaacctagcaaagagtaggttaaacaagctgcctttgccggcaaatttttttggtctaatctctctactgatcatgatggaataattaattattaaggaatgcactttgtgacaaaaccaaattttatatttaactaattaattatattcttaagttgttgatgattaagttcagagtttgatggtcaccattcattctgatcatgtcacattacgatatctatgagagagatcaacttggttgcttgtgccaacccatgccactagataagacaatttagacctcttctccccaaaaaaagacatacaaagaatatttatttaatgacaatttttttatctatacatttatattaatctctatatatttggttagaaataagttaaaaaccattggttattgtctgatactataagtcattttctctataattctgattaaaataattatatagtacgtagtatgcatgcaaatacaaaaataaaaataagaaaatttgaatttttatatacattagtttaattttttttttttttctaaacttatataatacccaatatttatagcatatgcaaacatttgtattatcctcaaaatatcatctccattacatcacctccctccactactacaaaaaacacttttggttcagtttccgtatcatttaatttaaaaaactgacaccatagagtagctcaatt

SEQ ID NO: 324486 - DNA, 1157 bp, Cannabis indica
aaacgggcggttattctattttcgtttgaatgaaatctaatcggcttcaaatatttcttagtttttattgattcctgtcaaagcttgctaatacaagaagcactcggcttactcaccgagaggcgacgcccagacaggacaaaacttcctgaacttgtagagtatgtataacaatacaaattattttagaataattatacacatgataattataattttttgtgattgaataaagaatgtagggtagaattctttatcacttattataataatatgtaatatatatgaagattaattttatttacaaatatattatattttattataagtgtataaccataaatttaaaaaaagtgtgtcttaatttattgatagagatgattggtgattttgggtaaaaatctttccaataagacgagacttaaagttctctacttttctctcttgatgcaggaagataagaatagagtggctcttgtttcttggggactacatatataacctcacaactaggtacattattaattttaagtatttctaatttagcccctaaattagaaatatcccttacgtacatttagtccatgacactttaatacctatgacccacaattactaaaatgatcattttatttgggtcaattttcaaatagcaatacatcaattgtaagaaaatttggttgcacggcataacttttgtcatcagaattaccattgataaatgacactttaataatccattttatataactgaagactataatgagcaatcatgcttgtcctgaaatagtcttcattaaactaaaagaaagtctattttaaaatcaatatatgctttatgagtaattctttacatacaagacataatgtgcacctctccacattgcagtttgcatctctctcgattataaatatttatttataaccaaatagttttacaccctatagcaatagaaaaataccaaaactttattgtctcacatcaatttgtactctttatttatgatttaaatccaattttgagaattgtaactttcatggcatgataaaagttgattggatcatcgtctatcattctattattctattattttgattatgtgaaatatttactatatcttgaatgagaagttgtttgatattgtcttatcaaggtt

SEQ ID NO: 324487 - DNA, 732 bp, Cannabis indica
ggccaacttagctctttacatttgcaacatatgctgctttaatgtatactttctctcaatttgctgataaaattttatctaagtttgaattttcacaaattaattatggtccatcgcacataagtagacttaatttaatggttacataatgttttgtttgaattctatctcgggattctttactcgttatttcatcaagtagaaagtgaacttaaatattttaaacaactaattacttgattatttttaaacattttgatcaattttgtgcaagtggttaatcgtcttattcacacttttaacttatatattacttatcaaaacttcagtgtagagtttcgtttataatatttactaagcatgtcatgcgagccgttatttacttggtcgcattagcttgatgatgtttgcaagatttttataatttcgtttttacaacaaatgctattgtcattcttgcttataataagatttcaatgttcgattttttgctattccggactagctttaactgaatattgtatcttttacaaaaataaataaattagaatttcaattgtcataagtttggtagatatatgctctccaagtaattttaaagtgttctttatgattacttgaaacaaataaaaatactaaaattttattaatatatatcttaaatttacatcattttgaagaattcaacagctacacacgagctactcattggtagtagggtctcaaatgttc

SEQ ID NO: 324488 - DNA, 1111 bp, Cannabis indica
aatgataataaaaaaaaataactaactagttacctacctgtaacattttgctgacattgcttgcaccaaagaccttgtgcacaatggcaaatttgtggggatcttcagagggaaagtatggggcgaagatacagtctttggcgcaacgacgtctcagcaatttgcatgaagcgcatggtgagttcccacccatttcgtattgttattttgtttgaaagttatagctagggaaaaaagaaaagctgaataaatgtaaagggaattaattatgaggatgactaaatgagctgatcgaatatgtctttatatatacatgtataaaggtgagtagtggactatctcaacacttcattttaaaaactaacagaacgtgtgaggctatagtgtactagtattatatatcccatttgaaataataataataataataataataataaccactaaaaaaatactaaaaattttagtgatacaataatttttttaaactaaatttaatatttagttacaacaaaaaacaaaaaaattacttgtcactaaacatagtatttagatacgaattgtcattaattttgtcttagtcacagcaagtactgtgactaaaaatacatttagtcacagcaaattgtaatttttgtaattaagatttttagccacaatctttttattaataatgtaagaataataatttataattaactcatagcattttcacttttaatcacaaattatattgtgattaaaagtaaaaaattttatagtaaaaaatattaataataataataatggaaaaaatatataaataaaagtgttttttatgtagtatttatgtttaatatataatcatcgaggtttgaagtgggatatattaattcttttgtcctttggtctgacaaaaccatattatattttatagatagatcaaaccaataggtcgtctacacacctttttgttttgacgagaggaagtaattaaagcaactctaacaccagtataattgtgttagtttaacatgaaaataatgtaggctaggcttagcattattatattatttttccactcaaaccatcaacactaaaagttacacaaaaataattttttaattaaata

SEQ ID NO: 324489 - DNA, 732 bp, Cannabis indica
tttgaaaaatatttttacttttctacttttaaaaatagaaaactgattaaaaaagtgttaccaaacgccacctatatatatgtatattttagattatagaaagggttatttgagtttctaattttttatgcttgaagtgttgtgatacgtgaacaaaaaatgtaatccaatgtgtaatttgcatcattttttgatgtttcacgaagcttttgcgataattgtcaaaaaaggtaaagatttggtgtaatttgcgatatgttatgatgtttcacaatgattttgcgatatattactaaacatgtaaaacagttaatgttgtcaatagtttctgatgtttttgtgatgtcttacgaatattttcgatataaacccgattattgtgttataaggcttttttatctattatttcgtttaaaatttgactttcctgttaatgataggttcaactgtgtttgtacttttgttgtatgatggagtctgggagtgtcagggtttcaattggattttcagaggtgcaactagtgtaactttaaaggttgagatggacacaaccttacaacaattgtgtgatattttatacgaagagttggaagtggcaccattagggtatgatttgaaattagaggtttgttacatgtacatgaaaggtcgtctgattccgcccgagtttttaaagaaagaccgtcaactaagagtgttcttagacatgagggctgttgggttttatgccct

SEQ ID NO: 324490 - DNA, 921 bp, Cannabis indica
ttttaataattttaaaaatattatttatctttataataaaataatgcggctttaagatgagatatttaagtaacgttcttgatgtgatagaaagcaaggagcaaagggtggacttcgctttattgttagtacgtggatgagagatataaccaagtttctatttatgccacttgaattatatattatgatatatgtattatgccacttatcaattaacacttaaatacttcaaagtgagtgattcccacgtagttattcttaaacattcaattaaaagtgatgtaattaccatttaaaactatcctattggctataatgataactgaaatgcttaactataactatataaatatgtaatagcaattcgcaaataaaaaaaaaaatgaaaatgaattacaattaaaaataatcttataaaaagattggcactgtctgtctatatttcgaatatttatcttctctatgtgctttcaataaattgtaattacattatttttaattgaatattttaaaaataattacacattattgttatgagtaaaaataaatatgtataatttataacacgtcaaaaatatatatatatatatatatatgtataatttaagtgaattacgattattaatcataacttttaattaagaattatacatataatttttcttaagtgacgtttgattggaaggaataaaaatataagaatagaaattgaatgaaataaaatttaaaatgcataaaaaaaattattaaattttttcttttgttacattagaatggtctttccttcctttttaaaatggaatagtcattccaccaaaatagtgaaaagagcattttataagaatgtcatttcaatactttaaaaatgcaaccaaacaaatgaatgaaataaaaattatttccttttcatttcattacctc

SEQ ID NO: 324491 - DNA, 1157 bp, Cannabis indica
aactttggaaggagggaaatcccctgaaattattggatccatcattggaacattcttattcagataatgaagttgtgagatgcatcaacatagggctactatgtgttcaagaagatccagaagaaagaccaacactgaagacaatagttcttatgtttaacagttgctcaatcactttggcagcaccgaatcgaccagcattttacaacagaaccgatgcagacatgccatcaatgggaataaaccttgatgactctagaagcgatgactttccacaatcgatcaatgaagcatcaataactgatttatatcctcgttaatttgtgtatatttaagtagaaaacattaaataaaatgcatttattacaattttttttattgtgcgactggtcttttctgatttaagagttaaatttatttacagattaacttaatcataaatattctcaataatcagattgtttttgcccttactatattcattttttttcccttttcgaatattttcaatgtgattaagcttaagaaattaatgctgcgttcatgtggtgttctcttttatatgctgtattgtttattttatgttgcattttaattttataataaacaaatagaaagtatctattagtttcaatctaattttaattagattaaaaaaaaactagttaatattatatagaaataaagtatctatgaacttaaaccaacaaaatcgctatgacattttattttgtaactattagatttatactctaccttaatttaatttttgtttggtttatttgggtattattaattaaaaataattagaaatttttagaaaaaaaatatataaaaacacattttatttacataaatacttttacaggataaaatatacttttatactttttatatacactttatactttaaaaaaaataattaccaaaataccttttcgtcacatatcaaacatgcacatactaatgtcattgtttattatcacactcaactctttttctttcagttctatagttttttttttctttttatttttcattagaaaatttgactttctatacatttattgacttaaaattaattccctaaacctaagttaacatttcataaaatccaattctacccctcctatttcaaataccctctctctctctct

SEQ ID NO: 324492 - DNA, 866 bp, Cannabis indica
ccggctagccggtttgcacctgtccacccgaaatatttcattctttgctcaattttccaccaaatactaccaaactttctagagtacctaattagggtatacacaacatattcctgccaataaaccaaagaaaaacacactaaatcaaaacatgccattagagatcacagttaaggcttctatgctcaaacttgcacaaaacctaaatcaaacaccaaaacaagctgctaggaactaagaccaactcaaattaactctataattcgaattacacaaaagttaaaccgtaacaacccctaatttgtaaaatcacaaactcaacctaaacttaaattcaagcactaaagagtagagatgttagggcttaccttggctacaaaaccttagaatccttactgaaattccagagaaattagctgaaaagaggtgatccccctttggtttgtcccagccgaaagagagaaagagagaaagttctcttgaatttggtattttctctttaattttccttttctttctaaatgaaataaatgttaattcacttaaactttggctgaaaaatattgctaggtgtcacaaggttaggcagccacctaactttcaattaacaaaaagaccattatgcccctttacttataacttaagtatttttaagactaggggtaaaatggtaaaaaactataagcccgctcaacctcgctattttattttctcaaaaatatttcctactaagaaataaggttctaaacttacccatgtgaccaaactagccatccatcgcattttcggttgttgccgagcaaaaattacaaaaattgtatcattcacatatagaacaaataatacccctagagtttaataaaatc

SEQ ID NO: 324493 - DNA, 1420 bp, Cannabis indica
ttcgaaaatgtttggctttctgaaccacaatggaatgatgttctcttagaagcttggtcttcaaacacccctagcgatgaaccttccacaaatcttttgttaaagcaatccccttgttctacctttctttcaaactggaaacataaagccttctttggttttcaaaaacgaattaagcaagctcaacaagcccttgaacaggctaggaattctgaagacacttcttcagaatcctactgtcgacaaaaggctctccaagtgaaccttgattctctcctgttaaaggaagaaacttattggaggcaacgatctcggatacaatggctcaacctgggtgataagaacactcgttttttccataagtttgcttctaacaggaagcgaagtaacatgattgaatccctgacttctgaggatggaactgtctttcaagattctgaatccatcctctctcttatccagtcgtattactcaaacctgtttacttctcaacatccccaggattcggacatagaagttgggctctctgacccccttcctaggattgatcctacacattgtcagctgcttgaaaaagctttttctccctctaaggtgaaaaaagcacttttccaaatgggtcctgataaagctctaggtatagatggttttaataaccaattctattaaaaaaactggaatgttgttggcaaatatgtcactgaagctgtcctcaatgttcttaataattttactgacatcgccccattcaacaccaccctggtcactttgattcctaaggttaaaaaccagtttctttgaaggactatcgtcctattagcctctgtacaactatctacaaaatcatctcgaaagtccttgctaataggcttaaacttgtcctcagccctttgatttccccaaatcaaagcgcttttctcaaaggccgcctcatttctgataacattcttatggctcaggaaatcttgcatgccatcaaaaataaaaagcaaggaagagtaagctggatggctgtcaagcttgacatggcaaaggcatttgatcgagtggagtggacattcctacataaaattatggaaaaatttgagttccctactcggtttatcaaactgatcatggcatgcatcaccacagccactttcaaattcaaccttaatggccaagctatggggcttgtcactccttctcgggggattaggcaaggtgatcccctctccccatatctctttctcatgtgtgctgagggcctctcatccatcctcaagcgtgctgagagacaagaggaggcttttggtatcaaaattgcacgtttagccccaaagatctcccatctcctatttgtagatgacaacattttattctgcaagtcaaatattcaagcgtgcaatgccattaaagaagcccttgatcagtaccaaaa

SEQ ID NO: 324494 - DNA, 1322 bp, Cannabis indica
gagctgcacttataaaaagttgcctacgtaccctatcacagggatcaagctccacgtagttctgaggacctgtaaaataatcaagttagtaataaaccataaagaaagataaatatgtataaataaaaataaccaaaaaaaatatactcgataaaaatattttaatctatattttaatcatgtatattataatttataatcactctcttataattaggattgctcatataattcggaatccatagtttcaaattacaaccaaactaaaccgcataattcttgatatatacttgatatgattattttattaaatattaatgtttaggaacaatcttaagcataatatttatgattatttaaacttaaaataaatattaatgtttaggaacaatcttaagcataatatttattattatttaaacttcgcgttaagaatatttatttttattattatttacgtgttataagctttaaagtaaaataattttgtaaaaaaatattaaaacatttacaaattacaaaccacgatttcaaaccaaactaatctgttgttattggtttgattctaaaaaaaaaaaaaaaatccaaaccaaatgaaaccatgaacacccctacttacaataagatgctataaattttagcatgtatatcacacatttccccattttgttttgtgatatatcttaaatggacacgatccaacaaatagcaccacaaatcctattagacaattatgggcacatcgtattagaaattaacataactttgttttgagtattttattcaaaataaataaaataatatactttttaaatttaatcaacaccattacaactttttttaataaatctaaaatataattgatcaaaataaaaaatagaataccaaataataaataatttaaaacaatatgaaaactctaaataaaataataaactacttaattgtattcagaattttaagaagaaataccaaataatatttaaccaatatttcttttgaattttcacaaatatagcctgccttaacatataatgtagaaaaaaattaagacatactcattgataattgatacacacagctatttagattaggggtgttcatctgatccaattcgcactttcttgatcaatcaacatccaatccgcactaagtgcgaattttatattttggatccaatccgatctgcataatagtttaaatccaatccaatccaatccgcaatagtgcggattggatcggttgttttttttttatgataaattatttaatatttcatagaaaaaaaataaaaaaagactattgtttcttaatcttcaata

SEQ ID NO: 324495 - DNA, 627 bp, Cannabis indica
tttttaaaactttacaaattctaaaagtctctactggacgcctaaataaatagaccaaaacacttcttttgagaaagtttacaacagacttaaatggttaaaatatactcatatgaactttagctaaaggtgttagataagttttatattttgttaagagcattctcaggtctgtaatctatcttttataataaataatattcattgaatatagagattagctaatatacattagtagtcatttttattacctctgagctaaaactattttaaagaagaaataagaattaaaaataatctaaagaatttgagagcactctaatttgtaaaatatgtaaaataaaaaatgaagaagcaaaaaaaaataaaaattagtgaggtaattttcaaacaaaaaattaagatttttgtctattaatattgttgatcaagatttttgacaattacttaatcttttttaattataaactaatgagatgtttaagagaaggatttagagctagaaaagaaaagaaatatagagactataatttttatatggttagagcattaataagctttagtccgcgagtcacttgtattagtgcttagtgttacgtgcagtctatgatggcacgttacaagcta

SEQ ID NO: 324496 - DNA, 1131 bp, Cannabis indica
ttttttttttttaagattcatttgatgatcatccttatttttctgtccaacgttgtcaacttttcatcttctcatatatatatatatatataacatatatccttatatatataatattgttatatatcttctatttttctttctttatctcctctcttaataattagctcgataaacaaatagaaacatgtatgacatattatgttgtttctatgttaaaataataaatcatataaaagttaataaaataatgtttgtaatattcaaaataaaataattaatgtgttccaaattaattttttttttttttaaaaaaaaaaattgctaacatatcataaaaaattaactcatctcccacatttaatatattttggaacaaaaaaaattatctatatatcctagtgatgttaaacattaatttgagagtgtttcttggaagatttttcactaaataaaatatagttaaatgtcatttttggatcctatatgtgtttacaaaagttaccgatcaaatttcatatttttgttaaataaaatcagattttgtatttctcaaaataatacataatctcaattttagtcaaaataataataataataataataataataataataataataataataataataagatataactagcctccttataccacctcaaggattttattaatcttttttgtaatcaaataaaattgtatgcactatcaattaaacactttacaaacttggagctacaaaaattcaattacaaatgggtaaagtattgctcgatcaaattcgatctgcatgtaactgattttttctcttttaaaatgagaaaattaatctgatacaaacatctcttttgacattctatctataattttgtttataatatatacatgtttatcccacaaggttacatttcgaatcattgcatttaataaaaactgggcttaatattatatatatatatatcttacctaatatataaaatggctatctaacttattttgttgtgcacttaacagattcttgtgtatttaacagaatataaccaaaaaataaagttaaactttaacagacacaactcattctatttacaaacattattcacaataccaagacaacttttgccattct

SEQ ID NO: 324497 - DNA, 841 bp, Cannabis indica
ctaccatgctcccaagatataagcattaggctaattccattggtcaactttaacgaataagtcaaagaacacaaataatacatttaagccagaacctaactatctcgagattaagatttattgacctaagatcaactaagtggtattgacttagaaagatataacagtaattttatgatatcctatctaatgtcaatatcgattcaattcgatgtatactccatacatccgatactagcatactttgcgccaatatcctggaaaggacatatcacttatctaaggtgtaagtaaattttatcgctgattatcatgtcagtataaatccaactgataattatgggacttaaactttgaaacatataaccatgattatttttccactatgtagaaaacactataatcatgaataactatatattctgaagttaatagaattcctaaattaaacatataataatgaaagaaatcatgtgaaccatacaacattaaatgatttatgatcttttattaattattaaatctgattatattaaagttggtttataaaatctcatcaaaaataccatagaacccttggtgattcttagaactccaccttctaccttgtagcaatttccttttgaatctaatacaccaagagaaagcaaatttgttttaaggtcgggaataaatctaacattattcagttagtgcatgcatagtcatagctaacatttaaaacatcaacattatcaaaataatcaaaaacatttgctgaatcaggactagcatttggtttttatccattatttttcctctaaggacaatctcttctgaagtgtccttcttaattacaggt

SEQ ID NO: 324498 - DNA, 1141 bp, Cannabis indica
aacagtaggttctgtaatctgcagacccgaaagccagtaagtgggtcgaatgagcagagaactggacacagcagacatttgcaaggctcctaatcgttcctaaacagtttttctgcacataaacaaatatgtatctttttattaaggtaagaaaagaaaaaagtgacagagtatagcaggcatatttggccacaacagcagcatccttatacattttttttcattaaagctctattcgtataatcatgtgaaagactccagtaggaacattttctaatacctaaagaatatatcatacaaacacacaaacaatttctttaggtgctaaaatttactttggtgtgaaagaaaaagatccaaaggtaatgaactttattcttgttatgtagacaccttcctaattcaataaactagatgcctcattacataaacaatctctctatctcacctctctctcacacacacataaagagaaagaaagagaaagcaatattacatatatatatatatagagagaaggaatgtattattagtttggtataaagaaataatgatagtaattagtaataaggttggtaaccagaccttgattttttaggatatttaatataatatataatatgaatttggcctaacatatatgtatatatacagaatagaatttagtatatttggatttttttttattaatatgaaaatatgaagaagacgtttcaaacttgaataaatttgaaatttccaatatatatatattgcactgtatatttctcttgaccatgtatgaatatcaaccaataaaataaaccaattcaaattggaataagaacatgatgaaaatttacccaaaaaacctctaaaatttaacatagagaaaaactagtaataataatagtaattgttttctaagaattaaagtacaaaaacagagattttgtgtgtgatgagataaatattaaattgaaataattaccagcttgtttggggagagctctccaattttcatggccatttttttgtatgaaagtgatgagtctcaaatcctcagcagggctccatggacctcttttcacttggctcttatcacaacaaggtgctctgcctcttcccacatatcactactataatatatatatatatgtat

SEQ ID NO: 324499 - DNA, 1380 bp, Cannabis indica
aaatatatttggcactcagtgcccccaaaacaattcagaaaaatctacagattaacttttcaatttttcaaatattttataaatcataaaaattagaatatatataatgccattcaacacatataaaatcaagtctaataattaagttgagtccctacctcctttggatcatcaagctttctccaaaagagacgctcctaagcccgtgattcttaatttcaaatagcttagtcacacaaaaagtcactttgtcctacattctccaaccaaataaataattatcaacattgtaatgtgctcttcaaactgattccaatgacatagaacgtgaccatatttgaaatttgacgttccacaatctcacctaaacgatgaacattaactatcggtggcagtagaaattagctctcaaaacgcacttggggcagcccccaatactttccaagccaatgccaggagaagtcttatccgtctacctcacagtgtccgaatatgcaattagtttggtcctaatccgcgaagaccagggtagacagtacccagtatattatgtaagcaagcgtctcttagatgctgaaacctgttatccacagatggagaaattggcatttgcattagtaattacatcgagaaagttacgaccttacttccaagcacacaacattgaggttttaacaaactaccctttgcggcaagttttggcaaaaccagagtcctcgggcagattgttgaaatagtcaatagagttaaggcaattcgacatcaggtacaatcctagatcagcaatcaagggacaagcccttgcatatttcatactcgaatttccaagcgacgaagtagccattatcgcagaagagcaaattgatcctgacgtaccaaacaatgaagggtggactttgtatgttgatggggcatccaacagtgaaggatccgggggtggcataatcctcataagtcccaataaattcaaggtacacagtgcccttagatttgaatttcctgcatctaacaatgaagccgattatgtggctctaatcgcaggattaaaactcgctcttgaaatgaaaatcgagtatttacaagccttcagcgactcccagatcattgtttgtcaggtgaatggagaataccttgccagaggaggtcgtttggccaaatatctcgctctcacttgtgagttattacaaaaatttaaaaagatagttgtctctagaatacctcgtgcttacaattctcatgcaaatgctttagcccgattggcctcaataagagaagcagaattactcgatgtgattcctgtagacatgttaactcatccgaaaatcagtcgagatgaggtgatggagattgataaagccaaaaaggtcacctggatgaccc

SEQ ID NO: 324500 - DNA, 962 bp, Cannabis indica
taacaagtcgtatattttaggagacagaatcaatattatcaaaattttaggaggcaaaattatgaatcattcattaataaattctataaaataaataaataactaattgttagcttatgaacgaaaaatgaagtttgttgacgagtctcacattaataataatatgtgcaaaattaatataacaatttataagaacgtgtgctattctacttattgtcaattaattttaaaataaaatcttaattttttcatcatacacgattttaacaatcttccttgttcaaacacaattttcagtgttctttactttctcacactcgaactctctaaactctccaagaatctaaattcattttaagaaaatttagtaagaaaaaattgacttaataatttcaaaggatcaaattagatttgaggaaattacactttatttctactttttattttttattttaatttttatatttttttttattactctttaatttatactcagatttataggtcatattatcattatgtgtgctctaattttgataagttatgtgagattatatttagtactttgattataaacgattgtatttatcaattaaaattattttacagttatatttaattaatgtgtaataaaaaaggataattttcaacgtatcccttattatttcatctcactatttatttccatttccctatagagtttgatccagtttgaaaataaattttttgaatgaagctccatacttaagtaagctttggcacgaagcctacaaatttttttacttttagtcacaataaaatttgtgattaaaagtaaaaaaattgtgactaattataaattgatattcttatgttgtgacttaaaggtccgtgactaaaagtattaaacacaaaattataatttgttgtgactaaatgtgtaactaaaaactaaattagtaataacttgtatctaaatacta

SEQ ID NO: 324501 - DNA, 694 bp, Cannabis indica
aatcaattattttttccttatttcacatcttgtgcatcgaagcacaattgtaaatagtaggctaaatatagcacaaacttattttttgtgctaaatttaacacaaattttagatcttccattagagatagtcttatgttttatttttatttttattatttttattttttatttttgaaaaatcaacatacatatgttgtatttattttaagagttaattgcatcaatatccataataattttcacctcgctagctattaactcttaaaattcaaattcttagcataaaacctcaaaaattacaaaattattagctatttacaattttcattcaaatttaattgttaattgttatgttaaattatgcacgtgcacacattttattggttcacgtattattttaaaaaataaaataaaataaattatgtatatttttctttttcattcttttcctttgctttttttcctttttttcttggtccattctactcatgttctctctcttatctttctctctccaacctaggtactaagtgcgtctcgttgcttaggaccaccgatctagagtcgttgctgagaaccatcgcgtagagtcatagagtagaccactacccatcttaatcactgtaagtctctcccaattaatctccctaatcgatctctatcccaatctcctctctctctctctctctctc

SEQ ID NO: 324502 - DNA, 1394 bp, Cannabis indica
agttcctggtaaaataacttccaacaatatatatatatataatcaggatcttttttacaaaatatttacaaatgtttcatagtgcgtgatacaaaagttatcgcctagcgaatagacaaaatacaacaagctgtcccaaagatcgtacacttcaggtctaaccgccatgacatgtacaatcttcatccgttcgctctcacggctgctcaaacttagccttgcccttacatacacgtgcaaacaatatctgtgagtcgacagacttagtgagaaaagcataatcaatatcataactataatcctgattataatcagacacccatacatccaaccataaccctatccatgtgtcccacacgatactgagtccagaacattcaaacgacagtactattgaccataatatcatcctatactcagtacgctagtcatactctagtcgtacaaatgtgatattgtcaaatagtacttaagccaggatacatttatcgatatccaatataatactaaatatatagatactgctattctaatgtaaactaacaggcttgacaaacatgtacactaaacatgtaaacacatatgcatataattatactagtcttacttcatttccgaattcaggtgtgctggccaacctgagtggaactactgattttcaatttatagggcactaaatcacatagtttgtaaaactgatgagtgacacgctaaattacttttcaggaacttaaaattgaaactaaaagtttctgtatcagtggataacatgaaaaaccctaaatatgacaaaagggaaaaaactagggttcccaaaattgccccaaccagtacaccagatcccgaaccggaaaccggttctgtggggtttcatggggaccaactggaattccgattcctacaggtcccactaaaccgtttgactggtttagtgtaggagatacctaaaacaacacaacaacctcaaatcaaacccaaatgcaaccaaaccttccagagtacctaattacaccataaagaacataattcatggaacaaaacccataaataacccttaaaactcaaatcaccattaaagaccaaagtttgaactcaaaagctcaaaccttgtccaacaacataaccaagccatcaaacatcaccaaaacagctcaaataacaataattcaattacagaattggaattcaaacaccaaacactaccacagaaccctaaccttagaaaaaccatgcaaaacctaacttaaagcttaagaaaacaaaggggaaaggtgttaaagggtttaccttcaattgggatacaccaactacttgctagatacccaaaaattaagctgaaaaatcttccaaccctactggttctagagagctcgagaagagagagagagagagag

SEQ ID NO: 324503 - DNA, 840 bp, Cannabis indica
taattatctactaattctcataaattaattaagcaatcattacaatggagctctcgtttcttcgatcatctttaacgggaacatccaataatggtcgatcaaactggcaacatcactgcgcataaaggtagggttcctaaagttagggtttttctttttaagtttaattttacttattaattaaattttttatttttaacaaattttatgtattttaattttttttattttatttttaaatatttatctacgtgggctaattaaattatgtcacttgtacaatatatttatatggacaatattctatgaacacatggacagtcaacttacacttaattgtcaaagatggagaaaaactgctaaatgataacagaacacgagttttgaaaattttaccgccaaaatttaaattttgaaaattaattactaattaagtaaaagtattaagagttttgccgtaattttctcgttcattaattataatcatttgactttcaagttaatatgaatgttttttattaattatttttatttgtagaataaataaaatactaacatagaggtgtcacgggcacctctacaccgactagtagataaaggggagttctatttgcatcccataaaataataaatacaccccattattaaacaaaataaaaatttaaataatttttaaaaattactcttaatatttttttaaaaaaatttcctcacattattttatgttaatttcaatacttattttaatttcattttcataatttttgctaagaaaatttcatataattttttatttaaattttttgtcataacattcaaaatataatttatttttatttg

SEQ ID NO: 324504 - DNA, 3347 bp, Cannabis indica
ataaatatgcttatataagctctaaggggttatcctggcatctactttactttgacaggtcttctagatgtgagggaagttgacgggaggaggaaaaatatgcacgaaattctgaggagaaggcattccatgagttaaacctccctaaaggtagcttaaagtaccacttttgggtggcttctacgagtgtggcaggaaatattctgcatcagacatcacctcttactccttgcagaaccatttgcatcttaaaatacttcagatgggataacggatcctctttccctgtatacattttctatgttggcatttttaattttgggggtaattcaaggacttcaatctctggggagaagggtgatctacgtgcttggtcaatttcgagatcagtgagttttgtggcggtcaaaccttgtaccatgtttttaagttgatccagttgtgctggcacaaatggatgaacttgtttggcctgttgacaggcttgtgttacattcggatctctttgaactggatcctagatgtggatgcttggatggacagctggtgggatttattgttcgtctaggccccttcttcaatttaggtcagtcctaaggtcatgtccaatgcccaacctatcaaatactgaagtaccaggtggccttggcctctgacttgtttggctagcatgttggccagaaatttcagttggggtaaagttggtgtatctaactcaccccaagggattgtccggcaggatctggtcatttaccatttggcccataagttggacatgtggttgtggattggacggctgaccattgtgggtttatatggtacgcctaactgcatacccttccgaaccaccgaaaaggatactagacacagtagtcagttgttaattggcgacttggtaggcccttcttatcagtacggtggctggctttgtgcgatcatcaatggctacctatggagccctcaaagtttccatctccctgtccctccattctataaactgacgtttttgctcgtcgaatgcaaggtttagagctgcacagagatcctcctgattatggtgcaaagcgttattatgaccttgcattagcccaagggctgctctgaggtttttgattttagtatcatctccaactagcctctgaacattagtggtagacgagacctcagtgttgggagtggattgattggctgctaaattggtgttcccagtctcttgcacgactagtgtgattccagccagaggggaagtcactccatgcgccatagtaggtggttgtgtattgacctgctcggggtttttcccaagtggtcctctcgtgtttccaggagtctgcacattgggatctgcaaccatagggtcgcccaaatcaacaaggcctctacgagtttgtaaaaccttcctatatgcctgtcaaaatttaagacaaaaaacttggatttttgctctcaatgaaagcaccaaaatctggacctcgcttttagccaacgatagtgagtcacttaataagagattaataatataattaaaagagaaaaaaacgataaagtaaaaaaacacaagattttaaagaggcttggccttgtgagtgtggttatagcctactccccttgtattgtattaacttaagagaaagaacaaagtgtttttcctctctgaaagctcttatatctttgagtaattctcttagatcactattttccctctgaagcaattctttccacccccctcatagtgaggctaggccactatttataggggcttaatgcattagggatggtttcccttttgcttacaatgcatcaaataggaaattacaatgattacaaaattatgatacacaaaataggaaactataacaggctgccatattttcctgattcagtccaacgattgtatggattgtcttcgtgtctgggcattacaagatcattctgaagtaactaacccttgtaagctgctcgacataataaacttctacctggtcagatgttcaatcttccaccctgcttggtgcacaggctgctagggacatttacctccgcccatgtatcacaaatgtaagacacgtgtccctcggtcgtcttgccacgtcaatgtgcaaaaaactggataataataaccaactaaaattttgaaaaattaaaggttgttgtaacaacattaaatatcttttcaaaatttaaaattcaaaaaataaaactaatttaaaatatctaggtttatgtgaattattttatcaaattaaattaaatatctaataagataagtgatttaaaaatatccaattagatattttcaatattattttctaatcttacaatttaataaaattaaaataacaaaataaactatttttttttaaaaaacaaaaaaaaaggttaggcaattattattttaagattaaaataataaacaaataataattttccaaattatatgtcaaaatatctcaaattatgcctttttaaaatttctacaaaaatatttaagttatttaaatattttaaatattatttataaatgtctgataagtaataagatataaaatattatctttctaacttataatttataaagaataaaatattccaaaaaataacctatttttgaatttaaaaatattaggttaggatgtctataaaaatatcttggttgatttcaaatttattaattttttaatttatcatacaagataattttaatataatatttcaaattaaaaagataaggctatcaattaatttaaaatatccctaatattaaaatatctaatcttataattaaataatatataaatattaacaaattaaatttttaaaatctgaccataatttaaaaaacaaaataatcaatttttaaattaattttaaattaaacctcaaaatatcaaaattcataataatctattaaaagttaatattattaatttataaatttgatatttacgtttaaatgtttaaaaattatattttatttagatatttagtaatttgaaataaaaaaaaattgtgaaaaaatcacaaaattcaaattttttttggtgaaaaatcaccttggccgtggctggaggctgcatgcagcccttctcgtccacaaatctcggtcacaactgagaaaaaatggaatttgcatacaccttgaccgaggtttctcagtcatttgcagggtgatgcgctcgattgtgtgtctgaaagagcagcacgccaagttcagacaggggatgtctgagaaatctgcgcgtgagcacctgttggaaatattttaccaggatctagatttactactaagtatgttttattaacatcctattatgaattctaaaacaatgaaataaacacataagagt

SEQ ID NO: 324505 - DNA, 1150 bp, Cannabis indica
tttcatcgttttaaaaattcatatttaggatgttagaaatatacttgttagatcctggtaaaagatattccaacacaaacctgggcttattgtggtttgtttgttggatttagttagagttgtttgatgctttaatgcttggttttctatggctgtttgaggtgttgagcaagtttgagtttaaaaactcaaacttggctcaaccatgggttatttatgttctttggtctataattgttgttattgcttgatatatgttcgttgaactttaattaggtattctggagagtttcacaaggtttggattagtttggagttgacattgagatttttgggaattttgcagtacaaaatggtaggccattttctcataaagggtataccgtttttgttggcagtgacccaaaaaacggtctgccatttctatagaaacgacctggcattttttggggagtttttccaaagtatttttttttttgctttttcttaatatttagggtattatcatgctatttatcaatagagaaactttcagtttttagtttatgtccccaaaaaggttttagcaagttatttacttattttacataaatgttacataaggcctcaaatcaatgagcaagatttctattcaggttaaccaactcacttgaatttagaaatgagataagattagtataagatatatatgtgtatgcatgtgatatacatgttttttttttctagaatgtatgaattggtatcatagcagtacgactatagtgttgagtcaacagtacaagtatattactggttttgactgatatttaatttcgtaatattattgacattatcacagaggtacaagtataggattaggtcggcagtgcgagtatagtactggttaagagtgaaattatgatcaattgtgttggattatcttttaccaggacctagatatactaacaaatatgtttattaacatcctaaatataaattttagaaacaatgaaatttaaacacgtataaagtttgtgtaaccttacattgattggagcaaaatataatgattcctcccattcagatctataacccttttcctttctatcgcaaagtattatcaagatctaagcctgattctccttcagttgtttggattcttcacagtctt

SEQ ID NO: 324506 - DNA, 982 bp, Cannabis indica
ttagattaaaatattttaaatgaccaggtgcaataagtcaattaaggttagagactcaccaaacaataggataatttagatattcttctactaaaaacaaaaagaagcaagtatatatgagtaaggaggccacaacgagacttttaccaatctgaaatgaccaaaataattctttcactattataactcttcccatgggaaattaacaatgtaaaccataaaatttctagaaggaaacacataatatcattcatgaaaaaacaaggtgcttgttaaagtaagtttatgtatatatttttatagaaagaaaaaacaatactatttacttactcagagtaggaaattcaactcatttctcatgcaataattgttggtttgataagatataatttacttactcagagtaggaaattcaactcatttctcatgtcttgaaaaagtcttatcgaatttgagtccttggcagttgacagtggctcaactccaaatacataacttcagatatagtgtaatggttgtttttctaggtataatttactcatgagtaggcagaggttttgttgaagggtcatgacttatttatcatgttttggaaaacccattagccattttgaattcttcgtcaattggttagttcaatagtatattactcattgtctgcaatgcaaagtatgtacctttgtcttcttagaatttcaaatgttttttaaagaggtaaaaatgtgcttcttactactctctcaggtgaaagaagatactgatctctttatcattgatgaagttggaaagatggagttgtacagttcatcttttttccctgctgttcttaaagttctggaatcaaatataccaatcttagcttctgttccaattccaaaatctggacgtgatatacctggaggtatactataataaacggatctggttattatcttgccatgactacgaatgcaaatgagttttggtgctgaaagttaaaagc

SEQ ID NO: 324507 - DNA, 1000 bp, Cannabis indica
catcttcaaatactgttttttttatgttttttgtaataattatttttcattttttttttgtagatatttgcattatttttttgtagaaaagataatttgtataaatttatgtatttgaatattatagataccctaaaaaaaattattgtatgagatataattttttgaaataataatttgtttacattaaagttcacatttatataactaacatattatgttatataaatatgtttatatattttttatttataaatttgataattatatatatcttgatttatataatatactattattttttatttaaaaaattactattatggccgacattttaaatgtaatgccaaaagactctttttaagcacgaactttcactacaagaataaaagtctatgggaatgacaaatatagtgccaaataatccttttttcgtgcctatctatctatagacacgacatgtcgtgccttttatgtagtgccaaaaggttcgtgctagaaaagtgcattggacacactaattgacatcctgcctaactggtcctaatgggcactgtaaggttttttattttgacacattatattaatagtgattccagtcttatctgtggtattaatctgttataactgcatactagtattccgttaaagtccacgtgagtctgttatgctttaagggttggtataaattgttcttaggtcggttgaactattgtctataaatagctggtttcattctgtaaatgggtcagctagctaattgataatcttggttagttcaaatatatcgtgttgtattgtgtgtggtatcttgtatagtttgttgctgttttcaggtgtgattgtatagcttggtgatggatatccatagtagaaagatcagagccttgtggtgctgagttcagactgaaaggagttcggtgttatcttcgtaatcagatctgaagggatttcagattgaagaaaagtatcgaagaagaacttagcttctacacaggga

SEQ ID NO: 324508 - DNA, 1709 bp, Cannabis indica
atggacagtccaagtaagaaactaagactcggagccaagagaactatggttcaaccattcatatggattaaccaaaagtttcaaacataaggacaagaggggaagctttgctaaagaaaataggtctattcagtggacttaagcaaacttccctttcctagtatcatgggtttgatgagtatatcaaaactaatgggttatggtatatctgataatttaattactccaatgcaaaaaatttactttagaaagatgctagagcatctttcaatggtcgaatctaaaggaagtcaccaacttctagacttggaatttatttatctaaaaataatttcaactattccagaaaagataaaggccaaggaaaaaaattctttaagcatcaataatgagaggtctcatgcatgcttcagtatacacttgaccaaacacctgctgttgagtcagggttataagtagatatcagtttaatctaggataggaacattggaagatagtgaaattaatcttaagatcaaggaggatctataagttagtctataagggtgatgttttcaaaaccctttaggctacactgactcatatttctagattgtattaatgctaaaaagtttacatttcagatggtgactactctggggtggagcagtaatttttggagaagtgtaaaacttatctagagtctctaactcccccagtgtcccaaaggctactagataattatccagcttagggaaagttctatacaacttttagcattattccagtcatagattgactactggtgttactttcctataacacaaatataggtctcgaaaagtaaagaatccaacaccctaagaggagtaaacatatagatagaaattttacaatatcaaagtttttgtgactaaggaggatgtaatggtggagaaggttgatacttaatacaacatataagatcctattacagagataatactacatactacacttgatctagacatcaagaagatgagattaattgaaataaattttaagttttatcatagtgcaagtgggagtttgttgggattttatgccccaaataaaactcatttgaataaaatcttatttttctaattaataaaagatcataaatcattttacgttgcttggttcacatgttactttcatgattatatgattaatatataaattatattaaatctcgaacgtatagttattcatgattatagtattgtctgcatagtggaaaataatcaaatgattatatgcttcaaaattattttagtcccatgatttattagtacacttgatttacactgacgtaataaacatcgatatgatttagttacacttagataagtggaatgtcctttctaaagcattaacaaagtatgcttgtatcagatgtataatatatacatcagactagaccaatatttacagtggaaaagatattataaacttaccgttatatattttctaagtcgatgtcacttagttgatcttaggtcaattgatctcaatcccgagatgattagattctaccttaattgtactatacaagttctttgacttgtttgttaccaacttacccataagactaggcaatacttacatcttagaaatttggtagtacaattaattgggagcgttaaccatagaaataaaatctatagcttctacaactatttagaagtgaaacgatgattttcttagag

SEQ ID NO: 324509 - DNA, 1121 bp, Cannabis indica
ttatttttttttattattttctaagatatgagtttataaatataaataaccttgaatttttttttccacaaaatcttagtttgtttaaattatttattggattttaaataatttcagtgtgattttttaaatatgtgtttataaataaaataaagtttgtatatatattcagaattatttaggttttttaggtaaacttaatatatatatatattttattaatgtttaccttatttttagccaacgacgtagagtcaatgaaacgacaatatcaagtatgtttataagaataaagattataaaaactgtaaatacacgaaatttatagaggttcagctcctttgagcagtaatagcctactctcttttttgttgtatatctctgagaaaatatcaagatcacaagggatggccatgtgagtttcttaatatctatcgaaggttacaactatttctacataatttttgatcttttgagaatacaaattttcccttatttagtgaaatgacttcattgtttatagggaagataaccaagatatttacatttaataacgaaataaatggagaaaatcgtgagaatttgagtaatctcacaattctctcatccttctaaattaatcccacaaaaataaggattttcctccaactatgtctaagaaatcaattaaggaatgaatatggacaattcctcttgtaagggtctttgatcggatatccttactgcggtgagtcattgatgactcaggatactggtggttagagctcgtctagcatatgtctgagactgggtggctccatctggcccatatagccgaccaacatcttttagagagtcgtggagggatcccgattttctcaacctctttcatgttcaccatgtgtcacatcattctgagggtgatttttgggataactttttcctctaagtttgcgcagggacttttggtcgtacggggactttttggtttgtccctttaggcgattatgtgatgcgtgattttgcccaaacagtctgtccaaccttggtgtcatacctacgagtagaaaattttcttcttgtcttttcaaatctttttgccatgattacttcccttgaaaactataccttggagactatgt

SEQ ID NO: 324510 - DNA, 770 bp, Cannabis indica
tgttagggtttcatctttattgttcacatatatgtggatagagtgattaattattgttttcatacattagtattgatattgattgtttttgctgttcatatgttacttttttaggttatttgttattgttttgttttcattttttacttatttattttcaaacaattcaaacaaaacttattcaataattttaggtcggtgcctttatattttgtggttttaatatattttgtttttcaatttatataatttatgctacaatatatattaggaaaaaaattatgtgcaatgcacgtatgctgtttaattttatttaaatcatttatgaaattatatttttcatatatttttatagttatgtataatttaattaaatcaacattgtaattaacaaaaaaaaaaaacaattaacacgaagttgaaatagaaatataaaaataattctttaacggaaaatattatttatagtttccaaaataaaatgcataaagaaattactaaattatatgaacaaatttgtgcaacagtgaattttaagtttgattgaaacgaaacaataataataataataataataataataataataattgattgtcaccgatttcacaattataatatactaagaagatacaatttttaacatcaatttgactcagatttattaacaaaaagtaattataaaaatgaatagtgtatacttatgttgccccaggtttttttcctaaaatatgtggccacggctatgtacgacacgtggaccaaaagga

SEQ ID NO: 324511 - DNA, 2318 bp, Cannabis indica
aaggtaatttatagtcttctcagatatataaacctcaattacatgcaaattttctactatcgtaataaattaaacatgtaacagacattaaacatagaaaccctatatgctatctaaactatataggcactctcacctatatcgaaattcaattttatttcactatagcataattgacactcacttctcagatctcgcatcaaaattatagacttttaattggtgataagacaaattaaaagtaattaagtacaaatgaaataaaatacatagaaattgaggctaatagacacaattcaaaaatctacatagaaaacacaattataaacaacaatgtaattgcaaattttgagaatcccattcttatagctaatatttgtttaataccaataaactcaatttcatctagcttaaagtaatattgcaattatgttgcttacaatcgtaaagttttaagtacttataccgctatttatcctatatatatattattttttgtttgatatatattttccattatatttattgatagtgaattgatatattagtaattactctgtacttataattttgttaacataatgggattatttcatatttagactaaaaagtaaaaaaaaaaaaaataaaaaaaataaaaattataacattgcggtagtacattttttgcggtttttgttgttttttcatttcttgttgtgtttgttggatgagatccgctgtccataaaagtattcttaaacttagctatttcctgactattcaaattttggtgcaggaaacaaatctaatgtctacaacatttctaaagagagtagggataggaagccgcttacctcaattggttttaagatttcatacaacaaactttttgtcgtatcagatcaaccatgtaattttttttttttttttaaagcagattttgacaattcacaattctatgctttttgagggcatctttaaccgagtactaaccctatatcacttttacaccttttgttttgggttttgagagaacatttttcttttgaaatggcattcttttccatgtacataacacattcacttcctttcttctagtgacaacgtttgggcatccactttttcaaataagatgggttgaatttgaaactaagttgaatgggaattcttttatttgacaataataatattgtttttatataatataatactagaatgaattaatttttttaaagcttataatatagatatcaattaatttaataaaagaataatattattttctttaaaaaaatatttttagaaaataatttattaatttaaatgattgcataatgaaatgatgtgtatttttgtgatataatactttaaataaataagacttttggacccttctagagttttgcttcctcattttatttttattttttgttgtaaaaattcttctttaactataaaaatcattgctaatgtcttcttaagctccattttttaaaagaatttacttatgtggctatgagacacatgtatagatatggtacatgggtcaattcaacaacttttagctaggcaaactcaagtttattttcattaaatatacaaccattagctctaagaatccacatgcatatttctataatataattattaagttactctttatgtatttattttttgtttggactcttatgctgttaaggattaatgttatgttagcgccacatcaacaaattgtttaaaaaaataaacaaaatgtaattaaatggggatatttgtaatattttttttttttacaatttagcaaaaattttcataacaacaaaaagttcatgggcaaaattctattaaggtttggggaaacaaatcctatttattatataactaggtaactaattcgctcttcttgcggttttttttattatagtaattgtaattgtttaggttgttaatctttgtgctcaaattattgatgtaaagaccgcttagtttaatttggaaattagcagttaattatgtttaattatggaaaattatttatagatatttaaataattatttacgctgttatttttgaattctgaaatgcattttatgtcatatagtgaatttcataattttgcatttctggtgcctgataacatggaactcggggtttggctcagtaaaattacaacttagtatgttagtatattggaacggtttattagcattggaaatgtcgggagtggtcgggaatttagaattcccaaaaataccctttagtacccttttaattagttttgtgtgggcaagggcattttggtctttttgcctttttgtgttttgtctttatgtgg

SEQ ID NO: 324512 - DNA, 898 bp, Cannabis indica
aaaattaactaaaattccagtatttttgtaagtttccctaagtaataactgatctaatccaattaaattccaatttttgacatttaattcaatccaattgtaattgaatattcaactttttgtaattagattgaatttaattggttcagttcaattagattgaattaaatcttgctcagttgaaatataatccaaaatattacagttcaactcaaatcctggattagaagctgatgtatgtggaaaaatatgtggtatttttgtaataaaaaatttaatgacatggcatgtgggtgcagatatcatgaatatgaatgaatacactcactaagcatattttaatcttacctgagtaacttaaaataaataggtaacaatctataacttataacatctgtaagtaactcgtaagaattgttgaaaagttatagaaaaaaaaatggtaatattataacccatcatctaataagtcactcaaacagacttagaggcctactaaaagtaccaagtgaccaaccatattgaacccaaagaaaccaaattgataactttgttactaaaatataaaaacaatataattattactattttttggttgttgttaatttaagtgctttctaaactgttgttgggtaaggaaatgtcatctttatataatgtttctacattttaaaaattgtgatggcattgattgagtttatagttatcaagtcactaactttattcattcatttttttttttttaaatgaataagtacttttgtattcctcaataacatttacaatctattaaagtcattacattcatatatttatacaatatatatatataggggtgttcacaaagtatccgatccaatccaatccgcacgatccaatccaatccaatccgcaaaat

SEQ ID NO: 324513 - DNA, 569 bp, Cannabis indica
aattcaaagaaaataaaataagaacactcaaggttttcacatggctatggtgttaataattagccttagtttacgagtcaatattattaagagatgctagaaaagcctaagggattaaaataaggtatgagcactctattttgcatgagcaagtgagccaagaatttctaaccctttgcatgtagggtttgtgtagtatttatagtgcatagaggtcatactaattaccatttttttctaatggagagtacaaataacatattgactttgggcttttttagtgaagcccggcccatggggtgccttgagtatgataatgtggatacaacatcatgatgccagttgtcaaaactgtgttttatcttcgtggataactaatgacatattaattacttgattgtcaattactctatttccttatttagtaagatattgttctttatccgagattctggggatacaatccctaatcttatgcgatttggtagaaagcatgaaactatattgggcttctgtgtacatgatgatagtgttggaatttattttaccagaatcttagatctactcac

SEQ ID NO: 324514 - DNA, 1352 bp, Cannabis indica
ggtttaggttgagtttggttaagggattttgtgattttggggttgtggtgttggattaagttcatagtatgtttctaggattaagttaggtttgtttatgtatgtattgggtggattcttgtttgctaaggtgtgaatttggaaagattgagtttaagaacttaattttcattccttgatggtgaatctgaatttttgaggaattacttagtttttatagcttgagtacattttaattatggtttagaactgttctgaaaagtttgagtaggttcaatggagttttggttcgattttgaggcaaaaaactagatttttcccaagctgccaaaaccagtcgaccggttctacaggccactaaggaactggctttgatggccagcaagggaagttctagggttttttctcgaacctggttttgccttggggtgttttctagagcctagtttagggtattttcagatgtttaagctatttctaagtcagtggggattagggtttgtcctgttgcgaaattagggtttattctagaatttgattaaattgttcagcaagtttcgttatcgtgacataggaccctggatcgtcgagcataattccactcaggtcggcctgcacacctgatattggattgaggtacgaaaagttatttgcactactaagcatctcatatgagaaacaattattatgatttgtggatcgattataattaaggtaaatactcggtaattaccgttgctaaaatgagtaattactcaccttgaaaccacagataagtttcttacttatcgattactttatcgagcaacgatagtgacatttgaagctcgtggttaacgagtggtaatgatgctttatgagacatcaatgtcggttcgtcttataagatgaataattgtttataaattttttgaatacgcattggataaatgtttgtattgggtgatgaacttgttggttatacaatgttgtggtttctcgtattatgcattgtttgtattttattcacttttcttactgagtctttgtgacttgcgggtgcttcgtggtgcaggtaaagggaagggaaaagtggatcagccacgagtctgaggtctcttgacaatgtacatatcaaccgctgtgtctcggctttcaatggatatgatccaccttttgattacgttttggaaatgtaatcctattttgtaatactgttcttgaaaccaattgtaaaattttataaacagaggatccacatattcagtattattttgtataaaatttatatttttagtttaattcaaaagtttttaattaagccacacttttcttgaactgatgggttaattataaattaatttgtaaaagca

SEQ ID NO: 324515 - DNA, 1026 bp, Cannabis indica
ttgaatttttgtgagaaaaccatatctactctcattgagaaagtgaaccaagatacctaataaaggttggtttatttcatatatataaatatttttttttgttatgtatatattataattcttgagagcaatcaagtagggtaagaggcaatgaataaaggcattttgcattgtgatcaatctcattcaacaatcaacatagaattagatttgaatatgaaatcaaaacaatccaaagttccaaagcccaaaccaactcagtttgtctttatagatttgctaggcctagctaggcctataatcaaattacaatagtgttaagtcacttaatcttttatatatagatagattttcctccaacccatgaatattaaaaaaaaaagttttagttcataatttactggaaaaataaacattttgagtaaaagtattcaagcacatatcataaagaaataatacagcaatgaatgaaagaaacatttctatgaacaatataactacccaaaaaaatgagatggctaatattgatttgttgtgagattttcaagcactctttactatttcaaaatattgatttaaatattattttagactatttgttttgcaaaagttaataatagaaactctctattttgttatataatttagactatttattttttaaaattgtaccaaatagtattttgaactcaatttttttttttttcaaattaaaatgtaataataatttgaactggaggtgttatgactagattggttacattttttttttttgcatctgtttgtattgtaaactagtttaggttggttataataataaaaaaattaacaaaaataaagttcagggtatgatttgtaccatgttgaaaaaaaaataggcccaatttatcatttaacaaggaaaatttacaaaaatactggaatttgggttaatttttacaaaaatactgtcacatgaaaatcttttcaaaaatactgtatttttaaaaaacaccagtaaaacacaaagcagaataactcaaaaca

SEQ ID NO: 324516 - DNA, 1213 bp, Cannabis indica
tggatcccattagattaacctctactcataactgtttatttaactagttcttttttttttttttttttgaaactagttctttaaacaagaatagatcataaattcacaattaatataatttaattttcaactttacaagattctattgcttcaaaaatggtatctacaagggattacaaacaatgtaaaaaccagtttttggacaaatagtgaaaaataaaataaaataaacgacataaaagataagaagtttgtatattatttaatatttaatgtggctgacaaaatataagtggaattatttatcaacccttttttaaacgtattaaatgattaagaaagagatttatgagttgaaattcttttcaagctgacaaacgcttccactaaaaatcaataataataataataataataataataataataataataataataataataatgtgcattaatggaagaggtcataaatttgcataatttttctccggaaaaaattccaagtgcaagaacggtccacataagtaagaacacataataattattaaattgctgcataatcttcaatagtgtcatatagttaggagtaatttgtggttaatcctacgaacttttaattcacttccaattaatctttcaatctcaagttttggtagaaaaatccgcaaacctctacttctttagcaaattaaaagtgttatatataaaagtagtgatgtgacagtataaattatcccacaagtaaataaatatacaagtatcgcgttcatattagtctatataattatttgaatttaaaaagtgattaaagatatttcaaagttgttgagatattctctgaagtagttgagagattttctcataaatattagtaactgaattcatttataaatatttatttatttaaataattaaatataattttgtttatcaaaatttttagaaactaaatattttataactaaagaaattagagctgtacatcggtcggtttagtcggtttatactacatattttctaacctaacgtaaagttcggtttgtaaaattctgcatacaacctacccaattaaaaaaaaaaacttaacccgaccgacggtttgggcggttggtcggtttaaccgcccaaccgaaataagagggttttttttttagttttctactaaataaaattaaccacataaatacacaatatatgtgagaaagaattt

SEQ ID NO: 324517 - DNA, 669 bp, Cannabis indica
agataccaattaagtattattaataacataaggtaccaaatatgttttaggttaaaaacacaaggtactaaataagtatattcccttcttttaattaagtcatatttaaataaaatattttttaaaattctatatttaaaataaaatgcattaaaatttactctctttctaaacaaaccaaactagatactttctctcttcaagggttattgacactctccaatggccgattctgctctccctttaccattgactgaaatcaaagccctcctcctccgctgtctaccgctagccaggccacttccggccaccacctctgattcgcagtttgctcctcctcttcctctctcattttttccctcgacccggtgagttgcgacaatggcaggaagacaaatctcaggcgatggcttaccatccaatcttactggaatgaccaaaaaccagctctatgacatcatgtctcaaatgaaggttttctcttcttctgtttttattttctcttgtaaaattttttctatttacaaacataatacttgttgggaatgaaaccaaagtcacacattggttaggaatgggaagaattatgggtatataaagatagacactactactccattagtatgaggtcttttgggaaggtgcccaaaaataaaaccgtgagggctt

SEQ ID NO: 324518 - DNA, 939 bp, Cannabis indica
cttaaagaaaaaagtgacactccaatcataaaaatcaaaaggttgaccggcctgcttatgatgaaaaatattattcctttgattccaaagagcccaaagaaaacaacataagaaacagatgtaatctttatccaactcctgagacacactacaaaagaaatcatacaaattaagatgcttatacttatactaataggtaacaaaccttgaagacttccaagctttcctcgatctgaagcaatctagcaaagcatgcttcaccgtttcaggatgaaccttacatataggacataagggagaatcaataacacaccttttatggagagaaaaagaaactggaagagcattagagagcattctccaaataaacaccttaacttttgggggaactttagaagtccaaattttagaccaaaacttcttggaactagctaaagaagaagaagagggaatatcttgagaagaaaaagcaaggtgataagtagacttaacagtaaactccccagaactatcatgaccccaaatgatatcctccttaccaaactcacccataatagggacactaaggatttcatcaactaaaggagcagaaaaacacatggcaagcttagaaacatctcaatccccagcatcattaatagaataggacagaaaaggggaaggaggcctactgtccaaagaaaagaaattaatcttgttacaaggaagtcaatgatcctcaagggttcgaatattactgccatcaccaatcttccataaaagcctcgaacttaataattctctaccccataaaatacttctccaagtgaaagaagggctgtgaccgggtttagcatcaagaaaagcactacgaggaaaatatctagccttgagaactaaagcaataagagaagaagggttcttaaaaattctccaagcttgcttagtaagcatagcttg

SEQ ID NO: 324519 - DNA, 1016 bp, Cannabis indica
tgcacttaacccccccaagctcaaattttagtagtaaaatccagctgttagcaaatttaaggtgtcatctattttcagagttggttgccaacatgtactgcttatgtgtacacgtgacatgtttatataggtacacctaatattattatttaaaaaataaaaaaaattatttcaaaaattaaaaaaatttttatttttaaatatttaattttaaaataataataatattgagtacaccaatataaacatgtcacgtgtacaagagtgtacatataagtagctcatggcggcagctaactggataacaccttaaatttactaactgttcaatagtttagaagatttttctgctaaaatttaagcttggagggttaagtgtaagtaaaatgatagttgggagggtttggctgcgaaaaaatacaaaataaaaaataaagagagagagagagaagagaaagaaagaaaaatcaacaattaacttaaaaaaaaaatagtttttactgactaaaaaaataaggaagagggaaaaaaaaccgtaattttagaagctttaataagtaaaaaggaaaaattagaaaaatttatattaaatgactaaaatagcttaaaatattatatttttattggaacacacattttgtttcttttttaaatctttatactttttattttacttttatacggtatgagattttttaaagggaaagactgatgtatgtgaaccttgtttgttggtagtgggaggcagggccggccccagcattttgggggcctcgtgcaaaattttaaaattgagccttttaaaaaaaaccatatatattaaaactacaattttattagtagtctttttttttttttaaaaaaaaaaattgcttcataaatttttaattaattttttttatttatgtataaataataggaaaaaaaaaaaaaaaaataggcttttttttttaaaaaaaaaaaaaaataaggccttagaaaaatgggggccttgtgcaatggcccaagctgcccaa

SEQ ID NO: 324520 - DNA, 1218 bp, Cannabis indica
tattatttatagttgcattgcatgtgatacgatgatgcccagccttgacccataattaatcaaattaagtattgtataagccaaaactacttattatgtaatacctttacaaaaataaaaaactatatcatgacgaattgtatcatgattctatatattatgtgttataacttataatattaattaatagtactatttaggtgatcatagatatttgattgtatataattcttatattatatatatatggagtccttattagtttattttttttgcaagttatgtgtctaagattctgtaaataagtttttttttttttttattaaaataacaattttattaaaataattaatacaaacaaacttgtaaatcagcccaaatattatattcaaaaattctataactaaaaagaaatcgagagtatctaacaacaatatgtgctacacgatttgctgatcgcctaataaaatgtaacttcacattgagtagagagaataacaaagtttgacagtcttgaatagtaccaaagataaaggccatagttttattactgcgaatgacttgaacacaaagtatactatctctctcaatctccacattctaccaattctcacttttaatccaactaagggcttctttttattctcatggcttcaacaatctcagctggaaaaacacctccttgatagcatgtcttagcctctataagcctacgcgaactatcttttgccacaacacccaaagccataagaactttcccgttgaaatagagctgcatcaacattgatcttaatttgatttattactagtttaatctaaaactcaggcccatcaccattgctttctaaagacagtgaaaataaggtttaatttatcctgagtctttcggcaataatcaagtgtaacagttctataatctcttcaatagaggaaggttttttcttccaaacaaaatcattacgggccttccaaattacccaacatatcatagtagcacgacatatcatagtgaagaaggtggtcatgttaaaggaagtactgaaagagtaccaacaaactttagcaaattgcatgtgagcaagacatgagtggtggtctcggcatgagttttacacattcgacacattgttgagattggtatgtgttttgtgactaacttacaacaagttggtaagcaattagagacaacacgttacaaaaagtttttaacttttggag

SEQ ID NO: 324521 - DNA, 868 bp, Cannabis indica
ggctacacaatttcattcatttcgaattagatgtattcaattattaacgaaaagtaataaatccaaacatgtaattttttgttttttgggaaattttttgtttttttggagaaaataattaaaaaaagggggggttttagtattaagagaaacaaatctttatctagctaagaactctgttattaggaataagaattcatttatgtgatctcagtgaaacatttgctaaatatcttttcagatttgagattaagtttccactgcacacattaatgatttgaacaactttctcttaattaggctgagcagttgatcaaagatgaagcagtaaatgcagcctatgaattgctggaaagtttttgtgaattcattctcgtccatttctcatacattcggaaaacaaagtaagtaccatgaaatatggtggatactgtctttcaattttgctggggtaaatatatatatatatatatatatatatatttatatatattcttctaaatattaaaggttcttgttttctttggttcattcagagactgtccaaatgaaattaatgaagcaatttctagtctcatatttgcctctccaaggtgtggtgatctacctgagcttctgcagattcgaaggttctttacagaccgatatggtcagaattttgcaacagttgctcttgaattgtttcctgggaatcatgttaaccttcaggttttcatttgtcttatttcacataacaatgtttatttatttatttaaaaagaaaaggactagttaagaaaatgtaatagtaattaacatagttgttaaaatcacaggttaaggaaaaactttccacactgtcaatttctgaggacatgaagcaaaaatt

SEQ ID NO: 324522 - DNA, 1213 bp, Cannabis indica
ttgtctctttaactaaggacaaatttttcttttgaatgaggagaaaggttgtcactcgttgcaacctaaaaaaaatttgagcataacacagagctaacgctcaagaaaaaataaagacaagaaaaaagtaagatagctaaaaaaaaaaattaaaaaaaaaaagagctaagcaaaaagaaaacgcttagagaaaaaaataacaaagcaaaaaagctaaggcttagaaataaattgagcaaaaaaaaaacaaaacctaaagctctaggaaattaagcaaagcaaaaagctaacgctcaaggaaaaaaaaaattgagcaacatgaagttaatgctcaagacttaaagtttaaagaagaaaaagaggtgcaagctcaaagaaaaagaggtgaaagctcaaagaaaaagagagccgcaaagagcttaaagtttaaagtaaaagcgagaactaaaggcaaaaagccaagactcgaagcaagaagctaaaatgcgttaagaaaaatatctcaaagcacaaagcttaagggtagagtaaagaagcacaaacactcaaagtgcttctctaaactacgaaaggcttgatcctgatctgggtatgtaggcaatataaataatagatacaattaccaaatcaaaacttcaaattgctctccctaatctcaaagacaaatatgaaaagtatttatcctttcaaattaagagtggtagaataagaaagctacaaaaagaagtagaaagtttatgtgccaaactctcaaagttactcgagcatcacatgtgtccatataaattaccacgcgcatgctcgagggggcagttgttgaaccgtttttatttatttatttacaaaaaaaaaataataacaataaatataaaaagactcgttcagcaacaaaaaagaaaaaaaaaaatattattaattaataatatctctaattttctctctactaaccttttaattgcccaccactcacctatccattttttgatcaatatattgtacaaaagagtctataaagagggaataaaaatcaaacaaaaagtagcgaggaagagaaagaaaagaaaattctgtcaaaatttttagagaaatattacgataaattttagagaattgatattctcatcttcaagagatttctacatagtaagtattaggttatccctacttttttttcatcaatctaaacctctttttttctctaatattttttttt

SEQ ID NO: 324523 - DNA, 1336 bp, Cannabis indica
accatttattccatgtggaacaatgtccataatacaaattacaaaatttcatcgggtctcatttattttactttagattaaaatatataaaacccgatactaatttacaccttaccaacataaaaagatcaaacatttggtttggtactatccacaatcataaagcttctactcaaaccacaaaactttattcatgactttccattagcaaatgacaagaacccaaatacaaaatcgaaaagaagaaaaggaaagattcatacttgtcaacaaaagcttcaaccacagctcgacgttcagctatacacttccttttagaatgaagacgagtagtgggttttgagctaacaatctcatcacctttctcagacttgttcacactcacagaataagaagcagccacagcataagatttcccagttcttcttccattagaatacactgttcaatcaatcaaattcaaaaaattgaaacttgaaaataaaaatgcatgctttgaaatcagaaattgaaaagagatagagatgaaagaaattgagaccgatttttgggattgttcgtgagatcatggtgatgggattctctgattcactggttttctacgcatcggagaatctgttattcgaacaagaattgaatgtagagagagagagagagccaaaaacccaaccagggttttaggaagaaaccttctttgtttcctttttattattatatttattttgaaataaaatatttatatattggagaaatttaagaccaaaattatgtagattatttgtaacaaatcacttttttttttttttttcaaggccacactcaaccggccccaacaaccaccagctgccacagcagccactacaacattaggcgtaaaaacatgcatttttttagctttgaataatcttcctattctttaagctatacaacatgtatttaactatttctttaatctcatttacaatttttaatatagttaaacaactactattatgcacacaaagattcttattttcccaaagcaagtaaacagtggcagcatagagcaaaacgatcacaccagaattcttgttagaaaaccagcagcgccacctgttgtagtccaaaggccaggctgcaacaccacaccagtcaaagacctgcttcacaacctccctagagacacagcaattgaagaaaagatgatggtggctctcctcttcaatgccgcaaactgggcagaaactagagtctaaaataatgtgaaatttatggaagttatctctagtgagcaagtgtccatgaaccacctgccataagatgaatctatgcttgggcagagaaagattacaccaaa

SEQ ID NO: 324524 - DNA, 1778 bp, Cannabis indica
aattttgttgttgtttttggtatttttgaattgaaatgtgtggaagatttcatatgtaagtttgctgtttgagatataggttttttattccaaatctgagatagaggaggaggcgttggtggtgctccgtaagggttttggggcagacatgagctagaggagagtgagtgagggaggagaaggtgttttcgggctaatgggttccatcagcggcaactgctggtcgatcgtctcgttggcttagcagaggtgaacgagagaggagagtgagggaggcatgttttgttagggaggtttccttttctttttgttctaatttatttagtaaaaaaagtatatatatttttttgaaataatttaatatgatgatttttaacattttttttaaataattaaattatatgggcctataaaatcatgacacgtgtacaccgtgtccacatggcacttaatagtaaaaattggatgaaattgactaaatgctattagaatacaagttttagaggttttactatcaaaaaaatgaattttgatgttatatagttgcaactagaacgaagttttttggggtttcgccgcaatataccctttttacaatttatttgtcagaactaaataagaaaataaaatatttttaaagagagaataagaaataattatacatgtttttagatataaatataatattaaatttatgtgcaatgtacggatacttagtataaacacttaagtttttatacttaatattttgtgattttaactaatattatatataatttacttagataataatattatttaacaaaaaaaaactaatacttaacataaaataataagaaattataatagtgatttttttaaaaaacaacaataatgttttagggaaaaaataatttataatagtgcttgttgaccttgaaaagtggtcaaccgacaatggagttgtaggaatttgatgtttgccacgtgttacacaattagaatgagaaagtaaagaacacacagaattgttatagaggtttggcctcctatgatagcgtataatgacctactctccttttagttgtattgatacttagggataatactattcagattcctataggtgagatttcttaaggatacaaagtataaatcaaggttgacaaatctcatgtgttaagaatgattgtatgggcatttaagagagagcaagaaagatagttattagacataggcttaaaactttatcacttggaggctagaatgagacttagagacttaggatttctagattaatcttaaggcctttatatatgaaaccttaaattctaatttacaattgaaacccttaaatatttctatattaaattagttatatacaaaagactaaaataccctttaacgtggatatttttcaattgttttattgggctattatggcccaattcccagcctaactcccagtcaacgtgtagaattatacaaaaattcctgccaggcctttccctggccacagagacacctgtaggtagtaggctggttggtcttggttttttctagagactggccagccatagggccagccaggggtgtccagccagcttctttggggaagctagtctatcacttgatatttcgtttgagtgtcgaggtccccgtttgctaaggtactgacttggccttgtttttggtgagttgtattgccacatggtgctgtttttgtccacataaataattgttggaaattattttaccaggatctatttactatcatgtatgttggattaacaacctaa

SEQ ID NO: 324525 - DNA, 976 bp, Cannabis indica
gcagtggggttctgatacagtgcaacgactgagctgttttatcctggggacgaccggcaattttcgactgcttgcacactcctgggcagtgccgcgaacgtcttaaggagagcgacttagtccgcgactcaacccaaaattcttcattcggtaatatcgttcctcttttattttgctagcagtttactcaacacctatatatcctgtgtttctaacactttaatttagctctcagactcataaaacattaaatatatattaaaaatattacctaacatagtaacttattttatgtaacacaaagttcttccatctgttgtggtactgctatgtataacttactcttagttatacagatataagaaaatttgtatgtgcaagctctttgaattgaggcagagaattactagcacaacttcaacatgcttaagagtttagatttgctgtgattttcctatttaatacttacatatatatatatattttgtttgtaatagcatatacgagagaattgaccgttaataggaggttgtaagtttaagtacatgtatctttgagcttgattttgttccatttgctaaaggtctagcattagagtaattttcctctacatgttctagaattaaaatggagagagttgaagatctttatttccttatctgaatttgatagcgttcctctttttggttcacacttgtatgactagttgtgtcatgtctctattgtttgttccttcattaaaggaagcctattctttcatcttgacagtaaatattattctctgaagtattatggataaattgtttgcttcaagatttcaataacaaggatgtgattgtttgaatttattttatcaggatcttaatctatgattgaggttccacttcctgtgtgtgggcactactctatcactgagggtttcgaaattatgaagaggaaaagagagagggattggttcggctatagagagagaagt

SEQ ID NO: 324526 - DNA, 986 bp, Cannabis indica
ttgtattaattattattattgtaattgttatcatgagttagatatgtgtggaaggaaaggcataattgaagagaggaaaaaatgtggatatagggcttggatttggttgatgattttattatgtgatggtacttacaaatttggaaggaatcatttttttggattggacatattgaggtcctagtttaaaataaattgatgttaaataaggtaattgttgtatttgggttttagtgtggatataaatgatttaagctcatttgttacaccgtgttgtagtgtactgtatagtattatgttaaattatattgtaaagtattaaataataaatgatttaagcttatttagtacattggtataatgtattgtattatactgtataatattatattaaattgtaatgtattatattaatgttatttaatataatattatatttagtattaactttattaaaagtttatgtaaaattatattatctcataacttgaccctgactccagaacccaatcttagatttgggtcaaggttcaagttcgagatttgagtctgaggtcagggtctagagcccagaccctttctaaatattttaatacaagttaatacaaattatttattatgtagtaaataatatgattcatatttagcatgcaaaaaatatgattcatattacattaaaatttatggttataataattaatacaatacaaaattttattcaaacatagtgttagttgttatttaatacaatacgatccttacggcctatcaaactgagcccttagagcatctccaatagtagcatcttaagtatgctaaaaatttataaatcatctaaaaatgtaatattttattttatctttctttcatatcattttggcactcttacttctaaaaatactccaatgtattatactatttaaaaatactataattatgatatcacacattattacttaatatatatcctaatttttagctacaat

SEQ ID NO: 324527 - DNA, 838 bp, Cannabis indica
ttctctctattttttgtcgtcccctttctcataaattcagcccttatttgcagttattttattgggattaattcatttacaattgttgatgaaacgtggacattccccacatttcatttatttaaacatggataatatctaataactatccaactaccccttgtttttatcctttagacggttatgttgactaggatggttatatctcgtcaaattgagttcttcttcttatccatcttaataggaaaaactactaaatgttggaaacacttcatctcgctgtatccctttacttgtattagtgatgcatgttgtgaataatgtgaggcggttgagtgttgttattttcaccatctctgatatcttgtatcctatatcttgctactctgtttattccaaggtgaacatatgtcttgtcaattctaatttaatagtttttattcttgtctcgcataaagctatacagttagcgagtttgaacatttctatcaaacttgtatttaattgacacgagttatttgaattacatttaataatataatgtcattattatatacattgagttgattcatattctttctgtaggacacgtgacagttctggtacatagcggaattttggatataacaaaattatttccatagcttttgaactatttatcttgatctccaattaccaccccaaataaaataaataagctagtataataaatatttaaataaaaatataaatattgagaaaaatatattactcatactcaacactactacaaaataatagatagggtgactattcaatggttacatttttatgtaaccatatggttatatttttcttt

SEQ ID NO: 324528 - DNA, 721 bp, Cannabis indica
taatttaattaaaaagaaaaaaaaaacaatatcatgattatgagatatatacatatgtaaatgagatccttacaggtggagcatatgttagaaaaaaacaaagagcaattatacatataaagatatttatatataaatttattatatattatgagagaagtgtgaattagataagaatatattatgtttgtgttgtcttatgtgtcggtgtttctatttagttggtaaatttaaggagagaactgcccccttatccttttaaactcaataaaaagttaaaagtaaaaataaaaataagcttggaataatttgtgatggcttttgtttctaaatattcttcataatatgtatatagaataataataataataataaaaaatattggcatatatattataataaagatagtattttatgtgtcaaaaagttaagacaaaggcatccccacatatcacattctcaacctataaagctaaatattattacatttgagtgggcagcttgttaaacctactcactcgtctctaatctcttttctactaattgaattaaattatacaataatatgtatttagatatatatatatggatacgattttgtcctctgatgtacttttacggaatatattccgtggtacattagatgggtctcaaggtacattagatgagtgttagggtacattgctattttttaaccctaattacctctagatcaatctca

SEQ ID NO: 324529 - DNA, 1088 bp, Cannabis indica
gggacccttccttctcagggcatcagccactacattggctttccatggatggtaaaggatctcacaatcgtaatccttaaccaactctaaccaacgcctctgtctcatattcaaatctttctgagtaaagaaatatttgaggctcttatggtcagtataaatttcacatctcaaaaatggtacccttggtggggtccaggcaagagttggacatcatcctgtgactgtatatcaccaatggtcgcgatattggtatctattggagataaaagatgctcatcatcatcatgttcccaatcttcttggtacacatcatcatcatgatcacactgccagtaatcatttgcatcatgcattcggtcatctacaagttaaaatggttatggttctccctccttcaacaatgtcatcatgtcgcccatttgaaccatgaagaactcctttaactttttctaattatccaagtatattcaacctttctaccactgctctatagtctagtgtattagttatagcggtcaaggcagatggctcgattagttcctaaggcaatggtggtggaactatattttccttactcatgacctcaacaatggttttggcttatgtttcaaacaccaaaccttcttgtgtaccattactgttcaccgtgtcatccatttccatctcaacacaaagaagggctttactatcgttgatggaactgtaatactcctctcagtagactaagggcacaagcagtgatgtgtggttaacttccaaaaaaaaaaaaagataaaaaaaatttaaatttgttacaaatcccaaaatactcaaaaaacatattgtgaaatatgtcaaaacaaagtcgccacacatcgttaaatgttgctaactatctactagcaagtgtcgctaaacatattggaccatgtcgcgctatgtcgctaaatatcaaaatgttataactagtaagtaaaatcatcattaacttaaattacaacatttcgcgaaaaataatctactaataaacctactcttcttaaaataatgtaaacataagtcacttataatcgcctaaactataatcgatatatttttagcttaaa

SEQ ID NO: 324530 - DNA, 632 bp, Cannabis indica
gtcactctaaggaagactattttgaaaagaaaagtcagtatagtaatgcaagtaactgctcacataaaaaacacttaagaaatgactttatcctcatatgggataaattcccacaattgccagcatggccacaaggccatgcaatgatcacaagccccaggtcgatcaatgtcgttgatcgacttggaagacaaacaagcctacatgacaacatcaataagaagtgaccagctgatacacacaccaccacaatgtgtacggccatatttgacacccttgtcgctctggctaggggcatcactactccaaagccaatagagtacgcattagataaagagtggtgttctcctctctcaaattgaatcaaggctttaaaaatcccctcaaagttaagaaatctagtgtggcatccatacactaccgaagaagaccttctctcccacatccataacttcaaagtacattttgacctggaaggaatttgagacaattctcgttgtcgagtctttctatccacactatcagaagtagcacaacagtggtatctcaagctttcctcaggatgtattgattcgtgggagatgctgaagaaaacattctatgaccaattctatgttggaattattttacca

SEQ ID NO: 324531 - DNA, 972 bp, Cannabis indica
aacagccagctcaggaggaactgatcaagtcgcatccagtcagccaattctggatttggaagaaatcttgttgcattaataggatcgatgatggtggcaggaggcccaagatgatcgccattgatgaatcattcaagctgatgcgcacactgtcgatagaacttgtgatctccagtagaaaaaattattgtgatccaaccgaaggttgagaggcacgatgtgattaagaattatctacactataggagtctgttgagtatttttatgagcggaagaggaggaaccttcaggcctaagcccagaggaagacgccatgaaagaagcttcaagaactcaaattgttgaatcaagcaaagaaaggaaaaaaaaaaccaagaagctctgataccaacttgagattgatgaaatgagctgtgttaaatcatagactctctgatgttttatatatatatataaagaacaagcttaatacaactaacaaaatacagttagaaaaagtgagctggaaaataactaacatttatagtaaattaactaaatcctaactacctaactactttcactaacagtaaggtaatcagtatttacactttgaggtgtttggttaggaggtgtttaaaataatttgatagaatataattataaagaaacgtataaattgtatctaattatgtaagataatatataatcatattctaattaaattaataacattatggcataaaaatcttatatattattttaaaaaattaatataaaaataaaaataattttctattatatttatttaatgttaattatacataaaaataaaatcaatattcgtaaaatattatatatgtattaattagtaaatataaaatctcattatatattttattaatgaagatgaacattcacatatattttagcactatatcatttacttttgttcgacatattatttatgcaaaccatcagtataaaacttat

SEQ ID NO: 324532 - DNA, 731 bp, Cannabis indica
aatcaatgtaaggtttcttaaacacttatgtgtttatttcattattttagaaattcatattaggatgctaatgaaacatacttgttagtaaatctagatcctggtaaaataattctaacacttagatactttcttgggcttgagattgcaaggtctagcaaaggtatttttatttcacaaagaccttatgctttgcaattattggaagatttgggatatttgggtagcaagtctattactacccctatggagatcaacttgaagttgagtcaagacagtgatgacaagcttgccgatcctactctttacagaaaaatcattggaaagttgcaatatttgaccataacaaggcctgacttagcttattctgttaataagtttagtaagtttcttgcttctcctaaagccactcacccaaatgcagcacaaagagttctccaatacttgaagggaacacctggacaaggattattttaccctattaagtctgatatcagacttgaggcctatactgatgccgactggccatcttgcattgacacaagaaggtctactactgggttttgtgtttctcttggcgattctctcgtgtcttggaagagcaaaaagcaacagagtatagggtcatggccaatactacttgtgagttagtttggttgctttctttactggaagaattggggattgagcatcatggacctgctattttacactgtgacaataaagcagcc

SEQ ID NO: 324533 - DNA, 653 bp, Cannabis indica
ttttattatgaattattattgttgatatgtgattgtgggattttgaatttatgtatattattatgttttttatttattaatgaattaatttttgtgtaattttttatgttttggttgatatttattaataaaaacttctatttattaattcttgtgttcatatatccaactcttattttgtttttcattaatgattattattctctaaaatcaagtttatgccattaatgaacatttttattgagtttggcccgaatccaatgccaaaacttctagataggtatgttacatttgaattgaattctttctagttaaaaaaggttttttttagttgctcgcgaataattagaagattctctaaaaaaaaattcagaattttacattaagggggtgtttggaatgggttaatgctaacaaaggaatggtaatgtgaaacattaccttgtttgttttgtgtctttagccttggaatgttattctcttagtattataactacccttgaggagggtaatgttcatacattaaaaaagcttaggattgaatcattactttctattgtattaatttgaatagaatttttgaattaataaataaatttaaataccaatactattatcatttattataaataaaatattacggtatatattta

SEQ ID NO: 324534 - DNA, 673 bp, Cannabis indica
ttttatttttaatctttcttcttctttcttctggtctcacttgcttctctcttgtgcaacaggaatgccagttcttaactccattccatcgtcgattgccaaaatcaaaggaacccgagacccctataatctctctcactctccctttctgtcttcttttttctttgacgtcgccaggccaaacgccatagccatctctaacgacctaaacgaagaccactgacacctgaataaagtcgagacccaagcttgaccctccctgtttccctcgaaccctttttttttttttgttctcgacatgaccataaccaagccacgacaatatcacgaaaatatcagtggttgttgttgtcggaggcatttagacaacaccaaaaagtaaagaaatcataaatactcaaaagaaaaacaacgaactctttgcttagaacaacgagtattcaaaagagactacccagaagatagaacaaatgggaaagtaaaatgaacacaagggagtatagtggttcagtcagatcacaaactgcttagtctactgttgcaaatgatctctatttagtttattcatgttggatcactcatttatatacaaagcaactgtccttttagttacacataactgaccagttatagaaccgttttacaattaataacaatattaaattagaataaa

SEQ ID NO: 324535 - DNA, 1074 bp, Cannabis indica
aaatagcaacatctcttagaactggtgaccagctttgccaaaacacagaaactgactaagtgatgtcaaaatatcaacttgagtgctgggtcatgaacttccttcaataaaatagccataattcacttaattttgatttaattgacaaaactaattcaatgctctatcaagtcatgtctcacattttaatcgtaattctgaagctatcatcatcaaaattcactcccaagggagttacaaaaaaaagctcagagttaaccgtaacaggcccccaatctccgaaaaatggcaaacaccaccaatacctaattatcaccgttagatcatgatcaatagtaaaaaatatcctatttgtatttttttcctatttttgtgggcctccttcacctataaaaggagagctcccttagctcgtttttcacattcagaaaactacccacaagttcagagcatttgtctctagcttctctctctagaaacaagagcttaaacacttagcctttttctataattctcgtacaaaataaaaactcgaagtagacgtagttcgaaaactatcgcgacatggggagtgagctactataaattttatgtgttttgcaaaaccatcgattgttaaaattttgtgatgtaacatcaaggttaagaaggcgacttcgaggaattgtgttctgagttgtgtaaataaattttgaggacgaaatttctataaggaagggatagttgtaatatttcaaaaatctaatgatgattaattaaggcatatttataaaatatggattgataagagtataatgggtaagattatgatattactaatctaattctgtggaaattagggaattttttcataaatgatttacatagtttaatttattaattatgaagattttattagaacatttcggtaacacacatgctattattaaatataaaaaatttcagctccggcaactcgagagaccaattgggccagaaatatcacaacgattttagttgataattcttatggaatttttaagataagtgtgttggaagttattttaccaggaacttagatctactcacaagtat

SEQ ID NO: 324536 - DNA, 843 bp, Cannabis indica
agttccatgattagaagaagccaatttgaagacataagtttcgataacatcttccaaggcataagaattttctcttatttgaacaaccaaaagacttactctctcatcaccatttcttacaaaagcatctgcatctttcaagaaagctctcatacattgcagcttgatctttgcattctcgacttggtctttgactccatacaagaacttggcctcatttatgagaaagtctccaagcctttcaatcacaaaagaaacaacagcctcttccactgccatatagctcttcttcttctttttcttctttcttcagtaaatgaattgtaacaaactctatgtgttgtaagtattttctctaatattatccactcactgcaatggtatatattaaattaaatataatttattttctcgatttccactgatgcacatgatgatttgaatatatctatgcaaagatgtcttcttctttttctttttcaataaatattaccactatacatgtaataaatttgaataattttatgtaaagttaccatgaatccttttttcttttgatgttttcaatggttattattataaaaaaggtggggtggtccttatatggtctttcaataatactaaaattaagaatagtttgtggtttgctttttgtttttctttatgtattattttaagagtaatttgcggcaaaacccccttaactatcaatttacttgcaaaaaaccatccaacctcatattttggtgggaaaaccctccaaagtactattctgtttacattttaagatgccgtctgtccagctcataattttgcccacgtggcaatgacaagtcactaaaa

SEQ ID NO: 324537 - DNA, 1278 bp, Cannabis indica
aaaaaaagaaaatatatataaaaaaaaaagacataaatggtgttctcaatctctttattattgcttatctacaagaacacgagactatcgatgcatccgaaacgagaatccaccaattgtggatctggaaaagaaactctaccattactataagcgtcttcaccagttcttgaagaaactcccttccaagatttttatcttacataaacaaaataaaaatatactttgttcctccgtctcaatcttctactgctttgcctgaagaagaaaacaatatttcttcaataaatttttataaatatataaatatagaaaaagttttaaaggttatatgaaatatgcaattacttattttaattgttataaccgctgtaattaatttaaaaattaaataaaaataattaataaattaatacgattttatttatttttttataaaaataaaaatatttataataattaactgtaaaaaatcttttattaaatattttaattaaaaaattaatttattttaaattatataattaattataattattttgagtctaaaattaaaaaatttactaaaccattaattatattgtatagttctcattaggttttggctactaaaataaactataattaactataaatataaattttagaaatattaacataaaaacaaaagagaaatttaagtttaaatttaactacttaaaaaaaaaatatgtatcttttttaagctaaaaaaaacatcaaactcaaacacaaccttcttttatctcctttttcgctgaaaaacttatattcttaaaaaaaaaaaaaaatcacagccaataaaacaaccccaaccccaacccgtcaagagtgctcttgaatacatatatatttatatatatatgcatgaacagttacagttccctcctggcctccttggcattaatggaataaaccaagcatatttaatatattcagtccttgtctttctaattgggacctaattttattacttaccttctaagagaacaaataatgcaaagaatctgaaaaaaaaaagtggattttccaagttcaaggattgcggcctcatctagttcacctaacatctaaaagattattaactgcaaaattggtagttaagtgccgccctaaaacaaattcaacccagtcttaccaaacacccagggccggccctaggcataggcgggctaggcccgtgcctagggcccacactttccgggggcccgaaataaaaaaataaaaaaattattaggcttttatttaagtaaaatttaa

SEQ ID NO: 324538 - DNA, 2205 bp, Cannabis indica
atatatatatatatttatcaaggatatcattccttcactatagaacattgtaccctttttgtctaaatatatatatatttcttctactctctatcatcagctgcatgtagtgtctcttctcatgtaacatttcttccacaccattatatatatacagtcaaaccagtccgacacatgtagttgaggtgttgcaataatactctatatatagtactaatttaaaagcatatataattatggtgtgcagattatatatacctaaaattatatataatatttatctttaatggtaattgattagattgtcctattttacttcattcccttgaatattttatccttttctagacgtaataatatgtaagaaatgcatattgtatggagatgaaactttttgtgtgaatatagataattaaggagtttggcaaacaattcctttatcatatcatccccacaaatataaattcccaaaccgaaatgtcatttggttataattatatataagcaagtaattttaagtagtgtttttgctaaaacagagaattttcttcctctacttttgctttaagctatatatatatataatattatattagtcctagctagctagctatatccctttattcatcgatggaggtttcttccatagcttctccaccttacacatgtttcgcagttcagtctcagaatagactgatcatcagccaacgagctcaaaagaaaaaagcttataattccaacatgttgcatcaatggcaatggtgccatttctgcttctaaaaatacacattcctgtgcttttgaacaacataacatagagtattacacctccagaggactttatgcaactttacctgtctttggtgacaatacttcattacccatttatggatcaaagagtactgtctccataactggaagaaagaaaactaggctcatgagttgtgaagctcattctacaggtaatttctttatacagagaatatatatatatatatataaatatatcacatcatatattgctttatgtatgttttatatttgtattgttttgacatctttatatagacaaaactacttgtactactgttgaagctgattctaaaggaaaaaacaaaggaaaagaagagtagttgtgacagggttgggtgtgataagctccattggccatgatccaaatgccttctacactaatcttcttgaaggtgtcagtggcataagtgagatagagggctttgattgttctgaatttccctcggtatgtatgtacttatataatatttacatatatatgatcagtttcaacagtgacaacttaatgaggttttgagtttgcaatttcactcatagttttcacattttttattttaacagcgaatcgctggagagataaagtcattttcaacagaagaatatgtgtctcccaagatttctagaagggcagacaaattcatgctttatatgctcactgcaggaaagaaagcactgctagatagtggaattacttcacaagaaatgggagaactagataaaagcagatgtggtgtcataattggcactgcactgggaggcatggcagttaagtctccaccaaattcactataaccttttccaaagtagatttcaactcagagagttattaattgatttactttgttgctattgttgttgttgtttttgttaggtttctactgaagcagtagaagctttaagagtttcttataggaagataaatccctttactgtaccttttgccacagccaatatgggatctgctatactagcaatagacttggtaaaagaaaaagaattcaagttggtttaattctaatggcatacaaaataatatacttgtacacattatcattatggttccaccaaaaatttcaggggtggacaggaccaaactactcaatttcaacagcttgtgcaacaagcaatttttgcatactaaatgcagcacaacatattataagtgacgatgcagtaagttctaactttttaaaataaaatctagtaataacccatgataagtctctattctctaatctagtttgtcaaatttcgcaggacatgatgctttgtgggggatcagatgcaggagttattcccatatgtaataaggccagttctttcattcttggttggttcaatacatgatctatcaaactaagtttagatttttatctctgcagctatggtagg

SEQ ID NO: 324539 - DNA, 844 bp, Cannabis indica
gctctgtgtccccaaagtgtgacacccattttgctttatactttttccttttattatttttttaatttggccattcattttatgggctttttagtttttaggataagattcattcctgatttttctgtttggatattattttttttttaaaataaaaattatcaactatattaattagcaatcgttaataacaatagaactcattttatcagatatgggtattttatttactttcttacttttgtttttctatggtggctttggtgattagactagattagacagtgtaatttttctagttcaatgtttggacatattggaagtttgaacaacgctctatttgttgatattaaatttaataaaaatttaaatgagaaaattattacaaatttattaaaaaaaaatattcattaaaattattgaaattttgaattatcatacataaacttttaaaatttaaaataatattaattaacagtagctacttaaattgattttaagataaacaatatgacaataaaattatacatttttttaaattgctagaaaatttatattaatattttaacaaattaatatttgtattaaattagtgattagcataaataattttatattattcaagtatttttattttactattttaataatttattattaaaaatttaataaattattttattatgtatttatgatatatatttgattatatataatagattatttttttattttataatttaattaattttattttttttgctgcaaattatttatttttatttatttattattataactttttattttaatttatttttttttaaagaaataaataaaatag

SEQ ID NO: 324540 - DNA, 1039 bp, Cannabis indica
attattaatttttaacctaaatcacttataattctaaacctatacattgatcaacattgtataagtcatcttaattattgttttttatcaatatcatcaacaaatctccatttattctctctctatttctatctcacttataactatatattataaatacataatacagttaagtatgtaaccctccatctgtagcttgatgggcttatgggacatttagattttgtaatgatgatttgtaatatatactatagcatctttttttaatttgataagtccgtcgtcccaagttaattggagactagctatagtgtgtgtaattaaaatcaataatatagagtcttgtaatcaattatgatttttaattttagagtaattgaaatacaatatatattttgcaatcttaacatagaggttttagaattatgtagtgtgtattactaacacgaatttttatatttagattttctaatctttacaatttgtataatttgaatttaactttaattaattttttaatatatattttaattacttttagttttgacttttgtttttaattagttttttaattttgtattttgttaaattaaatatttatttaaataaataaatgtgagttgtaaatatatttatgaaagtaaaatatcttatttattttaatatttatatatatataattaaaaattgattcaaacgattttatttatttctttcttctattaattttaataatgttctttgctaatgacatcgatatcaaatgtagtagcaactataagtgagatgtggtactgaaaattgtgactttaaatgagtgacgactacaagtgaaatattgtgatgataacgattttgaacatagtggcaactacaagtgagatacggcaattacaacggatttgatagtggcgactataagagagatgcggtagtgatgataatagctttaaatgtagtgacgactacaagtaagataaggtgatgaaaatgattttgaacatagtgacaactataagtgagatacggtaataatgac

SEQ ID NO: 324541 - DNA, 585 bp, Cannabis indica
attttgtgattaaaaaattgaaaggcaaaaattttccagatatttaaaatttaaaaaatatacaaacacttgtataaattatttacaactcgggatccgaaatccaattacaaaatatacatattaatgtaaaaatgattagtttaggaattgatcaatacattttcttattagaaaatagctacagaaatgtatgctaccgcgtgttttgactagtatcttaatgatgtaacaatacactactacaaaataggctattcccaacggtttaaaagagggtcaattattggaaccgttggaaaaggtaagtggaagtttttcccatcggtttagcactgtagcaaaaaaactgttgggatagttattgccgacggtgaataaccgttggcaatactaaatagattttttttaaaaaaaaaataatttattctgacggtttttaactgttgggaatagtaagtatacccaacagtgtataactgtggagaatagttagtatacccaacacttattaactgttgggaaaagatgcattttatatttaattaataatttattcaaaaaaaaatctgggctgaaactatt

SEQ ID NO: 324542 - DNA, 901 bp, Cannabis indica
tttaatatcagttcaaatatcaattcaaatattaatggaatttgttttattattattttattatatataaataatattttattattttattaaataaaaataaaaagtcacccatgaatttctcataaaccaagaatttcagttatataggcacactttatatagaatagatatatatatttatatatataaagcttatataatatctagaggatagagagatatttgtatatgtgtttaatttgggttcaatcaatatatcttacagctagcattgcatgcaattaatatataagcttcgaaaacgtataggttgtctgtatttgtaaataagaagcctttattatatatgtattgaattttattattatgtattttatataaacttcattgtattaagtaataatattattattactaacatggtgagagtattagtaaagaaaagtagtttgaatgtgaagaaaggtgcatggagtagagaagaagacattgttcttagggaatgcatagacaaatatggtgaaggaaaatggcatcttgttcctcttagagctggtatttatatatatatactttaaaacatttatgtaataatttaaatatatatatgttgattataattaataattaatttgttgagtactatttttgcatgcaggattgagtagatgtaggaagagttgtagattgaggtggttgaactatttgaagcctgatattaaacgtggagaatttgaggaggacgaagttgatttagttcttagacttcataaacttttaggcaacaggcaagtatatataaatttatatctattctatataaagtgtgcctatataactgaatttcttggtttatgagaaattcatgggtgactttttatttatatttaataaaata

SEQ ID NO: 324543 - DNA, 1123 bp, Cannabis indica
atattacatatatattctcattattgttaagttttcaccaaactgggacttttaagatttctctaacatcgattatcagagatttttatgagagctaatcagaaacagattctattccattgacacttccttaaccatttgtcttttaaccaattatatcgcacttcattctttttgatcacttgaataaagttaaatcatatctagttggttgtttatttaagctgatagttattggtggtggattttgttaaatattcatttgatttggagacctataactagtatagttttatttattgaatttttagttgaagttgtattattcttgattatgctctatgagctataatgaaaataaatgagaaatggttttaagatttaacatttaataactaatttaatctaattagacgtttaacttttcccattcaatctaattcaattgtaattagatattcaattacaaattaaattggattaagttgattcggttgaatcgaatcatgtgcaaccctacttaacattacccttacaagaaataggacttattatttgtttaagagaaatgctaaaggacactagtggtgcctagcaccctcctatgtgtcaatatcgctattgttccaatcaagtatcgggtcacatataatttaatataataatttttagagaatattgctagtcaatcgcaacgcgacatgtcgagaaagtgctagacatcactgtgcctaatagcaatgctctttgtttaaatagtttttttgtcgtcttatcctcatgaagtatgagcactctttcccaaattaattaataaattgaaaggaaaataaacaccaaacgacatgtcgtttggtccacttttaaagaactaactgtgaaaggtcatggactcatgggtggtatggtagacacgcgccttctcggccgtacttttatacacataacgaaaaacacgactaagctatttaattattgatcccacattaaaccacgtggcatcataaccaacggatgatattccgccacatcaccacaaaattccagggactacaaccaatccacggtactagaaaaagaaagttataatcgtacaagattacgaaattacccttcaacgccg

SEQ ID NO: 324544 - DNA, 882 bp, Cannabis indica
gcctctcaaagaaaatattaagacaaagatatttttggcccacactgaagaaagactgtatagactacgtccttaggtgtgatcactgccagaggtttgcaaatatcccaagagccccaaccaatgaaattactttaatgactagcccatggccatttgcggtgtgggaaatagatcccattgggtccctacccatgggaaacggtggggtgaaatataccatggtagcagtggactattacacaaagtggacagagactgaacctatgaagaccataactgccaagaaagccatggactttatcataaagaacatcgtactgcctctcaaaatagtctcagacaatagaaagcaatttgactgtgatgagttcacaaatttttgcgaccaacatggagttatcaaaactttctccgcagtcgcgaggccacaaacaaatggacaggcagaagctgtcaataagatactcaaggtcacccttaagaaaaaactcttggcttgaaaaaaatagttgacctgaagaactactgcatgtattataggcctaccgaaccactacaagaaccacaaccggccactccccattctcaagggagtacgagtgcaaagccatggtcccagtagaagccataattccctcccacaggagaaccacttacgatccaataacgaatcaggctttggtgcaagaagtgctggacttactagatgagctccgagaggaatctcaaatacgcatggcagcataccaaaagaaagtggcaaaatattttaattccaaagtcaaaagcaagatgtttttcgtgggtgacctagtcctaagaaggggcttcccggcttcccaagagccaggagtggggtacttggaccaaattgggaag

SEQ ID NO: 324545 - DNA, 1479 bp, Cannabis indica
tagagatgaagaatgacaagttggggagctctaatggtgagctgaacttgagtagaggaagacctcatgagaagaagccttggaacaataggggaaggagtaacaacaaagattcttccaagggtggaagatatagaaatgggaagtctccatcaagaggacagaaagatcctaaaggctgctatcactgtggtaaaccggggcatatcagaagagactgttatttttgaaagagaagtaacagagggcgagaaagagtcattgtgactcttcttgctttgaccgagatattgaagagaaaagagagttttgactctcctattatttgcttcttgggttgttgaatgttattgggcctaaaaaaaggttgcaagtgttattttaataataccaattattttctggataaataaaataataaattttaaaaaatatcacttttatactattgtattaattattttttcaaagtgtgttggtgaaaacaaaaattttaacataaatatatatctacatatatacatatatatatatatataatcaagagtgctcaaatagtcatatatgacaatcactttttataaataaaattttaatttttgaacaaataaaaattaaaagaaaatattttagttgtaaaaaattatttttaatttgaacaattaacaatataagagtactgaatagtacaaataaaactattttcataaatatataaataaaaaaattattaaacaaaatttattattaaaaataaaatacttattgagtaagacattagtcaatcatccataaaagataaaaaaaaaaaaatactaactcttaaactaaggaaagaaatgtaactaaagtattatttataatctacataaatagcacagtattttagttccacaagtgaagctaaatgacttagttgctttaaaaaggcactagaaatttattcaaactaaagaaagtttttgattatttttatctttattccattatggacaagatgaaaattaagtcatctgtatattcatatgcacttatcatgtagtaaagaatttagtatctctagaggagtaatacatataggaaaacgacatttcatagtattttatgaatacaaaaagaagtaatggtgaagaaagttttttgcttatcacaacattacattttctaatatttgggtaaagtcaaacacactacacttgatatgaatatcgagacaatagattaattgaaatgcacttctagttttatgctagtgcaagtgagagtttgttgggatttatgccctaaataaaatctatttcaatataatcttattcactatcgataaaagattagaaagcatttgagtttacatgtagttttcataattatggttttactatacaatttttgttaaattcagacatatagttattcactatcacagtgatgtcatcacaatagaaagtaattgtaattatatgcttcaaagtttttagt

SEQ ID NO: 324546 - DNA, 638 bp, Cannabis indica
gccctaaattataatttctaaacctaattatctctcctctccttttcagaacaaaattttgataaagagattgaaataacagaaagttaacactctgtgtgggagaaaaaattactatatcccttcccatatatgtaaactagctagctaattctatagtttttttttttattatttttcaataatgaagtgtaattctagttgggttaggtaaagttaatcatgagcgttttttaataataataataataataataataataataataataataataataatgtaactttctagctgtattcagaagaactatatatatatacgtatagtgatctgactatttgttttattatttcaattttaatttcttaacatcacaatataagaactttttaagcaactatatctattgaggagatttattatatatgtaataattaattacgttatattaaagaataaaaaaacataagtgttatgcggctaaattattaatccttgaactttctctatgaaataattacataagctactattttttattaaatatttacatttttgcgtttaaagaatattttttcaatatttttacggttttctaagaaaataaaaaacaatataaaatcaacaaaaaaac

SEQ ID NO: 324547 - DNA, 912 bp, Cannabis indica
tatatatatagctgtttttatttttattggtattatattgtcataattatttgtatttttctaaaatttaggtttttaagttaggatttgtatttaaagttaggccaattaattgtatttaactctcttaggtttttaattagccttttgatattttacatacactttattagcatttaatattttgttatttacttttatattagcttttaaaatatttttttttgttaattagtaatataattgggatgtattttaattatattaattcattaaatttatattaatttatatttaccattcatactctatggcttttataatctatttccaatttataattttattaatacatgcatatatatggtttagtatatattaatatttaattgtaattataacatgtttaatattgaatatttttcttatttatacattatatacagtttgttgtgcgtttttaattgcaagatttttaatattattatgtatttattttaggtttttatgtgataaacgtcaaaatgtttaagttagtttgtgtaatatcctccttttctaattttttacttttaaatgatatagttatatttggagattattaatattgtttatacaattaaaatttttgagattattaataattacttcaaatatttattttgtttttatacttttattagtactttattagctttatttttgcaccaattttttgatagtttagatgccatttatggcttttgtggagggcctactattacagagacttttcttataagttttaaatataattatttgagagtcgttatctttttactactgagtattttgtttttagtttttaatatcatcgttaggggttaatcctacttttctttatcttttttatttttgttagtactattttgt

SEQ ID NO: 324548 - DNA, 656 bp, Cannabis indica
atataatatatcaatttgacttgagatacaattatgaacgatttattttggtaccactctcggtggacgcaaatgctagtgaaaataccatcactatccattttactctcattagcgtcaaaccacttacacatgaagaagaaaacactaaagtctttttaataagtcaactccataattttaacaagtgtgtcatagaaaatttgtctagcttcaccgagcaccataacaccgctattttatattttgtggttattatccctttcattgactaaaaatttaatgtcgttcattatgcacctagaataaaaataaattattggcaaattatatgggacacaaataattggccacgagctataagagttgctcatattcccaagtagattaaaaccgtcagtagccaatttgagcctggcattctaggtttgacggcagaagacagattaagctggtcaaactgcttccattctttagcatccacatgatgcctaagcacatcgtcttctttgagtagtctatgtgaataatgacactgtatttccttagtggtgtgtcttgaacaatataatcgttttagtctcgatgtgagtaggaagtaccgcataactttgtgaggaactttttttctctaaccttttttttttacacaacgt

SEQ ID NO: 324549 - DNA, 1589 bp, Cannabis indica
acatgattatgaaaaaaaattcacttatgcatataatccagaatttcaattcaattacactcttgacagatttcaatttattttcatttacctccgtttgccggcttcatcctaatgaacgagtgaacgaaactttcttccataaagaatttcgtacggtaccatgccaatagtactttgataactattgttatacaaaaactcgatcagaggaagatacttgttccaagaaccctcaaagtctaatacacacgcccatagcatatcctcaagtatctaaatagtcttctcagactgaccatcagcatgaggatgaaaagttgtactgaactttagttttgtacccattgctcgttgcaaactctctcaaaacttagatgtaaactttggatcttgatctgaaacaatcgactttggagcaccatgaagcctaactatttccttgacatatagatcatcgtactgatccaccgtatacgtagttcgcaatggtaaaaagtgagctaactttctatatcgatccacaattacctcgatagaattataaaaccctactgttcttggtaatccaaccacgaagtctatggttatttcctcccatttccactcaggaatcttcaaaagctgaagtaatctcgctggtctctgatgttgtgccttgacttgctggcaagttaagcattttgacacatactccacaatgtcacctttcatacctagccaccaatatagggattttacatcgtgatacatcttagtcgttcccgggtgtaaggaatatggtgtggtatgagactcgtctagaatctcttgtctgataccttcatcggctggtacacaaaccttgcccttatatcgtagcaatccatctaatgagattaaaaagtcctttggtgacctagcttcaaacttttctttgtactcctgtagttcgaggtcactctgctgggtcatcttgattctttctaacaaatcagactgtaacatgatattggctagttttctcactacgaattcaattcctgctctggtcatatcctcaaccaactttggtgagattttcttcaattcataaacttactctaaaccctttcagcttagtgcatttgttaccacatttgcttttccaggatagtagagaatctcgcagtcataatccttaactaattataaccgtcgttgctgcctcatatctcatattaaaatccttctgagtgaaaaaaatacatgagcttttgtgatctgtgtagattttgcactttttgccatacatgtaatggcgccaaactttcaaagcaaaaacactgctgctaactcaatatcatgggtgggataccgctgttcatactccttcaattgcctagatgcataggcaataacttttccaccaagataccatccttcttcatcacatgccctaagaaacttacttggggtagccaaaatttacacttcttgaatttagcatacaacttatgctcctggagacgttgcaatatcatcagaagatgttttccatgtgcctcttttgaatcggaaaagatcagaatgtcatcaatgaagacaattacaaaatcatctaaaaagtc

SEQ ID NO: 324550 - DNA, 947 bp, Cannabis indica
atagaaattcttcttacaaaatctaaacccaatctctctcttttctctgtacctctctctctgtacctctcaatcttttctctctctatctctcaatttcaatctgaaccatcttctaaaaagacaagagtaggtgatatttataggcttaggatcaacatcctaaagtcggtggctgcaagaagttatggtgttaagttagttagacaataactaacttaaccatcttctttgagtgagatctccacgtcagcataagggtgagtgcatccgggaacatatacgagcttctgggatcacgaaccaaagacactcgctgaaggagcttctgcatagaataaagccaactagagtcgattatcaggaactaccttctaagaggaaagactagccatccggaactccccttctagaggaggactagcttcctgaagacccttcccagaaagagaaaaaagccttccaagaccctgcttccgtgagtgaacaatttttcaaaaaaaaaaaaaacttttaaaaattttttcatttgaaggaactacaccacaaatgtttatgatataaagtgtcccatgaactcaaatttccctaaaatattataaacattacacacaataattataaatacatatatatatggcttatcatgatcatatatatgaattaattgttattgttattctaatgatgatattattcagggatgaccaaatattgtttaatggaatttggttctacgtgggaattttcacaatcgatggagcacaaaacttaccgctatggagaagtgatggagtactgataacaattcttcttcatactacttttgtggagtttgcatactattggcttcatagagctcttcaccaccattacttgtacaatcgttatcattctcatcaccactcttccattgtcactgagcccattacttgtgagtaactaat

SEQ ID NO: 324551 - DNA, 686 bp, Cannabis indica
atgatttcaataaaaaatttgagaagtgagtattgattattctctattaaaatagacatagattttaatataggacgagagtacctatatgattgatgtagcatttgagatttttattcctaatgcctcctatgtgtttaaatttatcaagagagtggaaaattatcatataagtttagatatatatgccctagcccggatataagtttcttaagtaaatccgctatcacatgaaaattgggctttaaaacttaaattatattaaactaggtaaaatagattcaatagaaattaatcacccttaactttaatcattgttaattttatagtaattaattgctttatttgcttattttgttgtttaaattttacttaaattatttagttttaaaatcctttcattcgattgctaaataaaaataagaatataatttgttggtatatagctactatccttgtgagaacgatctcacttacctaagtattacttgttaaaaaaatacgtatacttttgtgttggatttatcacaataagtttttggcaccattgttggggactgttttagttaatatcgatatagttgaattatattataatttgtttcttttaatttaattttgctaatattttactaaatgtgtttgacctacaaggtaaatctaaatgttatatcgagattagtacc

SEQ ID NO: 324552 - DNA, 3258 bp, Cannabis indica
acaatttttggggtgtaaaataaaatttccctgtctactttataaccgtgtccgtgtcaaccgtcaaggctgcgttttgttgacttttaataagacttgttcaaattttggtcatacccttgatacggtacttggcctagtcgttgaggactttgactgacgctcattaatatttgaaacatttttgtaacactataatttgctaagcaagaaaaataaaagaattgatatatgcttgcacggtgcctaccatcttatgagaccaacctagtaatagagttattgtgttagataaactctattgaaccaaaattctatttactcaatctatatgtcacaatagcttcacaattacatatttatataattcactctttaaaaattactaataaatccctatactattttatagtgtaacactttcccacccttcaaaattaccttgtcctcaaggtggtaaaattaaaagaaaactaaaaacatgcacaaacataaaagataaaaaaatctaattatagcccaattattactttgttggtgtagtagagttttcaacaagcccaagcccaaagtacctagggcaatcaaccttcttcctttccatgattcaagccgtcagtttttttttagttggaagcagtgagttcatgacctccttgatttgaagcttcatcttcagcatactcattatttgaaccccataatatgtatataatatttgcagaaaatagccagtaacgacatctacatatatatgtttcttctgcaaaccagtgaataccaagcaagggatcgtcctcaactccacctctccaatgtaattctgcgatccggcgcgaccaagcttccgatcgtcctccggtgaccacttcatcccgtccatcatcgtcaaagatccatagtcgtcgccgatcaaatatccaccgtcgttcccgatcaagtatccaccgtcgtccccgataaaaaatcctcctccgatcttgtgcgcgaagatccaatgccatctctgtcttctccgatgttggagttcttcgagctgccttcgttggtgcagatcgagaatccacaacatccgatgaagccacaccgatctccttccctttcggtgttcttcgagctgccttcttcgtcgtagatcgaaccggaattgattgcgatcttcctggatcgaatacattagaaatgttgccgcagacgagatcaagaggcttcttcaatgacttcgtgttgatcactggttcaacagagccatctatgttgtcctcgaccttcggcgaagtagatgacacctgagatgtcaaaacgaaaggtgtctccgttgatgtgagataactcttaaacttggcatctagtttctccaattgagcatcaacaagctctctgaaatacagtttcattgccttcatttgagcatcaaaacgctgctccatacgcaactccatagctttgaagagttgaacaatctcttcatcttccatggctaagagttgttacagtgaatctctcactgtaatttctctcaatgaaagcaccaatgttagataatagtcctcttcgagattggacaaatctctgaaatgcactcttcgagtcagtgccaaactcccaattgaaccaaagttctatttaatcaatccatatctcacaatagcctcacaattacatatttatagtaattcacactctttgaaaattactaataaatccctatactattttatagtgtaacatattgtacctaattacatcgattgtttcaaatgactattgtatgttggaactcgttatgaatccacgcgtcttatgttttcattacatatgtgatcggtataattgcagacattttataatattaaacctattaggtaagttcacgcatctataaaaaccctgagaggtttatatgtggtaattccagtgaactcgcgagtttacatgttattgagaatatgaacagccaaacgtgtgattagagtagtcgcacccatttgagtaaataagaacggtcgaaaatattcttacatttattttgtaaacggttttgtaactgaataatcacttccaatctatataaaggagtcatcagatacgaataaagagatcacaatctatcttctaaaattggaagaagcaaactaaactctagttgaactaccataattattttgagtattttatatacttgttgtttatattttattaatcgctattttattttgagtattctccaatttaagtgaatactcccaattctatttataagtgttcttgtgtagcttaaatacttgtaatttttggatgtttttatttttcattcgacaataatttattcaattaaaaaatttatcttgtcaatagccagtttttatatatataattattttatggttacatttctatttttcttatttttttttctaatttttttttttaatttttatgtattatagtgacataaaaaagagtaaaaaaaaaatgaacataagttaaaaagtatatattttatgttaattgctttaggatttatgcgagtttggactttggaatccatgtttaaaaaaatcatttttagatttggtgtttggtaagatagttaaaacaaaatgcatttggaattggatctagtttttgtcaaaatatttgtatgatatttagctccttaacctatgttgatttatttatttttttccatcgacttctcatatttctgtgtagaaattacacaataagaaaattataagaatgtatttttttatgatataaataaataatactataaggttattgattttttttttttttttacatttatatggattaattttttatgccatatatatttttttgtaaaaaaagatagaaatctcatatttttaaaatgatattaagtttctccgggaaagttatcggcaccggaaaagtcgtcggaaaagttaccgtcgccggaaaaatcaccagaaaagtcactgaaaaagtcaccagaagtagacatctcaaatataaataaaaatagaaccggttctataacataatgaataaaaataaataacacaaaataactcaaagcggttataattgaaatataaccggttctgtaacataatgaaaaaaaacaaataacgcaaaataactcaaaccagttataattaaaatagaatcgattctataacagtgttatataatgaatacaaataaataatacgaaaaaactcaaatcgattataactaaaataaaaccagttatataacataatgaat

SEQ ID NO: 324553 - DNA, 1030 bp, Cannabis indica
tcatcatataaaaaggggtaagttttaaaaatcatacttaaattagcaataaaaaaattgtaaaatatatttaatgataattgaggaacaaaatatactaatttttaaacataatacatttctctttattagtcgtgagtatatttcaatataactttataggagacattagaactcatttttatacaaatgaacttctagtatttaatgaataaaaaaataatacaattacttataaaattgtcagccaaacaaaaataattaaaactttaaaatttaagtatatcaaatattgaaaagaaaattatttttaaaaattgcaaccatcctaaaatttttacttaataactatgtattggcatagcaacttcatcccaatgttttaaaatatttttacttattgtatttgatttattaagtctaacttgtcaaaaaaaaagtctaacttgtcaaaaaaaaaaaaaaaaaaacttagtacacattgctttcattaattaattaataattaatttaaaatatgtaaactattatagatattttttaaaaagtaattattatacttcattgtcaaaaaaaaataaaaaaataattatagatatataaatgcacggagaaaataaaacatggagaaaataaatatataaatgcatgtttaatatagaatattaatgaagtatatataacatttacatgtagatatataatgtttttaataaaaatattatagattcatttatccaatatgatgctacaactttagaaatttctcatcacctatttttttttttacctttcaatttttaatcttcaccataatcaataagctgaataaaaatcacacctataaccaaaaaacatcaaaaaagaattaacaaatagaaataaaacgaaaattataggtgccgtttggtaacactttttttaatcagttttctgtttttaaaattgaaaaagtgaaaatatttttaaaaaacatgttctataaaactgtttttacttttcaattttttaattgaaaatcaaaatttta

SEQ ID NO: 324554 - DNA, 1136 bp, Cannabis indica
gtttttattaaaaatttatttagatatttaaatttttatttgaaaattcaatttttgtaaaaactaaattttataggaacaaacttgagtatattttatttttctcaaaaaatgtagatttatttgagtaaacataacattttttattttcatttataatttttttcaaaataattttgtatttttattgaatttttaattatttttctttatttgttaagttatgagtttataaatattaataagtttaattttttcttcaaaaaaatcttaatttatttaaattatttcttagattctcaataattttagttttattttttttaagatacgtgttttaaatgaaatgaagtttgaaaatattatttaagaataatttaagtttttgtatgtaaaattaatatttttatgttcaaaaaaaattatttaatatttttatcaagttttttaatattttatttattttttttagaattaataaaatattataattgcttttaaaaagtagaatattataatttttaaagttactttatttaataaaaggggacaaatatttgtattggtcaaagtttgggggataaaaatactaatttttaatggtaaaaaaaatggaacataattaaagagacataattatgtgactgttatattttagggagaataacaagcttcatattttaaagggtaaaattaagtagtggtaaaagttcaaagagaaaaatactaattattctaatataaatgtaattgaaggcgaatattgcatcaattatatatgtaagaaaaaaagacaaatttattcaaagataaaaaaaattaatattaaattatactaatagtaatattctaattttttcggattcaacattttcctagttaatatatctttatatatatatatattgaaaagatatatattatagggaaattttataatacactcttttaagggatacatcgatacatctctatctattttagtattcgaaataattttttagtcaaattttttctaatggtcatgtaaattatagttatttaagacatcaaacaaaattttaagaaattcaaaaaagtttaacacgccgaaaattgcgctcaaacagtgtgttgcacacatgactattttattt

SEQ ID NO: 324555 - DNA, 794 bp, Cannabis indica
ttgacctcgcttttggtcaatgacgctgagtccttaaagcgacaagaagtttataagattaaaaaatatataaatgacatgcagtctaatcaagaacacgatgtgttatagaggttcagcccattattctggtaatggcctactcccatattattgtatttaacttgtgagtagagaagcaaaaatgtctcttttctctcgaaagctttataagaaaatgagcagcatataggctcactcgaatgaatgattttaaatccatcttcattagaactgactcattatttatagaggatattcaaaataggattctatctcctcaagctgtcatcctaccaatttagagaactaactcatcctcctaaaataaagaaaatataattgggattcccttttgactgtgtattaatgacatatttaaataaggacaattattaattgtatttttgtcacacgggttttcctcgcccggtctgtacccggttcgtactagttccttctgaccaggtctactcgtgttaatgttgtgcggctagttgcttttagtctgtctgttacttttgccaactttgaatacatcttgggcggttgactcgtgagggtcttttatccgcctaggtctcagagtgaagatacgtgttagccaaaagaacttgccacgtcacctgaccaatatttggataacaacttcttatttgatttgggaaacaaaccgaatgtaattcttctttataaatagtggagtcatttcatcgtaatacttttaattattttagaaatatcatacatttttt

SEQ ID NO: 324556 - DNA, 950 bp, Cannabis indica
gtaagtttctttaatgctatattatattatattataacaaaaaaactcatgacatgttaagttttaactctatttttaatctctttgtcgatgtatatttaatataaagtttggatatatcaaatcatatatagtaagtaattaaaggaaactttaaacagcacaattgttatcataattaattatttatttatcatataataaaacaaataaataaataattaaaaaaaaaaaaaataggggaccattgcaaagaatcctacctatatttatattagctaatatagcacaattgaacttaaaaaggttttaatcgtgtaactttgaagtattattaggtaagaaaaaaaataattgaaggtgatgaagaaaaagtaatatgaattggcattataaacatgctataatgataatattaataaaatgggtagctctatgatgttgtatacactagctagctactcacaaatgtctttaaaaatatattatatatacataaagcattattataaaaattgttatttatttatttagtaatgcataatattaaataggattacggatatggagaattgtatatatttattaattggcaccattaatatttttgagtaatgttggtcattcgatctaatttaatattatttttttatttgatccaattcaattagtagctgaatttaaaaaattatcatatccgatttaattagactttaaaattcaatcaatctaattattaatcggattgaataactgtaatacaactaaaaatttaaaataatttaaaaaaatattgttaagtaataaaatgtcatgaaaataaatatgctgttataaatattaataattatgtggatgtccaaatcttttatttattaccattaattgtaattaacattactcttttcttagtttccctttttcttagtttcttaatatctcactcttgt

SEQ ID NO: 324557 - DNA, 626 bp, Cannabis indica
aaaaaaaaaaaaaattgactagtaaaaatttcaaaagtgtgccaaaaatgatattttttttttaaggagaaatgctaagggcaccttagagcatctctaaagcgagtagtttattaaagtgaccttgctacatatgcaatgtgatccaaagactaattttatataaagtgttgtttaatatagacaatgaccacatagttattttttacctaaaaaaatcattaatttaatgtaatataagacaatggtggacaactttataagttaaatcattggagtattttcttttgaaaaatgtaacaaatcttatgtagatgataaagaaaataaaaaaaaaatagtttaaaatgataggtgtactttagcaactataaatgttaccctcaattagaaatgctcgtaagtgccaaacatcacaagatataacataccactattggtgcaaattaatatcgaattttacacattttaatttaataaataatataagaaaccgatcaccacccacaacacattacatcggtatcggtatggtgttagtcttagacaccataaattggggtaagttgaaaaatacctcttttattaatcaattaatcaaatttacctctaattttatatttatt

SEQ ID NO: 324558 - DNA, 1013 bp, Cannabis indica
actattttgtcaaacaagatattaagaattcatatgtaattacactacctagtaattacacagttacttccaaacgcacccttaatcctcatgtaaaccaaaaacacaaacatatttttgtttaaccaaaggtacaatttaatttaacaacgaccatacacatttattcaatgagaatcttgacaatatatattttttattattttaaatatacctgaaaaaaaattaaatgtcactttaattataagttttttttttaatttttaaattgaatataaaaaaatggacaagatccttattcgtaaaggaattttttcttcttggtattaaaaactaagcactaaatatcatttaattgagatgtcatgccagtacgtactccacataatggaacaattaaattcctgttgtaattataattataccacactaattaatcagttgctaaaattgataaacatatatatataaacaaggattgtgtattacacccacaccattactaaatatggttaaaattaacaaactagtttaatccatcaccaacctctccaattactcaattacaatttttttttaaaaaaaaacgagaaagaatataaatatatacacgataaaatcatcaagtaatttgtagtaagaagaaaagtgtggaaataaaatatcaagtttaattttatttttgtacggaaatcaaatttaaaatttcaaaataagaaacatttaaatgattttagttcattataaatttaaaatcattaacatctttaacttctcgtgttttcaattgattgaattttagaagtatattaaaaaaaataatattattaatttgttggaaatcaactacgtatatttttttttatatatattattaattttaatttgttttctatttttccttttatattattattattattattactagttgatgttaatgttagacttttatttgggcttacattaaattttattggttttattaaaacttgggttgattggatagttct

SEQ ID NO: 324559 - DNA, 1245 bp, Cannabis indica
attagacacgtttttcttgttttcttttcttttttttgtttatgtttgcctgaatcacaattgacccatattccctcattgatatcgtttctaatgtattcagcgtcgtcttcctcaatgttacgatcaattcccataagttgctcatgaattggttgtccaacaatgaagtcatcgtaacataagtcagcattctcctcatcctcttcagtctctaagaacctcctctctggtgtcgataaagcaatagaccatttataatgaccacaaggttaaatttctatctatttatgcatgcttatttcaaaaataaaaaagaagtcagatgtacacctaaacaaatctagaagtgattaagccccattcaatcaaaatcaaacaatgaaaaacaaaaatatgaacgtagctgggttgtccatataactttctcaggtgacaagattggtaataaccctacaaaaaatctcacttttagtcacaacaaaattcttgactaaaagtaaaaaagttgtgactaactataaattatgatttctacattgtgactaaaatgtctgtggctaaatgtattaatcacaaaaattacaatttgttgtgactaaatgtatttttagttacaatacttgttatgactaaaactaaattagtgacaatttgtgtctaaatactatattttagtcacagatataattttttgttgtgactaaaagtcacatttaatcacaaaaaaattatgttgtgactaaaaaattttcactaaaagtttttagtagcagttttttgtagtgtcaattcaaaatacaatacaattactacttacatgtctggataatagatagccattaatttgaatttgtgattaggcaggattaattatggtcttatcttgtaatggaggcaaatgagtatgcaatttcttcaccatctcagtgagcctcctgattctatccacctcagccttttgtattagatgtctctctatcatctgaaatgttgcatcactaagtgcctctgtaacgccctgtccaacagggacaccacgtgtgtccttttataaaattcttattttgatactatataatgataccaaaagtgtggataattaaatttgtgataattaaaatcaagcatataaaaacttctttatagtaaaagatatgtaatgagaactacggggaccccctattttcaaaatattcacaaactggtttaacagtgtttttttacaacataaactttgtattc

SEQ ID NO: 324560 - DNA, 526 bp, Cannabis indica
acacgatcatgaaaaaaaataagattaaaaagctctcttgaatgccgaaatagtcaagagtctaccaaaacactactttaaaagggtttactatagacatatctctatatttatattttatattttatttatatatatatatattcggggaaggatttcgagtcttttcgacctacatcgttgattggaaggtgaaggctaatcttggctccaatgaccgtacacttgatttagggttcgaaaccatcgagcccaaaggttgggaccaaaagttctgtgaggttagggatgagagattgaagattgttattcggagatggttcagatctacaacatcggacggttgtaaattggtttgaaaaacatgaaaattgtaattataatgtcattttctttttttataaagttttgtttatagaatatatttttttatttctttaaattaaactaggtaggaaggagtagaaattgttaggttatttttaataatttaatatgtgggtttataaattaagataatttattt

SEQ ID NO: 324561 - DNA, 1533 bp, Cannabis indica
tgcaggaaagggtaaatctatctctgatcaaccatgagtatgggagttgggtgatgtatgtacatgttcgtgccacactagaccaagcgggttggggtctaccagtgttgaaacttttgtaactctattttgccgcttaggtcggttaaggagaaaagacttgtaatattttttaaaatgatttttgggatcccgaaatatgtaacttttgtttgtaaggttaaaattattacatgtttattttcattccgttttcgtttaaagtttaatttccgcgcttattttaaaaccaattccgtttaggggattagggtttcttaatcatattgggtagcgtgcctaaatcttagggcgttacatatgtaataaaggtaatttcctattttattcatggtaagcaaaaggaaaactttccctcatgcattaagatcctataaataatgacttagcctcactttaaaagggatcaagagaattgcttcaaagagaattacttagagatctattgtaagagcttttagagaggaaaacactttattttttctctcaagttctcaagcggagtaggttattaccacactcacggggctgaacctctttaaaatatgatgttttttattactttattatttgtactctcttttaattatattcttaatcgcttattaattgactcactatcgttggctaaaagtgaggtcaacaactaaaaatatttttcatttcattttattttatttaaaaaaatgctcattactttaagacctagatatgaacaagacttgatcaggatctcgacccgaatacggacacggactccgaacctggccctggccctagacctaaaccacgacccttgacccaaaccctgatcccaaccctagacccaagacccaaaccccgtacccggacctggacccgtactgcaccccagacccgaacccgccccgaattcgagcctcaccttgaacctatacatagacccctggccttgacctcgaacccggacccgtaaccagccctagcctcggacccgtacccagcctcgaccccagaccccaaatgtcggatcccaaccttgatgaaagagaaagtgatgagagagaaaataatgagaggggtgttgaaagagaaaataatgtgaaaaatgatgatagagaaaatgaggagagaaaaaataaggagagagaaaataatgtgagaaaatgaagggagtaaaaataatgtgagaaaataataaaaaaaaatgtgagataaacttgagggtcaatccaatttaagtcattactcatggcccttatattagaagatattttttattatttatatatattataataaatattatttttataatatttagtatacataatatagttcataacaacaaatatgcatttacaacaaaaataaaataacttcataaaattttgtgatcacaatatacataattttaaaagagataattacataagttactattttttataaaaaaaaaattatatttttaagattgttttttttacattttta

SEQ ID NO: 324562 - DNA, 931 bp, Cannabis indica
tttttattttttatttttattacatatataacatattaaaaaaaaacccctaaaatctaatcattttatttttattacatagataatatattaaaaataacaatgtataatatattacatatagtttggaacttgacttttgtattttagatttgaaattaatgtattttttattttaatctaacgaatataaattatggtgttataagtttattacttatatgcttaatttaatatatagaaaaaccacaaaaaaaattaatgagttgacccggccaacccggtcatctcgaacccgcaaacccgcgaacccgaaccatctcatgggtcgggttcgggtataattttttgaactgaaaacccgtgaatccaaaacctataaacctgaaacccggtcaaatccgctcgatgttcagccttaagttttggggctgacactgaaaaaggaaatattattttagataaatacatgcattagataacatatgaaggttttttattttatattattttcaagagtacatgtttcacttaatgaattactatattatatatatatatatatattaaaaaaaattggcacttgttggttaaaaaatataacccttgtgtttcataaaaatgtgccttggtaattgggagccttgtacaatggcttacgctgctcaatacttaggtcaatcctgttcactatttatttaggttaaagaatacaataacgccattggatttgaaaaactctaagaattgatatatggtaatgaccatatgtttacagagaaaaaaataattctagtgtcaactctacaccaccctgacaccttggtgctcactgagttaatactagtcagtaggactaatagagcaagcatatgaggaccacgagagaactcatgtaacatcctaactaacataggcgtattacgtgatt

SEQ ID NO: 324563 - DNA, 690 bp, Cannabis indica
ttttgtattattattgttatgtggtatcttaaggtgtttaatatcatatcactcaataattagttagtaattttccaaattatttattaaattaaaatttataggagctgatattgaaatgcaccaataacgatatactaccttttgtagtagttggcatcttaatatgtcctttaattagcaaattttgtaagtaacgatctcgcaagttgtacaccgagtttccaggggacaaactggagaagaatacgatggattgaatccaactcatttcaaagcaatcttgttctacaaaatccaatttcgaaacacctgatgaatgaggaaatgtacttgatttctagttctgagataaaagcctttaaaagtaactgaaattttagcatgagtagttgtgattttgggcaaccctgtaccaacaaaacaggacaagagtcatctcccaagttgggagcaacaacttgccactttgctactagcttcgctatttgggttactgtgcttggtcttgtgacaatgggtggaactttcaacaaattgattttccaaattttggatatagcagatgaaattttttaaattttagatactcgacacgcttcgtttgtgattgaaataaagtttgaaactttaagctaacttttactgtgattctgtaacaccctaactaccttaggcgtattacgtgat

SEQ ID NO: 324564 - DNA, 1421 bp, Cannabis indica
agggtctctccatgttcattgtcgagtcgaagctttggatccattggagttttgcttggttactgccaagaaatcccgtatcttcaaggagttgaagtgtgtactttctttgagagatgaaaagtccttcttttgctcgagcaatttcgaagccgagaaagtatttaaggtcaccaagtgttttgagttggaatttctggtgcagggagtcttgtaattggtgaagtagtggaagattagggccagtgatgattatgtcgtcgacataaacaaggagagcaatgaaagtttcgttggagcctctagcgaataaagtatagtcaacttgtgattgcttgaagccttcttcgagtaatgcatcagacaactttttgtaccattggcgagaggattgtttgagtccgtagattgatttgtgaagcttacaaaccagatttgtttttgtagtaagagaagaatcgagtgttaagccttttggaagagtcatgtagacctcttcattgaggtcaccatttaaaaaggcattgtcaatatctagttgcaatatatgccattgtttaatagtagaaatgacaagtaaaagtttaagggagaccattttggccacaggggaaaaagtatcgaaaaagtctagaccttcttgttgcgtataaccttgtgcaacaagtcgagctttaagccgttcgacacttccatcactattgaatttaattttatagacccatctacaccctatggctcttttgtttggaggtagtttgacaacactttatgtcttgtttcgtatgagtgcccttagctcatgttgaatggctctcagccattgttcaaattgtatggcttcttgatatgattgaggctccctcatagcagaaactgcaaaaacaaaagccttgtaaggatcagaaaattgagaataatatagaaatttggacaaataatgaggtgtagatgattggtcttgaagaattgagtagcactcaaaatcttttaaggtatgagggtggttttgtttgtctgctggatcttctgggaggctgtgatggtggatctggaggagctgatgttgaagtatctgaagcagcagctgaatcaggttgtagagtgcctttatcattgttctcaggttgtggagtgcctttatcattgttaccaggtgctgagatgtcttcatgtacctgttgaggcaagaactaatattgttgtttgtagggtaatcacagacaggagtgttttgaatatttgtgcttgggagaactaattgagagaaaggatctgttgacgcggtttttcgtcaacggatctaagaagatcgtaaaacgagcaagatgaacacaagcaatagttaatcaaagtaaaccggtttgcaaaaagaaattcaccataaacgaacacaataattttatagtggttcaccccct

SEQ ID NO: 324565 - DNA, 725 bp, Cannabis indica
aaaaaaaaaatgaaaaaaataaatgcagtggcacgtggttttaaggctatttggattttcattctcgtattttttgtaaacgacatggtttggctatcttattgatttttcttatcaagcgatatatcattatgtaatagattaatgtctaatttgtttattaataaaagttttccatttttctctctagaaaaagaaaagaaataaaataatactcctattgcaacctaatatattaaatatggaagaatcatatgtttaagtttttagagtcgcaccaacaccgaccccaccgatcacaaaaccgacttatactctgcaagttgcaaacccgacagccatacttttgggaagccaatatacttaacacctagtgtctgttgacccgttgcctcatgatctcctgaagggttacacaaggaagaacatatctgtaagatgcatcatgaaaattgaccttagtaaggcctatgaaactgttgactggcagtttatggaagatttccttaggcttctctgcttcccttctcggtttattttgcacgcaagtatacgtatcgtaaacaagtaatagactcacaaagagtgaggtcgatcccacgaggattgtagttaagtacgttaaaattaaactcttacttctatttagttgaataaaatttgagataaaaataaactagaaaacaataagaataataaaaatcaggaagcaagtaaattaatag

SEQ ID NO: 324566 - DNA, 1312 bp, Cannabis indica
aagaaaaaaagagtaaaattttaatattaatttttgtatatacatatatattttacgtataacaatataaaatttaattattcattcaaactaaatgaaacttagttcgattggatgttggatgattggatttttggacaccccatccaacatcttatccgatccaatccaattggatattcaaaaataacatttgatccaatctgatcacaattgaatatccaatgtttggcagtcaattgtaattggtcggtcagttgtcattggattgactcgatttatgcacacctataaatacttccattatgtactactggtgtcaagaatcaccatgaccactcataaatgactagcaatattttatagtagttattaaattaaattatgtgaaactcgatatttatttctactaatagcgatatgacactttagatggtataagcaccactaacattttttagcattaatctttattcactacaaaaatagtgacatttaatgataacattttagtcacaacatgaattttttgcgaccaaatgtgactttaaaatatagtatttagatataagttgtcaataatttagttttaaatttaatcacaacaaatattgtgactaaaaatacacttatttacaataaattgtgatttttataactaatacctttagacacatatattttaatcacaatataagaatagtaatttataattagttacaattttttaactttaatcgttgaaaaagagtttgtaggtgtgggaaaacaagtttgagaggacaatccaattcgaaaatgacaccgttttcattggtaattataattttaaaaatattaagtaagagttaaaagtaaatagaatctcacattcaactttgtgagacataaaattgatttataccaaactattcttaagtgatatttttcttttatatttgaaatggtctcttggtgatattcctaagggtgtatttattatacgttttgagttgcatatggatgtgggcaagggaattacttgtgatgattatgaaactcaagtgtgaaaatttaattcatattatctattaaaagtcagtggactcaacccaccacatttttacataaaataaaattgcataaaacaataaattcccttccaatgccctattagagccataaatagatgaaattcaatcagaactaacttctaaatattgaatatatactaattactataaaaaattgctacttttagtgataacattttagttacaatataaattttttatgactaagtgtgacttttactcttttagtcacaacaaaa

SEQ ID NO: 324567 - DNA, 1276 bp, Cannabis indica
aatatgaggttgatggcaagattcatggttgcaaagttgctcgaagggcttctgtgatttcccatatgctattttatgatgatagttatgtttctgtagaggcaatacttgggaagttgattctattatggagtcactacatctttatgagcttgcttcgggtcaaatagtttatattgagaaatgctctattttcttcagttcaaatactgaaactacaatgagggattcgatatgtgggaaaatagggatttatgaagccgataataacacatcctatctgggtctgcctagtattatgggacgtaagaaagctaccattttgggtttcctcaaggataaattgcaaaagtgtattcaatggtgggaaggtcgttttctctttcgagcagggaaggaagtcttactaaaacctgttgcacaaactattcccaattatgcaatgagtgtctttctgcttcccgtggaaacttgcaaggaattggaggggctcatggctaaattttggtggaaaacatgctcttcggctacaggaaatattagctagatgagttggggtcgaatgtacaaacataaacatgctggaggattataatttaggagttttttttttaacttttatttagctttattgtggaagcaaaggtggcgaattcttacaaatgaattgtcattgattggaaaggtgtttaaggctcgttattacccaaatgggtcgtttctggatgccaatttggataataacccgagctttgtatggcgtagtgtgtatgaggctcaggctattattcgggctggtgctcgaaagactgtgcgtgatggctccacgatgtcgattctacatgatccctggttaccttgccctatagacccgtatgtccattcgaaccaccctggtttgaaagacaaaaatgttcacagtctctttcgtttggacgtttaggattgggacttggaaatcatcaatgattttttcttagcccgtggttgtgagcttataatgtctattcagctgagttcaaacaatcatttggattgctggtcctggaaacttgaaagaaacgacttatttactgtgaaaagtgcataccgatttttgaaaaatctcaaaggagattggtttgaagatgatacttcaagtttttgggttagcaactttatttggagagcagtttcaggtgttcttcctgttggaattattttaccaggatctagatttactaacaagtatgttggactaacaacttaatatgaattctaaaacaataaaaataaa

SEQ ID NO: 324568 - DNA, 2104 bp, Cannabis indica
ttctcactaaacccaaaatggataagtaaaaatggatatcgtggggttaaaatcaaagcacagtcataatcaaacagttttgttaagcataatcaagatttctaaatcttaaacctagaaattctacggttatcctaaaaaaggtccatgaacaatcaagattcctagatagaaacccaaaaaattaagcatggaaatgtataaaagaaaaaagaacttactcactaatttgaagcttttgatgtgctcggatggtgctggcaagagtttcctagaaattctttgaagaatgcaagagagaaaaatttcaggaataaaaatgacaaaaatcattaattggcgtaagtttgttaatcgatgcctaggacacgcgtcactcgtccggacaagactctagctcaagtgaagtccatgtgcgaccaggaaggtcccgtgcacacttggggggcaaatgttatctaggtttttgcacattgatgttgcaagaggatcaagcgacatgtgtctcacaattccaatacatgggcggaggtaaatgtccctaacagcctgcacacaagtcgtcagcatctctaatagtcgattacccgagaagggtggtaaataaaacattcgaccatgtagaagtctgttatgttgagctactaacaagagttaattactttagattgatcttgttatgtccagacacgaagacaatccctataatcttaggattgacccagagaaatatgacaacctgttctagtttcctattttgtgtattgtaattatgtagtcattgtaatttcctatttatgtattataagaaatagggaaaccatccctcatgcattaagcccctataaatattgacctagcctcaatacgaaggggatcaaaagaatcgctttaaatagggattctaaagaaaatagtgatctaagagaattactcaaagatcaattgtaagagctttcaaaatggaagaatactatgttccttctcctcagtcaatacaatacaaggggagtaggctattacaccactcacggggccaaacctctttaaaatctagtgttctttttactttatcatttttgttctcttttaattatattattcaattgcttattatttgactcattctcgttggctaaaagtgaggtcaaaaagaacatatagttattcatgattatagtgttgtcaacacggcggaatattatcatgattatatatttcaaaagtttaagtcccatgatttgtcagtacactggatttacactgacatgataatcagcgataaagtatacttacaccttggataggttttatgtcctttctagagcattggcaaagtattctagtatcaaatgtatggagcgtacatggtattggaccgatattgaacttggataagatatcattaacttaccgttatatctttctaagtcaatatcactggttgatcttaggtctgtagatcttaatcttgagattgttaggttcaatctcaattgtattatttatgggcttagggttgttcgttaaagtctgtcggctgaaaacttacatcttgggaacatgatagtgtacttcagtggcagtgctaatcatagatatggaatctataacttctataagtatttacaagtgaaacgatattttccttcgagctttgcttaatagagataaatgattgagatctcatttaagtaattatgttagtttagtgaaatatcttttataggtaactatgtgttttacggataaaatacgttgaagggtagaacagtaattttatccctatccgatcatttgtagaggatctttgactatttggatcagaaagatggataattcatagccaatcaatagcttggtacatatagagcgttccatataattaagagtacaattccaaatctatagaggcagaaggatgaattaataagttagataatttacttcgtaaattattgatcttcttattggaagcttgattatataggtccatggtccccactctagttaacataatactgcttgcagagtaagttgatttgttttaattaatcaattataatttttaaattagagtatgtcttatttatgaattttcact

SEQ ID NO: 324569 - DNA, 795 bp, Cannabis indica
ctatatcttggtacatataaaacgttctatataattgagagtgcaattccaaatctatagtggtgcaaggcggaattaataagttaaggaatttactttgtgaattctagatctacttattagaagttcggttatataggcccatggtcccctcactagttgagataatagtgctggcagttaattaattttaattcattaattataattctaaaattagactatgtcttatttatgaattttaactaagcagaggcttaattgtgaagaaaagaagttttacagttaatttgttaattaagagactttgcatggtctaattaataaataatataaatgaaaatttttatttgataattaattataattattagggactgatgcgtgcccagtgccggaaggtcaaggaagttggtgacctaatgacaggggagccggcgatcgaagccccggtgaacggcgaccgtaactataacggttctaaggtagcgaaattccttgttaggtaagtttcgacccacacgaaaggcataatgatctcggcactatctcggagagaggctcggtgaaatagacatgtatgtgaagatgcagactacctggacctggacagaaagaccctatgaagcttcactgttccctgagattggctttgggcttttaatgtgcagcttaggtggaaggcaaagaatgccttttataaatagttttggcatttataggattgaaattggaaatatggtattattgaaagaagaataatgttgggtttgtgccctaaataaaacccattac

SEQ ID NO: 324570 - DNA, 995 bp, Cannabis indica
ttttggggaggagaacatcatatcgaccaggatcttctccaactcttgtacgaggaccaacctcgtctttgcgctagtccgtcctcatcaagtgacagactttctaattcgactttcgaggactgggatgtgagcattgaaggtacaccttccccagaactcgaggtgtaacattatttctatcccgaccagatcgcaggtgaaggctacggatgcttcatttgggaactcaggaaggggtggagacgatacttgccgtccagctggacatacattttccagccagacgtaactgatactatccctgtgggccgtccaagtaccggtgcctttggcattcctattaccacttccgctgtaactgttgcttggcatactaaccaaacattttccagagataggatgatgacctgcacaaaatggaatatgcggagaattgctgcgactgatccccacgtggcccagcttgccacgatgccgagcgctgaataggcccggcctgctgctgaggatgaggataattaaggacacgtggaagtcaaagagatggaggattagggcgaggttcgtcctgatagtccaattgaagccgaggaggaaggagttgctctgccattgcgcttcggaggctataacaaagcaggggaatcggtgtccgaggtcggtgacatcctggtagagggtgatgattacgtcactgaggagtatgccgaggcagttccacaaagaggcaaggtgcctttggagctccgtgggtgtctcctccatccatagtaacccagggcaagctgaggagtttggagaaggacggatacctgggcggtgtcgagtgctttttcctttctcaaaatcaccgagcaaccagcccaagacagggatactgtgcctggtcgggtgcccagatttagcagggtgcaatgctgccccacttccgtacttcaagaggattgcggactactaccatctctgcccgacccagttcacaccaaagggca

SEQ ID NO: 324571 - DNA, 1095 bp, Cannabis indica
ttatgagtttggaccatattacccctaagttttaagtatacttcatggcgaaagaaaagggcaaattagtgattttgccttagttttgtctttagtaaaagtgagtggctttggtattaatcctttaattgattattaaataatgagttaaataacaggaatatccctttgattacatatagtaaagaatcacaaaaattaaaagagaaccgatctccttctctctctttcttgttcggtcctaaggagacccaagaaactaggccttttctttgttaaattctgagtatttcagcttgatttaaggtattttggaaagctaagaactaaggtaagccctagtcaatttgttctttgttgtttttggaatttaaggtttgttcaagcatgcaaaattaggtttgagctgctattcgagttagcaatgtttgagagttgattttgatgttatatttgagtcaattaggttgttgggataattgtggttgtgtttgagcttttaagctcaaacttagttcatcaatggtgatttttgatttattgacttgatgatagatttttcagtcagtatatgttgtttatggcctaattaggtaatctaaacatttggtgagatttagggtagaattctaggagaaatgaggctctttttgtttttgtagtaaaacagtagacaatttttacaaaaagggtctaccgtttttagcagtcagcgatctaaaaaaacggactaccatttttaggaaatggcctgctattttttgtggtattttctagagaatctcattttttggtgtttgcttgatatttagggtattgtcatgctatctatcaataggataacttttggttttgagtctaagtccctgaaaagtgatttggcgtatcacttatcaattttacatatactgtgacttaggggcctgtaaatcatcaagcaaaaatttccactcagattgactgatacacctgaattcaaaatcaaggtaagattagtataataatatcatatgtgattcatatttagcgtgcatgttatgataatatataacatatcagtaatggtagtattagtgtacatagagctgcactaaa

SEQ ID NO: 324572 - DNA, 587 bp, Cannabis indica
gtagcgtgccttagcattagggcgttacacaatgtctgtaggttgaggtctggttggccatgctcctgccagggactggccggccatgtgcctgccaaggtctggtcgtccatgtgtctgtcaggatcttgcaggtcatgttcctaccagctttagcaagaggaggtcagcctttagagatggaggccaacctttggagatggaggccagcctttggagatggaggctaacctttgtacatattttccttgtagaggtcaggcttccttgcttgaatggacccgttgttggtatgagagtcaccttttggtcgaccagtttgtgctcaaacatcggccgaccatacaagctcatcttagctggcctatagactccccttggccaaccaaacatgatggtacagccccctgatagcttgcttaattcttttcgctttctacttgacagtttaccataccttgtaaggagactttatcttgctattggcaaggttatattctacatgtgctctatcttggtttacgtggttgtgtcacgccaggtggacaaaatttgggatagcatttgctgttggatatattttacca

SEQ ID NO: 324573 - DNA, 925 bp, Cannabis indica
ttcgaccctacgtcggggacgggacgacgacgtcggtagggacgaactaacttcctcgtctacgtataccccctggcgttcccggaggcatacccccggccacctgccctggattaaggtggggcaacctatttttgatccactcatagaggtggcccaaacggatcagattttcaatctcgtctttgagatttttacactcattggtgctatgaccaatgtcgttgtggtactcgcatcttttactcggatctctccgggagctatctttgtacatattgtttcatatcttaatgtacagtataattaactatattctgtctatatgcaggatgttagcaacttaaaatatgtcattctttctgaatcgaagaagcttacttgtcttccaaatctctctcaatcgaatcttcaccagctttgtctaaatggttgtacaagtttagttaaccttccccgttaacattttacaacattttagatgatccagataaagaatttatagtgatgttccattatgattattggatggttagatttgtaaacgaaagagatgttcaagatactgaaagggtgaggcttttacctagtaacttgcttgatctaagtgggtgctccaatctcacaactcttccagagatttctggtaatataaaatttctatgtttaagtggaacagcaatcaaggaattgcacccatccattttctctctcaaaaatcttcttgtacttgatctacataactgtgaacatttaagggaacttccgaatgttacttgtgagttagaatcattgggattcttatatatgggtggatgtgtatcctttgacgaactccctgcagctaccatttgtaagttgaagtctctttacgtacttgatcttaaagattgcttacaattgaaaagctttccagaaatcttgg

SEQ ID NO: 324574 - DNA, 2470 bp, Cannabis indica
agaaatctcactataacatataactaactgtaactgacaagagaaattaacaaactaaccgtctatatccagctgtgtctaagactccctcttaagatggagtgtataaattagtgacactcatcttggacaacaaagtgtgaaactgagtaggaaagagagcctttgtcataatatctgcaatattgtgtcgagatggaacgtaggagagtttgattcgatttttgttgacttgttcacgaacaatgtggtagtcgatgtcaacatgttttgtacgttcatggtagacaacattttcagatatgtgtgtcgcaacttgattgtcacaataaagaactgttggctgagtttgtgagatgccaaaatcagataaaatgttgtggagccaaagtatttcacaggtggtgttggcaatggatcggtattcagcttctgtagaggactttgaaacagtggactgtttctttgatttccaagagatgagtgactggcctaaaaagatcaaaagcctgttatggaatgtcttgtgtcagggcaggagcctcagtcagcattaacgaaagcttcaagttgaaatagatgttaagctccattcattaagctcgtcaagaaggtatcagaccacaatcagactactatcgaaccatatcctacatttataagtggcatcgggccactatcaaccaccatcgaatcttcgtcttcaaccttcactcattataataacaggaaagcatcgggccactatcagacatagcaaaaacctagttttttgcccaaaactcaaatctgactatttttaaccataaatctaacatcaactcccagataacaaacattaaacatacaatttattcctaaatcaataaacatataaataaaatcacacctttcaaccctaaattatataatataataaaataatatagaaaacttacattcatagcgtggtagtcgtgattcagagatcctagatgtaatgactgcctaagtttaatatattaaattattaaataattaggatttaattatgagattgaattattatttatgatttatatattgtgaatatttatttaagtttcaatatgtattaattatgttatttatgtgaatttctcatttttcaatatttgtgttgggtagcagtggaacgcgggattggatcattagagagtcactttatatggtttaaaattttagtgatggcggggtatcattgttaggcattgaaaatgatgggaaattgtcaagatttagaaatgaccaaattgcctttagatgccattaaggttttttttttatgttaggggtatattagtcttttaatggtagaacttttgtcttatataggcatttttaatctgatttaattatttaatttgagaaaagaatagtattgatcatgtaaatatagaaaaacttaaaaactaccccttttcccacatctctctctcgaaccaccttgaaccagccaaggattttgattttgttcaactcaattcagtgagttctagtaggatttagagctttaatcaaaggtattatactctagcttacttctccttgatttttttttttagctcaaagtaggttttgatgcatgaattttggtacttaggttgttgtaggtattgggatggtttgattttagattctggggttaggttgtgattatttaggttgtttagagctaagttggttgatagttgtggtgtttgggtgaagttggagtttgggagctcaagctttgagctctaatggtgttttggttttctgagttaaatgatgaattctattgcttgaattttgttcattatagtgcatacatgtatcctggaagtttttagaaagtttgggtttgaattgtggccttggggtcatttttgggtgtccttgcactgaaccggtcgaccagttcaggggaacctgtagaaccggtcaaccggttggtccccaggaaaccccatcaaactggaattttggttcaggaaccagtctaccggttggaacaactttgaaaaccctagttttctcgtttttgtgatgtttagggtattgtcatgtatttcatcgatagggatattcctagttttgattttaagtccccgggaagtgtttttgtgtgtgtctctcatcagaattatgaatgttgtaatataggaccctgtaaaacgtcgagttgttgttccgctcatgctgaccgacacacctaagcacagaaatgaggtaagatagcataaagtacatatatgtgaatgaattcttgttattatttgttacactactaacactgaaatgagatagttttaagggttttagtacaatgtaaggtattagagtagttacattattaccaacatgagtaccaaggggtacggagtgcatgtggtacaacactcagtaacttctagaagtacaacaatggccttacctgttgggattttatgccctaaataaaacccattac

SEQ ID NO: 324575 - DNA, 1192 bp, Cannabis indica
ctcaaaaaaaaaagcattgctattgctattgctattgagcatcaaatggtacttaacacctctaaacatattatcttacaattaattagtaatattcactaaaaattattatcattaaactatacgagacagaataattaaactaataacaatattaaaacacaaaacaatataggaatggatatacaaatattataatcattgcaaatattattaatagcatacaattaattaaaaaaaattatttttttaatatttataattattttcaaaattaataataataattaaaaaaaaaaacacatacattaactggaatatcactcaaatcaagctgagcagcaatttcttcaagctgtttcttcacactcatatcaataagtttcgaaccagaatttccatacctaactgtgaagccagccaccaagctcggatcagtcaccgtcttgattcgaacattcttagctccggtcaatttctgcaccgtcttagcgatctgagccaagtgttgagattcaagcttcaccaccgaactaaccaccgccaattcagtctccgtcattccattataaaccctctcgaactccttagtcacatcgttaatcagatcgattctcctcgaatcgatgaggatattgaggaaattcgccatgtgaggaaggagattcatcgattcagctaactcgtcgatcattttccgcttcttttcttcttcgatcgttggattcatgaagaaactgaacaccgaagggtccgagaacaccttatcgatcttctcaacgtcggcgctggtggcttcgagtgtgttgttcgacttggctaagtcggctaaagccacggcgtagcttgaagctgctgaagctgacatcctagctccggtgttgcggcggaggactgggaagcggcgtgtgagggagagggagagggttttggggaaggttgtggcggcggaggtgattggtggagggagttttgagcggaatgagattggggtttgctgtagtgccgccattgatgagtttgagtttgagtttggtgtttggatttgagtttggaaatgggattattgtgaatggagaagaaatgagtgagttgagttgaatgggctatccagtgtttggagaatcgtagccacttgttttcttcatttggattttcattggatcaggttagtttttttatttttattttt

SEQ ID NO: 324576 - DNA, 1456 bp, Cannabis indica
attattttatttatttttaattacttaatttaaaatataattattttttttaaaaaaaaaaaagattaattaattcttttgtgccgcgccttcctttgtgcacgtacgtacataactatctgatcatctcatcatagaaatatcattattataagaatatttacatttaatttaaattcaatatatataaataattaagtcataaaatattattattccaaaaaataaaaaaaatcatattagtaagatcattaatgaacacaaactcaaatagatttatttaagtttaattacatatattcatataatttcatgttgtgcactcttacacaaacaagaacacaatacaagaaaggaaataggcttaaaacattaaaccggaaacaataaaccaaaaaaagtaaattgacagcaagaaataacgaggttcagtcacaagttttagataaaacttggacctaattcccgggtagaaatagctctattaattgtgatgattttattattgaatggaaaaaattacaacttatacaacaatggagagtcaagaacacaaagtacactaatggtgattcacaccagttaccaatgagctcactaaaggatgtcgaaatcttgaacttaaacagccttgtaacaccccaaacttgaagagaattcatctcaataaagctctcatttttttttctctgtgcaacccctcacaaacttgatctctctctctctttatgttagttgtagaatttctatttatagcagtagattagttaggacacatactaaccgaaataactgccaactgtcaaggcagttagttagttgtttaggtgctctaaaccccacaattttcacttggtttagtacactttaacaacatggtaatccaagccataaaagtaaccaatagaattgattccaatgtccaatgaatgtgaatctcagtaagagattctagtttgagttgatgttgagcaagtcaagacaaagtctaaacttgtctttagtcaaactctttgtaaaagcatcagcagggttttcatgagtattaatcttccttacagagacaattttggattgaatcacatctctaataaagtacatcttgatgtcaatatgtttagttctctcatgagacatgggcaaattgcttgagccaaattgcttctttaatggctctgttgcaaccatatattctgcttctgtagaagatagtgcaacaaccttttgtaggttagatatccaattaacacatccccaagacagtgaaaacaaactctgttaatgactttctaatgtctaaagaacatgcataatctgaatcaacataaccagtcactaattccttaaatttgctagtgccatcataagttaaactagtgttcaatgtaccttttatatacctcatcacccatttcaaagcagtccagtgagcatttgtggattagcaacaaacctg

SEQ ID NO: 324577 - DNA, 1513 bp, Cannabis indica
ttgctcatgaaaggggaagaaacattgacttgagcttgatctagcttttcttccaacaagtctaaactttgacattgcccgagcttgttatcatcgatgttgaagacattatgacgaagggatcctgcacccaccccaactgggatcatgtcattccatcaataagatagtgagaaaggagtctcaccaatcgttgattgcaaggtcgtattgtacgaacataacacttcgagtaaatcttctggagaaacaccatttctttcctcgagcttcccattaatgatatgtttgataattatattgactgccttagtttgcccattgctctagcgataagcaactgcagaaaatgcattatgtattcctaatttgttgcatagggatctcatttccttacaatcaaactatttactattattagaaaccagcctgtaaggaataccaaactgacatattttagattgaaacacaaactcgtggagtttgacaacaattatggtagcgagtgtttctacttcaacccattttgtacaataatcaactgcaacaatgacatattacccccccccccttacctttgggaaattctctaattaaatcaatgcactagatcgcgaaaggccatgcgttggtgatagagttcaagtcatttggcaaacgatggaaatacattgggatacgcagacatctatcgaatttcttgagaaagttgaccatatctgtatgaagtgttgaccaataatacccttgtcacacaattttcaaagccatggaatttctagcagtgtgactaccgcatatgcctctgtgtacctctcagaggatatagtcgcattcactcccataaatgcaatttaggagtggttgattggaactttagcggtagagtttttcatcatagataatgtatcaagcttctcgttaccgtaatttttttgcttcattcttatcctcgaagaccttccccatttttaaaactgcaactactagggttatccatgtcacctgactgtcattgtatgtctacataacatctttgtaacaccctaactattttaggaattttagcgtgattttcaacttactatgcaactagttactaatgaacaaggttatcgaaaatcgtgattaattaaaattttatttatttaattaaaaacataaaacaacataaatattaaattttgggatcctgtttacaaaaatatttacaaaagtttaactatacttatacaaaagtctgtcgcttagcgactatacaacaaaagccctgatctcccaaagatagtacgctccaggcctaaccgcctggacatgtacaatctccatatgctgttctcacggctgctcaaccttagccttgcccttacctacacatggaaatagcaactgtgagtcaacagacttagtaagaaaagcataaaccataacatagcaataacccagattatgatcagacgcccactaccccccaatcataatcctactccccgtgtccaacacggtgctgagt

SEQ ID NO: 324578 - DNA, 1618 bp, Cannabis indica
gaggtattttggaaataattaaaaaaagtaaaaaaattcgtgttaatatatttttgtaatttttggtttattatgtaaatgtttctttaagaaacaaggtccaaaacctctatatacaaaccccaccatgcatcatccatcttctttatgacagtgtttttgtggtcttaaaaattgagggtctccctctcccacaaccccatcatcatagtaatccattactttgaagccttgtctttatggtgtcaatgggagtagtgatgattaagaatgaacaagtccctactatcatctcttcactagcttcaagtgtcaccaattttcatatgatttggtctcttcttctctcttatatcatcaccataataccccaaactcctacaatcctcaatagagtttttcttttttatgcaaaagaacactaaaaaataataagttcatagtggaaaagaggttccactaactcaacagaaacaaaaccaaagaaatgattagcaagaatccaaataaaatgagaattctcacatccaacaattaaatcaaagaacatcaaaaataaacttgaaaagaaaacaagaacttgcctgattcctgcacaaagaaacaacatgaataaacactttcatttctacttcaaaagttatttttgaacattggacattaagtacattgttatataataaatatatcgtaatacatgaaagataatactcatcaaataatgacaatttatcaatatgatttgtatgtttgttatttagtatgaataatcattatacttaagtagtaaatttatgtaatatcgatcaataataattataatattctctaatattataattattaattatattaatttaaattgaatttttattaaaaaattcaaacattttagttaaattgacaaaataatctaaatatggtctaattgttaaaatattatgacaattaattgtgttagatatcttgatagaatgtctcgattcctgaactcactactcattttgtgaaacatacagtaaattcatctaaaaagagtagagatagcttgaaattctgattacccacattaatcagtttatttttcttttgcagatccaaggctcgtgtgagattgaagcttaagaatcaataactgaaggtattccaatccttttcgttatatagtgtgtttcatctattcatataaatttctagcaaaaaagagacagtacgacatggttgtgccacccaactttggagacaagcccgcatcatccctcatcacttgcaaaacctctaaagattgcccaaggtcagaaatgctgctagaagaattttgtgacttaccactagtggtgcacccaaaattaggggtgtttgcggtgcgggtggtgcgatttttgaccattttttcaaaccaatctgcacatgcgattttttcaattttccaaaccgcacccacactgcaaaaaatggtgcggtgcgatacaattcttgcggtttggactatcaccaaataattaaactatcacaaatacaacaaagcttgaccaacacttatcaaaaataacataagacttgacaataaatatgaaaaaaaaaaataagtttcaacaatacaataattagtggattt

SEQ ID NO: 324579 - DNA, 2386 bp, Cannabis indica
accaagagtacatcctttgagctcatcaagaggagctagaccgccttaataggtaagctaatgacctgataaggtggttcaataagagaattgtcaagagaggacatgatctaattataaatcttctccaaggaagactcattgacatatcgggtagggtctacaagcaaacagtccaaccaagtttttcgagaatgaggacggacttccccttgcccaaacacgaacaagtcttgccaaacagatctagtggcaggagcagccagactctagcacctagtggcatggacggttggccaagtatctctagcacattaacaccccagcttggccaaccagtttctggcctacagagcaaaattcttctctaaaacatttggaagcaagtagttctaaggcttatctttgaccagctaggttcgggaatgggtagaaacacttaagataacattaactcaaggagtgagaatctatgtgattttgttccaccattgaacaatcacttcagaaagtttgatccactaaacccaaccaattggtgtgatcaaccccctatcaacacataggctgcaccgaccaattaggggagaacaagtggccagacactgcccagcatagagttgactgaccatgaacaattacccattgtagggctggccagcatggctaattgcctgaccaagggcttgttggccaaagttagatgcccaacttagggttagccggccatggacataccctctcccaaggtatggccagctagagtctaatcaacccagggctacagcccaaccaagaaaggccacttaactaggctcctaaaacatcaaatccttctatgcaagcagagttggacaaaataagagacatgataaagggcttagcaggcccaaaatcataagaccttgaactggataggtcaaggggctctcctttctcggcatacattaatgcctttcccttgcctaagtttaaaatgtcagtatggaagatgtataccgaaagagaagatcttctcgcacatatcaagtacttcgagatggaaatagatatctaagaagtaactggtgatgcgcggtgccaaatctttctagctactctattggaaaaagcctagtaatggtactttaagctggctccaggaagattcaattcatggaatgaattttcatgagaattctacgcacaattctcatcctcgaggttgtcgaggtgaaataaagacaaggcaaacatttgaaggattatatccaaaggtttatggctgaagccaccaagatgaaaggcctaacaaatgaaggtcgttatacgaccatactaggggttatccttcaattgagtgaaatctagaaagatatctggaggatctcaaccaacgacatgaaggagttccttgaacgagcatacatcttcataaaataggaggaagctgtcagacaagcccagcgaggagggtaagccagcaataggtagtcttaggatgctgccccaagacttgccaaacatgcatgcaagtactactagtgccaactagccttctagcagtaaaatactagaggcaagcgtaacaacaatagttcttgttggaacagtggcaaaaaagagaagtacaatactccccctacgccacgaaaccaaaaggagaaggaggagaagtacacgcacttcaccctcctaactgagaaacttgaggccatttacatggccactcaggctactgtcccatagaaggagccctttcatataaaaaaggagatgagaaagagggacatctcaaagttttgccgatttcataataattttggccacaacacaaacgagtgtcaaaacttgaagagggagattgaattactcataaggataaataatacccacttgcatcattatgcgcagaacaaccaagagtaggcacaagcagcccagattggagaccctattccatctttagtgccgggtcacttggaggtcataatgtgcgaaccccatattgtaggagagacaagcattactagggagcactaggctcaaactctcaatcatgagcctaaaagtgacatcctagacattgaagaaagaggctctaagcaacttaagcttggggatctcctttacagagggagatacagcctaggttagcttccatacaatgatgccctggttatgactacatagatcgggaacatgatggtggctaggttcatggtggataacagaccctgttgggttttgtgccctaaataaaacccattttaatataatcagatttactaattaataaagaccagaaatcgtattttatgttgcatggttcacatgatttatttcatgattatgtttaatgtacaaattctattaaggccaaaacatatgtattttttcatgatta

SEQ ID NO: 324580 - DNA, 1165 bp, Cannabis indica
gttatgtatttttttttctttttccatataatattgtttttagagataatataatatactacttaaatgtggatattatagtatttatttataaattataatacatctattgtttcttaaagagtcaccccttcttttcctgttattattataaaaggatattggtagtatagatattttatttttttagttttatatatttaaatattatatttttattaataataacaataataataattaatataaaaatttttacaccaaaaatataaaatgcacactttattactaaaataccaccacacttttagtattacttttatactcttcaacttattttattacaattttatcacttccacacacatttcatgcatcactatgttcttacacgtcaatagtctattatgacctctatcaattaaccattcatcatttctctctctttttctctctctctttttttttttattttatttttttattttcaatttcttttcagtttttatttttaaaaaccaaatcctccataactgaacttgtctccctccatgatcccaacccattttccctcttctttcttttcttttactttttttttttcaactcacattaaccgatttctataatcgttttccctctctttttattgatgtgaatttatatatgtataatcatgtctattactcgttcttcatctaccccttctccattgcgccaaaaaaaaaaagttcgaaaatgggtgttaaatttgtagctgataggtccaaggggaaacgtccagttggtgaagatgatgactcggattttgctcctcagttattgaaacatgatcgtggtcctgctaaaaagaaatttatagttgctgctcctccaaaaatttcccatgcttttgataataaaaatgatatggttgatgatgatcttggattagaggtttgatttcggtttctttttagtttcctcccatttttgaaagttttttttatataacttttgtgggttttgtgtttatcgttttcattattttaggtttaggttttttaatttatttttggagttcttgttttttttttttgggttttaatgcttctgttattgtaatttgatgtatgtttagtttattgttttttttttttttgttttttagttgtaaattttgtta

SEQ ID NO: 324581 - DNA, 1623 bp, Cannabis indica
tagtttatgattacacttcagtcagttatgttagttagtcctgctgtgttttatcaacttgtatataaaaggcattttctcatttgtaaccattcagttctaacagtcaataaaaacagaattcttttttctctgctttctgctctaatactggtggagtcttttccctctttcccaaatctaggtccttattttgttgtctttctatcactgtgagtttgtcattggagttcacgtctccatggctttcaggccatttttaggcgtgcttgggcatcaccttgggccaagagtgacacaattgaactaagaacctcgagggaacaaaatccaatggctgatccgactaaagagtcatcaaaacccaccgtgagatctatgccagagccgagcatatttggatccgatccaaccagcttcagaccccgtcggagcccactgcgattcatgtcccctttttgttattataaataaatttggtttttaatttttcagttggaatcaatggctcccaaacattcttcatatattcattgatttgatttagtttgtgattttgttggtttagttttgttttgtattttattgttgttgatttggatctagcaaatgtaatggtggtggtggttgtaatggttgaggtggaggtctggaaatagatatgagatttagtttgatttttgtttgatttttttttttttgtgtgatgtgaatatatatgaaaagtagggagcaatggtggttttgatggtagcggcgatggatggtggcggcggtgttggtgatggtataaagaatgaagatgagaaaaataaaaactggaaaaaaaaaagaacatatggtctgtaataatgagaaaagaaagaaaacaaatctttttttaaataatttatttaatttaaaattaatttattttaatgttttttttaaataagtctttatgcacttataaaattgtgctatgtgtgtactatgtctatgtgtacaacatgaaaaattcaacattaacaacacaaaaattagtttagaaggtaaactgctaaaagaacttaagaggttttacaatcaaaaaattcgttttgatgcttagttataagttaagtgaaattttaaagggctgtttagaatgggttaatgctaacaagggaatggtaatgtgaaatattatcttatttgttttgatggtttaatattataatgttattaccttagtaatataactatcattgaagaatatattgttgataacttcaaaaatagtaaggttgaattattttcttttattatattaatttgaatactatttatgaattaactagggaactaaaccgcgcttcgcgcgatattccctaatattttttattttttttagtattaattcagtgatataatataaaatatgatattgtgatgttagaattattaaaaaaaaaagtaacatgatagaatgataggattttaaaaataaaatttggtattttacaaaatatgcaaacaaaaatgtagttatttgtgacaaatatgtagttatttgtgcggactattaatttattttatatataaaaaattaataacattttagaatagataatttttaccttctaatttattgatattattatc

SEQ ID NO: 324582 - DNA, 607 bp, Cannabis indica
gcgggttaggtatgtttcttccattaaatttatcgattgtgtagctaactgttggctggatgatattaagttcaatagaaattactatacctggagttataaaaagttcggagacgatcgaatcttctttaagattgatcgtgttcttgctaatcaagattggatggtaaagttccctattgccgaggcagtattcatgaatgaaggaatttgtcgaccattcacctattgttttaactgttcataacaaggtggtgactggtaggaagccatttaaatactttaaaatgtaggaaactcatcccagctatactgagttggtgaaaagcacatggcaggggcagtttaaaggaactaaaatgtaccgtgttgtctctaaattgaagaatatatatgaagatggcttttaagggcttaaattctcaacacttttcagatatccaagctcaagaagttcaagcaaggaatactcttgaagagtattaaaccaagctacaccagcaaccacttgatactgggctgcaacaaacagaacttgaagctaggaacaattatgttacaacacataaaagtttcttattatatttgcagcagaaggcaaagttaa

SEQ ID NO: 324583 - DNA, 851 bp, Cannabis indica
ttgaaactaatctagtactctataaattgtttaattattactttatatatatataaaaggttttaatggttatattaaatttgtaataatgatagttacatttattttcagctatttactattgaatgattgtgatatatttagaaatttaataaaaataaataacaaataacttataaggtaatagaaatttgatacatcatttttaattgaaagtcaacttacttgatatatagctcaacttctatgcaattattcaatatgtactactttgctttatgcttgattatgtctaatgtcttcttacctaattgtcgtttgacatgcttgaatacagaaaattattgttctggcatgtttgagatgacatcattgttttgttcaggacgactgaatcgagttttcactttttaaaagcacaaacatgaatgacttgttaaccacataagatttagcaatagatccttctgaacgggaacgattccagacatattgtttgtacacagatgttgaccgcttgatgagacacatccatctgtactgcattcacctagtatggtttttctagggagatgcataactacatgaaccattatatcaaagaaagatggtgggaagtaatttctaacttgtgtaaaatacttagaatatttatttgctagttttcccttttatagtatttcaggtagggcttagggttgaattaaatggattcaaaaagaataaaatattgggcaaaaatcacactagtggttagccataaagggaccaatctctagttataattttactactttatttcaactacttattcttctttcaataataccatattttccaattcaatccta

SEQ ID NO: 324584 - DNA, 1846 bp, Cannabis indica
gtcggatctcgtgctcaccatcacgtacattaaccatcctagaaccacaacataaggtacatccttcattcttttttttttctttcatactattaggatattgttcatttgacaaacaactgaccccctaacggaatgaatgtcctctttccatcttccatattgagcttccaaataattttcttgatgtaggcagactgctttaacctaatagtcccttccttctggttccgtgagactttgataccgagtatattttgaatatatccaagctctttcatctcaaattgtcttttgagcttggctttgatacttttgatcacgtatttatctttgctcatgatgagcatatcatccacatagagcaataagaacacgactgtagattgctctagattcttgaaatataagaagtgattgtacgcggatcgtttgaacccaatttgatgcatatacgtatcaaatctcttattccattgtattggggactgtttcaagccatataaagatctattaagcttgcatactagctcatctcctttaccttccacctgaaactcaggtggttgcttcatatagatctcttcttctaagaatccatttacaaaagcagtcttaacattaagctgttcaacttgaactccatttgagctgtcaaggacaacatcaaccatattgtcttgtactttgccacaggtgaaaagatttcagtgtagtctataccttccacctaagtaaagcctttagccactagcctaactttgaacctcataggttcattctcattgattctctctttcaccttaagaatccatttgcactccacaatcttcttgttctctggctttggcacaactacccaagtcttgttcttctgaagtgaatccatctcctcatccatggcttgaagccatttagacttgtttccacctaaaatttcctcttcatagcttctgggctcttcaatttccgtctgttgaactgccgctagtgcatatgctattacgtttgcttttgcaaatcttgttggaggatgaatctctcttcgagttctattacgagcccactgataaccttccaaacttttttgtccgaacccttccgacacctctatttggtcttcgttatctcttggctccacaacagcttccgtctgcgcattgtcttctggttccacactaacttctgtctgtaaactttcttccaagagcttcgttccatactccatttccacacttgcagtttctttgtttcctatttttcctgtaacacacggagacacactacctttcccgaatgtcaagtgaggatattccaactcatgaaaaataacatttttggcaatcacaacattgggtctacccttcttagaaatataaattctataccccttagttcctatggaataacctagaaaagttcccttcatggatctaggttctagcttatcaatagagtggtgaacatatgttgtacacccaaatgttcttaagtacattaggtttggggttctgctgtaccacatttcataaggtgtttttaggtctatcactctattcgggcttttatttatagggtaggtcaagctttcccccccaaaatggttttctaatccagaactaaacagtaaacatctaccttgttcaataaggttcaattcatctttcagcaataccattttgtctcttgggtcttcactacaattctatatctagtgaattccactttcttgacataacttgtcaaactttgagttaacaaactctaaaccattatccgtcatcaggttcttaattctaagatttgcttagttttctacctaagttttccaatttctaaactattc

SEQ ID NO: 324585 - DNA, 535 bp, Cannabis indica
ttttataacaattaagcctccatatataaagtaaaaattctaaatttgtcacttgacatctcacttgttttttaaaattttttaaataatttatagtgttcaaaataatattcaaaatagtatgtcacactcattttttttttcgtatataagtgactgtttaaatcttatttttgagggtataattaattatttaaaaaaaatcaaaatggatagaatgtttactataaatataattataaatttatgatataagctgtcatttaaaaaaccaagttataatatgtctccacatatcgaaaatataaatcgttagtacggtaggagctagcgaaagtatggctagtaatttgtgttattgtgtcgtgttcgtgtcgatagatttatgacacgtacggcatgattaaagtaaacataaacacgacacgtttattattaaatgtgtcaaaacctgaaatacgaacatgacaccattaattcgtaggtcacacaacatgacacgacaacacgattatcattataaatacaaaaattt

SEQ ID NO: 324586 - DNA, 1409 bp, Cannabis indica
aatatatataaaataattagtatataaaatagtaacttgttatcttatgacaaattagttttgaaattattttttaatactactgttataatctaccaaaaaatataacttacaaataactaactagttactaagatgtatataaacaagtttttaaagaataaccaaaatatatctcaatttataaatatgatataaaaataaagtttattatataaaggtaactaattttttttttcatgtaatactattaataattaaaaagttaattaggaaaaaaaaggaaaacataaaaaatgtcaaaaagtatcagaaaacactaaacttaactgacgtgacaagtacaataaaaataataatggtattattgtaaattagatataaataatgaaatattgtagacttctctattatttgagtactattaagtatttaaggaaaattttagcaaaaaaaaatgtatatttgaggagtgttaattacaatctctttattataattttttagtcaacttttaagccccaaaatcaatgtaagaatatgtttcatagtagtattagttatgtttataatattatcctataaatttttaaaaaatagtcgaatatttatatatattatcgaaaacagaactcttgatattccagtttacacgcatgtttaagaaattttaaacctattttcgacactgtaaactattcgaaatttttcaaaaaattacatgaatagtgttgtaactatagcgaacactgtcatgatttttttttaaaaaaaaataatatttcaacatgtattttcaaggaacagagaagttgtttaagagattgtaataaaacttttatgataacaatcctcttacaaattatatatttgaatttgatagctttattaataatttatgtgtaaaacattcatgaaaatagaattttgataagtgggaatttaattgttataaaaatatttaaatttattttaaataaaaatttaaaaaataaatttcattttaggagattaccatatgtacgtacttttggaatttttttttctagtttaattacatcttttttctgtttttcatttttatattttgcttatttattttaacattaaaatataatatatatatatatttcatttttattatattttactccttaaaccaattttcccttatatttcattatcaaatatatgtctttcccatgatgttttaacataaaggggtaacattaatatatatatatagggtgggactatggtacaacatgtcattatgtccctatgggtaaggaaggtttttgagcctttgattgtgcatcagacgatcataatgggctaaggtatatattagtattataaatgttagggcactagataatttgctaacttttttttcttttatatatata

SEQ ID NO: 324587 - DNA, 1110 bp, Cannabis indica
gatatgttaccttaattggttagcgattcttcttaaaagctattatattaaactatataagatccgatatttatttagaccaataacaatattgacatataaaaaagtactagcaaccaataccctttaacatttatctataatataatattattatatatatatatcatatgcctatatactctctctgtttctctctcttcttgttaaagtcacgagacccactgtccattaaattcattagtgagagagtccagatccagaggagttggcagacaaaaactgatagagaactttcaaacctttttttttttctatttttttttggttatatatatttctaccactactaccatcactcaactagcctctatattgcagtctcaaactcaaagtcttattattattattattattattattattattattattatttttcaaaatatatatatataaagagtaggttgagatgttcacacatatatgtagtagtgttgaagttaatattcttatttgttagtgttagtgttagtgtgtgtttgtgtgggcacaccataataatataatgtaggtctattctattctcccatccacccatccattcatattatcctcttttttcttattctcctcactatcacattcacattcacatatatatacacttttaataattaatgattcaccccaaacaatcaaaactatttcattattatttcttctctttattcttttcttttttatttatttatttttcttaaacaggaggcctcatgatcaagggaaccctttagacctaaacaacttgcctgaagattatttgatcaataataccactagatcagacggtaaacaactcttccatgatggatccaccggtacatttatatatatatatttatagtatatgattagctagggtttagggtttggtcttgtttttgataaatggtttaggtcatatatcatgatatatataataataatattatgtttgtttgttgttgttgttgttattgttataataaataataataataaataggttataataataatagtaatagaaagaaaaaaagcggcggaaatgggaataaggaaggaaaa

SEQ ID NO: 324588 - DNA, 533 bp, Cannabis indica
tctacctgatttttcaagttttaattgaaggactgtaatttcaaatgactaatatgcacggtacgtcagtttctgtctaatgatgagaacgtttattatttattgatatgtgcattgatttcttatttgagccatcattttttctgctcctaacaaaaccttattcaaaaattcagttttattgttaccaaaacattatgagcattgccacctaacatgaatatttagtggtttctaatattcttaaactaagatatgtggtacccaacttgcactaataagagtatgttcaccactggtgctccatagaaattctttgactttacactattttttttatgactattatgattttctttttgtggttgtgacttgtgaggatgttgatatgcgcttggtggtgaaagccgacaattaggggtgttcattggatcacatccaatagattttgacctaaccgatccaatctaattatttattggatattaaattttgtcatccgatccaatccaatcgaattgagtcatccgaac

SEQ ID NO: 324589 - DNA, 1197 bp, Cannabis indica
taactgccacagagcactcaacataaggcagacgctcaataataagtaaaaaactccattatttatttattctctttaaaatttaaattttattaatttgaattttgatgagatattatcgcttggataataatacttggggtagaaaattaacgtaatttttccctcaaaatatctacttaacgatatttgattgattatcatattactagttatttaaataaattatctactcaaagaaaattatttaaataaattattaattattatcttattgttactattatttttaattatcatatataaattcaaataagtaatgatattatatacaaaattgaagactgaagcagtgataaatccatttaaaaatgctttaaacttatttttctttatttttttctaatttaattaaacctattttttttttctaaacttttaattctatttatttctaatttagcaaagaaaaaatactaaaatatctacctaatctttcaactatttttttcaaggatgaacttttatatttcataaaaaaaaaaaagtaaacttttaattgaaaataataagaacttaaaattgaaaatcatccattcaaagtaatttattatcactcggtgtacaaatattctagcaatatcatctaataaatagcctatcttgttacaaaagtcattaaagctaggttagtggtgaagaagggatgagaaaaaggaagagatcatgattcgaacccaagacttttaaattattaagttattaattgattgcaaaatactattatgctacattaaaaaaaaaccatcttgttacaaaatgattttcttgagaaaaccaaaatccgtctaattcaaacgaactaatagataatctaagactaaaaaatcaatttaatgtaaccattaaaattaaaaattatgcttgaatggtatggcagttgcatctaatactgtaaatatgggccgggctttttcacacgacacgaaaccggcacgagtctaagaggcatgagcacgatctgacacgaaaaaatatgggcttgagcacgacacggtacgatgctacaaattagcacgacacgacacggaaaaaaatgggcttaagcacgatacggcacgacaagcccgaaagcacgacaagcaagctcgaatataaaagctcaaaaaatacgacacacaaataaatatgattttt

SEQ ID NO: 324590 - DNA, 560 bp, Cannabis indica
ttttttttttttgaataaatgaatgtaaaatttcttaattaactaaatatgtaacttatataaacattttcctatcccaaattagtgtggatgttaaaaatacagtttcacacaaagttataaattttttattaattttctaaggatttaattaattattagattcataaattaacagttttggttaaataacgaaaacaaatttttcaaaaaaaaaaaaaaaacacaaaaacatatttgtaaaattttataataaactgaataagtaagctgtggccaattattgacccataaataatttgaataatttctttaaggtgtaaatttttatttacaccccaaaaatttataaacacaacttattttaataattattattttatataaaatttatatctttaattatactaagtttttttaactttttttctttccaattttatattcttaaaaaatatacctagctatcaaataaaaataaattatattttaaatattataactaaaaattaaaataaaaaattatacgaaattttcttagaaaaaaatatatatatata

SEQ ID NO: 324591 - DNA, 1431 bp, Cannabis indica
cttttgggcaccatacctctcttaccactctctattgagtctgggagttttatctaggcgttggcacaataccttgttttctataaacacttcgtgaacattagtagttctttgtacaccatgggatggtgataacgaacttccaacatcttggacttgaccttcgtcatcagacacggattgtttgcatgggcatcaagaggtcccttcgctagtaggtttagctagttgatactcttcatggtgttccatggtgttttcttcattcatggggtcatcatggtcttcctcctcatagtttgtccttctcgtactcttcatgatggtaagtggtcattaacgcttgtgttcactgctcttaatgaaagcaccaaactgttgacgtggttttcgtcaatggacctaagaagatcgtaaatgagcaagatgaacacaagtaatagttactcaatgtgaactggtttgtaaaagtaaattcaacaaagatgatcacgaggattttatagtggttcacccccttttggtggtaataggttggtcaacttggtaagttattaatcccaatgcttgagtagaattctccagagttatgttctccatgagttaaatcctcaagtgagttttacaatgagataacgggatctcaagtgtatgatttcgtgagtatcaaattcagggtccctttacaagtgatttcatccccttatataggttttcacctaggatttaaaatcccttaaccataggagcacccttccgtaactacagtcaggtaagatttcaaaatacaaaaatctcatttcaaaataaatgtctaaaaaatgataaaagatgtattgtcctccaagtcatgctgatgagtcataagaggcacgtgccactgagatgaggcccctctattgggccgagatgatgggagcatgagaaccctctattaggtcgagataatagaagcgtgaatcctcctttggtctgaggcaatggtagcgtgaggcctctctattgggctgagataatagaggcatgaggatcttcctttgggttaaggtgatggtgggtagaggcccatctattggttcgagatgatggaggcgtgaggatccacctcctttgtccaaggtgagatggtaccaaggagagtggtgaggagacttttctttttagtctgatgtgagggggtaccaagggcatgcaaggtgataccatgaggtggtaccaacgaggtgagaccccatttagaggactccattgagaggacactaatgggaggcccacattattggtgaactactatgacatttcccatatctaaagaaaaattaataccatcaatattttgagggataacaaagaaaacttctaagaaattggcagaagggctgaacatttagaaccgtacacccgaaaacccggccacccgccccgacccgc

SEQ ID NO: 324592 - DNA, 658 bp, Cannabis indica
ccgttattaacccattgcaaaaatataatgtaacataaaaacaagattaaaataacacaaaatcgtaaagataaaaataaaaaaaaagtaaaaatatataaaaaaaaatctatttttaaatgtattgttaaatttcctgactttaaatacattgttacaacaaccttaatatctgtttcatcacctaattagtaaaaaaaaaatctcaaatcatttgtattaaatttatttgatatgcatatttttgtaaagattcttcacttgaaatgcacccaatctattttatttttctttccttttttatgtttagggaccatggaggctctttatccattggaatatatttaatcattttcctttttttaaaagaaaaaatattcaaccaaggacagctcataaaaaataataacaaaaccacacaagcacaacaaggtaactaataactaataaataaatggaaaaaaccccatatattttacgtaattagcaaattgcccaaattaattattttttttactaaccaaaccaatgcttcagagtaaaaagttaaatccaaatatggcattgttcaatcaagttttgatctttacatatatagatgatgaatgagtaagtgggccacattcccaatttacgatttttttttctctttttgttt

SEQ ID NO: 324593 - DNA, 3738 bp, Cannabis indica
aggtgcttattgattgaataaaattcatttgattctaagctaagtctatttatctttcatagttcaattctggtatttttcggtttgaagtttatgtcttgattacttgttatgttaattgttgctcttgttgttttggcactgtttttggccaagaattaagggtgttttcacccaatatataattggatttttcaaattttgtcaaaactttaaatttttttaattatttttaacaaacaaaaatattttattaaatttcgataatttttttaattttgttttctttattatttaataaatatttaaatattttaacaatgtttaaaataatttaaaatataaatatacacaataatttataaatatatatttatatatataaagaaaaatataatttatatgactatttttatcataataattctggttatcatttaattaaatttttatgttaaaacttaatatttaatataaaactaaaaaaatcaaaaagcatataaataatgaaaaaaaaaatattaatatcaaatggtgttaatgtaagtaatctatatttatcaatatatagttaaatagagaatggagtcttttatggattctatgaaaaattaactatgttaaaattttatacaattttaagacttagttatcattaaataaaagacataatttattttatgtttctttttaaaaaaaaattattctatgtaagtaattttttatattttttaaatatctaatgcgaagcgtgagttgcttactagtctcataataatacagactcatagactaaggcttattgatgcaccaaccacgtaaaaaatttgagtgttctctgcatatttgattcctccaattgtatttttttttagctctaatattaaataatttatttttttccaaaaattttgataaataattattattattgttgaaaagcttagatattttccaattagatatttatccctcttggacacctcatcatttgatatactatgagctgtcatttagagatttctagaattccctaaaatcttgagattccttttattcagccaatcattggcaaaaggaatattttatggttaggaaaagatcctctcccatgtactatttatataccattaacaattatgtatatttttttgaggaattaatacaattcatttcagcaaatatactctattttctctctgtttctttttccttatttatctgtttaattgagcttggtatcagagccaatggcttctcctggtgatttctcagtcaacaacgccagatcacaagctgtcgatgctctagctccagctccagctccagcaccagctgctccagcgcttcctacacctctgctgcaacctttggcccccatcaccattcgcttggacagagacaattgcccttactggcgttctcaatttgtcccaactgtacgtgctcatgaccttgatggttttctcttcagaaccagaccatgtccgcctcaatttctcgatgctctagacgtaccaaatcctaacatgctgcagcatgtaaatcctctgttcacagtttgggttcgtacagatcaggtcatactaagctggctcttgaactcgatttcaaaagccatgcttggccatgttcttcgttgtcgcatctctcatgagttatggtcccttcttgaaactatctttaccactcaatcccgtgcccgtatactacaactgaggtttcaacttcagtctgtaaagaaggggtccatgaccattcatgattacattcttaaaatgaaaactttggctgatggtcttaactctgcaggacaagcttttactgatgatgatcttatactttacatattgggaggccttggcccagaatatgactctgtggtcattaatcttacatctcgaggagaccaactaacactctctgaagtgcaatttcttttgcaaagccaagagatgcgtattgaccaactcaactcaacctccgcttcagatctgactgccccttctgccaactttgttgctagaggcaagaggcctttcatcccatccaaatcaggaagatcttctggattttgtggccgaggtcgcagacaaggtcgtggaaatcaaaactgtgtagtgtgccaactatgcaacaagcctggacactctattgtcaagtgttactaccgctttgatgtaagctttacaccagctgctaatcctcagaatccctctcaaaatagcaatgcaaatcagcagcacggcaacaatgctaatcagcaagcattctcagccaactcatctcagcatcctcgtccagacgacacaaattggtatgtggatagcagagccacaaaccacatcactgacaacaccaacaacatccaaactcctagtgaatacagtggtaagagtcaattaatcgttggtaatggacagtcccttgctatttctcatgttggtagtttagtcattaaatcccctggtatttctaaacctgttaagttgaatacaatactgtgtgtacctaaaattgctaagaatctattgagtgtttcacaactaacaaaacacaataatgcttatgccaagttttatgctaatgattgtgttttgaaggacatggattcaaagagggtgcttcttcaagggaagcttagcaatggactctatcaacttaccacaccagcaacatgctcaactagttactcaccttcctgtttgtctactcaaaagtctattattaacagtcctagtttcagtcctaatttagagtctatcgagacttgtttccaagtttctactaatgaatcaagtttgtggcatcataggctaggccatccttcctttaatgtactcaaacttgttttaatcaatgaaaagaagtctttaccttctaatttacaattttgttctagttgtcaacttggtaaatctcatcacaaaccttatcctactactttaaaagaatcaaaacaggcccttgaattggtgcatttggacatatggggtcctccaccaactatgtttagactcggctatcggtattacatctattttttggatgatcttagtcgctacacctggatctttcctcttaaaaccaaagatgaggccttatctaccttcaaagcttttcaaatgcaggttgagaaacaactaaataccaccataaaaactgttcaaaccgattggggaggagagtatagaaaattcgagccatatctccaatccataggtgcgaaatttagacatccttgtcctcacactcatcaccaaaatggaaaagctgagcgaaaacatcgtcacatagttgagaccggccttactctccttgctcactcaagtatgcctcaaagatttagctgggaggctttccaaacaacaacctttcttatcaatcaccttgccacacctgttttaaattataaatgtccaattcaaaaactgttcggtcttgttccaaattataaattttcaaaggttttcggtggtgcatgttacccatatcttcgaccttacaacacaaataagttagaatttcggtcagccaaatgtgttttcattggctacagtccgagacacaaaggatacatgtgtcttcacacctcaggtagagtatacgttgcaagtagtgtaacctttgatgaatcagattttccaattgctaatggcttcacatatcctactgcacacacagattcctcactagcaccttgttacaccgtaactagcataggcgtattacgtgatt

SEQ ID NO: 324594 - DNA, 1701 bp, Cannabis indica
tgtaaaaatgaaaaaatttcttattttttgtatgaggatatatattataattaattagttatagtaaatattttattagattttgttgaaaaaaaagggtttatatagaaaaaaatgaaaaacattaatttctagtgtttactatagaaagaaacattgtataaaaaaatatcattggacaaaatttttcatacaaaatataaaacatatattttttttagggaagatttttttttctttcacaattacttttttttcctaccaacatttaaattccaaacataatagtcttgtcgtttttgacatggttagtcagtaaaaagtttttgtaaagtttcgttccaatttctgggagtttttttagtgtttctttgggtacaatgagcaacaggcagacaaggtttcagaatttatcagaggactatgcagggctaacgattgatgatgaggatgaggaaggattgttgtttgaggcaggggaggatgggcttgctgaaatcgatgatcgatggctattggtggggcgttttctaaccaatagatctatagattttcaagcaatgcaaaacaagatcgctactctatggcagccaggacgtggtctgtatgtgaaagaacttgatccaaacctctttcttttccaattttatcatgaggtggatattgaaagagtcattgaaggaagcccttggacgtttgatagggcgcctttgattatggaaagggtatcacatggagctaatcccagaacaataccattgaataaaattgagctttgggttcaactgcacaatctatccattggattcatgtccgaaaaggtcatcaggggggttggaaattacattggaactttcatcaaatcggatcctaacaatttttctggagtttggcgggattatttgagaattcgagtgaagattccattggagaaaccgttaaagaaaaagaaaaaattagaaatgcaaggaggactggtttgtcatgtcactttcaaatacgaggatcttcccactttctgtttcatctgcgggatactaggccacacagaaaaatattgtgaacgactctttgacactccgaaagagatgattaaaaagaactatgacctggagttgaaggcggctccgcgaaggcgcaattatgcagatggttcaaggtggttgaggtctggtttggccacgaaaaacgctgcatggcaaggggaaagttcggccaatccgagaaggaaccaggtggtggtgccgtcgacagccggtggtattaatgatcatttgatgatggagagaaatcaaggggagaaattggtgggatttgaccaacagaataataatcaagatattggcattcaaaacaaatcccaaacatcaggggaggcgtttttaagggaggaaattgtggtggatgaggtggacaactcaaatgatgggctgttaatttttgactccaaaagaaggagaacaatagaatgccacatcagtaggccaattggacatacagaaggggacgtgggccttgttaatgttggctcaaaaatgcatgtgattaatgaggaagaggtggttattagagaggacattatgtttgaagagagtgtcacaaaaaacttgattggggcgggctctggtcttcaggcccgccaagaattatgaatgtgttaagttggaattgccgggggcttgggaaccaacggagtattca

SEQ ID NO: 324595 - DNA, 706 bp, Cannabis indica
gggtccaaaatggtatttaccatgttaaaatgacaaatttgaatttatttgtttattttttacatacgtaggtgcgatacgttgttactgaaaataaaagaggaacgatattatcgaataaattttttagattgactcgcaaactaggtcattctttttaagacgttcgcagaattgttcaggaatgtgccagccagaaattgttggtcgtcttcaggataaaacaatccaatcattgtacactgtatcagattaccactacattgtagcaaatagtcgaatacatccttaaatatgatattacaaatggaatttttcgctagtgaaaattgtgcttgtttttcggtatgaaaatgatgtgtttcaatcgcattatataaacaaatacgtttattgttgaacgtgtctcataaaattgatacgactgaataactaaatacgtttctcaaattaaatataataaaatttttataaaaaataaagtgtcacactataccaatgtggcaagtcaagtgtgtgtcattatccatcggcacaaaactgaatatcccttgaggccctatcccaagtgccataattatatacttttataaataagggcttacattaaatagtgagactctatctattatggaaactagaaattaacattcaagaaagaaactaaacaaattaattgagcgcttcgccttgattacatacaata

SEQ ID NO: 324596 - DNA, 665 bp, Cannabis indica
aaggaacatctgaagcttgagattaggactattagtttcgtggagctagagcataagtcaccatagtaggagcccccttcgatccaaccaactgtggatgtgtcgagcttctcaaaggattttcctgatacacatttagaattaggcatcaatttgggatcgtagattgatacggaaatgattaactatgaattgaatcttgggttgaggaggcatgttgaatttcaagctactgctaaggaaacattgagtaaattcaaggtaaatcaggttaggaccccctcaaccaaatttgaattcactaaaccattgaaacaaggtgatcaattaattgctagaattgatatgaaagaggttgaatatgaagcttctttctggaaaagttcaaagttcagttgtgtgtctagttctcaaggctaatcctctatttcttctttttaaaggttttattaagggtaaatggcggcaaaattccgtaaactttcatttttgtttcacttaaaccccaaaactcaaatttgggcagtaaaaccctcaatactcctattctgttagcaatttaatatttctgtctattttatgtgttaagtgtcatgttggactggacacagtttacacgtagcataattttattggtccacgtaaaaaattattttaaaaaaaat

SEQ ID NO: 324597 - DNA, 1215 bp, Cannabis indica
tctctctctctctctcttttgtacacgtagcataaggggctctctcctcctttctctcacacgcctctaacgccatacctctctctctcattagtgatctgcctacttgatccatgctttgtaaccttatagagagctatatcaaatcccacctatagtgattgaatagtattatctttaggtatcaatacaaccaaaactggagtaggtcattacccgctaacttagggggctaaacctctataaaagtccttattttagttactttattgttcttattatctaacacgtggcaaacatcaaattaatacgaccccgttgttggttggctattttttgagatcaatagtttggtgctttcattgagtgcgagttgatatcatatctgatcaaacaccatggttaacacgagaagaactctggttgcaccatatgcatctttaggccttcctcaagacccacagattgcagatccttatgtccatgttctagccatgactagaattcccatgaacactacagatgtggtcaatcctaccatctcagtaggcaccacaaaatctggtcactacaactagcagggatggcacaaacatcccggtggattagagcaatcggcccctgcctctaagggaggaccctccacaggcgcctcccaatgaagcaaggacccttggggaacatcccccaggaacaactaccggatctcatccccaatagtatgcaggagtgacaagacaaagaattggcgagccccgtgtggacttgagagaacatcttaagctagcaagacttagagaggctgtctgccaagttagcctaattgaaagaccacacactactgattgcgatgtattcactcagtagagacgcaaaatccttgaagagccatgcactgctgaatacgatgtagcgcttagtagagacgcgaattcttgagatggatgggtgactaagagtgcatccttcaatctcgctaagcagagttagatcaccgcaatagagaggccatcaatctataaggcagttcagccaaagaacccgtgtaagaggccaggatcttgtcagagatccactttaaggaagactagttgatagattacggagggtttattaacaagctaaccaacttagcccctcagggactaggacagactttcccttgccagagggaggattgtaacaccctaactaacataggcgtattacgtgatt

SEQ ID NO: 324598 - DNA, 976 bp, Cannabis indica
atttgaccctaatctcccacaacaaaattgtaaggatgagtaatcttggtgtgatcattgtcaacaccattgataatttcaatcttcccgcaaggaaattcatggaaaactagccaagtatactcctcagtgccaaagttatagggaatcatagcaaaaccctaactcaaggtaatattgatatcccactaggcattgcttcactcatttagtaaaaaacaacttgaacatttatacgatcttcttgaattagtcctctctaaatttgttttttggttctagatctcttagtgctttatgctttgttgcacactatggtaatttctcctctaaaaaattctctaacaccattgacaatttcaatctacttgctcggaaattcatggaaaactagccaagtggactcctcagtgccaaagttacatggaatctagcaaacctagactcaaggtaatattgatatcccactaggcattgcttcactctcatttagtaaggaacaacttgcacatttatatgatctttgaattagtcctcactaaatttatttttttggttccagatctcttagtgcattatgctttgttgcacactatggtaatttctcctctaaaaaattctctaacaccttggataattgattcaggtgcttctgatcatatggccgatttaaattatttgtttgaatcctaaactccttattcttataattctatttgtcaacatagtctatgctactcttttttgcttttgtaggaattggtacaactaaattgttgagtgactgagttctcaagtcaatcattcatgctctttttttaaaatgaaatttaagttttgttagtaagttgaatactgataattgttgtcttgcttaatttatattcgactattgtcaactttaggaactatccttggggagtatgattgattgtgctaggattaatggactttatttctttgaaaatcaacaact

SEQ ID NO: 324599 - DNA, 2999 bp, Cannabis indica
tctgtattttaaagtttaatttttgcgcttagctctagtagattctagtttagcgagataagtttatatttagtcacagtgtgtgacattcctattgttaggttgttacaatttagtatcagagcgccaaggtttttaaacttcttgtagagtggctaaacatgtacaatcatcgtcaaagacaagctcaaatcgtggtgcagtaagtattgagaataaatgcttaactgcttttgtaattaaatgtttaccgcttttcattattggcagcatatgagcatctaaaaataaaatgttatatgaaaagcatgatttgtaattaaattgataaatgattatttttaaaagaaaattagtatgtgtgagttagggttaaggcaataagtgtgtaagtgtggatttggtgcctgaattgctaaggtttttgatttcagggctatttgagagaaaatggattctaatatcaactataccacagggcaagcttgtagagcctggtaatgaccgaaccaatccaccaacaccgcttatgcctccgtagaatttgggggttaacaatgctaatccacctaccgactggcaccaaatgttcctcaaaatgcaaagcattatacttcattaggaagatcagtcgcatcgatataagcaaccgacccaggaagctcatgtggtacaagtgttccaccatctcttgttccagtggtgggtaaccctagatttgtactgccacattgagacttgattttctagcggtttttcaagctacaacctctgacattattgggaggtagtgacattattaaagtagaacattggatgagcattgtcacccgcattctggataacatggtaataataggaacagaataagtcaattgtgctgcattcatgtttcaagagcatgcccgcatctggtgggatattgtgggacagactcgagatgtaagtaccatgtcttgggatgaattcaagagtctatttgaggaaaaattttataatatttccatccgaacttctcacatggaagattttttaaaattgattcaagggaagacgacagtggccgagtatacactagaatttgatcgtttatccaagttcgttagcgatctagtaccaatggtcttcactcaaaaacataaatatgtaaggggattgaatggcattatcagtcgggacttaaaaattaccaccaatcacgatacattatacaagaaagtggttgagttagcattcattgctgaataggctaaatagcatatgactaaagatcaggctactaaggatgtcgtcatggcattgaaccctagtgttcgtggtagtgtaagaaagtggaccgacagtgacaacccagacaataagcgaaaggctaaagcttccggaacaccgaggaataatagaaacttttgtggtaatagaggtggtcgtcaaggtcgcaagtcttcatttaaaacttacctggagtgtcccaaaatgtaaaaagcaccaccagggtgagtgtcgagccaaaacatgtttccagtgcggtatattgggactttttatcagagactgtccacaatctaagaaagaagaaccaaagaagaacaataatcaaaatccagggcatttgttcactatgactcaggctgacgttgatgctagtccatcagtggtgacatattagttgtctataagcggttgttcttattcagtgttatttgattcgggagctactcattcttatgtatcaagtagagtaatagagagttttcataatccgtttgatgtgtatgctttggggtttgggaccgtgttaccctttggggacttaatcgtatctactcggtggattaggtctttgtgtttttggattgacagttatgaattaactgccaacctaactaagttataattatctaatttttatctaatcctgggaatggatttcttgtctaagtacggggcaatgactgattgtaagcagaagatggtagtgttcgaaccttatagtgcaaacccagcggtgtttgtgggtaaggtacaaggatcgcgaatacccagaattacaatcctaaaaggtagagacctaataataaaggtttcataggactcctagttacaacagtggatactagccagcctattttatctatacctaaaaatacgagattggtgtgtgactttctagatgtatttccacaagatatacctgaattaccaccttctcgagagattgaattcgttataaaattagttctagaagcaaaaccagtatcaaaagctccttaacgaatagctgaagcagagttaagggaattaaaggttcaacatcaagaattactaaacttgggatttaccagaccgagtttttctccttgagatgcttcagtgttacttctgaaaaagaaagatgggtcgctttgcatgtgtatcaatcacctggaactaaataaactcactatcaagagcaaatatcctctaccccaaattgatgatctgtttgactagttgaagggtaagatgttcttttcttagcaatgtatcaggtgtatgtaggtgcgtcaatgattgaatggaactgtgaaggatttcgccattgccaggtcatggcacagatcaaaaccattgttgggtaccatcttggcaacgtatcgggcataggtacgggcgtcagtgacatatgataagtaccgagcgtaggtacgggctcgtttgattagacgatgcgatatattagtgccaagttatggcatgggctcacctgattaggtggtgcaatgatattatatatgatattgcattatgacacgcactttcctgattaggtaatgcaaatatatgagcatatcgatttctatgtatatggatggttatattacctattgttgaatgttatgatgtaattatttatgataatgaaatgtattattagttattgaatgtatcctttcttctcacttttcttgctaagtctatgtgactcacaggtgttctgtggtacaagtaagggcaaggaa

SEQ ID NO: 324600 - DNA, 827 bp, Cannabis indica
ttttagtttaatttttttatgattatttacattataattatttaaaacattttataaaatttttagagcttcaaaaaaatttaacacactaaaaatacaatttaaactgtttcttacatgcatgactttttattttatgtacaaaataaattatttaaatattattttttaaattataaattattaaaaatttctcaaaattttataaaatattttaaataaccataacatatatatattaattacaatgcagataaaaatacatccatacttacattttaggagtattttgtggaaatacctataaatttttagtcctattaataataatgattaaaaagaaattgaaaaaaaaaaagtcaacattgagatgctgagctggcaccaactctttctctctctctctaaataaataataaggagtcttagtcatagatcggacggtctgagtagctggtttgacctaataaatccacccgtgtccaatcctacctatcactctttttatttattctttctaattaatagttgtttatttttttttaaacaaaatagttatttatttatttttttttttaaaaaaaatatttatttatttgatagtatgtaccttttttttcgttactttaacaaaataataattataataatacgaattaaactatttgttttgttattattattaatgtagaatttttgtttatgttctacttatagttcttagagctaccttcaactacaatttattttattttgtaatattggacaaaaagttaaatacttattaaatatttaagtaattaattattagtctatttttattttta

SEQ ID NO: 324601 - DNA, 1075 bp, Cannabis indica
ttatattaaaatgaagtgtatttattataaatttttgaatgaaaataaaactgttgatttgtgaatattgaagtaagtaataattatttattataatttttgtaacttcttttttctattgattttgattccttaatttttttagacaatgtacattcttattttttttttatgtatattattaatttaaaaattaaatgtgacatccttattctattaatttattttgtaactatggctattaactgtaattttgataaaatatcattgttatacttatatttcgagcaatcaatatggtgatgacacgtattaattaaaagttagaaaataaactattttgttataaagcaataaatgtgttcaataaactcccttcaataaatacaatagctagaaatatttaaactcaccttttgaaagatatgggcgagccgtgaataaaaactaccactttgtgagactaacgaggtgaacaatcaacttaaaaggttcatctcgagatacaaagaatataatatagaatgacagtgcttggaaagggtagataatgaattctttaaagagcttgcagttcattgacccacatactcgtgagtatgatgaaagactaagggaaacactcccaccatgattaattttggaattatcacactatgatagtttctcatgtttacttctctcaatatttgcagaaggacatacgcgacaagtactacccagagtatatttaggcgcagaaagtcatcttttgaataaagcatcataagaggatcgtttatattgcgagatgaacaagtatagtcaacataattgtttatagataaaaacaaagagcggttgtcgcagttatttattgtcatctcatgtgatgcaaatgtgaaataaggggattgtctacgtttcacgaacgattacatggataagtgttatactaatatttcgcgcagcaatatggtgctgacacgtgtaatgaagccggaatatgaaccaacccaaattataaaataataaatacattcagacaactttttttggaaagtacagttggtagaaatattcaaactcacccttt

SEQ ID NO: 324602 - DNA, 2473 bp, Cannabis indica
gagcacaacgtagtcatggctgatcacaccaacaatggcaacaatggaggagctgtaaaagaccaggctaattgtcgcaaccacaatgaccgtagcctgaggcactattttcttcctaacttgatagtggttagatcctgtataaggccacctgttgttgatgccaataattttgcgatcaagccagccatattgaagatggtccaatcttcattctagtttgggggactaccattagaagacacaaacatgcatctagctaacttcgaggaactttgtcagacattcaagatgaatggagttagcgatgatgccatcaggctgaggctatttccattctcacaaagggagcgagccaagagttggttggtatctttgccatccaattctatcaacacatgggaagaattggccctgaaattcctttccaaattctttcctcctgcaaagattgccaagctaagagctgaaatccacaacttcacccagcataacaatgaatctctttatgaagcctaggagagattcaaggacttattgaggaagtgccctaaccatgggattgaaaagtggttacaagtgcataactcttatactggattggtcagcaatacctggacactcatagacgctgcagctggtggggtttttatgacgaaaagtgctaatgaggcctttgaattaattgaagagatagctatcactaatcaacaatggtcaacagagagaggccaatctaaaaaggttacgggtatgcatgaagtcgatgccataaccaagttgacatctcaggtagagccgttaacgaagctggtgacggcacaagtcaaacaagctcaagttgtctgtgagctttgtggagtacctcataccactgacacctgccctatagatgtagacagttttccgatgcagcaagcccaagccattggaaactaccagaataattattatttcaaccaagggggtcatcagtagaacttccaaaaatagtttcctaatcaacaacaacaagggttttatccttagaaaaatcaatctcagcaaagccaacagtatcaacaacaacaaggctctagtggagggtctgattctcagatagatgcgttactacaattcataatagagattaagtcatccattaaggtcttggaaactaaagtggggcagttggcttctcaaaacactaacaggactcaaggtaacttgtctagcactactgaagtcaatccaaaagacaattgtaaggaaactaccttgagaagtggtaagaattatgctggtccaagccaagacaagcccgaggatgaagaagatgatcaaccagtaccaacacaagagaagaagaagactacttacggtcttcaagaaaaagaaacttcacctcctatcagcattgatcatcctatcgaaattccctatcctcaaagacttcacaagaataagttggataagtagtatttaaaattccttgaaatattcaacaaattacacattaacattccattcatagaggctttggaacaaatgccaacttacatgaagttcatgaaagacattctatccaagaaaaggaagttggaagaattggaggagtgtggtgcaattctgcaaaagaaactaccacccaagcttaaagatccaagtagtttcaatattccatgctcaataggaggtttgatagtaacaaaagctctatgtgatcttagtattaacttaatgcccttgtctacattcaaaagactaagatttggagaagccaagcacacaacaatgactctacaaatagcataccgttctttgactcatccttggggtataattgaagatgtttggtgaagctttgtaagtttatattccttgttgatttcttaatacttgacatggaggaagatgagaatattcccatcattttgggaagaccattcttagccacagggagagcattaattgatgtgcaaaagggggagttaaagttgcgcattgaaaaagaacaagagacttttaatgtctttggtgcaactaaaattcctacctattgttgagtaaaattattgaaagattgtcaagtaactgtcgagaaaaagaaagggaagcgcaaagaacaatttcaaacttttcgacgttgtatgaaaagattgatgtgtgggaattgtgaaggtgactctcattctagggatagcttcaaaatttgcaacgttggaggacaattttcttcctttggtacaagaacccttatggatgcaagaggtggactgtatcccagttgaattttgaaaccaccaccaccaccgccatagtgatgtggcgctcagaggtaagttcccttttctctctgtttaatgtcacattagggacaatgtttcacttcaggttgggggtcaacttaaattttagtcttttagaattaaaattttaattcttttaattttttttatttttaggttttgttgttttgagtcaatttgcttaa

SEQ ID NO: 324603 - DNA, 683 bp, Cannabis indica
aaaaacacaaaataaaaatgaaataaagaacatagtgctaaacaatgttattacacatggcttggttctttttaccgaattgccatgaatttatttttaagtaaggattaatatgtatatggaagtcttagaaattgagaatatgtgaaacaaaagtacaatttttttttttgaaaataaaacaaaaaatacaatttttttttcctaaaaaataaggggatcacgtgttatagattcattctctattccttcggttgttctgacaatctcaaaaaccacgtgtcagctatagagggcttatatctcagtctgccttaattgggttatcggtagtcacctcaagaattctcatcacacagataataccacttacagtaaggaccaaacttttttttaatttctttcaagaagagttgtggtgagtttcaaactcttgacccaagcaagatgcccgtaaatgtaatctctaccactacaccacacaacacacgtgataaaacaaaaatacaattgatcactcaatttctattttttttagtttgtttgtttgtttatttttttttttctaaaaaaagcattcataaataaatcaataattatggtgtgaaactaacatgacataattcatatttttttataaactaacatgacacaaccatattttgaaaaccaaaaatataaat

SEQ ID NO: 324604 - DNA, 1069 bp, Cannabis indica
ggattacattcttctaaagagcttgtttctaattttcattgtttgtcaaacaatatttctcttttagtttctaatttttctggagctcaaatttctcatgtgtatagatctgctaataatgctgctcatttattggctaggtttgctctttcagtagaagctaaaaaaatgtaaataaattattatctatatacatattgtaatgaaattatataacatatataaaattattatatattttttagtttttcattactttatgtataagaagaaaaattgaaattgagttgtaaaatatattaaataaaaagaattgcggcattagaaatatagacattattttaactcaataacaatctgcaataataaaaaaaaaaaaacactcaataacaacaagttttccatttcacaaaataataatgaataataaacaatgtcaataacaaccagttttaatatgaaagaaaaagaatgtttataatattaaccgacatctcgaagaagcggcacatgtaagcaccataaaaactcaacaattccaacccatttcagagacaatcccaccaaactgtttgtctctttgtaagctaagttaaacatgtggcatttttttcaaagtttttttttttttttgtaaattaatttaagaaaaacacacttagtttaatgaattaatttctagataaactatttgtatttttcttgtatttaattaaataaagaattttaactaactagattctttctgaaacttactttaattatttcattaaatattcctatttaagttataaattagttatttctaactaattttccttattaacttaaatttgaatatcttttgaatttaatattaagttgaggaattctaggaattggttattgaagattcttaagatattttttaagttgattttaaacttaaaatggaatattcttaaattaagtagttaccacttaattttgatatttaattaaatttcatttggaaactttttaagttggttattatagattctttctataacaacttaaattagatattttccaaatcttgaaaagatac

SEQ ID NO: 324605 - DNA, 1581 bp, Cannabis indica
aaaaaaaaaaaggtgtgtaggccaaagatacgaacatcaaggccctaggattgaaaatgagtagtgttctaaaaaggccacaggccacatggaacatgaaaataagtaatgttctaaaaagtaaaaggccacaggccatacagaacataaaaatattatctatgttatataaacatgatgttgaatactacaaatggaaaatactatgtatgtttgtacaagggtaggtggagccgagtctgaagtcgcgagatcgagatcgccggagtctaggctggccacaacatcaacaagcttactggtctgatggtcaacatcctggttggccacctcctcagtaggtgggtcggccaggccctcatcatggttccctaatgatgacccctctcaataggtggcggcctagtccacttccatccagctctcgaagggtgcctttccttaggcgaacatgatctccacaaaagcctcactgcccatgtatgacagattagctctggggttatgcagcttgaactcataaatgagtttggaggataagtaaacatactcctcccttatggcctattggacatcaagagcctccttccctctctactgaagctttgctagtttagactccagcctagagataaaggcaacttgtgtggtgttctccttgtttttgacaccaaacatggtctctaggcaagaaatcaagctatacctccccacaaggtgagcctcgatctcagacatggttttgtccttcaccaggatggaagcctccatggtcttcactttctcccaaagatctgaggatccccaggggctattgcagacagagttcagtttcatcaaggtctgaaaacaaaacaaaacaaagttagtgttaaactacaacattggtaagccagcccctctttgggactagtatggctagccagcccctctttgggactagtatggctagccagcccctcacagatacaaccctagtcggtcaggcccttgcagcacaccccatggctagccaacttacacagtgtcagaaagatgaacaaagttgaaaatacaacttaccagagaaagatccctgaaagccagtagagtagagcctatctagctcgccatcacgaagctccttgagctcctcatccatgaaaggaaaagctctctttatgcgtctaaaggctgcctctatagccttctaccctccagctgaccctactcctggaccgagcctctaagcaccctagcgtgcaggtcgaatctgtaacgccctaaataattaagcacgctacccaagatacttatgaaaccctaatcccctaaacgggattactaatgaaattagcgcggaatttaaaccttaatcataaacgaagtaaaaaaaacttgtaataatttaaattttacgatctaaaagttaaagaaattgggatcccaaaaacatttacaaaatattaatacaagtcctttttctttcacctggcctaagcggcaaaatagagtctcaaaaatacaacactggtagaccccaacccgcttggtctgatatggccaggatatgtaaattcttcgtccagctcctgcactcat

SEQ ID NO: 324606 - DNA, 547 bp, Cannabis indica
tctttccagaaatatacattaaaaaaaaaattaaaaaaaaacaaagagaaaaatgtcagagggcccaaggcacaccactagctctgttattgtgtgatagtattaacataccacatcaccaaatataagctttatatgtaaagctttcatatgtcatcaattatcactctaaaattatagaaaatataaaaatgccatgacaacttgaaacaacctataatcaaactacaatctacaaaaaaaatgtcaaaagaacatagataacggaaatttaataacattcaataatagtcgggcaaatgtcaaatgtgtgtatatatatataaataaatcaataaatatcaattttaagggtatatatttatttgttttcatgtgttttacttttaacaaaacatagggactatcatcacgtacctgtaaattaatacctgagctcaatgttggtaacaaattacaaggtaccaaatggatatattcccataattaacaaaataacattttacaatgatttccagtaggctaactaatctcattttttttctag

SEQ ID NO: 324607 - DNA, 743 bp, Cannabis indica
ttttttttttttaacttaaatagctagaaagttaaaataagagccatttttatattcaagctccctactttagttagtatttgattatttgattatgctactatctaaatgtagtctttctcacgtgttgtgctttcagactagtatattcttgcttacatgttttgtcttcgagtttgtcatatcatgttttgattagaagttgaagatagcagtgcttgttttctcttgatgcaagacttgtagaaatctttttctgaagatagcgtgttgttagtatttgtgccctgaaaattctgtaaagacattattaattattattagttaaacattgtgatatttacttgattgctaaattattaatattgaatattgaataatttatatatatatatatccaaaaattatatgagcatgtgatttgtattgtatagagaattaagatcacttagtcatgaataaaataattagaaacatattaaagttatgtaatctttaatcaacgattgctagtactgttcactaatacttgttattcgatgcaagcaatctcgattcaaattgctgatgtagtatgacatctaactgattgtgatgaatacaatagagattatatatggcatgaattgatatgtaattaagttgtctatattaaatatgtcagttactataaagatctaattcatatcataacgatgatcaataatagatagacatgcatcttgagtaatcatgaactcttg

SEQ ID NO: 324608 - DNA, 1962 bp, Cannabis indica
attaacataaataactgctaatttccaaattaactaagcgggctttacagtctttgttggcccttctgctattattccaacttgtattgaccaagaataacacaacatgccaactttgggtgttgaaaattcatcatcatctagttcttctttagctaatcatcccaattcaccatctacaacaactattgaagcatccccaagttccccatctgctgaagcttctgcgtccacctttgttgtgccatcaaataattcatctgcattcgcttctactcaagttttagatactcctaaagctccatttgttcctcaagaacctatcagtaatcatcctatggtgacaagagccaaagttggagcatgtaaacctaaagtgctcatgctttcaaaggtgcctatgactatagcagcaactttcaaggatcccaaagtggaataaaagctatgtaagctgagatcactgctcttaaaaaaacatggatccttgttcctctacctcctagttggagtgccatagaaaagaaaaatcatgatgatagcattgctcaataaaaagtaaggcttgttgccaaatgatttctgcaacagtatggttatgactttacatagacttttagtcttgtagttaaaccaacaacaatttgagtcatcttaactattttcttatctaatggttggcaagtaagggaattagatttcaacaatactttcttaaatagagagctaactgaaggggtattcatgactcagtgtcctgatttcattgatcaaagctctccccacttagtttgcaagttacaaaaagcattatatggctcgagacaagctcctatagcttgatttggtaagttttgatttgctcttatgataatcgaatttgtttctgctcgagctgatcgatccttatttataaggatagcaatttctcctaccacatatgtgcttgtttatgtggataatattcttattacaagtagttccaaggcagctgtttcaactcttatcacatatcttaatgcatagtttgcataaaaagaccttagccaaatacactatttccttggaattaaagctcaacaccttgatgatggcttacacttgtgtcaaaagaaatacataatggaccttcgatgccatgctaaaatagattttgcaaactctcttccaactcttatgactggtggagaaaatctagcagccttcaatagtgatcatgttgctgttccacatcaatattaaaacatagttggagcatttcaatatgctatcatcaccagactagagattgcttatgttgtcaataaggtgtctcaatgcatgcacaaaccacttgagtctcatctgaaagtggtcaaaaaaataattaggtatcttaaaagaacttcagactatggattacacttaaaaccttgctctaaactagttttaataaggttttgtgatgctgattaggcctctgatcctgatgatcgcagatcttctttcggtttttgcatctatctaggctcaaacttggtatcttggagtttcaaaaagcaaaagaaaatatctcgatccaatactgaacttgagtattgaattcttgcaaatgccactgttaaacttgtttggcttcaatcttcactgtttgaagctggtttatcaaagcttccaatccctactatctggtgtgataatcaattcactgtccttttgcatgtctacaaatacaatgttacactccaaaaaaaaagaaagcacattaaactagacttttactttgtcaaaagaaaatgattttgaacagccaactctatgtaaaacacacgccaacttaagacgaagttgcttaacatccttaccaaggctttatctacacctagatttgttttgttgagagacaaactgagtctggtatctttatcttagttcagtttcgtggggatattagatacggttgttaggtagtcataattaatt

SEQ ID NO: 324609 - DNA, 1302 bp, Cannabis indica
acaactcataattggcacaacatctagaatgatctaatgacaactcatgattggaaaatatctagtatgaggatgactatttttttaacatgctccctccagcttgacttcggttgactgaccactacaagcttgtccttcaggtaaaaaaattgattaattgaaatagtttttgtgaagatgtctgcagtttgctctgatgtaatggaccttaacctcaattagtcactatttaatgaggtctctgatgtagtgcacgtcaacttcaatgtgttttgttttgttgtgaaatataggattggaaaagaggtttttagtgccaacattgtcgcactagataattacaagtagctgatgttgtatgccaagttctttaaacagaaagtgaagtcaagcaactttcatggtagtttgcgaaagagctctatactctacttctattgacgatattgcaactaccttttgtttcttcgagcaccagtttataaggtttcctccaaaataaacacagtaaccagttgttgattttctatcatcaatagaaccagcccaatcggcatcactaaaacactcaatggtcaattctttagacggttgaacataatgccttgcccaattgtgcctttcaactatctcaagagccttttacatacattccaatgatgttgagtgggactgtgcataaattgactcaatttgtttactgtaaaagcaatgttagggcgattgagtgttaaatattgaagtcctcccaagacacttcgaaagaaggtaggctgatcaaagcgcttactgtcattgatattgagtttgttaccttgagagataggagttgggcttgagtttgggtgtaacatatgagtttaatttggtgagtaaatcagtagtatattttacttgtgagaggtgaattccacagttgccgcaagtgatttcgaaaccaagaaagtaattaacggggccaagtttttttagggagaacacttgttgtagctgagcaatgataccacaaactttgtggttattgttgcctgttaaaaggatatcatcaacgtataccaaaagatataattcaacacctccatttttgtaaaaaaattaatgatgaatctgagatagaattttgaaacccaagtgagaatatgacttgtttaagttgatcaaaccaagcacgcgacgcttgtcgaaggccatacaatgccttgtgcaacttgcacacatagtttggatgtgtcttgctaacatagccgattggttgttccatataaacatcttcagagaggacaccattaagaaaggcat

SEQ ID NO: 324610 - DNA, 574 bp, Cannabis indica
ctttttgttgtgactaatattcacatttagtcacaaaaaatgtatgttatgactaaaaaattgtcactaaaagcggtcttttttgtagtagaacatcgtattgatagagcttcacaaggcttgcaccagacctatgaaattgatctctaccataatccattgccaatcttaatctttgatccaactaagagcccccagaacacccattgcctatggaagttttcgttcaacaataccagaagaaaatactaagcaaccttctacattaaagccattcgagtcatgaaccaccatacccaaactgtaactttgagcacaatcagataatactacatctacattgaacttgatactattttgttgtggacgtgtccaatactcgctgccataaccctctcaaaaaactagggcatcacaattctatttcagatttctgagtatttttcctttgtcaatgtaaacttttgaaaaaaaaaaaatctttgtcagctctcactagtttatcattcaaaactagatctttatggctcaaatagcctaacatacaattgtttggttttgtgccctaaataaa

SEQ ID NO: 324611 - DNA, 1403 bp, Cannabis indica
tgtttttgtgaaataatccctacataaattttacttgcttcgtagaagctttaatacttgaccaccaatccactaccaaaaaaccaatcaccaacccaagaccaaaattaaaaccagatacaaatttatgagaagttttaaaactcgaccatcaaaaccactacacaaaacaattactacccactaaaataaaaaaaaaataataactgtaagaaaagtagaaaagagaatgagaatattcgacagaattgcgctatcatcatcggaaaagttgtcgctaccgaaaagtcattgtagatagacatcgaaattgtcaccaatgtttaacgttggagttgttgccggagttggaccttgcaatttgacaaagagaaatcaataatatctatcagctaattaaaaatataagaccgagaaatcgattatgtatattaaccaaataaaaactaaatcttagagctagttacgtataataacaaaagcaataatttaatatagaaaccaatttcgtatgacataactaaaattaaacaaatatatgacgcctaaagtaataaaaagatgtatcaattacaaaaaccagttacttaaaaaagaagtaatatatatcaaaaaagaatttttaacaaatacttataaactaaataacaaaaacatgttacgtcaaataatttagcaaaaatttaatatagaaaaactggctacgtaagacaattaaattaaaaattaactcacattaaccaattacctaaataactaaaatcttctttacaagtagattccttcttaccattctcattattattactctaaaacaatatacaaaataatcaaataataaattacaattgaacattaaaacatattaaagataaatatgcattaggaacccagttttaaaacaacagattcatgagaaatcattaccaaaaactgaacagaaaataaaacattataaccaatctcaataataacatagtacatactttatttcgacctgctcctttctttcatatctttatattttcttagcagtatcaactttcttaccaagctctagctgattagaattaaagaatatttccatctgttaaaaaataaatacaaaattcaaaaatataattcaaataatatagcaactatgataacaaacataattaatcaattttaaaaaatgaaaccaatttttagactcttgaataataaaatttgaacaaaaaataaaaccagtttcatctacaacataatgaaaaaacacaatgcaaaaatttataacctaaaaacaatacaaacttttaaaactagtatcaacatttaaataaactaaatttttcattaaagagtaatttgcagcatgtaacaccccgatttcccgagatgtcacataggatagtccttataaa

SEQ ID NO: 324612 - DNA, 1562 bp, Cannabis indica
tggtaattatcatgacatagagtgtacgaaactttgttcatatataaatatatatattatacagataaataaatactattttaaatcttgcgttttgcaaaagatattagttaaactttctattttgttaaataataaattaaaccttgtattttttaaaatatacaaaatagtatcctaaattagttttttatcaaaataaatattaataataatttaatctagctagttatgaaaaaattagatatatttttgtatctgttcgtactagaaattatttttaaattaattgtattaaaaaaatatcgaaattgagctaagagtactattttagaaaatacaatgtcaaattttttattttacaaaaatatagttatagtccaatcaataatttttagaaaacacagaatctaaaatagtataataactctaaatatatttatatatatatgtgatgagtagtattgttcgataatttttggagaaatgataaaaaaaatactaagtggtgttgattcggtatcattacgaggtgttatatagttattagtataattaaatattttttttttacatattttaatttaataactcttgtaaaaaaaaatcactaattataacgacatgatcacaataagttatcttgtaataacaatatatgttaagacactgtatgttacaattattgctattatgcaccagttgtaatgtctagcattatcatagcgcctaaagaataattagcaagtataaaaattatcacattaaattatgcgagaattgtaagacgtcacttcataatagtactaaatgattaaacactagtaattatttttttttcttttgaaataaattgttaggtcctaataccacgtataattataaacttgtatcaagttttaaattctacactatttatttttacaactgtcttgttactgtaattttgctatctacagtcacatattaccaatttattactacaagtctttacatttactatttcattacagttattaaaaagataaattaatatatggaaaacacaatatttcataaatgaataacaataatcattaattggatgtaatatgttggtggagggtgatattttgtcaattgatgacacaaatcacaactgtcatgaaaagtggagtaataataagttattaattattttgtagagaagggttggtttgaatgtacatatatatactaataatactacttttataataataaattagtcattatatttataataattaataatctttaattaattaattaatcaccaaattttggatactaatagggtttaaatatgtagctcaccttatcaatctacgtaccctaatcaacctattgctattattaattagataatataagagaaatactaaaagtactacctaaattacaatattggtgatattctattaaaaaaattcatcattaaattgtgtatgatctaataatatttcatttatatatgttgtgactaaaaggtttgtggctaaatgtattagtcacaaaaattacaatttgttgtgactaaatgt

SEQ ID NO: 324613 - DNA, 843 bp, Cannabis indica
acttttttttttaaagagtattgttatttgatattttctagtacctaatatcacactaaattgcgcattatgaataatcagtatttttttttatattatttattaaattaaaatatgtgagaatcaataatgttttgtaatttacactaataattataccacctattgtaatacttgacaccagatcatgttccttaacatttatcttttattaattaatatagattatagcataaaatactgaattaaattgaattttcatataattaattgtaatggtgtgggcctatcaattttgtgggaatcctatttttatatacaacctttttttgctaaattaattatatacaattaaagttgtgtcctcatctaattaactctctctttttggtataagtaattttgtcttcttgtcaataacttttattccttccttaatgatcaatcataattgtaatttatagctcacaattaaaaactaaatataaacaaataataaacaataagcctccaatacatgtaaggtatatgaatcccaattcttatcatcatctacactcattataaaaagaatactattaaaactttttagttataatataaattttttgaggctgaatgtgacttttagtcacaataaaaaattatttttaactaaaacatagtatatatttatatataattaaattatttgtgactaaaaaacacatttaatcaaaataaattgtaatttttgtgactaataatacatttagttacaaaccttttagttactttaagtagagcacgctactaaaatggaatttacttctgatgtgttggcaaaagaggttggcaaatcaa

SEQ ID NO: 324614 - DNA, 797 bp, Cannabis indica
actaaatatctaataactaattggggaatatgtcaactacttggagaaaatcgttcagccattttaagtgaatatttcaactataaataaatatctatagccaacttttaaattcaaatttaaacagatgtttaatgtttgaattaattaactaatccagaaacaaatctagtggggcccacaattatagtaccgtttattattgttcaagaacataatgttagctaccctcacaacgatcccttggttgtagaggtgcgaatagacaacatagtggtggcaagggtgatgatcgacgacaaagaatcctcgaacatcttattcaagcaaactttaatccagattggtttgtcactcaaacacctaaatccatgcgaacatctaatgtatggtttcagtggagctgccattactccatgtggcaagatcaaactgccactcactagcagcactagcccaaggtaaaccaccatcatggccacgttgttagtggtggatgtgaagtctccatataacgtgatgctcaaaagaccagctctatacgaccttcgagctatctcgtcaatctaccatttatccgtcaagttcccaatgacggttggtataagttgtctccttggtaatcaaggaactccctgtgagtgttataacactttgttatctctcaccaagaagatctcctctgttgcttcggcaccagaggacgaacaagacctctctcatgaaagccaaagagacgaaaaagcccttcaatgtaatatcccagaaaataaataatatttaaatggacatatttt

SEQ ID NO: 324615 - DNA, 1009 bp, Cannabis indica
aaaaaaaaaaaaaatcatttattacaatcatccaactttaaaatacaaataactctcttaactagtaattaacaacttaaaaaacaaaatcagatcaaaagaaagaaagaaaaaaccatgtttacaccatcatcaatgccaatagccttctcttttggtgtttggcctttggtttattgccaacgagtaaaaaacaaacaatctgagaaaaaaaatacatttgatttatgaataattagctttttcgctcttgaacgtttttcattatttaatgtctcccaagatatacgacttgcaaataatacttattgaaatataaattttacattaacgtggtctttctatcacattctatttaattttttctgtgacacagtaaatgatagactataatattaatgaaaatatatttaaaatgtctagattcaacttcatctagagaagcagcaaaatgtccatgttgagtcaaaatgccagatgaatctattatctacatcaatagacaatagatgagaaatattgctccaataaatctgtattccactctctagcatctttcataagttagcaactacacttaaagaaactagtatatatgtcttcttagtattttacatatataaacaatttctctatgcatgattttatacaaacaatggtagttgtacaatattgtactcttgtttaccttgaatattgtactcttgttttctctagtaattctattatcatttttaaagtattaaatcattctaaaatgacagttttgtaagtttttttttttttatttagtaattatatttttatgattttaataggtacaaggagcaattcaataaatcatctcaataaatttttctactcggggtaagaatttataattgataactaattatatgatatgatatgagacatattttattagggatatgattttgtcccgttattgtactttcaccgattgtaatccgtgatgtacggcagccgtcagatgagggagttatttgat

SEQ ID NO: 324616 - DNA, 2040 bp, Cannabis indica
agccaaaccttacaactctgctcccggtatcaaatcaataacaaatcatttcacattagggtggtaaaccaagtaattccttaggaaacacatctagaaactctttaaccactctcacatattcaggcccaactgtttcgagtctactagtatcaattactactgccaaataacctatacacccatcttgcaataagtctgttgctctcaacaccgatatgattagaattcgggaaccttgaactcttcccacaaatacaaatggttcctaacctaccggttgaaaagtaccatctttctcatgcagtcaatattatctgcatacttggataagaagtccatccccaaaactgatatcaaagtctgctaaagataactcgataagatcagtacttaactccctatcatccatcttgattggtacaaccctaactccacctcttggtagataactaactccccactaggtaaaagggtttcaaaacctaattcataactataacaaggcctaccgagttgtatcaattactcttgacgccacgtaagagtgtgtagccccagagtcaaataatacagtaaaataggagtatttataaaaagttgacttgtaacaattgatagactagcctcggcatctgcatgtgtaatggcaaatacccgagcaggagtggatatgatttccttctttggctcttcccttgtcaactgagggcactccctcttaaagtgtcccatcttactacactggaagcaggaatcgttgttacattctcctaagtgatgtttcttacaacgaggacatgttgggtacgtaaatccaccctgacgaccaccactctaaccatggttctcgcaaaacctcttgttctgcctagaattgcttggtgtgaaaggagtttttcctttttgaatcgaaaattgaatcactactactcctacccaaattagaaggaggcgatgaatgactccactagaaccctgagtccctcgggggtcatgcaaaaattgtactgcaccttcagctcgaagagccttctgtaccatcagtgcatatggggtagcatcatcagtcgtaattttcaaatcatgacggatcttggcattaagcccacccaggtacttttccttctttgtgtaatccataggtactatacctaaggctaatctagccagtcattcaaacttggtcatatactccgtcactaacattgattcttcttgaaccaattatgtaaactccttccgttttgcactaagaacaatctcattatagtacttggagttaaacagatcctggaattcatcccaggtcataacaacgacgtcctgtgtgagcgacactaactcccaccatactagggcatcttcctggaactgaaatgtggcacaggccactctgttgctaccggtgactcctataaaattcagtatccggtttatagtggttagccattgctcgactttcatagcattagggcctcccaaaaagactagaggtccatattttcgaaaccgctcatatagtggtaccaacctgttgcaagctacaagatattcctatggcaacattggtactagagcaatacaaatctgaggaagaggagcaacctgagggccttgctacctcagcctaacaatctcctcatcatgttgttgtattctggcctgcaacttagcaaacctttcctcccaatcttgtggagcttgtggtggattaacatgacccggaccataagcttatccacggcctctacctcgacctcggagatgagggggttctttgtggccctgactgccactagttccaactacattaccctgacttcatacattttgtcgggtatccatatgataatagcctgcgaacccatagtcaatttaatcaggcagtggtcaacataataaacttaagaacggatgcatgggatcttagacacgcacataatcaatcaatatatcactaacatgtttccatcatacttttctaattataataagctactaaaacatgtaaagtcttactgaaccgtgagttgagct

SEQ ID NO: 324617 - DNA, 1813 bp, Cannabis indica
gatagaaaaaaaaaaatgaaaaaaaaaaaagaaaaaatattaactattttaattttattttatttttaaaaatattaaactattttttaatatataaattattaatattaggtggactaataaaaaatttgtcatgtgtacacttgtgtatactgtggcagtccactttggcacttaacaaaccaaaatggatggaaggactaaaaagcaaaacgattgtcaagtccagacaatataactataactttttgagttaggggttaaaccgtaacaaacacaaaagtataggaagtctagcagcaaattacccttctctatatgtaatattattatattaaggttttttagtataatattttcttttccaaaataaattattaataattatctatggacccctagatccacaaaataaaattatgccacatgtgacctcaagctaatgccaagtagctagggcaatgcccgatactttacttttagagttcaatagatgtattagtaaggtaaatgtacgtatggtttttttttaaaatagcaaaatcgctaaatataataaaaattaaaaaaaaaataatctaaaaaataaaaatgggcacttttattatgtgcccttcacagtttgagcaacttttttacatttagttttttttttttttttgcatttttatggtattttataaaataatacaaaaataacaaaaaaattatataaaagtaataggaaactaatatccaaataagaacaaaaaataacatacaaataacaaaaaataaataataaattaacaagagtacaacataaaaataaatcaaaagaccatattttctataaataaaatcataaaaatcataaaaacatttaaaaatatgtacaaccgtatttttataatttttttttttgttattgttgtgtacatgtgaaataatgtcttttttcatatatgaaaaactcatatgtttacaaaattcaagtcatacaattaaatttaagggaacatccatatcaattattcttattccttatgtaatatacatactgttaacatagtgtttttgatatatatatatatattcattatataattttttttgagataattcaatacaatgacttgattagtgtatatgttatgacgttaaaagtttaataagattttttttattgttaaagctttatttaattaatttttaaattttaatgataatggcgatcatgtaaactccattgcatttttgtggtgtggtttctacgatttgaaggacttgcagtgcggttgctgtttgaagaattataaaaaccgcatttacagtttggtttgaaaaaatagtcaaaagctatattgcccacaccttgaatacccctaataaaaatcttgcaaattctactagttagttcactttaataaatgagtttaaaatataaaataattaaaagtaatattttattatgttgtttactaaattgattaaaaataaaattaataatattttattttatttacataattagaataagtaattaaaatgctttaatttgactaaattgatgctattgaaaaaaaaatataattacttaaatttttaagggttatttatctttttattattaatttaattaataaaattataagtaagtaaattaagaaagggaagcttccttataaaaatagggaaaatctttccattttctttcttcataatttatgtcgaccctatcaatatcaatatcaatcatcaatatcaatatcaatatcaatatcaatatcaatatatctttatatattaaaagtgcctatctaacggcaattct

SEQ ID NO: 324618 - DNA, 946 bp, Cannabis indica
aacaattttctgtttttaaaaacaaaaaacagtttttagttatgatgccaaacatgcactaatttacttaatttatgttcttcttttatttttattttcgacatactctaaaaaatacatttaaataaattattttttaaaatatttgacaagagaaaaaataaataaaaattatacattattatcttaaacaaataattattaaataaaagtcatcaaaactactatcgtttaagagtgaaaatttgatattgtcaaaaaattaaaggtttggggattaatttacaaaaaaattatagttcagaggccaacttgtcaatacttatttatttaggaccaatttgttaaaaaaaatattagaggaccaactttgccaatacttattatttgagaccaatttgaccccaaaaaaaaaaaaaaaaaaaaaaaaaaaacgttaaaaggcaaactttctaaaatatatataattcagggacctaagtcactaatagacattaatttaattatatacataaataagtttttaatttattaattttatttttcaggattctattttggttggcaacgtattgtatgtgttgttattaatttttggttgacaagtatttgtaataaatttcaaattgagttgcaatctcatacaagtaaataaggaaatttcaaatttatgcaaccacgcatgtatgtgtgtgttttttcttttcttttttcttgaataattcattcaaccaaagaaaaggaaaccagtttttgtgaccacatgaggaccaatttctctttactaaagtctagcatctcaagcaactaacggtgtaaactctaataattttgttaaaccgttttttttttaattatttttcagttagaaaagtgttttttttttttcaaaaaacatgttttgtgaaacaaatttcatttttccttctaaatcaaaattttatag

SEQ ID NO: 324619 - DNA, 686 bp, Cannabis indica
aggcgtcacatccaaaatattaacaactgaagttttcactatatctattatataaatattttttcttttttaatattttatttataagcctcgttaaactaaattacatttaataatgttgcaaacacacaacaccaacccaaagataataaataaataaataataataaaaactcaaaaatagacaattcaacaaataagaaaaataatcaaaattgaaaataattgatcaaagaaaaaaaatacagtagacacaattaaaaaaaaacacagaatatatatatatataccagaaatttatactcgtttagcctaatcaatggcatactctaattttaatttgcagttaattcaatttaatttacacgattcaatgtaattttttctaaaaatattcataaaatatttaatttaattcgcacaattcaattcaatctacaaagtataaatatttgtaaaatgtaaataattaatatatataacaaattatttagtctcttggttgctttttaaaataagatactttgtctcaataatatttattgaattaaattaatttgtactttataactattaaaaggctgtgattaaataatatatcatcaaggtaagagttttagtgacaaccagataccaaatgactataggttatacttttacttaattttttttgaaaaattattttt

SEQ ID NO: 324620 - DNA, 1871 bp, Cannabis indica
tttcttttgtcaaaatcaccatcaattgatggttcacctttccatttttttaactccacgctatactattgtcgagctaatagttggttgcctcccactatccttacccttgaatgagtggggaactgtaggggtaaatgtttgatcgagcttattgcccctaaacctattaatgatgaccaacccatgagtatgttgtatactgaagggatgtcaacaactaaaaactcttgctgacaatacatggtttcaaccttgcctcttctaagccaattttctttaatgtttctttgtagagaatattaacaaaactctcattatcaacaagaactctttctattctcttattagcgagctgaattgttatcactaggggatctgtgtgcggaaaccgcatgtgtaatgcatcttcatcagtgaagatgataggcggttcttcaggcttggctctctctaaaggttttagggaaaaagtttacttttcattttttacttcatctatatatcgttttttagcattattgctatttcctgtgaggtgtcgccctccagaaataactaagatgtcctcaccctcaactgggggaggttgcaatccttgtttgttctggttgttgggcagattctactcatttccttaaatccttacatattttctcagatatcctcacgagatgatatttttgatctcgccttttagttgacgattttcctcaatggtatgcccaatatcttgatggaaacatcaatacttgttaggatcacgcttatttctttcatgtctcatttgggtctccgaaacgcgatccaagtttcatttgtgagatagatattttcatgagtttcatttaattccatatacactgagtatataggaatatatttctcgtgcttctttttttccttatcttttgaagaatctcttaactcgtcttttcttttagcattcgagccattggggtttgaatttccagcttcggttctcatagtgcttgttgtagctgtacttatgatgggtttgtctcccgagtcagatttgagaagcttcatttcattttttgcctcttccttttgcatgaaaatttacgctctttcattgaattcattaatgtttcttacagggtgaccttacaaatcatcccacatttcacctcctgtggttgacaagttagttattatattagcctgaagagttgtcaactgaatgctatcatttagattcctgactttggttgatgttatactagaatgacttaagtaagcccttatcttttctttattgatgtgataatacactatgtagccgccacttacatccttgattagcgcgtgattgctaaagaatggatttaatgcgtctggcatgtcttttcatatttgtttgtagacatttcctccaagtttcatttaatgccaattaatagttcatctctagtatcctaggcttggaggagctggatgctacccaactctcggaggtgagcaaaagattgatccctctgaactagccatagctccaggaggaacagctaggttgtccaaggggatccttcctacttaagattttcctttgactaccattggatccttaagctttatctgtcacatgtcgcgccatggaattgccacgtatattgggagaaaactatggcaacattacacagtaattattattcaataaactatccaaaacacaacttaaaattcataaaatagatactaatatactataaatatgcaaacatatatatataaattataaaaatattactagaaatataagaaaaatactaaataggttctagtcgacctactttgcccatgggtccttaaccttgaccaactaggatctgtactcgaccctgtctctt

SEQ ID NO: 324621 - DNA, 1309 bp, Cannabis indica
gctcgtaccacaccacaactgtaataaaaaattacaattttaaaattatttttgttagtgcaatctatggttttagaatttaataatcgtagttcaaaccgcacgacataatatattacaaaaatacaatttttacaatatatatttttttcatgtaataaaaaactcatacgattaaatttaagaaacatccaaattaaactaatctcattctttatttattattacttctcaaattattattaattacatataatatacaagtcccaccctgtgttaaggtgggctagacccatgcttagagcccatccaaactcaagatttaaaattttcatatagtatacttttttacaacgaaaaaaaataatatttttgtgtaaaaagaggtccaataatactcatactttactttagatataatacacacaaaattttttgaacacattattactcagggctgaccatgataacgtgtaatatatatatatatataaaattttttttttagagataagtcaatatattcaacttagtttgtgtgtaaatgttattatgttaaaagtttaataattttatttttttggtatcattgaaaccttattaaattaattttttattttttataatatttgataattataatagtataaacactctaagttacactgcatagtactgcattttggcagtgtgatttttcgttgttttaaggtcttgtggcgcgattgcagtttgacaaattgtaaaaaccacatatacgatttggtttgaaaaaatgatcaaaactcgtaccgcccataccacgaacatccctatagacaagtatcaaagcttagtaggacacatatgagcaattggtttaacataaggttaaataataccaaaataaaaagctaaagaataatgagtattgttattaggcatcggtagtgtctaatactacctaaaagtaacgttctgagattggttagtgatattttcttaaaattattacaccaatttatataacattcgatacttaattacactaatagtaatatgacacatgcaaattagtaaacattactgatgccttctaatatttttaaagtcactataaaagtcacatatcaaaatttaaacataaaaataaaaaatagaaccatattctatttgtgaccaaacgactttgaaattagattaaaacacatgaatctcaataattctctttaaatttaggcgtgtaaagactagagaatgataagtttgagtaaaggctacgtgaacttgtatatcaaccaaaagtgagtatttattgttgggttttatg

SEQ ID NO: 324622 - DNA, 1621 bp, Cannabis indica
aatacatattgaactatagggatatataagggccgagttagatgtgttttaatgtgccaatttaataattaaggtttgaagaaactataaaccattcaatttttttcttgtacaactcaattttatttagtacaataatatatagaatagattatgttgaatttattggattgagatgaaatattttaagttttaatatttgataaaataatttaacctagtgcacgagaaaatacatgatatgtatatatgtatcatgtgtatgttaacatagtgctttaaaaaaactaaggtggtggtggaatcattgtatgggcaggaaaattaattataatgattgattctcacgttagacttgtttatagaagtagtagagtaactatggactacatattcgtgatatattttaattaatttatttttttattgttatcgtaataatataatttatttattaaaatgtaaaatataatttttgtatatattttgtgaatgtaaaatatattttatatataaaaattatcttaaatttagaacgtctctcaaaaattaagtggggttgagttatataaagttagaatatgttcaatccataattatttgttctattacttttcagcccaatgaaccatgatctaatcttaacacaactatttactataaaaaaaaaaaaaaaaagttgagttggccgagttgaatgatttgatctatgtaaagcactaatttcaataggtaaatactattttagaccctgtgttttgtaaaagttaccaattggattttagttttggtaaatgacaaaatggaccctgtaagtttcaaaattgtataaataagaacctgaattgattttttgtcaaaataaaactgaataataatcttatctaaagatgttatgacaaaactggttacattttttatatctctttgtattagaaattatcttaaaattggttatattaaaaaataaaattattgaaaattaagctcagggtcctatttttaccattttagaaaatatagggtcttttttgtcgtctaacaaaatagagggtccaattggtaacttttgcaacacacaaaatctaaaatgttatttaccctttttcaatcccctcagggcaactccaatggggaaacccaaatttaatgttaaatcaatactaaaaggatactatttcaacactaaatttttttccaattccaaccacaacactaaaaaatatattttttattattatattattttattaaattatctcacactataatatgtatataaatataaaaatttaatcatgaacatattaatttaatgttaaaaaaaaaagaaaaagaatatttggtgtatagtgtcccactaaaaatagtgggacactatagactcccacatatataggtgttaaccccaaacattggcatctttaatttttgagattattcatcgaagggaagaaagacccacgctggtacgccaaatcagcatgctcgcccgaggtccacctgtaatatcccgataagcctaatggtaaataattagactttatatttatactatgggttaatcaggtaattagtaggattatgatcttactaatctatttcagtataaaatttaaat

SEQ ID NO: 324623 - DNA, 704 bp, Cannabis indica
tccgtgactaaaaatattagtcacaaaaattacaatttattgtgattaaatgtgtttttagtcacattacttattgtgactaaaactaaattagtgacaacttgtagctaaatgtaaatactatattttagtcccaagtaaaattttgttgtaactaaaagttacatttagttataaaaaatttatgttgtgggatttttggttcccattttatagggaatttttttctaaccatggttggaagtttaattttctttatcatcatcttatactacccaatatttcctttttaatttacccattgtcctaagattaatgattgaaacacattcaaattgtacaaatttattacatataatcatagattatatgtataattaatctgaactactatatttattatatataataatctgtaattaatttgaactactcaattaaaagtaatgttgttaccatttaaaaatataaattattaacattttttttttgaagatctgagctttaatttctaaattatgaacatttaatatatattattacgtgtaatttgagtgtatctagcattactcatactttggtatagtaagttcattaaggacaaaaactatatatcatgtttcttatatacatatatatatatggatgatttcttaatgggtaatacccattaatgagtactaaaaaaattgatgaggtggcaa

SEQ ID NO: 324624 - DNA, 1069 bp, Cannabis indica
gttgtaatcttctcttctacctttcatatatatatataatatatagtgtatatatatgtattgtaccatatatttaatcaatctcttattttagtcattgtattattttacaatagagttgtaataaatcttgattttcttccattgttataaaatctctaacaataaccgtatgacatcgagaagattgttagattaataatattttttaacaattctataattaaatataagttttggataactttttgaattaattaaaagtaaaacggttgactaaatatattttaaattaataaaactcaaatatgaatatattatgttacattatactataatctatatattaataataatattaaaatgagtactataaatacatatatattatatacattaaaataaattagaaagttattcattcacgtacgtcttaattttctttttactattatttccttttctttgaggttgtaattttcctataaatatatatatatatatatatatattaaatttacgtatatttatggtgttgacttaagacctttattagtcaacaatgtgctcttcggtcaaggcctagaaaatataaatggaagaaaacgaaaatataaagtactcatatattttcaaaatttaaatgatttaattgaccatataattgaattgtcatcttatttttctttagttattttttttaggttattaagtgtgtttcttatatttatttttaatgtttgaaaaaagaaaacacatatatattctaattgaaatataatatgattatatataaataaactaaaatatttttttttagcataacactataaaatttacaacttgataatatataatatcccaatgtaaaataagattaatttttaataatactattaataattctcattgaaaactacacactaattcttaaaaaaacttacaaaagttaaaaagcttaaaagagagattaatcaattaaattaaatttgtttccattctttttaataataattaaattaatttattataaaaaaaaataaacgaaataaattaagaataagatgct

SEQ ID NO: 324625 - DNA, 544 bp, Cannabis indica
gatttgatttatttagtttgattaatctctcatctggtgcaagttatattagctagtatatttctgcttggaatacttagctctaataattagacataacaaattagtttcaagatgacattttgagtgaaaaaatgcttcaaagataattttttcttgttaaaataataattccattttatcctgatttaaacaattaatcacaacattattattgtataaaatgctaatctatttttctatatttatttatttcgttgttaattttggaccaattggttgtttatatcggatcccttaaaggtgatttcaagttattttgtctaaatttctgagaaagcgtgatcttatataaattattttttttaagtgattcatattctcactttgtatatctttagctagacaactagcttgttgactgaaagttctcttacatcgacgattatcattgtatgattcagatcactttctcttaaaaaaaactagaaatatgttaataataatttaaatttatctattttttttttatatttttgtaatt

SEQ ID NO: 324626 - DNA, 878 bp, Cannabis indica
aattctacatagaaactcatattgcaactagcgttgcaatctaaattgcaacaaaaaatcgtatagaaacccttgttgcaactagcgctgcaaccactttagaaactcaaaccgtaaatttaaaaaaacagtgaagtaatttcccaaaaaataattatagttttttcaaaatttcaaaccacaattaacaaaagtgatgcatcacaacacttagcttgttgtagatggtgttatttgtgtaatgagaatccttgaagtgattatcgatgactcaattaaagaaagctaaagtataagatctctatagctaacacgtggttctcgaaattgttaattaaggccctagagaaaacaattattttgtgccattttataagagtaaatgacatttatttattaaaagtttttttttatttggacccctaagataaatgggttttaaaagtgggagaagttgaaaatgcctatttttttatacattaaccaaatttacatccatataaaatgtaattcaaatatgcttttttatgagtattatacataaattatccttataatctcacataattaagacataattttaaaaataatagatttgtgttcattgtagatggatgcgtaggttaaagtttgagtaaaattttgattagaaaagaataaaaattattttgaagtgatacggttaaaattagtagaatgattaaaataaaagataaatataataaattttataaaatatagtaaaaattaaaagatatatataatgtaatttcctcaagtgtgacctgaagtggaaaagaaatttacactttttctatttagtaaaaaataaaataataataaatatgtatatgaataaaacaaaaataataataata

SEQ ID NO: 324627 - DNA, 606 bp, Cannabis indica
aaaaacctatgccttcactactcaaaatttccttcacttttggaagtttatactgatgcaagttggatagctaaccttggggataatttatgcataataggttgggtatttaccctttatggaggggcagtttcttaagggtccaagaaacaaacttgaatttctcattctacaatagaagcaaagtttatagctttaacaaccactagaaaggagagtgaatggttaagagatgttttagttgagataccaataatcaaagagaatgtatctaaaattttgatacattgtgatagccaagcaacgttggctagagtgtatagtggaaggtatacaatgggaagtctagacaaattagtctaagacatggatatgtgagatagttgattcaaagagcagttatctcaatatcttatgtgagatcaagtgaaaacatgatagatctgtttacgaagccactaattagaaatttagtgaaaaagacttcggaagagatgggaccgaaactctctaaagttgttcacaattgagggtaacctatcttgatactaattttactagtgttaggttcaatacgtaagaacaaatcaatatgtgaacaaatgt

SEQ ID NO: 324628 - DNA, 719 bp, Cannabis indica
aaaaaaatccctaaaaaataagtttttttgagtttggtattgtattttatgatattttttgtgtgtgagatttttttatttattatattatctcattgtaagtagactaataatgctaatgtttattcactgcagaattaacttagttatttaatgtaatgtgtgtcttttgtttgaatggttttctttacgtgtcttataatattaatgaactttttttaagaaaaaaaatactcctatgaggatatagtccacttaaaatatttttggtgttcattgtatttagagagcatgtcaattacaaatttttgagaaattctaaaatttgttgtctttttttcctcatataaagaagaaataatttaaaatttgtaaagagtttgggaatgcgacaataagtttaagaaattactccatcgaatgtaatttgttttggatcccgacataacgataatgcgtattaaatattagtcatttatatttttaaatacacatcattatatataattagtgtttgcgattaaagtgtgtttctaacattatcctatggttaattatatactgtccttatgtttttataagaaaaaattattgccactacaacctgattcaaaatgtagagttacatagtatactaatttttgctatttttttacaaaaatactttcaggcggaattttttacttttttactgtgtttttttttataagtttcatact

SEQ ID NO: 324629 - DNA, 2425 bp, Cannabis indica
tatttagtttatttaaatgttgacactagttttaaaagtttatattatatttaggttataattttttgcattgtgtttttttcattatgttgttgatgaaacttattttattttttgttcaaattttattatttaagagcctacaaatttgttttattttttcaaatttattaattatgtttgttatcatggatgctatattatttggcttttattttaattttgtatttatttttaacagatggaaacagtctccgattctaatcagctagagcttggcaagaaagttgatactgctaagaaaatgaagatatgaaagaaaggagcatgtcgaaagaaagtatgtactatgttattattaaaattggtttcaatcctttaatttctgttcgatttttggtaatggtttctcttgaatctgttgtcttgaaactggattctagatgcatatttatatttaatatattttattgttcaattataatttactatttgattacctgcatattatttcagagtaataataattcgaaaggtaagaagaaatctacaaaagaagattttagttatttagataattagtttatataagttaatttttaatttaattgttttatgtaatcagtttttctatatcaatttttgttaagttgtttgatgtaacaagtttttcttatttagtttataagtaattgttaaatttttttttttttgatatgtatgtttcttcatttttttaatttactagtttttgtaattgatgtatcttttcattagtttaggcattatatgtttgttcactttttagttgaatgtcatacaaaatttgtttacgtatttgttgaccgagattttcggcaactaaaacataaatgtaataaggatgatttgaagagagttaacacaaacatttttacgtggttggggcattaatgagccttagtccacgagtctctgatattaatatataggtatttttaacagaaaatgttccaccttttttctaacattaattatgttggggttaattatagcagctgttcaagagaagaaatttcccaattgtcttaagtgcctaccttggctgtgcaccagttcccaaacctatgatgtagggtatgcactccctacgtagtagaatacgtagggtttaggtgagataatctcttaacccgtccttgattgatgtgattgctcattatggagtcgtcacttacatccttcattaccgtgtaattgtcgaaggataagtttaatgtgtttgacatgtcctttcatatacgtttatagaatcttcctccatgctgcattaaatgttagttgatacttcatctctgctaccctggatttgaaggaatgggatgctatccaactcttagaggtgaacaaaagttggatccttccagacccagtcgtggctcttggagtagctattgatttgtcccaaaggtattctgcctatgttatgactctcctttaattatctccgagtcctcgagcttaatctgccacgtgtcacataatgggcttggcacgtacattggaataaaaccatggcaatatttacccccaagtcttgattaatactttataaatgacacttgtatatttcttttgtcctcaaggagtgacgtggcacgtacctcgtgcacatgtgggccattttaatattcataatcatttcgccttgtgttttggtaggcaacgattcgaatcccgcctgttgacagacaccttcattaatgtcgatgtcagaaaggtacttaaacatttcaactgcccttttctcttcatctcgtgctcttgccctagtcgttggatcagtgcgatttgaatcgttgtgaacccccaccgctagatggtacttaaatgatgttggttcatatcttgaggggcctataaaacctcttgtgactaacttacttacacactacatttcaactttcaggcttacaaaccctctcgccaaaattccagacttctccgatttccttctactcttcctctgccgttgccaggtgaattactacaatcgtgtggcggcctctttatctgctatgcatttatcatgtaagttcttctttctattttacttttccatatagtagagcaaaatgtgacagataatgagtcattcttttttaaggaaatcatatgcctgttattccttggtaacgaccatggcggttatccgtggaataccctttttcgggtgtccgatcatgtttttgtattcccttctttttttcttttttcctattttctttgatgggagcaaagggttagagaccctccattccatgtttcctctgtatgttttttgtaagttaaatcgtccctgcacattcctattcttttcccttgatttctctatattgcttggatgtctttcacccgatgtttgccactgtgaatcgttagattc

SEQ ID NO: 324630 - DNA, 1082 bp, Cannabis indica
agccggatagagtttgtacttgatgaagttagcatcagtagccaggagaaagatatttcgttcagtaggagggagttggagaattttttgaggcctcttcctgagttctagtgttaacggagggcggtagtaggacgacaccaatggaaaactagtataggtggtatccatccctttgacaaagtagaactcgtcaacgaagcctcctatctttgccacttcaatggtcgttgtgctagtcaaccatgacttttcgattatggagaaatagaagtacctcgacctattatgcttggggcctcacttgatattgaatagccagttggtatcatgaggggatgactcaccccatccttgtgaggcgtagagtacaaacagggtcgacaaatacttaaggcccttggggtgaactaggtcggacatatgtggtagtaattgcctattttcttaaagtatggaagcaagggaaacattacactctgtttagtgtgagctcccaaccaagcaccgtagccttctcctgggttagtagccagttggccggggaagggaaggaagcattcgacattccctataagaccacgatcgaggaaattggtcatcttcttcatgattacaacggagggtggagaaatccattgatctcctagtggaattttcttcttcaaaagaatggcctcggtgtattctataacaacgtagtcctcgccagtctccataacatcccctgcctaaaaaattgactcttctttatcattgtagccaccaaatgacagcacccgagctactcttacttcctcatctcctttgacattaaaaggagtagtaggtcggaccttgcactagtcctccacttcttggacttcaacgtcccctacaatatcctcttctttggtagtaggataggtttgttctgccctgggcaaggtggccagttggtaaatgtgcgggtcagataatgaagatttttgtacaatctgcttcgtctacaccatcatcccatgcttgggcaaattttttcagaagtatgcctagcaatggtcacaacaaaaatgtcgacaagtctacctatagcagcaggg

SEQ ID NO: 324631 - DNA, 1216 bp, Cannabis indica
aacccctttcactagttagaaaatattgccttttctgccaatatattttattttgaacaaaattatattttaagagggattcttttccatgattataaaaagatagtagagattagtgatgaatcaagaaagtcgttttgggtctagatgtctttggactattttaatataatctatagaaaaaaaaatgacactactattattgaaatggtaaattttagaggggccaatgaaaagggtataagctggctagaatttatttatttatttaagaaatccactctattaataattaaaaatcttttaaactagttggagaaaaaaaaacataagattacaaatacaacgaaaacaagatgagacttgtaagtggacaacttcgttacttaatttaggaataaaattagaaggattataagtaagaatattaacatatacgaattgacaaattttaaatttgcgagataggagaatggtggagattgagaaccttggagcatcaattttaatctaataatcaggctaccttccattataaaattattttgttttgcaatttaaaacattaatttggaataaacaaaatgaattttcacttatttgggatgaatctattttcattcttcttaaaaaaaaaaatacatttcaatttgttagaataatttttttcttatataattttttttaaatgacttatataattatttcattcttacatatgctttaaaatagagattttttaaatataatatttaaatataatatttatttttattaaagttaaaaaaaattaaaaattaatacaatacaataaacaaatgctaatgggaaaattaaaaacaattaagtacaaaataaatagaaaaactttacagcttcgctaaacatttttaggagtttaggaataggtattttatctaaagatttagagcgtttgttggagataaattttaacctttgaatttttttttagctcttagctattataaaatatctattagggtgttctaagattaaaaaaaggctacattaaatactctaaactcactttattttaactctaaactcattctctattttaaaacttttttaaaattcattatttgtgctctatatttatagaattcaatattgctctaaatttattttattaattgtttagtagtttttaattttttttttttatatgggagatgtataaatattaatattatat

SEQ ID NO: 324632 - DNA, 1500 bp, Cannabis indica
aaataaaaaagccccaaaaatatttttttagcagcttataatatttaaaattaatttttttttagtaattacacaatataattaattacactcgggtcttgagaatcaaagggtgtaattggaatcttttaattacctccaaaaatgtaattaatgttagaataaatttatatggagtaatttatttgatttgatttataaaatataattaattagttaatatttaattgaattgttctaattacaataagatttaattaataaatttaatttttaaaattaattgttaaaatattttgacaattagtgtggcacaaatactgatacaatatatctcatttataaatataggatactagtctccaagcttattactcattcggtaaaacacaataaatctatctaagagagttttaagagtttggaaacctgaatactcatactaataaagttttgttttcatttgtagattaaagctcacgttggattgaaactcaaaaaatctataaccggagatatttcgatcatttattcactatgaatatatatttaatttattttatattttatacacgatcatatatgtttcatattttaaatataataatcttacagttacttttaattacactaaaatctgattttttgatgttttcgaacacaacccttaattattggtgttcttagtaaaatgggattgtgagtttgattcgaatccaatccaaaaattatccatttatattatattaacatgtacattataggcaacttgagacttgcgggaattattcgattaaaagtgcatataaattcttgtaagaatctaaggatgcttggtgccgagatgccaatacagatttttggaagcggctttggtcattaaaaattcctcctaagatcagtatttttttatggcgagctgcttcgggtgtgcttccaacttgttttcaactccaaaagcgtcatgttcatgttaatgttgactgccctttgtgcaactctagtactgaaaccattcaacatgcgttggtggaatgctcgtttgcaaaggctgcttggtatcgtagtatagtggacgtcgggcctggggctgcaacgttcagcagctggttgttgggcattttcaccaggggcacgaagttgaaatggaggaagcaatgatggtgagttgggctatttggtgtgcgcggaatgactttgtttggcaaaaaaaaagttggcttgcttcaaatattgtaacaccagctagaatcatgcttgatcaatataaatttgctcaggaaaggaaggaccttttgttgtctcctttgaatgatggggggcagaactgtgagcggtggattgcacttgtgttaaacaagattaaagttaatgttgatgggctttatttgagcaagagggccggtttggagtgggatgtgtagctcaagatcatcatggaaccatagtagaagctttcaagaagggaaatgttgggtatgtccaacccgaaattgctga

SEQ ID NO: 324633 - DNA, 1340 bp, Cannabis indica
gttccaaaaatggtgagattttttggtaacaaacactactaccaaatgcacaattttcattggtcaaaacgtcttaccaaaataattgaccgagataaaaaataggcagagattttatgcttcagtagataacaggagctaagaaacaattaccgtcagctactacattgacgctaaaaaaagaaccggtgaaaaagtgaaaaattttaaaattatcttttacattttgcttcagtgaaaaaaagatgcaaatttctttagcttcggttgtaaacagaagttttaaagtttgcaactattatctaccgaagcaaaagaatttaatttttgtatatatataatatccaatgggctttgggcccaataaaaaaatcctaacttaaaagatatacttaacctaaatatcacccacagccgcaccaacctttctctctctctctgtccctctatctcacccagtcgcaccatggcagctacactaccatatttgcccagccgaagtgcccatcggagactgttgagatgcccattgccaaccgcctaaacgagagccaccgcatagccaccccatcagtcacgctatactctctctctctttctcttgatctctctctatctctttccctcttttgatctctctattttgaatctgatattgtcattttttttaagtttgcggtggtaagataatggtggtgtcgtggcgcgcggtggtgtgctctcccgtctctaaattttttgtaagattgttgtaaatttgagatattagatttgtttatgtgaaattgaaaaaattgtgtgaaactaaaaaaattcgtgtggcatcgatctggttataattactagatttctttattatttttttaaaaaaaaattgctttagtttatgaccgaagcaaaaaacaattagcgctggtgcactaattttgtttgcttcgattcataaccaagcaaataatcaattagcgttagttcataactgaagcaaaaaatatcactatttgcgtctacgattatagcgtcggctacaccaaccgaagtaaattcattatatgtcacttaaaaagtgaagtaaaaagccttttttgtagtaatgaaaaaaaataaaatattttaacggtaaaaataacagtaacaaatatttttaatgatatttggggaaattattaacggttcagaattaacttaagtgtatataaaaatatttatatttatattgattctcataatttaattagtaatcaaacgaattattttttaacaaaaaatagattttccttcactttaaaattataacttctaagcattacatgtgaacaatttaatgtaaatacaaaaaa

SEQ ID NO: 324634 - DNA, 641 bp, Cannabis indica
caaaactaattggcaatgggagaagtaaaacattcatcttatatatcacaatttatttccagacattagctatgtgggactctctaactgggatcccgctataagctaagtattatcaaatttaaagataatttaagcaatgttctcacaagaatcagcacgacttacgactctacagtgtgacttacgattatgaaggatagattgtttagttaccttcacacttaagtgatacctaactcataacagttttatctcttcggtacgactcattatgcacactatcactacttcagaaatcttttaaagaaaatttaaagaacattttgagagaggaataatagaaattttatttagtagaaagcttttctgatgccccttacaatgaaaaggatggctctatatatatctatttacatgaggtaggatacaaaataggaaacttcctagaaattacctacaagcaaacaaacatacaaaaggacaaactaacaataaatggacaaaccaacaaaatgacaaacagagtaaaggacactctgacaataaatggacaaattgacaaacataaaaatgacaaaccgacaaacaaacgatttagaaaaaattcctaacaaacatcatgactattaggaattttt

SEQ ID NO: 324635 - DNA, 519 bp, Cannabis indica
atataatgccaaaacacctatatgcaaaattaaaactaagaaaagtgaatttaagatgaatattaataatgtaggttacgtttcatttctttctatggactgatatggttttctaataaataacaaaaagttactataaaacaattagaaagttactagcttcttttcttcctttaagttgacattaatttggctatattggttacgtttataaatgaattaatgtgtaacatttgtcaaactaaaataaatagcagtttttttatgtatatgttggagattaatgctagttgatcttattcaattccaagttcgaaactaattaaagaactcatacacaaaagttaaagaacaattgctcaagaataaaatgttatattatttataataatataatatatagattaaatatgtgtaataaactaataatatgtaacatatgactatattagttgtcatctttttgtaacatttggggagttgttactatgagtaacctccaccattatcaccaacatt

SEQ ID NO: 324636 - DNA, 1156 bp, Cannabis indica
  modified_base (23)..(23): a, c, t, g, unknown or other
cactatttttataatattttaanattatatatataaaatgaaaactaataattttaattatatacataataatataatatctggtgatttttcttatattttttttaaacattttctcatttttaattagatgggagactctatgttcactttaaatgtgtgtttttattacttgttagtagataattgattactattatttgtgtggtttatattaaagatttgaggaataataataatgttttttttttctctcatttattacaattttgccttttaactatagtaataattggtaacagaacagtacagtgaatttcacgtggacattattaataaaaatgttccaacaaattaatatataattgtttttttttaaaaagaaaacaattaataataattcttcaaagttattacaatatttatttaatttgtaactcatatatgtatattatgtatttactcacaaaaaaatcactcatttatatattgaaaaatattaattattttaaattctgtatttttataaaaattactaattgaactatttattttaataaataagaaatttaacactttattttttttaatatattactaaatagtattttaaactgattttctgtcaaaataaataaacttaatataataacttgatctagaagtattatgacaaaactatttaagtttacaacatctgttcgtattgggaattatcttcaagttagttatattaaaaacaattataaaaaattagagttattattttaaaaaatacaaagtttaattttattatttaacaaaatggaagatacaattgataacttttgtaaaatacaaagtccaaaataatattagctctataaatatttacattttttattaattaaataggttttaattaaaacttaatttcaaagttgttcttaattaaatatattttatgtatacttcattcatgtattttatgccaactatctcaaattgattttagttatatatattaagattaagcaaaaatcatgaattgcgttttttttttttaaaaaaaaaaaaatacatatttatatatttgatattaatgaatttcttgtgttgcaaaaatacccttcaaatctaattttgttattccatcaacattttagtgtctcaattg

SEQ ID NO: 324637 - DNA, 2112 bp, Cannabis indica
gaacaactaaaaaacaccagtagaacaccagtgaaacttaacacagtatactgcagtatgaaacttataaaaaaaatacagtaaaaaagtaaaaaatttcgtctaacagtatttttgtaaaaaaatgacaaaagttagtataccatgtaaatctcccataaaaaaatagccttatttaaactatgttggttgaaattatatgtgggcccaataggctttaatttttccattttattgaaacttatctttcttttctcaaataatatttttcattctaagttcataaatgatgattttatctatttaataattataattaattatcaaataaaatgttcatttaacttatttattaattatattttttattgtctcttaattaataaacaaaccataaaatctcttcttcttcttaaaattatccttgctttgtgaaactcataaataagacatagtcattttagaattataatcgattaataaaatcaattaattgagtctacaagacaatattatctcaagtagtatgggaaccataagcctatataataaagctcccaataagtagttcttaaatttaccgactaaatgtattatcttattaattcctcctgactccactataaactcagaattgcactcttaattacatagaatgctccattcaccaagaatagatacattataaattattcattatttcaatctaaataatcaaagatcgtacataaatgatttacatcgactatggacaaatttattattttacccttcaatgtattttatccttaaaacacttagcttcttataaatgatatttcagtaaactaatataattactgaaataggagctcttctatttatgtcgttaagccaagctataagtaaatcatcatttcacttctaactagttatagaagttatagattctatatctatgattaacgtccccactcaactgtactaccatgtccccaagatgcaagtattacgccgatctaaatggtcagctgtaacgaacaagttaaagaacacgtgtaatactttaagcaagaacctaattatttcaggattgatcttttgatttaatatcaactaagtgacattgacttagaaaagacattataataagtttatgatatcttttttactgtcaatatttgtcaagtctgatgtatagccaatacatctgatactagtatactttgttaatgacctggaaaaaacattccacatattagtgtgtaagtaaattttatcgttgattattacgtcagtataaatctcgtgcactgatatatcatgagactaaatattttaaagcatataatcatgattattttccattgtgcacacaacactattatcatgaatgacaatatgttcaagatttaatagaatctgtatattaaaactataatcataaaaactacacgtagacctaaatgatttctgatcttctattgatagtaaataagattatattgaaatgggttttacttagggcataaaatcccaacaaactcccacttgcactaatataaaactagaagtacattcaatcaatccattgtctcgatattcatataaagtgtagtgtgtttgactttacacaagtaacatgatctttaaggttgaaacaactaataaccttatcaactattactttcttttgtgttcacagtacattgtaaaacgtcgttatctatatgcatcactccttttgggatattgaattctttactacatgataattgcatctgaattgtaacaccttactagattagacacgttatcatgattttaatttgttgtgcactcattagttattcaaaaagtttattgaaaaacgtgaataactaaaattttcacaattaaactttaaacttgaatatataaatattttacataatttggatcctatttttaaagttacaactgttttacaaaatagttagttataaaagttattgcttagcgagtatcaaaataaagcatgctgccctaaggattgaacactctaagtctaattgccccgagtacaatctccatttgttcgagctcactactgttcaaccttagctttgcctttacctacacatataaataata

SEQ ID NO: 324638 - DNA, 1380 bp, Cannabis indica
actataacatacataattatataaaaaatagtttataatttcttcctataaaaataaataataaaaaaaaaaaaatcacatctataaaatatatgctataataaattgttgagatggaatggaggatgaactgggtctggtctggtctggtccccatagccttagcttcttctctttgttccttttttttttaattgtctctcaaaatattcctttccttttctggatgcccacttttccttttttttttcttgtttcctttcttactttttaatttactttaccattttacaatttatattataaatacacgtttttttaaaaaaaaaaatggaacaacagttcaataatataaatagactcattttgttactttttctttttcccactaattatcatcacataattccttttacctttttccctactctttttcattgcaatggaaataaatttttttagaacattattatgtctgtgtttcgattcaccattagcaattaataccacgtgtatcaataaaatgcaaaactaattaattaataatttagcagaaaccatacatgtatataaatatcacaatggtacatatattatatcaaataatattaaaataggctagtttagattgctattttgtgtgacttttacatatatttatttctttttcaattattatgatcatattgtgaagtcaactatgaccgaattgctgctgtcagaaatgtgttaattaattcattaatatatggttacggtctaacttagacaaactatatacattaaatattaaataaagaataataattaacactgttaaaaaaaaataggtagctatagatgccgccggcgtaactatttcttttactaaaaaacaagaagaagaaaacaaaacaatacatatataaactttatttaattaatgattgtgacaagtgtgcaatcaaattgaatgacaattgactcatccaattacaagtaaccattaaatatggatatttaattgtgattggattagaatgaatattatttttaaatattcaattgaattcggaggttagttgtggtgtccaaataatctaatatatccaactaaagtatcatatttacacctgaaaacccatccatcaagcaaacttgtaacgtccccgcttcaagcttccattgggtcattacacccacggaataatggctcttatacacgagtacatcactctggctgcttcatgggctgacaactgaccctacagaccaacacgagtgtttcccgcgtgctttgtcctcactcgcacacttcctgggaaaactcccaggaagtcacccatcctaaaattgcccaggccaagcacgcttaactgtggagttctttcgagatgggct

SEQ ID NO: 324639 - DNA, 1713 bp, Cannabis indica
tttaccatcaaaggtagttactcgagtatgtatgaattgactcgagcaactgatgatatttacagtaaattgattggggttccaagctaaaataattctccccccttatgccatgtcaaattagaagtaaaacaccaacccgaaaacatattcaagtataaggctccaagctttggggcctttactctcgtctcaaggagaccaactaaaacaactttttgattagcaataaattgcttgaccatatgttgcttttgctgattgttgattcctcggacgttccaacatatgattttatccattgggaagagagggatcctccccccccccccctattttcccaatttcctcctctgttgtggatcagtcaataattctgttgtatccccctcagtaatagaagtcgagtgcaggacttgaaaagagttggaagtagagggcccaatctctggagcttttcctttaactttccaaccttttgtgacctctttgaattccccatctgctgtttgtgctttctcatctggtttcctcttatcattcttgactatccattcctttttctgactttctttttttcagcaattagcagtagcatggcctattcctttacaatttccacaactgataggtttccattcataaaagatttcaacaggtatattgttaccatattcatcctcaaagtaaattgtacctgggaaatcttggtgaattgagacttggataagaactcttggatagcttagtttgtctctctctttggtagccgcatcaaccataataggctctccaacttggcctatgattttgaacaaagctttttgcccccagtatttcagctccaaatcagtaagctgaacccagattggaacagtccgaatgtcctcctttttgaaattggtattgggatcccaagccttcatgattaccgctctcttattgaagaagatatagcctccattaagaacttcatctctatgctccattgtatcaaatctgatcaggaaaacaccatacgagagcatccctactttatcaattttcccactccatatgcgccgaacaaatccatccaaaattgataatggtggattagctcccaacacataacaaactatagctgttttccagtaggcaatttcttcttcaatgtcttccaaagtgatcttaaccttactcgctttttcagaattgacaaaggtagactctagattcctaactacattctcagatctgagaattggaggtgtgatcgagttacctttagcaattgaagctgaacaaatcctgttagcctccatgaagtgtgcgaaatcagatcgtatgtcctgctgaagtatcgatctcaaagaggattttagagacagaggttcaggcattaagtctcgctctgtggctgctgctgttgttagaaccgcatcagctccaccctcatcctcctcatccgttagctccattggttccacccctaatatctcttccattgacttagttttcttaatatcagcagttgatgtaggtccttttttcttctttttagctgactgttgaattttcccctgaactttagcccttgttttcgccatagcaccagctcgaagagagctgcaagagagagagctcgagagaaaaaactaaacccttatgtgtttatttttattgttttagagaatttatatttaggatgtaatgaaacatacttgttagtaa

SEQ ID NO: 324640 - DNA, 910 bp, Cannabis indica
ttggttagataatgccatatttagtagcatttactttttatgtcatatttatcataaccttaatatatttttccatatttttttgctttaggcaactctccttttattattaatgtaagttaatattagattgaatttcctataaactttcccacgtggtccaaatatgcactgttttttccctatcaacaaatgaacaaccaccttctctatcaataatcatattagaagtgagttagttgaggtcagttctaacatttgggaagtaagagtttaaattctaaagatattattagtacatgccttggtcgggtttagaatttagttctaaccaattttaaatactttataatttataactcaatcttactagttataaattatgggtttccatagattataatccatttcaaaattggttccaagtatgattttcaaaatcattcattcataccgtatcataatgtaaaaaatgacccaattaaagtcttaaatgaagaaattcaaatttttgtagttagtacttaatctatatcatccaaacataaactaaagtcttaaaattattaagggtgtcctagtaaatagaaatttaaatcgactaaaagatttatcatgaataaacttttaaggttattagcttttgaaatttttagttatttcactaggttggtttggattggattaatttaaggcccattttcaacttaataagatccacttatgaacattataagccattttcggacacgacttggttggattgggttgttcggtccataacttcatattgggccatatatgtgcggccaacttaatagggaaaattacatgaaatatgggatttcataacaaagttagaaaaatatggcatttttaggtttgccacttttctatggcattttttcac

SEQ ID NO: 324641 - DNA, 928 bp, Cannabis indica
ggcagggcagcagcctagagttttctccccaaactcgagccaaatccaaatcaaacctattcaactgctccatatcaataaattatcataattacaacatatcccaagcatcaattaactacaattcatccttttgattaaaattgcatattcaaaggaatttaagcttaataaacttcacttgaaccattacaattcagccagccctaactctagcttaaacaagctcaatcaaactttaaatccaatctaaaaacattatttaatctcagtttaacatctctaccccaaaattttaaaaccttaatccaaaactaacattaaacttgaaaaatccataaataacatagtaggaaactcacctcaagaacttggacagcaactaaggttgattttctagcaagatttaattgaattaggaagaaagaatttggtttccccttggttccttctaggccgaacagaagagagaaagagagagaagactagagaggttccttagttagggcttcttccccttcttattcttcttctttcctttctttttttttttttaaattctttaattaataacttaagaaaataaacttataccatgcataagtctccagccataatattctaagtaagacaaaataatattctaacttataaattactatcttacccccttccacacacactcaaactaaaacacaacttgagggcactatggtcatttcaactcaacattcgtacttcccgacattttaacctagtccgatataattccaattcaattcatcttttattgtcgtgacattctgaccttcctgtcaagttccacagtttcctggcccaaaatattttattcaaattatggtatctacgatacccacatattccaatacaatctccgtaattaataaattacgctttattattcatt

SEQ ID NO: 324642 - DNA, 756 bp, Cannabis indica
gtactttcacggaatgtattccgtggaacattaaatggatctcatggtacattaaatgagtctcagggtacgtttctactttttaaccctaattacccatagatcaatctcagccgtcagatcaaataactccctcatctgacggttgccgtacaccacggattacaatccgtgaaagtacaataacgggacaaaatcatatccctatatatatatatacaaagaagctatattgagaacactaataactaactctctaacaataaacaacacttaactaatatttggataactaactcactgttagtattcttgatagatataataataaatatatatatataataataaatatgttaataataactgttattaacatcctttaagctttgcttaaaaaattatcaatgaaccccatcaattatattcgataatacatgaaagtaaaaaaataatacaaaatattgcaataatcttctacacttctataaacaaatactctatacaatctctttttttttttttttttttcttttttcaattcttattggttcaatttccttccctataacatagggtaaaaacgtaaaaacactagcccttaacataaaattactctatatgtataactagggaatagatccgcgcttcgcgcggttttaataattttttaaaattttatattcaaaaattaatttttagttacgaataaaatttcaagtctaatactattttatatttttttttatgaataat

SEQ ID NO: 324643 - DNA, 416 bp, Cannabis indica
ttaactatttttacagttaaaaagtaatattttttctcaacagtcaacaccatgtcaatgtaatttataccactttattaagcaacatggacctcatacaatcatttcggcccaagaacaatttattaaagatgatttttcataaatataggaatttttggtgccatttactattttatggcataaaaaaataaataaaaaagatatgaaaaaaaaataattaaatgtaaaaatatgggaaaccaaaaaatatataaataggcttaaattcaaaaacccatactttccaaacagaaaaccatctcactcgatctctctttcctattccctacaatttctccgatcgtcactctaggaattgatcgcacgatcaccagctgcggaattgaccactgcaattctgttggaaattattt

SEQ ID NO: 324644 - DNA, 939 bp, Cannabis indica
acacatatacaatataaaattgtacatatataagaaatatagactgtttcaaaaaaaacaaaaaaaatatagaagaagatacacaaaatatattatataacatatatattatgaagaaaaatacaatatacacttactcacaaccttgaatgtagattagtggagatcattatgacttgaacaagacattaattatcacttaatttgtccaaaagtttattctttctatctctaaacactaagagcatcttccaatattcatgctctccaaacaaactccttacctaaaatatattttagggagtgagcttcaaaaaaaaataagctccaaccatacaaaaatagctccttatattattaaatagatagggagctctctacttttttgctaaatttttttaatagtattttaatcgaaaaaaattattacttttttattattttattaaattaatttatatttaccaaatttaaattataaaatattattaaaacaatcaaaattaactaaaaaaaagaacaacaagaagcaaaaaaaaataaaaataagttctattttaattttttaactattttaattaaaattaggctaaaataaagagtatgtttggaaatgctttaagggaactcattaagatataattttcagaattatcaagtagggttttctagcaaagtaagtttttgatagaatttctagtcctctcagtaggtgtaccttaatcttctttatatagctagtgtttaaaatatttctatttaaaattctaactcataactccatccccaagaaagatacaaaattgaataattcataattaatagttatataactttatatatggtttagatatattttataaaaacatttataattataagttacgagcgcatacaattagtttagagttaaactaaactaataaataaaatatcaat

SEQ ID NO: 324645 - DNA, 631 bp, Cannabis indica
tattcagatttatgagtatttttcagggcatctttcatatctcttttgagcttaactaccactatttataattacacaatgctaagttaattataaaattgacaagaatatgtttacaactatcgtccctaaaatcgtgggacttgattacatatcacatagtgtaaatgcggttttgattttgaaatcatatagatgtgattttcccgttttcattgggtcaaaattatcgtgtattaaacacgtcttttaattgttgtatctggagttgtctcgatagaaacttggttatagtgatgccaatcgcaagctggggctattcttccttccgagattgaggatgtatgtctgatgtcgaccgcggttctttctttcaaagggtcattctgactcgcaagggttgtaagcctctctcccgttagctagatgaagctataggaagtcttcccatagcgagatggtcacctcgttttactcgctcttgagtcgatctaacttttacacatagtttgttcatcgtacgctaaggactcacgattgatacatgtcacttcctttggtgcctcactattcgcatttagggacatatggtttctcgctaatatactaagtgtcagtttgtacattgatt

SEQ ID NO: 324646 - DNA, 827 bp, Cannabis indica
tcaaatttagttttggaaaataccaaactaattaagtattattatgtggacctaccttttaagttttcaaaaatataaaattgttttcaaatcccaaaccaatcaaattctaagattaaatttaaatacaatatatatcattaaaggtagggcgataaaaatataattatcggtatttttttaatgcaataaaaataatcaattaattagaaggtaaaaaatttaaactattctaaaatatatatatatttttatgtaaaataaaccaattaaaaattataatttcaatttgtatgaagtatattttctagtattaaataaatgaaaacttaaacctttaatgagtgtaagatatttgtttttttatcaaatgatgtcggccatgaaacatattatatagaaaatgtgggataaaatactgaagaaaatgtaaagtataataattaaaaacaatgtatatgccaaacttttgatgtcaagaacggctggattaatctttaccggctggattaatctttactatacatatatatatatatatattatattaataatttcatttgtagtcaaatgcctaataactaatgttaaaatttaggatatgataattaagaattagttcattcatcttatatatgataatttatttatacacataaataatgtgaaactaactctaatacaccctctttatgtttgggcctgaaaaaatgtgaatataacgatcgatctttaagagaccacatgaccgaacgtgatatttgaaagaatcccacaagaccaaatatcgaaaaatttgtgagtgtacacgtcgagaaatttgtata

SEQ ID NO: 324647 - DNA, 1255 bp, Cannabis indica
acaaaacccaacaaaaaatcacttgagccttttgcacttgaatagtcatcatattggtcaaggcttctacttgggcaattaacttagtaattgcatcaactttgtgtaaacctgctactttcttcggttggcttctctcattttggccattgttaattattcatggccatctcctcaagtaaatcataagcctcgtgcacttttcctgacaaagaccccaccaaaaggagcatcgatgtgtgcagatattaaccattaacccattgttgaagttgtggacttccatccacttcttaatcccgtgacgagggcacattctaatcaggtcaacacagtggagtataatcatgattatatatttttaagtttatgtctcatgatttatcagtacactagatttacactaacatgataatcaacgttaaagtttactgtacaccttggataagtgttatgtcctttataggatattggcaaagtatgttaggatcgaatatatggagtatacattggacaagaccgatactgaacttggataagatatcataaacttaccattatatccatttaagtgaatatcagttagttaatcttaggtcaatagatcttaatccttatagggttaggctcgatcttaattgtattatttatgttcttagagttgttcatgaaagctaaccaatggtttgggccaatacttatatcttaggaacatggtagtataattgagtgagagcgctaatcataaatatggaatctattgcttctataatttctaaaagtggaatgataatttttttcgagcttggcttaatagaaatacatgatggaggtataatttcaataatgatattagtttactgaaatatcatttataagtagctaagtattttaaggataaaatacattgatgggtagaacggtacatttattcctattcgatgtagataatctatagaggatctttgactatttggattataacaatgggtaatacaaattgcatctatttttagtaatagtgtgttctatgtaattaagtgttcaattctaaatctatagtagcacaaggaggaattaataagttacaaaatttactttataaatttcggatctacttattgtaagcttgattacataagatcatggtccccacactagttgagataatactgcttgtagactgagttaattggttttaattattcaattataattataaaattagactatgtcttatttatgaattttcact

SEQ ID NO: 324648 - DNA, 443 bp, Cannabis indica
atctaattaacctcaccttgttcacagatgataaaatagatggtcctcttccaaattctctaaagcgaattgaattaggggataatcaaattgaaggtggatcaataccaaattcattggggaatctttgtaatcttcaggagttaagcttaaggaattataatacaactctttttgatgttttagaaagtcttaatggttgtgctaaagattccttagaaattttagatttgtcagataaccaactcagaggatcctttcctaatcctcaagcatttcccatctttctaagggaattatacttgagatgtagccaaatagaaggaccattgcccaaatatatatcaatgttttcacaccttaaagtgttggatgtctcttccaataatcttaatggtacattacctgaaagtattggtgagcttcaacatcttgagatattg

SEQ ID NO: 324649 - DNA, 1524 bp, Cannabis indica
acaactgacttcccaatattttcttttacctcagaattgttcaaaaatagttcaaagcctcgaagaaggagtaaggacgatttgaaatcacccttgacaaaaataaaaaataaaataacaagtcatatgcaaagcacaaatggttaagtttgacactcttaaatctcaggtggaaagaaaaatctccatccttaaaaattctagccatctggctagaccctgagacttacaaaacacaaaccatccaaagaggcctaacccaaatatttgaaccaaaattctacagcgcacatttctaaatcaaagcaaaaagtaatggtttgggtagaagaaatacttacttgcaaaaggtgtaatgaagaatcgctggttgcttatgcttggttaaggtgtcttacaaactgcttgatggtttggtcacgactcacctcaacgtagaactctttttttgtatgttgttggaaaatctggtgatacgatttgaaatagattctcgtcctaaatgcaaggttagatagttgcgacctatgcacaatcactagaagttagcaaaaagagaaattaaggtctttggttcgagaagtgtataaagaagacaagtattcttctaggtcaagaatttttggggaggttctataggctaaggcttgcaatttgaaatgagaagggaaaaatgagcctctttgccaagttttccatttgtatgagtgggaacgacttagcatattttgaattggatgggatagatcttaccgatcaagagctgctccatccaacgactggggacttgtagagtttgcatttaatgcaccttgggagagagaatggggcattcattactcatcattccaaggcaacaaacctgatgcgccataaactagccatcttttcaagtcttatcgccattcattttccacaaggaacgtacctacgcctagtgcgtaagccctacgaactctgtttcaacaatacaacagttgtacatcgccaatgagaaatgttaacccttcaactgtcctatataacatggaagactgcatatgcattttaagatgttgcttgtatatcataataataactcaagcatccagaacgaggctgcaagctcccaccattcgagagtcctgggagcttggggtaaatgttatccgtgttctcgaataagtaacatgtggaaatcatagaaggattccactctagacgttccatgatcaatatgtatttactgcttaaaagatgtgaaagagactattatgttctagaggctgatcaaaggttctcaatgttagtaaggataaaaatctaggagtcttactatcctttcgcgatcgaaaggaattagagttattcgatgcttaaagtatttcaaaaaggtaatggactagtgtgatctgagaaggccttagcttgttgatcctagagttcattcatgagtgtcatatatggaacttgaagcgatggttatccaccctttgacacagaatcaaatcttgtcccctgtgtcagatctttatagtgtgcgta

SEQ ID NO: 324650 - DNA, 535 bp, Cannabis indica
ttaattgttagatttatggtcattttgtatcttggccctttttttattggggtgacaattcaagtcatgacccgacaacacaataccaactcgagatgaatcattgcgagttagggacctagaaaatagacgcgggtcgaaaataggtctaacatgaatgacatgattattattatttgggttggattagggtttacgcacgtgtcacgtgacatgaaatcgacacaattaacccatttatatccaatatattattaaaattattaatttatagttaaattcttttttattttcataaaaaaaaaacagaaaaaaaaaattatacttgataataatatttttgtcattctattatttatttgaaacttgatatatatacatatagaggaagactatgataggacatagcataagttccctatcggtagggaaacttttttgattattgattttagatcatgtggttattaagatataaggtgtatactcttacgatagaactgctaatatataattaaaactttatacatattat

SEQ ID NO: 324651 - DNA, 554 bp, Cannabis indica
aaaaaaaaagaaagaaaaataagggaaaactaaaacattttgtcttagatataatatctaaagtaggctctaatagatttttttttcttttatttttattccacttgtgtttgtttgtacatatattgtaagctaaaattataatttgatttttcttgtagaaaaatataaattgagctcttagtgtaatttatcaaaactaagtcaactagctatcatcactataaatttgtaattggaaaagaaattcaaccaattatgtgatagagcactatcactaacatttcattgactagatagtccaccaacattgtataaaatgtctacgatcataatcttatagtcaaacccaacataaatttggattatttcttcaacactaccatgtattattaatcttattacattataatatgaggaaattacacttagtatgtgattttaaaagttcttatgataaatatgacacatttaagtttggccaatttatatggtatttttttatttttagatttttttatggtatttgatatgccatatatatgtaattaggt

SEQ ID NO: 324652 - DNA, 984 bp, Cannabis indica
tagatttgcagtcactcaatatgagtcactaaactcatttttctagtagtgattacaccctttatttgcttaattaatacaatgcttaataatacttagcccttacccccccccctcccaaaaaaaaaaaaatataattccttggagatcttggttcgacatcacattccaaacaatattagaatttgctaagtgttaaaactttggttcccatatctgctggattctcttcggatggaactttatcaatttttatcaacccttgtgtaaccttttctctaatgaagtgatacttcacatcaatgtattttgttctgtcatgaaagacatgatttttacacaagtgtagagcaccttgactgtctgtgtaaactacaacattctcatgtgtgatcttcagctcgtttagcagtccttgtatccatataccttccttcattacttatattgcagcaatatattcagattctgttgttgataatgctacaacaagtggcagttgagacttcacgtttacacaatttccacacacaaggaaacaaaagatgtagtagatcttctagaatccttatccctagcaaagtctgcatcaacatagccttccacttgaactgagttgtatcttttctgatattgtataccatagtcagtagttatagttatgtatcttagcatccactttaaagcaatcgagtgtgctttttccaggattttccatgtatttgctcagtgtgcttgttgcataggccagatcaagtcatgtgcaaaccattgagtacatcaatgatcctattgttgggttttgtaccctaaataaaacccattacaatctgattagttatcaatttagaattttgaagtgatttaagtttacatgtattttacatgtttatgctttaatgtacatatttaatatatgcacaaaatcaattaagtccagaacatatattcattcacaattacagtattgtcaatacagtggaa

SEQ ID NO: 324653 - DNA, 1253 bp, Cannabis indica
taatgatagtatcttgtacctgaaccagtggctcactttttttaagtaatagagaagaggactgaaacatgccactgaaatactctactaagacaaagatttttttttttctgagctttgtctgcaattttggaccaagcccacatcatctctgagttcatcacctaacttaaatcttaccagccactgtttattccatgaattttatttattttaatcctttaaatttgaagcaccaatcgatctaaagaaaatatcatcctttataagttaccatatcagttctaactttgaacatatattgagaagtcataggattgcaatttaaatacaattttatatatagaaataattaaatagcaaacaatatatattatgagagagagagggagagcgagtataatttgtatttttctaatatattgaattagtattttagtcctagaattagaatgaagtttcttaaaggaaaaaaaacaaagaaaaaaaatataattagaatgaagtggccatcactactaggaaaacatcctttagatgcagtttttaaggccttttagtgtcagttttgaccaaatttgctactgatgcttatccaagtgacgttgtagggtctaaaataactgacaccatatgtgccctatggcgtcggttattttctaggaactgacgccatatgtgccctattgcattggtttctagcaaaaaaatgacgccatatacgcccataaccgatgccatttaccccctaagacccgacgtcaaatctctaatgatttttttttagtttatttagtttaatttaatttatttaaattatatatttttattaatttatatattatattatttaatttaaatttaaattagatatttttttaaaaggtaaattaaggggaattaccccatatactatttttttaacttttttttttcaaatctacggtttgggcttctaaagtagttgcagcgctagttacaataggagtttctgtacgattttttgttgcaatttaagttccaacgctagttgcaataggggtttctatgtagaattccgtaaaaataaactaaaaaaaaaaaaaaaaaaaaaaaaaactacttttgaagtgtaaaaataaaaaattcccaattaaatattatttaaattaatattatgattagccaatatacctaatttcatttcatagaagtaattaaataaattacaattaaatattacacaaatattgtaaaattagtccaagtattaa

SEQ ID NO: 324654 - DNA, 1315 bp, Cannabis indica
tttattagtaaatatataatagtatagaagactatacaagcatatatatgatattaatattttttgtgttgttatttttttttattaatttttgtaaattattattttattttttgttagaatttgaagataagatgaatgggttccatctcaaaaccaattggtaatgggaggagtagcccattcctcttatatattctattatctttccacacattagcaatgtaggactctaacatttttcttataaactttaattattagtaggtaatagtaaagcaaattacaacatttagatataacgactggtgatcttgtctttaataagtgaatttacatcatactatgtctttgtttaaaaataatttttttaacaaatatttaaatataattaataaaagtaagatatatgattataactaagttttgacgggggttacgtgtttgtggcgcgtcctccacacgcctagtatatatctattctatataaatatgttttttggttttctacaagtttaacagaatattatcttaattacttaacaaaatattttttattaattttataatattattatatgtatttaaaaatgaaaattatataaatttttgaatgttaacttttttgtcaaatttaattaacagagaaaatagatgtcattatgtaaatataaacaaacactcggtacttagtttaaatccaaagattagggttaatcgtcttttaaaatttaaattctcaaactctttaccgtaaatcccaagatgaggacctactttatcaaaatctccttcactataaatattataggacgattaacccatatgagtgatttttgaacgtacacttgggattaggaatcatattgttctgatcacaaaataataatgatcatgatcaatcggcacaaaaagatagattttagattggagactcaataggtataagtttatcatgccttacaagttagcaatggtaggtggaatactcaagacaattcaaatttttggaggatgttttggaacttgaagttgccgcctaaggtgaagaattttctttagcggggtcttaccaattgtctccctactcttgtgtctctgcagtctagaagggtccacgtgagtggattgtgtctgatgtgtcatcgggagaatgagacaatttttcatttattggttagttatgcttttactaagagttgtatggagggggctgggaggaacggttggggggagtgaagctgtagtgtttggcagctagtttgataatgtttgtaaggtgcaacctatggatcgtattgagaggcttgctatg

SEQ ID NO: 324655 - DNA, 769 bp, Cannabis indica
ttctaattataaaattgaaaagtaaaaatagtttatagaacatagtttttgaaaaaaaaaaatttacttttctacttttaaaaacagaaaattaattaaaaaagtgttaccaaacgctacctaagtgaatatttttttattatgtgtttattttattataaattaaccttgtaatttaattatattatatgttgatgcatatgatcgatcgatcgatataaatgtgaatatgtaatacatgagtgcatgcatatatataaaataaaagaacttcacatttttacatttaaaaaaaaattatattaatttataattaataaaatataccaaatcacgatcgaagattcgaatccacgtaatcatatccattgtaattaaattcaagagaaaaaggataaataaattcatgagtatcagttgaggtatcaaattattatttaagagtccaatgagtgggacccctacgtacgaaaaaattgaaatttattaattactatatattaatatagtgcatttcttttaatgaaaaattcattaataaattagttggaacatattgaaacgacaatcatataatataacggttctagtaaatatgagctaccatattcattgaactatttgacaaaaattacagaaatgttaagcaaacgcttataatcatcaattatatatccaaataaaaaaatcattaaaaaaattgccttacaaaacttgcgcaactaatagacaattagtttcaagcagggccggccctaggcataggcgg

SEQ ID NO: 324656 - DNA, 960 bp, Cannabis indica
ttttgttaagtccattgaataaatttattaacgaaaatttccttttatgtccttgtaatagaaatttctcactaaaaataataatttttttttgtatataatatgcaaaccaataatacatcgaaacttcttcttgttgtttctactaatttaatatatattcttacttattcaatatatagaaagcattaggtaaatacatacctaacttatgaatttgacaattttattaccttataattaaaatgaattatatatgtgtttttttttcttgaggagaattatatatatgtggcttggttaattaagtagaaaaattgtaggtatgttgtgtatgaatgacaacagatggttttgggttaaactttgtatatttaatttttttaatatatatatatatatattggcaatatatttaattaatagatatatttacttaattatattctagctttcgcttttaattttaatcatcaactgtgtattgattgattacttccaacaatttttcaactgtcaaacatttgacttcatcgaaagccttttgataaattaatattatttttacagcaaaacactctattattaatgggatttaacagttaaataaatgtggtgggccgtcaatatgatcatagtgatatatcgttttacttttttttaagatgcatatattagttaatatataatatagaaaaagaaaaagacattacaaaataatttggcatgacaccgttctaaccattttttttttccctaaagctctcttagtcaacttatgaaaattcaaataacctaatcaaaccagataaactgaaaaaaaaaagaaaaaagaaaaaaaaaagacaacttgaatagcctaatgaaaattcaaatagctcaattaataaagggataatttcataaatacacaaaaacaacaaaaaaaattacaaaaatacaatttcacggaattttaaa

SEQ ID NO: 324657 - DNA, 716 bp, Cannabis indica
tgttgtgagttctagagtggctctctatgtcttacaatagtgtacaatatcagatagttctcaaatagatgagagaagagagacttagtctctactacaatgataatggcgtgtagaagaaagtgagagctagggttttaagtgcttgaactcaatagcttaggagtgagaacttagacttcagaacttagagcttttaagtttagcctagtgctcttcatatagaagagagcttataagagatagtaggttgatattccttgaaatgaggagatatcacctatttgttacatattaaataaataagaaaataacatattaattagtcccaaagaataggtaaataactgaagttagactcctatttttgtgggttgtttaaggccaattcgtagctgaaaacgttgtccaagttgaaagttacaaaggcaccgaaagtgccaactagaagagaagctggtcctcctaccctttgttggaggctggttggcctatgttggcattagggccggtcagatccccctggttggccattggactcttcatcaactggtatgttatacatggtgacttggtctttttactgacaagttgtactccacgtggcatcaatcttgtctatgtgaacataccacgtcacgtggacaaaaattaggataacataaaattcaaagtttttcaaaaatttacagggataatactaaaattataatgaa

SEQ ID NO: 324658 - DNA, 1142 bp, Cannabis indica
caacaaaattcagtggttgaacgcaaacatcaacatatcctcaatgttgcaagagccttgggctttcaatctcatattcccttagcctactggccttatcttgtctagacagccacttatctccttaatagaaccccatctgctcttttcaaaggcactacttcctttgagatactacacaataaaccacctctatatgaccacttaaggtcctttggatgccttgcctatgtgtctactctcacatccaaacgcccaagttttcccctcgtagtaaagcatctatattcattggatatcctttgggaatgaaagcatatttactccttgatatcgagtccaaaaaaatctacatctctcgagatgttgtgttttatgaacacatatttcctttctcaactctcaatactcactctgagattgacagctgcctaaaccaagcaattttaccttgctccaaaccaataactcaacaaaaagggactaaaatccctgctacaaaccagcctcctcctgctgtccatcagccacttcaggctgtacactcaaataatcaacataccaatccacaatctcacgttgcacctcaacaaatacctgctgcaactctaccatttcatgctgaaaatcagcacatcactactactcagcaaattcctgctgccatttcaaaaataatgatatagatcaccaatcctatgatctgcatcaacaaattcatgatgtaaaccatcaacttcagactgaccatcagcacattactcctacacatcagcaactccctgatgtaagtgagctcaaaagcattcctgctcatcaacaggatgctcatacaccccagtcgcctactgttgccattccacaacatgctgctgctataaatcacagcaacaacaacaatactgttgcatcaacccattccaccaactcttccaccaatcgcactacctctagtggaagaacaagcaaaaaaccagcacacttacacgattatgtgtgtcatgcatctaccactgctcatcccaattgagccatatctctcttactctaaaaacttcaccctatgtttcgggctgctgtcttgttgcctacactcaaactgagcctaaaactatgctttaagctttctcattttcagcatt

SEQ ID NO: 324659 - DNA, 762 bp, Cannabis indica
aggtagcatgatttggtacatattaaaatttaggggacaaaaatacttcttatgtgtttgaaatctaagagaaatgctaaagcaaatcagtacatgatttggtagcatgatttggtaaatctaagagaaatgctaaagcaaatcagtagtgtctgaaatcttcttatgtgttaatatagtttttagttcaactaggtattaagtttatataatttaatataataatttttaaacagtattgctagtcaaccgcaatgcgacatgtctagaggtactagccactattgtggctaataaaaatacttttttatataatttacaaacatgattcgaatccaaaacctccaacacacggactctactatgttggctatagaatttgtttgattaagctttattttatttattatattaataaaatgtttgtatatttcagctaatcacataattcgtgtacaactatataaccacttgataaattatttggggaggctaattcacacataataaatatatttattttttctgagaaagagtcactgttatatgaatttaatattacaaattatataatgataacgatataaatactttataatgtttggcaccttaaaatcatttaacattttttttataacgtataggaaaagtctctactagtacacctataaaatagatgtttcagtacacatattaagattttttttttttgagtgaaaatacttgttattataaattaaacaaagagttcatctacaataa

SEQ ID NO: 324660 - DNA, 1193 bp, Cannabis indica
tgacatatatagtaaatcctattcataatttttgtttttctaacataaccatatttagtatttggtatgcaattttttttttatattcattcattcatcgataagcgtgacaataaaattgagttattaaataattaaatctgttactactaaatttatcattacttagcattattactataaataaaattagatatatatgtatgaatatggatcatttgttgtactagcatcacagattggtacatttaaaattaatactaagaaaataggtaactttaattaggtaacatgctaatatgagaaaatatgagattgctatttttatcaacattaaatctgatttttgtttttcacaaaaaatggtgatgtcagcaaatcaaattgaagctttctttttaaaaatatttacataaatatgataataagaaacctaatttacataaatataaatttaatagaacaaaatatgatatttaaaataaaaatattaacatatataggatatatcatttatattaccataaaaaatattaaaattctcatcacattttttgctatcggtgctgaaaaactcactggatcactggagttgccattggtgccggaaaatttactggagtttgctattggtgcctgaaaagtttttagagttattgtcggtaccagaaaagttgtcagagttgctgtcagcatcgaaaaagtcatcgaaattgacattgtcaccgaaaaaatcaccagacaatttatcagagttgtcaccgtcaccgaagtttgatgccagagtcgtcattggagttagacgttggaatcagattaatataaaccagttacatttatctgctagtaaaaaatatgaactatgaaatcagtttcttaaaataaaaaaatatatatataatatttaaacacaaaaaggagctatttggtacaactaactaaaaaattgaacagagatatgacctagaaaaacaaatttcagaaactacaaataaacttataaaactatatgaagataaattcaaaaaaaaatgaacatacttcaacaaagaaaaaaaatgtatataccaatgatgagtccttacaacttggataaatttacttttttcttttcttgagatagaggaagattcttcttagagtcagcatttaaaatctttatgtaaagaccgcttagtttaatttagaaatta

SEQ ID NO: 324661 - DNA, 1731 bp, Cannabis indica
aaaaaaaaattatacaataatatttatatgtataatgtgtaaaatatttcaacatttttgttatatatattattacaataacccattattaatacatatatagtataacaacccacaataactcacaatatttcaactttgttgtactatatatagtacaacaacccataataaccttaaaaaaaaaccaatataattttaaaataaaaatcagtttaataatatgcttctaaattttaaataaacattaagaatataaaaaacatattttggtcaaacttgcttttacggtaagtagtagtatatgatttggtggccgacattactataaaattgggctttagagacagttttatgggcttttagcataaattttggcaaaatttgctactaacgttgttccaagcgacacggtaagggtaaaaacaatctacagcatagggaccttatagcgtcagttattatgaaataaccgaccccataggatccctatgcgctatgccgtcagttattgtataataaccgacgccgtaggattttttgtgatttttttttagctttataattttgtattttagtataatttttgtatatatatacttattttattattaatataattcaattaagtataaattatatataataagcataaataaaaattaaattagaatgttaaataaatacacattaacgttaagtattaatttgagatggtgcagattttagtttgagtatgtgatgaggtgcaaaaagtgagtgagtgaaaaacacttagtagcttttgaatgacataactttctcatttcttaactaatttagcaatcacttgtatttatataatttttcaagaccaataaaatgaaacaataatttaagggcaagaataaataaaaaaaaaataagagaaaatggctaaaatttgtatttttttgaaaattttgaacattaataacttttgatttggtagtccgtttgaggtttttttttttttgaacttgggtacttttttgcgttctacgtatcccaaacaaccatgacggtttgacaaactattttgtccaaaaaatgctcttttgtagaataaaatcatattatgcacccccacataattttttgtattttattttactattttacttaaaataaactaatagaattcttatgttaagtattagaatcaatatttatgatgtatttgttaattctactacaatgaaatgtgcaatactaatttctttttagatctcttctaatatttaaataaaatcataatagctaatttatgcaaagatagtatttcggtatattagtaaaaacttatcagtgtatctttttagtcacaagttcaaatttcaatagactttttatttttactttttgtagcttactatatcaatccttagtactcaacattatttatcatatgtattacatcaatattattctaaaattaatctaagtatttaagggttagctaaatatatatataaaaatatttttataaaagtagattaaagaaatcataccttataccaaaaatcatgtacctgacttccgataaagtcatttatgataaaatcctaacaaccaactttaagcgaaactaaaatcaaataattctatcctaattttactgaaatttcggcagcataacgactataattgaatgttttcaaaaaattcaaacctattataacaacaaaatacaattcaaaataatataaaata

SEQ ID NO: 324662 - DNA, 810 bp, Cannabis indica
ttcttaagtttgattttttttttaatttatgtgttaatggattgataatttaaagctttactcttttattaaaaataactaagtttaatttttgattaagggtgaaatctaatcattaaggtgataatataagaatcgattaagcgagtaagaaaatgtatataagaattagattaagcaatttttgtcctgatgttattcttagagagagtgattttattcctatttgatggattagtaaatatttcttttatagggatatgtatatagcttattcattagaatatattaacttgtgtgcttctaaagctatatgttggctagttcgtatgtgtaaggagacctttcacgatctttagcttacacgcggttcatgcaatttaaagaagacatatggtctgtatgaatgacatcagtttgatgatgatatattagatcgttatgtggtagggctacattcttaattgatatgcaactcaatttagaatcaggtagtttattgaatgcagtggattggataattttgaggatggaattcatattaagagtgttgactgaaaggtaaaagtaattttcaggacaaaatttcttcaagtaggagataattgtaatatcctctttctcgaaggggtaattttgtattttttttgttgttattttgttaattttcatattaagaagttttattaaatatatgaaattttagtgagaataaaatttttattttttttagttagaatattttactagtgtacgaaatgttaggtaaataattaattgttgggttttgtgccctaaataaaacccttt

SEQ ID NO: 324663 - DNA, 547 bp, Cannabis indica
gtatcaaagaagtaaaacatgttttatcaaagcaaacatggtgggtagccccactatcaactatccagagattatttgagaaaaatatagatttaccaatgaggttagaggccaatggagttttgatatcaactgttgattgagcctgttgagcatgttgaatctattgagtaagctgtgaaattatttcttgcagcaaagcaagtttgtccgaaacagagtgggaagtggaagcttggttagcagccggacctttggcaagggaaccccgatctgaagtggagcgctgtaaagagtcagatttgcgcttgtcaaaataattgggagggaaaccatggagaatatagcatttctccttcaagtgtcctggtttcgagtagtgagtacaaaaaggttgcattttcttattgcaaggaggatttgaggactgagatgaagtggcagtgatgaggttcgagagaatgcagagtttcttttgtcggtcatgctaaatgatagtagagaacaccttcgatagagatgggaagggttcggtgattaacacttg

SEQ ID NO: 324664 - DNA, 507 bp, Cannabis indica
atggaagatctaaacttgtcaaaataaccattttcatttcaaaataccaagtattacatgtaaaattaataggaacacttgttcaaaatcctactaaaagacaaagttaaagtaggatcttgaaccaaagcaatacaaaagcaataacaacactaatgacaacatttctacaaagggcacttctactatttttgtggcagctagaacattgaagaactcgaacactaggactgttatcatggaagctctcactttcgcacaactttgtaaggtaagattgctcatttacttctcttctcccacttctgacctagaaattattgatatttcttgttccaattgacgaatctatctcaacatgttaggaatcataatagtggaacgatcacacataggaggattgatccattcccaaaactcacacccaccataacattgccaatcaagaaacattcacacagtacaacgaagaaaaacccaaaataagaaaaaagaaaaaaaaagaaa

SEQ ID NO: 324665 - DNA, 830 bp, Cannabis indica
accaatgcccaaaagtctcggtttagaaccaacaccaaagaatatactttttgtgactgtggaataggtgtcagttttatgaactgacacaaaaagtataagtgtcagtttaaaactaacaccaaaagtacattttgtagtagtgaatttagctcggcatcaaaacgtttccgtttgaaacctccaaaatccttgtatttccctggacatcaatattgaagacactataattgacttagaatatcagtcattgacaattctgtggggaaggaggggggagttcttctcttaagctttccatcaaattttttactccttctccttgagtcactaattttatgaaagcgacgatggccggcatacccaattttattacgtaagcaaatagaatgagtgtgttcattacatgtcggacatactttgtacccttttgtgatccaaccagacattaaagcatatgtagaaaaatcatttatagtccacataatagctgctctcatcatgaatgtgttgggatgtatgtcctaaataaaatctatttcaatataatctaatttgttatcaatagaagattagaagtcatttatgtttacatgtagtttttatgtttatggttcaatgtatacaatttctgttaaatctagaagatatagttattcacaattatagtgatgtcaacacagtattgggaggtaattgtgattatatacttcaaaatttaatgtcccacgattcatcagtgcactgggtttacactgatgtgatagtcagcgataaagcctacttacaccttggataagtgttatgttttcctagaacattgacaaagt

SEQ ID NO: 324666 - DNA, 1615 bp, Cannabis indica
ctaatccatttcttaattccgggtattacacgttacctgcaaacaggaaataaaaatcaatgatgacgatcataaatattgcccacgagcctggggaacgtgccacatcatttattaagaccggagatggctcacaagtctcatttacctacgactaaataagacttgggggtaaatattgacccggtttattctcaaaatacgtggccgctgctatgtatgacatgttgacaaagaagacacctcactcagagataagttaaaattcgtatggaagaggcaataagtatggttcatggcattagctcccagacaagtgcaaaaggcatgccttctcctccggtagttaaggtatagtaaggaacctttgtgacgaaagggatctactcgaacagtcacctcgcatttaatgcagcatggggaaagcatctgggaacacccataagaggacgtgtcagacgtcgtaagcctgatttaaggcgattacacaataatcgaaggagctagagacgactccattatgaagaatcacctcaatcaaggaaggatgaaggctaatctcaccaaaccactacgatgcctactatgtaggtaatgcatgccatattttgtatcttttaggaacttgtgcttatctatagctggctctcaaagacaagttacccctttttgactatttccacaaatctctataaatatccttgagaaaatgagaaaggaaatcgaaaaaaatgagagagaaaaacacacaaataacattctctgtaaggaaatactctcattaataatagagactcgtggactacgtttcattaatgcccgaaccacgtaaaattatctgcattaattatctctcattattatctcatttacttggttaccgaaaatctcgatcaacacctacctctcccaagtcattaaactttatccaaaagacgattttaagctctcaagtcccaagcttattatttaatctaatcttagatattactctcacatataccatcaaatggctaagtaatattacattgcattctacattcaaaattgagtccaatgacatataatatgactactttaaagtttagagttctgaaacctaacctaagcggtgcacattaactattggtggcggtaaaaattggtgtactagaaatgtcaccgaaaataggggtagtatatatcaaaacgaccacctcgacgagtagatcatacccatgccaactatttatcaaaatagttcacgatattatgtaaagttgcaagaaagggcagagctacaaaaacgtcaccaaaaaaagtagcaggttgggcaaaatggcttagtgtatgttgttctcctttacgagctgagtcttatggtgaagataactcgtcaaacggacaccggaggtggtcggaaaatttgttcaaagttgaacctctaaactttgacttgcaattcctggctaatggtggcgaaagggacaacgctgcttcggggttgaggtcattggtgcctaggggtttggatggtgtggcgtggccagacggtggccagagaggggtttatagagtcacgccggtgatgggggtttgtgggtttccttttgtggttggagagagagagagagag

SEQ ID NO: 324667 - DNA, 1114 bp, Cannabis indica
aatgcgacttgattgctcaggggaagcctgacacctcgcggagatgccttaaccttacttgggcttccgggagcgtgtggggctccttatgtctcctccgggaggcatatcccggatgctgctttattacataaagacttaacaaatagtttggatgctaagttgtttgatccacgtgtccttgtctggttggtccacgtatattgggcaaaatcaggagcaacagtgtctaagctcatattttttgtgttagattgtactcgtattttccaaactcctactagtttcattctatctcaaaaagtgattgtatttacaacactacttatatatattcgaaaattatactgtatgaaagtactacttttggccctatcagtagaggtattttcaacactcagacaaattataattttttttcatatgaatgcttacaatattgttgttatagctttatttgttttcaaaaaatttagaataatttacctgtaaaaaataagttaaacacaatcaattgcatacttgtttgtgtttttatcgacgtgcatgcaataattaattatatatatttatatattttaatttttttttctgttataataattaattatttagatttttattaaaaatagatgagatggttatgggcgtggactgagtccgagaagcttgaggcagctatgatggtttgggccatttggaagcatcgtaacgagctagtttggaactccaaaatacctgaggttagtgaggttgtgacattagctaaattgaactttattgattggtataatgctcaaaagaatactgttcctactcttgatggtaatggttcggttgttgaagttctaaagcattgggctgcccctcaatttcctatgattaaagttaatgttgatggtgcaatcttctctaatgagaggcgttttggcattggtttggtagcaaggacggcggctggggttgtcttacaagctaagagtctgctcaaggagggtgtgttgaagccacatgtggtggaagcaattggcataaaggaggctctgagttggattaaaagcaaacagatggacgaatgttgtggtggagtcgaattgtctgagagtcatcaggg

SEQ ID NO: 324668 - DNA, 1158 bp, Cannabis indica
agggtcctatttttactattttagaaaatacagggtccattttgtcatttaacaaaacacagggtttaatctgtaacttttgcaaaacacagggtccaaaatggtatttacccaaaataaaattataagttctatctcaaaatcaattggtgatgagtggagtaatctatgttcttatatatagcttaatattttcatatttaattcatgtacaatgttatctaatatctcccgttaagatggtattttttgctcactaattttgaattattatgtcacaagttgtgctatttactcgtttattttgttcgaatctctagtgtctttgcactatgcggatctcgtgcggctggctttactacctggatagggtgttgatcaatagtccactaggaatatgactctgatattataaaaattataaggaattcatctcaaaagtaattagtaataaagtaatttaaattcttatatatggttaaatttattttatttttaatccacgtgtcagtgacagtattgtacaataattataccagcgcctatcttttttatatgtgtggaactcatttttatattattctacattattatgcaaaaataactgataataaaattaggttttatataatattgtgtaaatgatgaccctcttatatgacttttaggataggtcgaaaagtgtgaaatggaccactaaaattcaattattagacagtaaaatatttcctcataagtattagtcacccatacatcgagaactactcaaaatatgtcaaatctttaatttattcatcactgaaataatgtggtaataatcataattaacatgatgatttgatatgaaatgagcagtttgaggagaaatgaaagaagaaaatgttctttaatagattctaagtagttagttaggggcatatattctttgtttcttttgaaaatgaatacatatgtattcaaagagctaacaagggcggttaactttatgtactaataatcttctcattcaataatcatgtgcgtcacatattcgatcgatgaaccaaacgtatattgacaaagatttattatataattcgaaaatctatatgttagctaaataaattccctaatcatgaaccatgaattgaggcatatacatgaattaatagattccac

SEQ ID NO: 324669 - DNA, 845 bp, Cannabis indica
attgattgagaaaaaaaaactgtttaaaaaaatattgaaagtgattttcttttgtttttaaaattttgattctcaattaaaaaattgagaagtaaaaacagttttatagaacatgtttttgaaaaatattttcacttttttaattttaaaaacaaaaaactaattaaaaaagtattaccaaatgccaccttagtttttttaaaaaatcacttaatgttttcctaagtttcttttacaaattattttgtgttaatgtagttgttttaattttattttcatattttcttattttattctaataataattgtttacacaaaaatttgactcaatgacaagacaacacttttgacacgtggcaagaaggaaacaaccctgaagccaaatcactaagactaaggtggtcgacttgggcattgaaaactacgtcggtgccctagttgacaatagtgggtagcccagtaggcaccaagatccaacaaagtcattttttggtacaatctttcaacaaagttcaagcgaataggtcctagcgtcaatgttgggcgcccgagttgatatcctgttgtcgtctcgcatcaatttagttcctatcaacttcttatgggctatctgcgcagccactatcctaagatagatgagagacatgccctaaccaagttttagactttggcgataagtctacgtgaaacaacaaccgtgcaccatgaagccctaatgggcgcctaggttgacatttagtcaatttgggcgcaccgtgtctagggttgaagtttctggagataatcttggtgttgggatttatgccttaaaaataagtaattaatggataatatattagagaata

SEQ ID NO: 324670 - DNA, 1384 bp, Cannabis indica
ttaaacacgtctttaattgttgtgttctgggatgtctcgacaggagcttggttttagtgaccgtatagcgagctggagccattttccttatactttcgaggtcaacaatgtacgccttgttgcttctttatttaaaagcttattgcttcatttgggacaatcgcagttcttgttaacacagagtttctcggggctcatttgaatgatagcttctgactcgtcaagattgtaagtctcagtcagaagatgtctgaagttaactgggggaagttataggaatgagccctcccatagcgagatgaacacctcgcttattgggtcttgagctaacccgactgtgatacttagtttgtacgttatatactaagtgtttccgcagtcgatatgcgtcgctttcgtcttcccacatgtaatgtacttaatgcctcgctctatgcattcaatgccatatggtttctcgttaatatactaagcaacaatttaatatatcgtttcttcgcataagacctcacagtaagcaagttgcaaatatactctgccacttatgcaatcaatgaagatacgatcattaattttattgtgaatgagtattactcgcttgaaactgcaaattaggtttcttacttatcgattgatgtatcggggcatcgatagtgacatatgtagctcgtggatgacgagtggtaaggatgctttttatgaggcattaagagcagtttgtcttattaggcagatagttttcatgtaacgcttgattatgtgttgtataagcgtttatttgtgtattatggaattaagtgccatgtattgtattgctatctcatgttattcactgtttgtgattacttgctttcttgctaagtcattgtgactcatgggtgcttcgtggtgcaggtaaagggaaggaaaaaagtgaatcaaccatgagtcagaggtctcccagtgatgtacatatcaactgcagtgtctcggcttctagggatcaagatcaaccctttgtctatatttggaaatgtaaccctacttttgtaatagcagttttgaaactagttgtaaaggaatttataaacaggggatccccgtattatggtggtattttgtataaaagttatattttagtttaattatagcgttttcaattaaaccgcacttctcctaaactaatagataaattataataaatttgtaaaagcacatacgtggcgtccccgtgggtcagggcgttacaagtagggactaaaattactgttttaccctttaatgtatttcatttatgcctgttaactaagctctaaagaaatcatcatttcacttcaaagtatttatagaagctatagattctatttctattattagtgctctccctcaattacactattgtgtt

SEQ ID NO: 324671 - DNA, 699 bp, Cannabis indica
agaaatcaagtcttctcctaaaaacctacacttgttcaaagcttctctgcaacctattctatgagtagtacgatatcataacaagaaaactaaaacctagttgaacactctaagtttttacaaatgaaacagtactcttttcacaaaaatagattttaaaatataagactagaagaaatgagaaacgtttggcttctaggtcctatttatagaatatagaagccctagagatagccacaaacacgttttcaaagctatctataaaacattcttaaaaaagtccctgatttgcagcatcaagattgatttctgctgcatcaccaaactagaaactttcgaattaggaccaagatcacgatttgatcttcaatacctgccaaataaagattatttgatcttcaataaacatggcaaatataaatttaacaattagaaaaagggaaaatcaatttttctaaaaatagaaaactttccataaaaataattttttctcttacaagaagtaacctaaaccaaaaaaagtaactgtaaataaaacttttctaaaaggaaaagagcaatcaaaaacatgaaattaacacaagaaactaatttacttgcactataaaaattaaataatatttttacaactaaattgccaaaaaaaggacctaacaatctcctcctttggcactttcaataatcaaattattttttaat

SEQ ID NO: 324672 - DNA, 1018 bp, Cannabis indica
tgagtaccaattgtttttccaaatccttaagtgaggtctgctttgaaggccaccaacttaagagtaaatgttcgagcattgtgtactttatgggggtcatcagaccttgtacacctattggtatatttcctcaaatgtcccctattccaataacttggtactaaaactagttctatgttttcgtcataccaactaagtttatatgctccctaatatgtgacttctgttacttgatatggtccttcctagttaggttcaagcacgccagctgtgttgtcttttgtgtttaagaacactcttctaaggaccatatctcccacaaagaactttcttaccctcactttcttgttgaaatatcgagctaccttttgctgatgagccattagctttaggtttgcagaagttcttctttcttcaatttcatcaggtgattttgtcaagagggcgtgattggtttcttgatcataaatcagtctcctatgggacagaggttctaactcgacgggcagcatcacttactaaccataaggcttggcaaatggtgtctgcctagttgatgtcctttttattgttatgtacgaccacaatacttttggtagttcctcagccagttatctttagcttctttttgctgttttttcatggtatctttgagtgtcttgttgactacttcgacttgcccattttgttgagggtgtgctactaaagagaaaacttttaatgatttcatatgtcgtacagaagtctatgaacatcttgctagattattttccaaggatctttatcaagatctgagcccgaatgtccttctttgttgaaactggattcttcacagtcttccacactatgattgaggtactacttgatgtgtgtgggcactactctatcacttggggatttcgaaacaaagaagaagaaagagagagagagaggtggcggctcaggaaatttctgtgaaaggaatgagatgcaattgtgttgtgtgtagtttcctgaagcctttactttctatttatag

SEQ ID NO: 324673 - DNA, 938 bp, Cannabis indica
acccctgaacccctcgatccctcattccccattcccagttccaaaaccaccattcctcccgaatcattccccatcgaaaagcgaaggagatccgagattatccaagacccgaaatcgcgaaccgagctgacgataccggagccaccgagtttcgagatcggctggaagaggacgaaggagattaagctggaaaagccaaaaggatatgtgatagcggatttcttggaaaagttggagggcttgatggggaaggagttcgggtcgacggagcttttggcgaaggcgggagagattgtgacggagagggcgagagaggaggcggaggtgcttagagagaaaggggaagtggaagagaggctaattacagagctgtttagggttttgaggttgattgagatggatatggcaatggtgaaagcggcggttaaggaagagactctgaatgagagacttgagcaagccaaggctaggtgtaggcaagctattcttgttgctttgtcgttttgaatgccattgcgtgcagtgaatagtataaaacaggttaggaattaaattaactgaatcaatcatttttgcttatgaaatcatataaatataaatatatatatttcttacctattatataaacggattgttgttgtgcttttgagagaatacacccaacaaaaatttaattttagaatttcacaacattattataattgcatcttttcacctcttttcttgtttaaacaattccatcttttccttgtaaaaaaaaggcacctccctctttccttgtaaaaaaaatggcaccttgggaaatttgattttttatgcttacatgtagttaaaaaattttttctaaacaaataataactaatatttgtaaaatatgacaatttttatgatatccctaaaatacccctatttacatcaccccatttacaccatcggac

SEQ ID NO: 324674 - DNA, 1119 bp, Cannabis indica
tagaggaattaccctatatacttattttttttaacttttttttttcaaatttacggtttgggttttcaaagtagttgcagcgctagttgcaatagggatttctatacgtattttttgttgcaatttaggttgcagcgctagttgcaataggtagtttttatagtgaaaaattacgtaaaagtgcaaaaaaaaaaaactttttgatgtgtaaaaataaaaaaaattgcttatttttatagtagtgagtattttgagtagcgaaagaatagcatcaaattgaattgggtgtgtaacaaaattatatatcttttttaattatgaagccacttgaagtaataaacttaaatttcttataaaagaaattcattctcaaaaacgtgggacttaaattttatgatacttatattaattattactaatattatgattttttttttcgtctgaaaatttaatgaaaaataaattagatatataaagtggtggatgtacattattacattataatgataatgttatatattatatatatataaattgtatggttgggtaggtggttctcatgtaatattaatggtttgattggttttgaataagaagtggaactaaggagacagttgtagatgatgcttacatataactaagataaacccattaattatttaattaattaataattgattgattgattccaataatgagccaagtgagatttttcatcccccttttcattttaattaaatgttttagcatattattaattattttttatggtcttatattatacatggaacttgtttgtgtgcatataaaaacatactaattattcataaaatgtatttccacaaaagattaattagataaatttattgagttacatattattttagaagttataaaaactatctttaaaagaaaaaaaaaatgaaatttataaaaattagaggcacagttggttggggtactaattgttggggttgttggatgcctatatatattgagtttttttatttttcttaaaatcttattttatatatatttatataaaatattgaagagcaatatatgttagacttttatttgggcttacattaaattttattggttttattaaaacttggg

SEQ ID NO: 324675 - DNA, 751 bp, Cannabis indica
agagagacacaataattttatagttgtttacttcctgtatcacgatagtaacagagctatgtctacctcaagttttattattctcacgagatggattccaaaaaaatggctaagtctggatactctaatttctagagagaaactagggagagatgctctgaacttaaaaaaaatgcttgtggagctccctttttacaaggaatgaggtccaattaaaataataataaaatatttcaaaaaaatgtggaaaaatacatttaggctatttttttactattgacgatgatctaacaatgaaactgactccaaaatcggtcatcaatttttggagcttgactcgtgtttgtgggacccgcttcgggtaaactgtagcttaaattcataactcccttgggggtaaaattttgagtcgataacttcagaattacgattagagtgtgagacatgacttgatagagcattgaaatagttttgtaactcaagttgacattaacctagacactgggtcagttggaaaatgagctagagatgaattttttatgcctaagtgatattttgacatgtaacaccctaataaattaggcgtgttatcgtgatatcttaatgatatgcactcctttgctaattaaaggatttattgaaaaacgtggataatttaaaactttattaattaacctttaaacttaaataaaaagaactttacataatccgggatcccgtctttaaaattacaactgtattacaaaatatt

SEQ ID NO: 324676 - DNA, 826 bp, Cannabis indica
gggtatcattcaactcacaacctcacagtatatgactatgcaggaacaaatgcagacattacaggtagaaatagcaagaagagaccaaattcaagcctaacgtccaccatgaatcccaaatcgacgttgcaatgataatcaagtaactgatgatactaaatgtcataatgaatgtcctaacaatactcgtaattgcaaggaacatttagatgagaatgggcaggaaggactcaacctgaactaacccatttgtgactctacacatggtagaggtcccgttgcacctgatgcaagtcgacagcctggtcaaagggaggaaagattacaagaagaggaagaccctgaacgacacaacccgcgtagtcgtgcacaaccacgaactaaggtaaatgatgatcaatctcactctttttcctcaagaagtgatagtcatacccccagtatttataccatgttaggaacagtctttacaaggataggaggaaggtatcatgtaacaccctaactagcctaggcgtgttatgtgattttgaaacgtactgtgcagctcgttgctaatcaacgaggtttatggaaattgtgattaattaaaattttgctttttaattaaaacttataatattttatacaaaatactcgggatcccgattacaaaatactttacaaaagttaattaattctttacaaaatatttgtcgcccagcgactaactacaaaagcgctgctgtcccaaggatcgtacgctctaggcctaactgccccgacatgtacaatcttcatcggctcgtcctcacggttcctcaaccttggccttgcccttacctac

SEQ ID NO: 324677 - DNA, 987 bp, Cannabis indica
gaattaattttattaaaattaattaatcggttgttttgtattcgccaacctcttttatattctctcttgttgtttgttataacttatatatcaataaattttaaacaataggattgataatatatacaaatggaattggaaatgtgaaagcacatatctatatatataaatattcatatatataatttaagaacaatacgacttgtcaaagtgtattgcatgtactaaaaacaatcaataaccaacaaaattttataaaaatatatataacaaaaatcagcatcatttttgcttctatcataagtagacccgttttccattttcagtacacatagaaaaattatatacttcaattaatttaatatgatgatgcatcagttgtagtaagcatttttctgtttttcagatgtattctgcataatatatatccccaaaatttgaattcaaaaaatcagttgcacaaataatttatattttcatttgcatacaaaatgactattttgaacttaattcttttcttgggaaataaaaagaaacatctatacaccttttgaatcaatattatttagaaaaataaattatttagaatttagaaattttaacagtttataatatttagaattttttaaaaaataaataagatatataactacaatttatataagtcatgaaaaaaataataaaattcagatttataattaattagtaacaaattttaatcaatattttgttgtttattttcttttagggtagcatgtgtgtatataatttttaaaaggtagtactatttgtttttccttttgtaataatttcatatggcatatatataaatacatgcatacaaaaatgccttttcaatgtttattttaattatatatataaatgcatacaaaattacgttttcaataaaagtgcttatttaacggcaattcttggtttaacgattcttagtttaacgattctcttacccttacacgattaacttaa

SEQ ID NO: 324678 - DNA, 961 bp, Cannabis indica
aatgttcgtagctacagtgccacaacatatatgccgtgcactttgtagccacacgacatatatgatgtaccatttgctgctacgttggagggattacacacaccaaatctaaagtttagtgcctccttgcacttgctctaagggctgcaacgttaattgttttacacacgacctcggctaggttccgatgtacattttttcaagatgaaaaataaataaatatattatttttcgtaccataaattttattactacagcactcttaacagattcaccaaacacattaaatttttctttttctaaaactaaaagagaacttcatttaattaaatagaatatgtatacaatagaacctgcataaaagtaagaaatattaaaatggttgattgcataatcagcattaaatcaagattgcttaactacaaagtgagcaacttgatttgtaaaacattttacaaaacacaatgaaccatgactcatagaagaaatgagccttttacaatcttgaacaaaaaggccaaatgcaaaatttattgataaagaacctctaattgcttgaatggttaattaactatttgtttcgaccactacttgctgcccggacatgtttttgatctaacttagagcccttttaaccccatagcctcaacaacagcaacatccaaatgaccatgtctgcaactattttggacagcaactaaagtccctcagttagactgagtaaacatataatgttgactcagaaatctagactaaacttctaagctacactcgctcactagattgacgggaatgattaagtaattaagtaataattataagagagatacaacaaatttatagtagttcactccctgtatcgcgacagtaatggagctacgtctacttcgagtttttaattatcacgagctggtcattacagaaaaagactaagtgtcagaagctctgaccttgtgggtag

SEQ ID NO: 324679 - DNA, 573 bp, Cannabis indica
taaaatgacatgttaaaaaaaaaatttccctatagtttataactgttgggaatactatgtgtatctaacattttataaccgttgggaatactaagtatacccaacgttttgttaacatttattgttttttttttaattccatttagtattagccacggttctccaagaccgttggcattagtttttcccaacagttaatttgcttcagttctcatcagtcgttaggaaaaacttccatttactttttctaacggtttatataatggactcccttattaaccgttgggaaaagcttcttttgtagtagtgtaattatgatattttactttgaaaatatagttttccaaagttgtttgttttcttgagtcatctctaaagacaacatgtttttgttctaagatgttaacattttcatgacattaatagtattgtgacctgagtttaacttaggtggcgtttgataacactttttaaatcagttttctgttttcaaaagtgaaaaagtgaaaatattttttaaaaatatgttctataaaactgtttttactttttaattttataattagaaatcaa

SEQ ID NO: 324680 - DNA, 2053 bp, Cannabis indica
ttttattttttataatttaaaaacaaagtaattgttttaaattacacttaattacgattacataaacattttatttctcttttccaaggccaaacaatgttagagacaaacacacacttataaattatgtaatccattttgaattaaatataaatttcaattacatataaactcgttaatttaacatatatatttgttggttttacacttttataggttctcgaaagatactttcttcgaatgatggcaatgatagggtttctctgttcaatatattattgatggaaggaaaccgtgtttgcggtttgtgcaataactttaaatgtccccgtggatgtaattgctatcccgcagagcaaccggtaggaccttattgtgccggaacatgttgttaaggagtaatagtacttattttgtttgacaatatataatataagtaatatttactatgttactttggaaaaaaaaattaaaatgttgccaaacaataattataagtatttatgaataagcaatatgcatgcctataattttggttataggcgtgtttggttgtatggaataaatgtatgagaaggacatgatgattaccttttgtaaccaataagggcatacttgtcattatccaaaatttaatgaatagtagcccagcagtaattaagaaaaaagaattgtagtaattaatttgtaactttaattttaataattttcttttaagtattttgctgctaaactctctcaattattattattatacttgcaattgattctttaagtttaaattttgacgataaaactcttcaaattacggaactgctaataaatataaggtatcatctatttttcacacttaactgccaatatatatagactgcttatgtgtacacttttatacatgtgtcagatttatatgggtacgcttaatattattatttaatatatataaaaattatttcaaaaaaggcagaagaaaaaatcaattctatcttgcacaatatcagaattagatccttttgagcatcctccatatcttttacatttaaagttctcgaacataattgtttgaaaaaataacatggctgggtaatagtggttgcggtatcacttggtagaaatttgcaaataccgaccgaaagaactcgctgcatgatgacatgacaatcgtgggataacccaagaatatttgactcatccagagaaactttgctctttaaatttgaatagaattcatcaggaaacttgattcctgtaacaaattgacaaaatagttatttttttcaagagtcaaaacataaggagcatgcagtttcatcaaccttccgttcccatcttcataaatccacaacgattccttaacacccttcttctttaaatcatgtcttgcattggtggtatatatttagatttatcattatctaagatggtgcctaagagactgtctcttctcaatatgcatgacatctatgttgtgctttaaaatgcttgtgctccaatatatactccaactcatataaaatattttttttcctccaattaaaagcttttgtaactcttctacgtttcacgcccccaaaatcctgatgatatcttagaatttgcagtttgagagcattgacttgttctaatatctcctcacaagtaaatcatctcgaatgaggtcttttatcaatattttcatcaaactgagtgtcccttctcattgcatgattacttggaaagaaccttctatgaccaacataagaggtcgtcccaattattcgaatggaagttgtgtcttcattacaagtaggataggttttataactttaaccactccatccaaacaagttgttacgagcaggaaaatcattcatacaagatgtccacaaaagtgttgcacgcattgtaaatatcatgtcgatcaaactatctttggtgggtactccattataccacaactcttttaactcgttccccaacggtcttaaaaatatatccatgactttacctggagattttgcaccaggaataaggacgattagcataaaataattgtctttcatacataaccaag

SEQ ID NO: 324681 - DNA, 694 bp, Cannabis indica
aaacaaagtcttaaatatatgaatcattatttattgaaacaaatttattttaaaaatataatattgaaacaaaaaaacttgatttaaaaaattccaatatttgatagagaacatacgagaatattttgtcatcttttttctttttctaatttttttttttaaaaaagttttttttaccttaaaatgtcattaattcaatatgatgtggcaccatggtggacaacttttaaagttgtcaaccattggagaattttttttaagaaaaataacaaatcttatatatgcattgatgagagagaaaataaaaaataaaatattttagtgtgatatgtgtattttggtaattataaatgttactcccattagagatactgtagaagattgtaatagaaggtcagctgtaacacttctttaataataaaaaaaacaaaatatgaaaacaaagtcttaaatatatgaaccattttatattgaaacaaatttattttaaaaataaaagattgaaacaaaaaaaaacttgatttaaaaaaatccaatattttgatagagaacatgggagaatatttaaccatgtatcttgttttctattttaaaattgtatttaaaaaataatataagaaaataatttttgaagttttcaaaaatacaagacgtatgtagttaatattttctaaaaattatttttagatttttt

SEQ ID NO: 324682 - DNA, 1131 bp, Cannabis indica
caaaagcatcatccgactcagtgccatcacgcaaccattgagccccaaccagattgtttctcctcctaggttgtgctctcatccaaaactccataaggtttttacaatattttccatcggcacttcaaaaagcttggaagaaaacttttcgaaatgtccgataacgccacaaataaagcaaaatgtagggacataatcatatttgaattctgcctaaaatctaggatcatccatactccgtcgaagcttcttccttcgtttcagcggaacagtaatatcaattgtgacaccgaccccccatatactcacgccacacatgttgaaaattcttaggatccgattttatgaacgatcctacgaaattccccaatcgtttaacaatagctaccgatttgaatccgacttggagaccatgtatctgaacccacatatcaagattattaataaccaccttcttaggatcttcacccctttgtagttttcgagaaacgaattgtaatcgattgaatgtccacggactaccttcaacgaccctttccaaatcgatctcatgataaaactgaaaaaagataccgattagcttcaatttctttaacgtaaactcctcttcctggctaccacagagacgccataacatgtctcatagcttcaaaatcgatggcctgagcaataagaaaatggcctacaatgcatagatgatcatgaccaaccagatcgttaggcacaagaaaatcaactcccaaatccccatcatcttctccttcaatacttatgtccgcatacccttcttcaagatcgtttatggacaaactatacgaagccatcctcaccaaacggaaacaagaacaaacgaaacacgtactcacacacacaaactcaccatgtcaaaagacaagacctgatggttgtattactagtaataatagtgaacaatatttggaaatggagttttaaaattacacattttatattataaaatattataatgtagaagaaaaaaagaagagaatagataaaattttctattctaatgggtgatctcctatttatatacatataaaagttaaatattaaaaaactaaaaaaaaaagaaaactaagaaaaaagaaatattgattacgattaatggta

SEQ ID NO: 324683 - DNA, 905 bp, Cannabis indica
ctagcactcacggttcaccatctccagccgctccgtcagcaaactccatttgactgagcttcatcaaccacgaacccagcttccattcatccctagcaccaagctgagactccacgtccaacctccgttcacaaaaatcgtaaccagcaacacccagccgagccatcttcagtcgactccaccaccaccacaaaccacacatttcaacctaatccgaacctccacctgaaacctccttcaccatcactttcatctttcagcaacaacccacccaaatctccattcgaacaccagatcaacacaactccaacttcgaatagcaccatctccgtcctcagccgctccattcaactcgactagcacccacagcacacgacccacctgaaacaagaaaacctgcacctgaaccagtagcttccattcgaccccttcccacgaaccaaattcagcaaccgcacatcacttgctgaaactccaccactgtcaatttttgctagaaactgaggaagccagcaagaatctccattaaccattccattcacaaacacaaattcaaggagcaaggttagtccttgtggttgcaatgaaccgtatgtaggtgtttaatccaattgaacttgctgaatttgtgaatttgcacattgggtttaatgaaacagagagatctttaatgtgatttgattgtggaattgttagtgtatggaattaggtgatttgtgcgggtgttgaaatttggatttcagtggtacttgagaatagttggtatgattgcaaattttggtgtggctgtgaactttttctggtgtaaatttagaatcattgttgttgttgtttgagtagttcaaatatatatatatatataaaagagaagtaaaatcaagagcaattgttgtggctaccgaggg

SEQ ID NO: 324684 - DNA, 1916 bp, Cannabis indica
gtttttttaataacatattgaggttaatacattgcaacaattaaaaaaagaaatagactaaaaactaagcccaaatcgtggatctcaaattaataccaatatatctcaatagataactataatcaaatagatataagaaaataaataaataatttaatccctcttaggcagtgacttgtatgagctacaggcggccgtccttaacgaaaacatttacagaggagtgggtgtgatgactgttcttgactaactctgtcacggtggaggcagggcgttggatgacctcttgggcggcaagccgattatcaacaattttgtctaaacgatgacaactttttagtagtttgacttccttgcatctaccattacttctaatataatttttaatctaagcactatacatataaaaaaaaaaagcagagtaggctcagataatactcttacatagaaaacaacaatctcagattcagataaggaaaaaaatctcaaattttttttacagtagcaaataggaaatctaaagcaactcagatgtaggtcaaagaaaactccacaaacacggttagtcgaaccaccatccgagttgatcgtcggttgttagagcttacaaggactcctttcatgatactgctacctatttaaatctccacaacatgccttcttcgctcccaaccacagcctcatgctcaccggctttgaactatttacaccactacatacttgtggtgtcaactatcaacaatgaagatgcttctttggaagaagaaacccagatgagaagagaaaaagagggaggcggctgctctgctagggcttcatttgatgagaataagatagagcgagaaatgagtaatacaatatttgagagatttttttttaataataatataataataataataataataaaaacgttggagagaggaaattaaagttattttgtctactttttatattaataatggagatggatgcatactaaatactaaattataaaataataataataatagtagtaggctaggttatacgctgattgattattctctcaccagttacatttttttaagtaaacttcacgtctagcaagatgcaatatttaaaattaataaaaataattatttaattaaatttttaatatataacgttcttctattctattaagtctaatattgttggacataatacaaattttttttctagtctagtaatgttggacacaaaatttcttcaaaaagatttcatgtccaacaccatttttgttggacatgaaaaagggacatggaaagggttatttgtagtagtgatcatagtagagggactcatgtacagaagaggattctcgatgccactactcagaggtgttactcaagatgaagctgcacgactcctatctgaagttcacgacggattctgtggaaatcacaccgccggacgaagcttatctaagaaaattctaaggcaagcttacttctggccaacgatgatcgaagagtcgagagcctatgttaagaagtgcgacaaatgccagagattttcaaagataccaagagctccgtccaacgagctaacacagatgcaaagtccgtgacccattgccatttgcggaattgacctgatcagacaattacctaaaggtaaaggtggagtgcaatatgcagtggtagcagttgactactttactaagtggactgaagccgaaccactcgcaaccattacatcaaagaaagttcaagactttattgtgaagaacatcatatgccagttccgactaccgtacaaaatagtctcatacaatggcaagccattcgatagccaatccttcactgatttctgtgcgaaccatggtatcatcaaaagtttctccgcagtggcgaaatcctcaggcaaaatggtcaagttgaagtactcaacaa

SEQ ID NO: 324685 - DNA, 675 bp, Cannabis indica
tgagtggatatagtttggacatcacaacaaagcaaaaagtactataattaaataaagtgagaaagagagaagccttattaaggggtaacatatacatatatatatatatacacatattctctcttctttaattatatatactgtactcttctccagtactggagctgtgtcccaaggtgaagatgatgaagatgaagatggtgatgctatggttgttgttcatcgtgtcctcaataagtagtggaagtagtatacgtggcctcccacgattggagcaggcagccaaagaagatggctctctcaccatcttggttgtaggagattggggtagacgaggtcactacaaccaatcccaagtcgcatatcaggtatatacatatattatacctctctctcttatatatattcatgatcacaatccacaaatcttaatatctagtatcttaacattatttaattaacttaactaattatatataaacttattatgcaattaaataattagtatatatatatggttgtataaaaattaatttattaatatgttgatatatattattgattgtgtgtaaaaaactcgtagtacataatatatagggcataggaataaataatgtagatcaaaatcttactcgtctagtactatatatatatttataattaagtaggacatat

SEQ ID NO: 324686 - DNA, 981 bp, Cannabis indica
ttaatcacattttcctaaaagcatattcaataagtacaaaacaaaaccaaaccaactaattttgtttctttatatgtctttaaaggtataacagataatttgcatcatctttgagtatataatttgtcttttaatgccaaaagaaatttagaggaaacagctaataatgttatgttcaagtaggaaaaaaaattaaagaaaaaagaaaaaagtaagtaaactgttagtaaaaacttcatatataaagttgtcgggtccacaaatgagtaggattatatatagcaataaagaaatttaaattttgatatttaattaaaaaagatattaagaaatattttttttatactatattaaaaatatatttatataaaaatatttaagtaaaatttatttttttatatattttatatttgtcgaataatattttttttcaacaatttcaacttatataatataaaaataaatatttttttaattaaataaaaaattaaggataaaatttatttttttctcataatacatattcatgtgtaatccttcttaatagtacaccctttttatatgtaataactataaatattaatttcgaaaatattaagctgttagatcttatgatgaatgataaaagagaaaattaaatttttatgcacttttatatttataatagtattaatatttttaaaattatattttttttagtaaaatatgaatgagtaatacctattacaaattgtgacatatatattagcacaaagttttgattgatatactagtactgctctagcaaaatcttaggagaatagtttctattttggtaagaatatgatcatttataattaaaacttatttaattttcctaagccagctacaccataaagcaaattaggctcaattattattattatcatttaagaataagacttttagttctaagattcttcttaaagatattgaggtcagatgaaaaatgaaaaaaaaaaa

SEQ ID NO: 324687 - DNA, 528 bp, Cannabis indica
aaaaaatacttttgttgacatttttacacttatctatcaaaaaattgattaattctaccataaatgtattggagcactattataattttgaccaaatataatattaactcattttttttagctcaaattatacaccttccattagagatgataagaataatgccaaggaaagtgctaaacatcataaatggtggtataccattattggtgcatttcaatattgggtctcacaaattttaatttggtgaataatatgagaaactgctaactaattattaagtgtcatatctgtataatattagacatcttaagatgccaactaataatactctattaagaataataaaaaaagataattcagaaaaaaatattttacataaaaaaatccacagaagttgttgtaaaaaaaatatacgaaaaaaattgtaaaaataattaacaatcatattcataacaaaaaaaattacattaaattttacaattgtgcattaaagtataatactaaaaattgatgtaaatatatcacaa

SEQ ID NO: 324688 - DNA, 1154 bp, Cannabis indica
taaaacattgctatgctggagctcgtggattgccaccatcatgatgatgagaaagagagaggatggtggggagcgaaggtcagagagagatggtttgaaaatgtataaatttgaaaattttcagatttgaaaatgcgttatattagagcgaggaaaaacaatgttatttaaaaaattttagatttaaactaattgctgacggttagaaaccgtgacctataacactataggcgacaattttaaaccatagcctttactataaacgacagtttaaaatcgtcgcttatagtattggtcacgatttttaaccgtcaacaattctcctgtaaaaaaatttacaatttttaaggcacgcttaaaaattatcaaaaatgcctcaggagtgtttaaaatcgttaggaatatctattttttttttccttgataattttaaatactcacttaatttttttttagtaacggtcaaaatagtaatttttatagtaataaataaataaatttataataataataatataataaacgaatttcgcggaaaaatattttattgataattttcgactaaatattatgtattacattacatcttaatataatttatactagatgtaatttgtaataattatttattttgtagtaaactatgaaaatagattccgaatatgttcactatatttatatataattatatataatatagttacaagttacaatattaaattgggtattattgcatgcatgagcaaataattaaagtgatgactgatgaaaccttcaagtcaattgcagctgaaatctgaaaatttcaactcacaatattttcaacttggtagaaaatgataattaaccaatgtgtgtgtcttttgagaactgttaaggacatttagatattattattatatatatatctatatagatcaatataactgtctcttggttatatatagcatgtaaaatttcatcatatatatatgtactaagttgtataaatatgtgtatgtattatgtagggtaattgaaatttgtttcccaatttttacatgtactaaattatactcactaaattttgaaagttgttaaaaacttccttgaattattgagattgttggaatttaaaaatttttgttccaattttaataaggaaagtctaatat

SEQ ID NO: 324689 - DNA, 909 bp, Cannabis indica
aaaaaaaaaaagaataaattaataaatttatatattaatagatagtttttttttttaaatatagctttatgttttaatatagctttattgtaatagaacctactgtctgcaaaatccctctataagtagaaaagattcacattcttccccccttttctttttcttctttcttctcccagtgaggacctgtgaagcttattcattctttccctttcttctcccagcaaagaaagtttcataactcccatgaaaaaaaaaaaaaaagaaaaacagataacaaaaaggtgaaacctttcttaaacctttctcccttatgatcaaaatagctttcaaaaaccttactcccttctgataaaaaaaaaaaggaaaatctttagtctctaattttctcacctcaaaggtgaaaccatagaggaagaaaaaggaaagaaacaagtgagtaagaaaaagctacgaagcatagacttttcttggctttttcagtttttatgtactttacctagtgaaaacaatgagctaaatactaatagaaatatgctttagtgcgccacaaaaataagtgatatctcatagcaaaaaaaattgatgggaccacacagatttcgaaacagcatagatttacctcaaaaatgtgaaatggtacaatccagtgtgggcaggtacacaaatcatcaactaatgtaatattaaaacctcataaaaaaaatttgtaatattttaaatgcaataagtattaaatgggataagtgatttatcttgagtctgacacgtctcatgatacttgaagtccaggccaaattttcatcttttattgatcccctcaaaatatatttcaaccctagggccaggtcatctccttcaatggactcatccacctcacgatagtccaaatgatcgtcctaggcaaaa

SEQ ID NO: 324690 - DNA, 948 bp, Cannabis indica
tttttcttttaaaaaaaaaaaagcatttaaatattaaattaagtagttggatttagagttgtttgggacaatagaagcaaaaacacttaaagatgtacatgtgcattcaaatcacttctcaagttgcatatttaacatttatcttattcgcctcacgattaattagtaatattctaaaatttatttttttaaacctgaaatttaattacaccattaaaaaaaatattattaggcaccaacaatattttttgacaattatcttattaaataacacatcaaagtttttatttttcctaatcacttctaagttgtgataaagtgttttagaaaacaatacctttacatatctacatatatcattgctctaattatattaataagctaaataattcattcaaaccaaaccaaaaatatccgaccaaatataacccacttaattgaaaataaatccaacctacttaattaaaccgaattaatctaattaaaggttttcattttatgtttttattatatatacattaaaataaatatataaatatataatttgtttttaatatacatgtagttgatttcaaatttaatttaaactatgtttttctcattatcacagtaaattaaccaaattttaacattaagttaaataaaatatagcatatactcaccaaacccaattttacaaatccaatatttgctttgtcaaatcaaaaatcacaattccaacattataacaaaaattcaattattcattgaaaacttacataattattacaatgttgattttaaaatgtaaacataatatttctctcattacccaatacccatagactcaaaataagacaaaaccaaagaaaaaagaaaccccttttaataaggcatgtcatcttagaatagtataatagttataactaaccacctactaataatgaattttagaaagaaaataaaaga

SEQ ID NO: 324691 - DNA, 683 bp, Cannabis indica
ttatacacgagtacgtcattctatttgcttcctatagactgataatactagtttacagatcaacacaagtgttttcaacatattttgccataactagtatgttttttaaaaagaaactttccaggcaaagacgaaaaggtgggttgcctcacctcaatttttttaaaaaatatatgtattttgaataccataaaacaaaatttaataacgtaaaagaataataatactaatacactatattatttataaatgtattgtcatatttaattatatacatatatctaatatcataatttatgatgatatatatatatagaactatttgtgtttaaattttaaggtaatagtataataataatttttattatttcaaaaatattaatttcttctttattgtattgaaaaccattgcataaattattttattaaaatggttgaattgagttaattttacaaagtattataaatatatttgaaaaaatattttagtaatttctttcgaaagaaaataatattaataaaagcattatcttctatatatataaaaaaagcatttatgatttaaaattaaaataatgcaaaataaaaaaataattgaatacatttacttaagcttaaatattattttagaatattttattttttatatctgtatttcttctttctttttaagcacaaatttc

SEQ ID NO: 324692 - DNA, 1433 bp, Cannabis indica
tttttttctctcacgtttttaattttctcatttatttgtttttattttacattttaacttgctcatcattttattttcaattccaccttttttttttctttatgaaaacacaattatgccttttaatagggcaatttacttctacacatgtgaatctcatgccaaaaaaaaaaaaatcacaccatttttttacttaacacatcattttcttacaaaaaaaattcttagtgaaatcaactaatattttttgtttgttaatacttttttttttaagaaaagatcaaactttattagcaatcaatttcggttaccaaataagttaataaatcagttggaatagactccaaactgaaaaagcaattagggtaaaaaaaatagaagctctagcaaaattatgagcccccatctgaacttttgacaaaataaataaagacatttctcatagtactaattaaagccttataatcgttaacaacttgaccaaataagaaaagcataactatggagctacgtaagacttgaactagggaaaggcaatcgatttcaaggataactgcaggccacggttgttcttttatccagttaagggcctcacggatgccaatagctttagccacctttggagacaccataccattgaacaatgggataatttcacaagggaaatttggaaaagcatacttaaaaatttagactattcttttaatataccacctataaacaaatacactaaatattctccaaacactcttaaacccaaaattacccttacaattcagaacaccctcttctcccactctttctatctaacttcccccctctctctctctctcttaaccccaaaattcccaacatcaaaatccacgagaagcatcaaatccccgatcctctctcttatcgcgagctcggaccgccgcccaagactaagacgacccacgaccacgacaacccatgacaatccacgacgacccacgagaagcacccaagacgacccacgagtgattcttccaatttttaagttcgacattttcgacaatgataacgatatttagcgatatcgtccccaatggcgcctatagtttgttcatttttatcagtttatatgaattgtgcgatgtctcgcgatatttgttgttatggttttacgcattatgacaactagcgacatataacgatacgttttgcgacatttgacgacatgttccataacaacatgttgtcatcagacgtcgttaacagtatcgccagatatcgctaaattctacagaacaccaaagttgcttattaattagagggtaaatactattttggaccctctgttttacgaaagttaccaattagaccctgtgttttgttaaatgacaaaatggaccctgtattttctaaactagtacaaataggaccttaaattgattttttgtcaaaataaagtt

SEQ ID NO: 324693 - DNA, 1305 bp, Cannabis indica
ttttttaacttttttttaattttctgtaaaataatatttttagaaaaaaaaacaatatttttatacaaaaaagtataaaaactcataaaatttaattgggatagattgataattgccctttgctgtgtttgattaactaaaattgccttcaaaataaatgtaacttatttgaagcattctattttcactccaacaaatataacaatgagtatttaatacattaaaaagcattaataaggagtaatatctaaacagttatctatcatttactcgtacaattaatttgtgagaagttttattgattgcatatcgaacatgaattagagataaataaatatttatttaaataagctcaccattcaccttaagtgcatacataaagcagtattattagccacatgtggaatatgaactaaagatgtctcatgataattagaaagcaaattagcaatttcatttatttaaaagcctaaatcattacaaaaaagatacatgcttaaaataaactaaacaatcaaactcaataaaaagaataggaagccaagcaaaaaagcataattccatgccaccattaatgccactgcctctatgtcaacgactttgaaactccttcaactaagcaagttatgaatcttccaatccaacaccattgtcaaatctagttagagcaattgtaaacctccctataaaataaattaattaattaaattagtatactaaatattaatattaattattaacaataataatatttctttaaaataccttaactttatcaaaaaaataatttaaatatatttagaagagatctccctcctcctcctctaatagtacccctttcatatttcaatccaataaggtaataataaaaaaaaaagtaagatttttacccacaaactaacacacatgaggattttgccccttaatattatatttttctttgtaaaaatacttcctcgaactatggaattatttacaaattccctttccatttcttttggctcttttttcaaatattatttttgaataagatatttctttaattttagtattagtttaggtgattctttcaatatttttctataatttttataacaaaacatatttttattaacatttgttaaaaatttataactacaaccggtgtgtattattttttttttctttttatggtgtagatcattttaacaagtacagtagaacctctatttaagaatactctattcaagaataacctctaatttgttataaataaatcaagtcccgatttgggccaattataaataagaataacctctaaattgt

SEQ ID NO: 324694 - DNA, 1068 bp, Cannabis indica
tagattgagtctgggtcccaggttcaggtctaggtctaggtcccaagtctgagtctgagtctaggttcgggtccaggtccatgggttctggggtcggagattggtgttgatcgtggattctttgtaaatatataatacaagctaatacatactatttgttatgtattaaatactacaacttacattaataattaacacaatacattagtttatccaaacatagtgttatttattatttaatacaatgcgacccttatacagtgtactaaacgagccattaaagttcaattttgttatataccaagcaaatttgtgtatacatataattgatctaatagtatgtattgttttgggtgcagaaatgtaacttgtttgtttcaatttcgggttcgggtagtaatggggttggttacataacagctcaaggaagagagagttctaacgaaacaagtgggtatgtatttcatagtaacaccatcaaaggtacaggtcctaccttattggggagggcttatagaccccattcaagggttttgttttacaaaacctatatgagtgatattgtcagccctgagggttggaacgcctgggaaagcaagggtcacgagtaagtaattattattattattatttaatattccaaactaaattttatatttattaaattattagaaattatgtgatgcacattctaaaataagtatatcgatgcacttctttttatattctcagtatttagatatagttttggaaaattctataatgcacttccgtaaaaagagtgtattgatgcaccttaatttattttagcatttgagaagtttttttaatttaatttttttttcatggtcgtgttcattatagttatttaagatatcctgtaaaagttttagggattcgaaaaaaattaacatgctgaaaatagagttcaaattgtgtatttgatcttgtttttatattataaattattttaaattttttaaaattttataggatatcttaaataattatgaagttcacgactataaaaaaattagattaattttttttttctaaatgctgaaataa

SEQ ID NO: 324695 - DNA, 1846 bp, Cannabis indica
tctatcatttttacatcttttttttaacattgtaccaattttgccactgccacttcaagatactctccatgtgactctcttatgtcaaggtattttaggtacaatacatataaaaagaggtatgtttcaattaaatataaaattagaggtaaatttgattaattgattaataaaagtggtctttttcaacttaccccaaattgaagtggctcaaaactttgaagcttgatcaaactatatcattggcccataatataaccaacatacccaaaatgtgattgaatccctttataccattttcgtgggcttagaaataattggtttagtaattagagagttaagtaggagggtgaggcatgtgattgaatttggagaagaagagtggacagccaaggtcccaaggatacgtgtggggagaagaatgtgttgggctgggccattatgcaatttgaccaacattttaagttggactttaaagcttcaaaaacgccaattgtttatctctattccaactcctttctatccaacaaatatatggaaaatacattttatttgtgcaaaataaacataaactaagtcaaaatcagatacaaaatattttacattaattgcataaatataatgatttatacttaatttatttagcatttaagaaagaataaaagtgtatttttcactacgaatcaaaagagtagaatgataaatttattattactggatgtggattatctatagatgttttttgactatttagattgaaacaatgggtaatttaaaacacatttttcttggtatatagagcattctatgtaattaggagtgcaattctgaatctatagtggagtcatgaggaattaataagttaaaaaatttacttagtaaattttgaatctacttattgggagcttgattacataggaccaacactaactaggataatattattttgtagtctcaataaattggttttaattaatcaattagaattctaaataagaccatgtcttgtttatgaatttttttcactaagtaagggcttatttgagaagaaaagatgatttagagtttatttattaattaagatactttataaggtctaattaataatgaagttaaatgacaattttatttgataattaattataattattaaatagatagaattaacatttatagagttagaattaaattatggtatttgtgaaagaaaaagataagttttaaataaaatggcaaaattaaaatccagtagggtctactaagggttcgaccataagggttaattaaaaccaattttatcatttttttttaattccattcaattctaaacctagccctagaaggaatcctataaatagaataagaagactcttgttttctagattgacttaagactactttgtcagagaaaaatagaaaataaagagagccttttgtaattcgaaatttcttcttcttcttcctcaaattttcgaagcctttggtgaattgagagtatgcccacatatgtcaaagcaatacctagcatagtgaggaagactatgtctaaccaaatcgaaggagagaagatccaggtgttgtggtatttttaacacgcaagtgtacgtatcggtaacaagtattagactcacaaagagtgaggtcgatcccacaagaattgtagttaagtactttaaaattaaatctttacttctatttggttatgtcaaaattaagagaaaattaaatttagaaacactaaaggaacagtgaaattaagaagcaaataaatcaagaaaaaaagaaattaacaatgattaaagttggcgcttcgatttcaattgtacctattgattatggcataata

SEQ ID NO: 324696 - DNA, 649 bp, Cannabis indica
aaaaaatcttttctttctttacgatttttctgagagcaaacagtagggtgttacagagcgatacagttcggtgcagaacgtatcgtacttatacagaggctgttttatcctggggacgccgtggttgctagactgccgtgcacacttcgggcagagccgcgaaacgtcttaaagagagcgacattgtccgcgactcaaccagattattctatcggtaattcgttccaattttactgtatttaatttcggtataacaattttcgttttgagagcttttggatccgagcaccagtgaagagaagacatcaaccccgtcgcctgagaagaagtcgtcgcctgagaagaataaaaacgatgggagttcagttttagggctttggtttatttttagtagtgaaaattacagggattttagaaatgacgatgatgaacagtttcgcacgtgccaatataattgtgttcgccattgataaacgaaattggaaaaatcaagtggccatagctgggtcgtgagtgtgtgttggaggtcctcggttcgagtcccaggtaaaacagtattgtaatatataaacacttaaataaaaaaaaaaagtttgagtgagagaatatatatatatatatattatgagacacgattttgtcccgtgat

SEQ ID NO: 324697 - DNA, 1526 bp, Cannabis indica
aatgtgtgtgaatgtacgaaatgaatgaatgaattagggtggtgtgaatataggcaggtgaggaatagagatgcggctgtgagatcaagggagaggaagaagatgtatgtgaaggaattggagatgaaaagcaagtatttagaaggagaatgccgaagattggggcgtttgctccaattttgctatgcagagaatcaagctttacgcattgcgagtagtagttgttacgcgtttggtggttccaccacaaccaagcaggagtctgccgtgctcttcttgggtatgtatcatcatcatcatcatcactttttgttttccttctttggtctatattctttccataataatattcttacacattacgagtgaatgaattgtttatgtttggttacagaatccctgctgttgggttccctgctatggttagtagtgggcaccatcacatgcctgtttaccctgccactcactcctcctcaacaaaaactactactaaatcaaaatcaagaacaagatctaacaaaatcaagaagtgagaattatgggttttcaattcaatcttttgtaaagagcaggagatgcaaatcctcctggcccaagatgaaatctccaccaacctttcaatttcatgcttctctccaagttttttaatatgttcagtaatatggagcgttacttaaaataacttttaattataattagtatttgtatctgtatttcttgctctggtttggattatttttgttacttgcatagctagctagtttaattatttaaaattaaaattgagaaccaatttaaaaaaatggaacagggctaaagatctttctaaatttcataggaaaatcaactttttgtaaaatatggaaaaataaacttcatgtatatatcttggattcttataaaaataaattctgcattaaataagtagtatattagtgctagagattgacacaaatcaaaattataagaagatagatctctatggatatgtgtatcaccacctcacttgtgaaagttaagatattgatatagtatactatactgtatatttcaaaagaaacaaatttgtattgcttaaatgtggtttgtaaattcacgattaaccgctagctcaagtggctataggtgggtgtgtgagtgttggaggtcctgggttcgagtcccaggtaaaacatgatgtaatatataaacgcttgaatcaaaaaaaaaataaatgtggtttgtaaattttgaagaggtagttttaccgcactatgttagttagtaatattttttaaaatttattaaattaagttctgtttgggaaccattttattttttgttttttaaaattttacttaacaaaattttggagattcttcatgatttttgattaattaattaaaaaactgatttttttaatggttgccgaacactactttatattatatagaatttaatgggaaaattatagtaaatggtttcaaatcataggagtatgttagtttatgtctttttttcaaaaaaaatatagcaaatggtcctaa

SEQ ID NO: 324698 - DNA, 487 bp, Cannabis indica
gtattttttgtcagtttattcggtttggtttgggcggttcattcgagttgggtggtttattaatttttttgaacaaccctactgtgaggtttaaatttaataagaatatgaatgtaaaatttaaatgacaaaagatttatatttttaagtaggtcttatttttttaattaaaatggtagtaatgttaaattgttaatccctcaaactcatgacttttatatttcttccatgtctacccttttaattttactctctctaagtcaaactcacataacaaagatcttattaggtaacgtttggttagaaagaataaaaatatagctaaaataaaaataatattttaatactttaaaataaaaccaaacaaatgagtagaataaaaaattcatttctattcattatatttcattccctccaaccaaacactaagtggttcctagtgctagacatttatgtatatgaaatgaagcatatataattattgtat

SEQ ID NO: 324699 - DNA, 628 bp, Cannabis indica
tttaggataggacgaccaatcactgcattatacgccgcatactgtcgataacgggaaagtcagccattgacttggccacgacaggtgcggttcctaaagtgaatgggagtttgataattcttttaaagcaatggtgtccctggtaaaaccgtagatactcgaaaccactggtcgcagatccttctcctgtagtcccatttgcttaaaatcttgaaagttaaggagattcacagaacttctgttgtccactaatacgctgtggacattgtctccttcaatgttagcgacgatgatcaatgcatcgacatgtaggtggtgaactcatctggcatcgctttccatgaatgtgatatcatcgcactccttaaatagtttttttggccgctcactcaaattatttacattagtgagcggcctctccttttcctctctggcatatcgttcctgtgactttctggagtcccttgcgatgtgaggccctccaataattgttaagatgttgcgaggagttcttgaacaactcgcgttgttactttcttccttatcatccgctcggggatgaccttcttcatctttcttgtacttgccaaatttcccttgtctgattagttcctcgatctcatcctgc

SEQ ID NO: 324700 - DNA, 608 bp, Cannabis indica
gtgaagagctcactataaatagaacccttgaactcattgtaaagaggacctcttggaggaaaaaaagatattaatgaaacattgatttttctgaagagtgaagattgtaagatttttactttgagtattcttctattaagatctttaaataccacttcgagtttctattatttcgttgacaagttcttatcgtcaacaatttgggaccgtctatgggaactagaggttgcaggggtgtgagctaaggagactgctcgctgttgtgtggagcagcttgtgcgaggagctgccctcagctgcgtggagcagcttgttcgaggagctgccctcagctacgtggagcatcttgttcgaggagcctactcctgctgcatggagcatcttacgcgaggagctgtcatcaactacttctcgaggaggctaggtgcatattgcgtggagctacccgttgttgtgcgtggagttgtaatggagggaagaatctaataggatgtggggatgtgatgaggagaaaatgaaaaaagaggtggggacctcctcttgttcctttgtttatctcgagaatcttgcattatccatccctcttatttgttgtccataggaatact

SEQ ID NO: 324701 - DNA, 751 bp, Cannabis indica
gggttgataaccaaagtgccacggctttagctgcgaatcctgtttttcacgtccgttctaagcacatagagatagatctccactttgtcagggatcaaattctcaacaaagatctggttgttcgatatgttccttctttagatcaagcagctgatgtcttgaccaagcccttgtcgacagaaaggtttctctactaaaaatccaaactaaaaatggtgtccacaccatttagtttgaggggggatgtaaatatagttgagtgagtttgttagtcagttagttattctaactaactcttgtaacgtttttctagtttcttgtctttcttgttcaattctattatctcatctcttgtgtatataaactcattcagtattcataataaaaacaagttctggttttatgctttgtattgctctatttctctctctttagttttccttgctctgttcttaaaaggtttcatactctgaaactttacatacaggcttaccaatattgttaaaagagtttcggtattgacagtatttaattattggacgatatttagataaatattttaaaaactacgtattgttaggtaaatatttctaatttttatgagtgcttaatttattgtaattaactcctaattttaatatgttagtggtaaaattttcaaaatttgtattctgttagcagtttaatatttccattcatttttttatgttaagtaccatattggaatatctacgtgtacactgacacaatt

SEQ ID NO: 324702 - DNA, 600 bp, Cannabis indica
gaatttagagttctaggatataaatggtgaaaaattctacgttttggatgctcaacacaccccgtttgtgattgaaaatcaagcctgaatcttcaagccaatttttgacaatgatgcattcactttgaggaaaaattttgcgaatagaacttctagatctctctttcatatttgtataacatctttaatcgtccaattctgagcaatattgaaagaattatggctaaaaaattactagttgtcacactaggaagctcactgccaaagatggagcatcaagtgccgcgacactacaaggtagtgtcatggcccacctcttttaaaatgttagaaaattagggttatatctttttttagcaatataaatgccaacttttgaaacttttgaagacaattaaagagggacaaaaatttaagaagaaagcagcactagagacttttatgagtattttttgacaacttatttttttctacactttttctatgttcttagttaattattatcggatattttcaatgattatgaatagctagactttttttagggtgttaatgaagattgtttgtattttattctggttttaatgtgatttaattctt

SEQ ID NO: 324703 - DNA, 743 bp, Cannabis indica
gttactcagaaatgccaatgctgcatctatgttttaaaaaatacttgtggcatgtactctaatccaaggtatcatgtcttcagatagcatatgtctgtcttatttttaggaaggtaaaaatgaacttttcactttcccaaatgaaaaaaaaagtctctaatcaaagctttgttattttaattataatgcttgattaaattataagaaatgtcacttaaactgcattaaaaatgcagtttaataatgtcagaataattcttgcctctctctggatattcattttgaagaaataagctcacataatttatatgagaatttcatttcaggcataaatagaaaggtctctagaaaacattattactatgaattaaaactataaatgtgtgaggaagattgtgtggtatataaaacaagaaaacttagcatctccaaagacagttccctgcaatttttgcattgtttcttaaactgttgcactaagaatgcatatattatatggcacaaatacttagttattacagaatatactgggtaaatttagcaatagtaaataacacattcattatcacaacagtaattgtgtgataaacagttaaatcacaccaaaggtaattcacaccaaataatgcaaatgtttcacaaacccattttccttcaaggcatgcatgatgatttcaaactctccagtataaaatttcagccttattacaattagtaacagtaattgaaaaaataaatctaac

SEQ ID NO: 324704 - DNA, 2169 bp, Cannabis indica
tgattaattaaaattttacttaattaacaatagacattaaaatattgtacttataataaatcaggatcccgttttacaaaatattcaaaaaagtaacactacaaaagtttgccgcctagcgactacaaaaaatatgccctgatgtctcaaagaccgtacgcttcaagcctaaccaccctgacatgtacaatctccatctgctcgtactcacacctgctcaaccttagccttgcccttacctatacatagaaatagcaactatgagtcaacagactccataagaaaagcataaatactaacatagcaataacccggattataatcaggcgcctatacacccaaccataaccctatccccgtgtcccacactgtgctgagtctagaacgttcatacgacaatactatcaaccataatatcagcctatactcaatatgctagtcatactctagccatactgatgtgatagcgtcgatcagtatttgaggcaaacataaatctattagtatccagtataactctatgtatactgatactgctatcaatgtactctatcaggcataaataacatgtatgctaaacatgtaaacacatatgtataacattatactaatcttacctcgtttccgaattcaagtgtgctggccaacctgagtggaacagttgctcgacgaattacaggcccctaaatcacattattcgtaacacaggtgagtgacacgctaaatccctttctggggacttcggctttaaattataagttttcctattgaaagctaacatggcaataccctaaataatcaaggaatcaaccaactaaagctctgaaactaaaacgaatcgacaagacgaaaaatttgggaaccagcttctaatccgattaaccggttttacaggacctgtaaagccagtttacaccaggtaaccccaaaaaaattcaaaacctagcccagttcgtttccaaaccataccaaacctgcttaatataccccaataaacatattctaagcaacagaacaacctaacatgctcaaaatcaaaatccaccattaaagagcaaagcctgagctcttagactcaaagcttgctcaaacaccacaacagcccctaaatccacttcaaatcaacatattacatcataaatatactccaaaaaacaatttcaaacaaccctaactactacagcatctaaactcacaaatcatgcaaaaactcaattaaaaaccataaggaaattaaagagagaagtgctaaagctattaccttggattggatcacctaataacctactggaattccttgaattaagcagttaaaactcaaaccctagctgggttctatggggttcgaaagagaggaagagagaatggaaagagagaatgcaattttgtgttttcctctaatttaataaaatgaaattaaaacatgatttatctaataatatcagcatataaaatcagattacttaatcaaataaattctcattaaaggacgaaaatctgaaaaggcaaaaagaccataatgcccttgcctacaccaaaagtaaccttaccacctaggggtattttggtcaactctaaaatctcgactaatcctgacatcatgatgtctaactatattgcctcgctatactaaaaatactaaaatgtgattctaatggccaaacgtcgcgttccaatgttatcgggcacaaaacatgcaaaaatataaaatttcatatatggcatataaaatgcattctgaattcaaataaatctccgtaaaataacaattcataactaatatgcaagtttcataattaaaccctatttatctgttaatttccaaattaattttaagtggtttttacacgaagacccagaaactccagtcactggaacaagtggcgcaggttgggtgatcggagaagcagaggcagaaccacgagaatgcctcttggaaggttgagcatttttgttcttgggcatttttctttgaaactctagaaagcaaacacactctcaaatttgaagaaggttagactttttaaaaaaaaaaattgagagatgagtgaatagtggtgatcgtgggaatggtatgtaattgagcatatataacacttgaaaataaaccaaaaattagaaaacaaaaaaaaaagggaaagtaacttttaacttggtcaccatgtgagg

SEQ ID NO: 324705 - DNA, 758 bp, Cannabis indica
caacaaccaccatgatcatctcgtcactcctcacaacatatagaaattaacacacaacatggtatgtgattgcaaatgtataacaattaatttggtcggattatagcatatttatactaatttaatataaatataaatttatagttacagatttacagtagacacacatttcaatagtcttcaatatatttcaaataattatttataaaaataattagaattaatattctaagagcactcgtagaaaagataaaatagctaatggctaaaaaaactttagctaaagaaataaaaaataaatgaaaaataatgctctatcaaatgagctattatagctcaaaaatttagttcataaatagtacttagctacatgtaaatataagcactattcgtgtagaaaaacattattcattgagctataaatattatattacttttctaaatctttttaaaatgtatatgtgtgtatgtgtaatattattattgttggggtccaatctttcaccttcttgcaccgtcacctcaccttgactctgacattagtataatattgttcgctttgagcctaagccccaacacttttatttttgtgtatctttctaaagtgtcttatactaatggtggaatacttatattctagacaattcttatattgatactccaacaattaaatttatttaaaaaataaataaaatatatatttaaatgaataatttttaaatgatatagagaaaatttaaagaaattaatatatgata

SEQ ID NO: 324706 - DNA, 876 bp, Cannabis indica
tttttccaaactttctctaaatatttggcattcttcagctatacttaatcctactaacaaagcttcatatttttcctcattatttgaagttttaaactaaattctaagtgcataatgaaactttaagtttcctagtgacaccactattactcttgtcccaagccattctcatttgaagctccatcaatgaacaatttccttgcttctatttcattttatgttatggagttttctcctgagttaattccttctatcaaaaagtcagtcaaagcttgacctttaattgaagtcctcaggtggtaggttattttgaattatcatgattcagtagaccatttattcactctccctgatgcatcgggttttgataatacttgtcgcaatggttgatctgtaaggactttaatggggtgtgcttggaaataaggcaacaatttttgagatgcatgtatcaggcagggtgcaagtttttggagtggtgggtatcttgattctacccctataaccttttactcacatagtaaatatgttgtttgttcctaccttcctctcacaccagtactgcacttatggtattttctgagatacccaaataaaggaacaatgtttctctaataattagtttggctaaaactggtggtgtagaaagatatttttttttatttctttgaatgccatttcgcactcctcattccactcaaatcttttattccacctgaactttacagtttgtcacacttacacaaaaactgaaattttggcggctaaattaccgaaaccctagttccattttgctcttcacacctccgtccaaaaattacagttaagtgccacggtggactgtccacgtgtacacacttgtacacgtggcaagtt

SEQ ID NO: 324707 - DNA, 1091 bp, Cannabis indica
taagttcctcacacgtacgtatgtagcacaacacataaattaataaagcattttcatgcaacacctcatcacttgatgaaccgccgttgtacgttgaaaatatgtacacaaacagaaattgtagaagtttctataactcttcaacaaaatagattcatgagatttggtatatatgtttaaagccatattgtatacttttattattagtcctattatatatattaattaactaaacttatccgattttgctgccatttttattgacttttaataccaaaataaaaaaatgaaaaaattaaattatacattttaaagatcgtttagtgtgctataaatattggagaagatgcaaggtgcaatgccatcattattatcttatcaaatatatcattaatagctagccaaaaattaatggagtcttcttcttcttcttccaggactaaatggtttccttctccacaagaggttctagctgttgaaaatggaaaacgcattaataataataataataataataataataataataatagccaagaagaggaaaaacaagaagaagctacaacgattcaaccgcactctcctcaggcatgctttggtcgaaagaaaaaacgcccaaacaaaccaaacccatagatgatcaatgcatgaatgtaagttatatttatataattgttttaattaatgaatatatactactattattgtgagaaattaagtttcagctccattaattccagagaattaatttcaaaacccaataacatctactcctttaatttctctgtatctccccatgttaatttggtctttttctattttttttaacaaatcttatgtttgaaattaaaatatatatatatttatttaattattataatttatacatcatgaccaatattggatttttacattgttcaggtataattgagatggatggatggtatatgatatatatggatctgcttcctcttaaataatttacttcctatactataataaatagacctgtattattattattattattatattttttttttagtgtataacattatactttctgtactgtttagagtatctactgtaca

SEQ ID NO: 324708 - DNA, 895 bp, Cannabis indica
tcgttagggattggctgacacactgatgtgtgtcagccaatccctaacgacaatgtcgttggtggcatgtcattggtaaaaaaattgatgttgatccccttcaaaaacctttcccccatttcagtaaagccattttaaattttttccctcttcgcctccttctcttcatctccttctcttcattcttttcatcaaaatcattctcttcaacaacccgaataacacattgtgatcaccaccaactgtcggaccaccaccctgtggggtcctttcgaccgccaccttaaagtcatcgaaccacctcaccattgccattttcaggtaatgtctttttattttctttaaaaattatatgtaatatgtatatttggttatatttatatactattttttgaatatgtatttatatattgttttaatgttttatttttattttttgggttttgtagatattattgtgttactatctataagcaactcaggcctatatctccatattggaatcgtcactgtaagggttgtttttttcttatacttatcattatatatttatttttttacttgtaaatatttgtcatttttgtaatatattaaattgttttacaaataaaaataatttttgtatataattttttttaaaaaacagatttattataatttttaaacttaaaatctgattatgcatgtaagtttttttttttgtaaatgttaataaaactgtgatgtaatttttgtttatgtaaaaatagtataaaagtgtgatgtatttggaaatttttggagtatttagagtagatttttatatttttagatattaaaaaatgtaaatgttatgttgtagaaattttaataaaattttgagataataaaaaattatgttaatttgatattaaaa

SEQ ID NO: 324709 - DNA, 1504 bp, Cannabis indica
attcacgtgtcattttttttattggtatatttaaattatttttttaaaaaaaataaaactttactgatttggaccaattaggaaatggtcacgtggcaatttacttaacacttaacaattaggtacgtacaaaagttttagaattataacttaaatattattactgctaaaaattaaacttaagtatattatttataactgggaattaaacttaagtatttatgccgcaaattactttaaataaaatagagaatatatatatatataactaagtaataataaaaaattaaaattaaggtttaaaattaataacataaaaaaaaattttagtagcatatagaattgacaccttttttacaatagtcaacgtcttacctagaaagagaatttgaatgggatccactccacattgtccaatcattatcgatcgttgatgaaacttccatcatcacataattaattaaacattttcattaattaattgcctttcttttatattctacttaatttcttgtcgtaattaattaagtgtaccagagtgatcactccaataattcgtagctaattcattgttttaagattataataagttatataaatataatggtgagtgtatttatatattgttcgaatgtaatatataatataagtaattttacaataatattgttgcaatatttatatagatataaatcacttaaaaatgttaatatatgtactagatattagaaaatgggataataagtttgcatatttataagaaattataaatttcaatttttttttatgtgatgttatatattaacttatagtaggcatatgatttatttttgagaaactgaaataatttatggtaaaaaaataaattttaacatagttaattgtacacgtataaattataaattaaattaaatagatacgcacgtaatttataattaattaatcgtattttaatatattataaattatttaaaaattttgaaaattaacaaacaagtatattgtcatacaaaaataattaacttataacttagatattattaccgccaaaaattaaatttaggtatttatttgtaactaagagttaaacttaacatttatgccgcaaattactcaaacaaaaataataaagtaagctcctttaaaatatatatttattatttaaaatagagatattttatttttaaacttagttttgtttttatatatatatatttttatgcaaattcatgtagtaacgaacggactaacttaaatcgcaactaaaatttacgtaacaattcatgtaaaaattaccagaacaacttaaactgtaaattttaaaaaaataaaaatatatatttgataattcttttttaatatattttattttattttaatgtcctactaaatatataacaaattttgctacaatcactacaacaataatggtttataccaacgccactattaccaacgccaaaaagtcctcattaaaaatggtactatcaataacgacacttac

SEQ ID NO: 324710 - DNA, 518 bp, Cannabis indica
attgacgaaaatagtttcagcaatcattaattagataatttttattaataaaaaacattacaaattgacaaaaataacactacttaaattaaagtgtcaaaccatatgcttctacaatgcaacttctaaaaaataaatagagatgttctataaatgttaaaaaatacgatataatttataatataaaaaataagaagaatattatcactaatctcctattatagtattttagtaaacctcctataataaataccattataaaaaaattattttgtcatgaacttgaaaattaattaagaggttgtgattatcattttttataaaataatgctcaaaacatatgtagattatttgaattttatttttaaaatattaaattttttcttttgtttaaaattttatgaaataatagaaataattacaatgtacacaacaaaaaaaattagattaaaatttttcttgccatcaaattttctaaatatatatttttcttttaaattcatctataattctcagaa

SEQ ID NO: 324711 - DNA, 1324 bp, Cannabis indica
ttaaacttaaattaaacatttttagtaaaaaataattttgtttattgaaaaacatccacacacaatccttttgttgtaatcaaacgcttaaatttgggaagtttggagtacaatcctttctagttttttaatatgtggactgtgtatcctaagtttagtaatattgtcctcaactgctagaggaaggaagtcaaggagagagatctagtggatgtatgtgtcaaatttgaaaagactacaaaaagatcttaggatctttaataaagaaaagattggcaatgttaaagttgaatatgagaagacaaaggaaagatacgacaaggctcaaatgaatttacgacagaacccctattgtgtaaagctccaagagaaactagaggcagttgctcatgacaaacataccagcagcaacaaacaaattgaaagcttcctaagacaaaaaggcaaggtagattggatacaatttgagatgaaaatttaacctatttccatgcttgtattaaaaaaaagggaggcaaataggattacaacctttattgatgagaatggcaagattgaggatgactatccaaaagttatcactcattttctttctcattttaaggatttcatggggactacaattgtaactacagaatctattcttccacaaatagtgaaagaggagccatgtctttccttaaatttacagatcaatctcatcaatcctttaactcaggaggatgttaagaaagcactattctccataccagatctaaaaagccctggaccggatggcttcgggtcaaaattcttcaagagtatgtggacagaattgggcaaagaaatctcatctaccgtcatccaatattttcagcatgggaaactactgattcggcttaatgagactcttttcatgctcattccaaagactgaaactcattctcaagttgtagactataggccagtagcatgttgcaacactttatacaagtgtatatcaaagatgatttgctcgagattgtctgaagttctaccgatccttgtagatgagaattaaggtgtgttcattcaaaatcgttctcttgctcataatgttctcattttacaggatttgttgaagggataccaaagaaaaaacacctctcccagatgtttgatgaaaattgatctaaacaaagcttatgatacaattgattgggagttcttggaatctttgctgaaagcctactacttttcgagacaatttattacatggataatgagctacgttaggaatttagtatatctattggtgctgaatggaaaagtttaaggtagatttcaaggtgcaaaaggcttacga

SEQ ID NO: 324712 - DNA, 1955 bp, Cannabis indica
aaaataatgcacaatgtacaacaataatctaaaaataaaatataagtgtgaaaactagttttgaacctagaaacaaagtaataaaaaaacttaaaataaatatacattaatatcataaaattgagcaacctcattacagaaccctcaaaacccgtgaaacaagtttcaaacctgtgaaccctgtgaaaccagttttgaccctataaaaaatcataacaaaacttgtaaaatcattacaaaacttgtgaaatcataacgaaactagtttatgcaatatgaacataaaagatttaaaccacttagcataataccaaggacccttagagcagcaaaacttaaccaaagacaagcgaaccaaactaataaatttcacacaagcaaaccagccctctgaaacacacaaactaataaatttcacaaccaaaaacacaaactcaatttctttctatctaacaacatgaactaacttgttcttgttgttctacaaccacaactaggctatatagtaaataacagattgatataaaattatgattgattatataattaacacaatcatagtatacaagaaagttaaaagcttgttctcttaattagttttgccctacaaataagaccaaattacaaattaaaaatgtcataacaatgacaacaaattaaaaccaatgtatacacaattagtgttaggaaaatctcaaatttaaatcaattttattcaattcaactgtgttgtctccatttttgcagaaaaactcaaaattgcaaacccaataaaacccttaaacatttgtattttaacattttcgagcaaccaaactataaattaaataaaaattgaagaacaagaaagaaatgcatactgtaccaatatatcataccataagattactgcaatgtatcaaacccatccatcttcgatgagtcttctttgcaagaaactagttttaaaggataaaatgaagaaatacgatacaatccaaatatgacttaagtagttataataaatcactatggataaaaatatacaggttttttaactgtattttagctgttaattattaaattataaaacacttgaaaacatatgtatctatagtatacttgaatcttttcaatataatatccaattatcatgtaaagactaaatattaatatacgaagtaacacaaactattatcattatatataagaatctgcctaaataatttgtgtcttatatcaactcttttattactatactcaaagcaaacatcagccatgaactattttagactgtgaaaactgtttaaagagaaccattaaattaaatctatgtaaacttgtggtaaaactaagcttataataaatgtgtagataaacacatgcaaatctatatactgtgcataatagaagatcaaaccttacttcaaaagggaggagaggctctttcattacaagtacttgcgagcccaccgattcaatggtcgtctaaccttatagttgatttttctcgacgatgaagatcacaatgtcgaaggtaatgtcggagacactgttgtcacagttgtacggaaattgctggattgtgtgtgaactagaggtgggtttaggtttaaagctttaggacaaagaagtgtggttgaggtgggtatgagctggtaaatggagatgagtgccaatgaaggttagagaaggtggggctggtgaacggatgtgggtaaatagagctactgatggggtggcgtaactagaattgttgaatagaggggaagaaataaaatcaaggacactaaaattaaatatgggttttaaaaattaagtttacatatatatggcatagtaaataccataaaaaaacttaaaaactaaaatatgcaatagaaagtgaccaaacttaaatctgccatatttttgtaacaaaattttaaaaaaaccatattaagtgtaattttcacaaacttaaatgggcttcctat

SEQ ID NO: 324713 - DNA, 1088 bp, Cannabis indica
tgttcttatatatggctcaattctctaccatttattctatgtgggacaatgcccacaacacaatgtaagtaatactatgcaaaaaatcctcttataaacaagtattcctattgttccacaaactgcatatacaagatgccaaaactgtataaaaaatcttcattctatggctaggactcttgatgaatagccatctcttccaagcttcatatatagttcaaatgccaagcttttactcccaattaatcaaaaatcttagccacaaccattctagagacaatacaatcaaaaaataagtattagtggctctccttattaatgttacaaattgggcagttcaacatgtttagctctatatggaatcttaaatattgatccttagtcaataaatgagcattaacaatttgccataaaaaagaacctgtgtttaggaagactgggcctactccaaactgcaaggttgtaggtgactactccctatttcaaaagacaattatacaacaatgaagctcaaaatttacccgtctttccaactacaatcatgtcagttttgctaaatttaactcttaaatgacatagtttgtgccaataccaactggtgtcattaataagagtgtagtcccaaaagttagcaccctttaagtacaacacatttacccacttgacctagagaaggtcatgttttttcatgacagctcaaacatacttcgagagacttgccctgttccaatcagccccattttgaaatccaagccctccatgggactttggtaaacacactttatcccaagaagccatatgcaacttacttctattgcctttaacaccccaaaggatgttggaatatattttaccaggacctagatttactaacaagtatgtttttaacatcctaaatatgaatttctaaaacaatgaaacttaaacacatataaagtatgagaaaccttacattggttgtatcggaatataatgactccttccactcagatctctaacccttgttcctttctgtcgcagagtattattaagatctgagcctgaatctccttcaatcgtttggattcttcacagtcttacacactatg

SEQ ID NO: 324714 - DNA, 574 bp, Cannabis indica
gttgatatttttacaaaagggcctccatgcattctatttaatgattttagggacaatctaaacatatgagagggagtgtgttagaatatatttagcatatgttctcttattattgtatatatatttatttagtcaatatttgttacatgatttaattatactactacaaaaataatttttcccgatatttttaaatagtagtttaaagtattcccgtcggtttctataatatgtcgcctattcgaccgtcgcaaaacggaaaaaataggcgacgccactaatgtggacttcctgacggtttaaaattgccgcctataacacggtataggcaacggttttaaacaatgccctatactatatataaaatgccaatcaattaattgtgagaccaaattcgataaatataaaatattcatttatcttaaaattaattcattaattttatttttaaaataaattttttctcgcaataattttttataatgtaacttggcaacatacattatatgttacgtactattagctagtacgtaggtatatgtagtatataaatatatatggaagaggtttcaat

SEQ ID NO: 324715 - DNA, 1254 bp, Cannabis indica
aaagacttttatctaattttagtaaaaaattctaacatgaataaaaattcatggggcatgatttaatacatataaaagtttgagggatatgatttggtagatatcaaagtctgggagcatgatttagtacttgaaatagtaaaattgaatgaaattagataaaagttcttaaatttaacaatctcaatagttcaggggaatttttaacgaccaaaaaagttcaggggacatgatttggtatatgtcaaagttcgggagaaaaattactaattagcctaatttttattaaaaaatattatcttacatggattaaatgtaaaaatattgagtcatatttaagaacatgaattactccactcattattaattgattttgagatgaaaactcatgattcttaacaactctaataaaaaaaataactgtaaaattttaagattttattgtagtcgtattcctttttagccatcaagtgtcaacttagaaacacttagcgatatattagtagactatgtattaaacaagctcaataaatatatcgtcatgtgtttttgagctggtatttaacgggcttaattgaaacttaacaactaaaaaaaagtataattgtaataaaattgtaaattaaggattatatataataattgtaaatatcagaagagttccgccgtaaatatctctaattttacggattataattttctttcttacatatattttttaattatatttttatgtaacttacgtgtaacaacatgtacaaataataataaaaaaaataatgttttgtatttttgtaataaaataattttgaacctgtaaaaatattaacaaaaattgtaaatttgtatttttataattctttttgttatttttttttaggtcgcggcaggatttgctgtaatactatcgcttcaagttttcattagattaccggaagcttgaaacaggaacgttacaaaataatattagagccttgatccaactaaaagtgtggttgacgaaaacgtcgaacccaacaaggagtaattgtaaccattagtagactgttagactatatatatagtgtatgtaatatagcatatacaaatgatatgaaatgcggaaaataaactgtaatcatatcaataatatatgcaatgaaaggatcgatgtacctccagccattgatctttgagcttcaatccctgcgatagcttcagtattggagttcgggcttcctcgctctctcaactctctttagatggaatttgctg

SEQ ID NO: 324716 - DNA, 1439 bp, Cannabis indica
gttgagtcaccttgaatatttgtatttggatactcacgatgctgatgagtttctagatttggaacccatttcgtcatctcctcctccttttatgcaatcgcttgaattatctggtcgattgagcaagtttcctcattgggtttcaggtctcactaatttagagtcgttcattttatacaactcaaaattggcagtgaatccacttaaatatttgaaaaacttgcccaatctaatatgttgtcgattgtatgataattcatatgaaggagaggagctgcacttcgaggaaggtggtttcccaaagctcaacgagctttgcttaagaaatttaccagagttgaagttggtgaagatagatagaggaacattgcctcttcttactgcactcattatacattcttgcccacaaatggataggcttccctatggtatccaatatctaccaaagctaaaagaattttgtagctggaacatgtcagcggattttatggatcgagtgaaagaaaatgagagtcctgattactccaaaattcagaatttgccaatattgaatattaaatgaactttgttcattaaatttaattgagctcagttgttgctttctgttatttatgcgttatgggtgttaatttttccttttgtatttgtttgtaattttacattttctgtttcttttaactttattgattaaggtttgaaattgattataagatttttgggtgttttttttttaaataaatatattatttatgctttgtacatatataacattgagaggtgtgttaattacaacctcttgttataacattttagtcacaaccttcacgtctgaaataatatgttaaaatatttttttttttattctttttttttccatagaagtattcgttatagttatagtatcatctctgtaaatttttgaaaaattccgaatagtttatagtactaaaaacaaagttcttgatattctagtttaccactcgtgttcaaaaaatttcaaacgtattttcggctcggtaaactattactaaaattttttaaaaatttacaaggatgatgttgtaagcatatcgaataccgccgtaaaaaaatttgaaaaaaaaaaatattctgatgcatattttcaggcgtagagattaactaagaggttgtaagagaaagtttacgatagcactcctccataacatttctagagtttagtttttatttattatttattaaaataatgttttgagattctaatttacaatatattaacacataaccactataatagcttcttaacaaagacaacacaatagtatatatgaaaatcaaatagacaatttatgttaagagaaatttatatttttcattatatttatttttaatatcaattactatattaatactatatttaatatataaaaattatttcatatattattttttaatttttt

SEQ ID NO: 324717 - DNA, 1214 bp, Cannabis indica
tatcacgccttcccatttggttctcttcattttcaacccatattgccgctacacccatattgccgctacttgtgaggcagggcattgaatacacgttgatctaggtcagcgtcgttcctaacatgtattatttgtctttccaaatctggcatattaccaagtgagcgaaagaaaatagagtacggattgatgcaaagaatattgatgagttgacttgtgattgttgggagcattctgtattgtgaatcaaatagtcgattctctaactcattttttgtgtcatagaaatgtaattggagattaaaaggatgaccataagaaggaagcaaatctgtgatgttgtgatagatttgtccttgggctctaaaagtgtatattctattattcctttagcagagattttgatcatatttaacacccaacgatgcgaatatatgtccaaaaatgtgcagaatcacttgtgttggaggttaataatgcgtaaagttcatttggaacttcatttgtggccagatacatttttccatctgcacaacagaatccatttgtttcatggataaatctctttgctttacaatgtatgcatataggaaccgacagaagtgaaaatgctttagacggcacattttgtagcaattttcgaaaacaagtgaccctattttgcgaatgacctataataatgaaagctttaattaggtcaaattagcaaactgatattttcttattatgaatatttactaatattaaacaaatattttgatgtagaaataacccttacttctacaagttgctgacataattgtgtggctaaatgagtcctcgagatcaacaggggggatctgtttgtagaattgttattaggtggactgatgagaaaaaacagaaggtcggatcaattagaaaaaagaaggcggtattttgtatatacctgattaaatcactcattattttcggaagatgaacttgggtagaaattatttctaccactacatccatttgaagaatccaaatcttgataagaagatcttccctcagttgagattttgttggtatgatgatggcattgtctctttgatactctgtgaccatgtctatcttgtcgatcattgttaatattatcagcatgataacacgaatgttgcgtacttgtagatgccgcatgatcatcagtacataggggtaaattgttacgattcaaataacttgaattagtc

SEQ ID NO: 324718 - DNA, 997 bp, Cannabis indica
tagagtttaataaaatctccgaaattgagcaattataactctaatgcccatttgttataatgggacccacagataattaaattcataaataattataaaaataacagaaattagagctaattgcctttactaatccaaattactaaagcggtcattacaaccttggtaccaacttttttttgaagaaaaatagttgatagtgtttttacttaagggattgttgaaacttaaataaccaattaaccagagctaattaattactttagaattaaacatttcttggtaaataccacttgcttttaggactttgtgaacttaaatatttaattaacctaaattaattaatttaattgactagcttgaaaattttagttgtcttaacatgagttaactatgaagcctgaacttctattttaagttaaccttaagtaattttgtaatatattaaatcaattccaagtatactaaggtagtggcttacttccacttccctgaggtttcagttttaggcgatactccctactctgatattttgttaaatgctagattaacttcaaatataataaggtaggggcttacttctggttccctaaggttctgatttcaagcaatactccctacttttagacttgtcatttaatttagttgtttcttgtgaaagaggtctaactttataatgatataatgtatgctaccccgaagtgattaacagttgaaacttttgatcacttgttacatgatagaactttcaaagaccaaatatgaaataaaaacttcgtcttttattcatatacttcctgccctaggcacacatggaaattatacagtacaataaagagtaaagaaaaataaaaaggaagctgactagccctaatttacgaaatgtatcggcacaggtggtcaacgttccgtgttcttaggatttatgttccatctaatctttttaatgttgggttttatgccctaaataaaactctttacaatctgattagttatc

SEQ ID NO: 324719 - DNA, 512 bp, Cannabis indica
gttaaaaaaatcgatctcacagactaaatatatatatcgtaatattttatttatatataaatgataatattattagtatttaaatttatttattaattgaaaaatgatattcaaattaatataatggaaggtaataattcagttctacttttttttaaggtattaaaattatcctcaaaggtagttatattactaagggaataacatttcaagactagatcttcaaaataaataagctaatgtttcacattattcctgtagtagcattaatccattttaaataatccctcaaataatttctgagtctctgtttttcttttaaaaggaaatatcatgggcccttagttttggttacaactttgagtcttttaaagagcaacttttaagaacttttataaaaaaaataagggagaagaagaaaagagaagtgattagaagaatagttgtatttttaataagtaattatatatatataataaaaataataacattaaatataaatataaaataaa

SEQ ID NO: 324720 - DNA, 725 bp, Cannabis indica
aattactagagaaagtacgtaagaagaatatatatatgtaacaaaagctaacaataattataaattcggtataataattaaccacgttttgtaattattcgactcatgcattcaggtctgtacaatatattaattaattaaattaaaagctaatatttgaaagagtgagtggggacttggtcagtggaggctagccgtggcctgtgggctaattgtcattatcaccccaaacaaaaaaaaatatagtgcaaaaaaataaaataatattgtgagaagctctttctcagaactttagttaaggagtaatattgagactaagggagcaccttcctacaaccaagtatagcaattgatcaaacaaacaaggtgtcattttcaaaagttaccagttagctagaattttcttttgttacaaattagacccgaatttaattggattttttttttttgttttttttaatgtgaaaagagtaatattcacagtaagctatatttataaccaatttaactatagaacaaactaatatatattcgaaaatatcttacagaagaggacaactaaacgccatcatgagaaaattaattattagctatcgatatcccctctatcagggccggccctaggcataggcgggctaagtcagtgcttagggcccacactttccgggggcccgaaataaaaaaataaaaaaaaattattaggcttttatttaagtaaaatttaa

SEQ ID NO: 324721 - DNA, 758 bp, Cannabis indica
gcataattatgtagttgttatattttataaagaatttttaacgaaccgtatattttaaggagtaaaattaagtagtaccgacaattcagggagtaataatgccaattattctatattttatatatatatataaatatgacaaagtatatatcctaaaaattatttaggatatctttcaaaattttgaaagtatcaaaataatttatcatgctaaaaataaggtttaaataatcatttgcacatctacatgttttattttgtacatttgtaaaataagctatttcatatatatttttttagttttaagcaaaaaactaaaaacgatatatattatttatattttcaattactctaagtttcagtttcaaaaaaatactctaaatttttaaaatataaataatgtgttaagtaattataatgcagattatcatatatctatatatatatgttaggctaaaattagtctaagtttcgggtcatattttcggttagttttcactctttgtttctagttttagggctatattacgcttgattctttggtttcaggtcctcgggcatttaaagaaagtatgttcaagaattgaggaaaagttgtgaaagaatcgagaagaaaatccaagattggtgtcgctgcctgttccagtcgcgacggggaatttgccagtcgcgacgggaactggcagagagattttcaaggagtcaaagtttactcccgtcgcgacggggaacatgccagtcgcgacgggaactggcag

SEQ ID NO: 324722 - DNA, 1260 bp, Cannabis indica
attacaatttgttgtgactaatattgtatttttagttataatatttgttgtgactaaagctaaattagtaataacttgtaattaaatagtatgttttagtcacaagtaactttttgttgtgactaaatgtaactaaaagtcaaatttagtcacaaaaaatttatattgtgactaaaaaattgtcactaaaagtagtagttttttgtagagataacacctttgtgacaatatgacaaactcatgtcagaaaaatgactcctttacaattattattagattacgtactgttttcccgtagtaataattttataactattttacaaatattggttatgaatattacagacaaaaaggtctattagatatttagctattaaggaagtttatttaatcatatattagataaagttggagatttatgtaaaagcactagatttaatgtaatcaagattcattgttaaaaaaaatgtaatcaagattcattgaaccccggagatgcccttaaaatgttttggtctattattatcaaagttacttccatacagaaaaaaaaaataacttaactaaaataattttagaaaaaatagaaaacacttaattaatattaccttgcaattgtcaaaaaagtgtctctccaccagtctcagtctgccatatgtgttttgaagccagataacaacgtcaccaaaatttatcttgtgttttctattatttttttcttaattagcttaatcaaagttaaaattacatccattcaaaaaaaaaaaaaaaaaaaaaaagttaaaaattaacattaagaaagtcaaccagtactttatggtttgcttggctaaatgcttacccatcttgctgcacgtgatgtttacgaatacccgcacgtggtcatcttcctccaagacataactttctcccgaggaaagagttatcaaagtgttcaaatatatttttgatatttatccattttttttttgtaacaagtgtttgaatatatttatatatatatatatatattagttggactaaaattcaattaagctaattaacttgccttgttggggtgattatgaacttcatatatatgtttgcgggtccctaactcatttgtattttgaaatgttcacactgaagagtagatcgtaatagtattttttttaaagtcatctgaataataacgtgatcagaaattatttttaaagtttatgagaaaaaatataaaaagagagaaagaatgatgagagaaagaaaatataagagaaaaaa

SEQ ID NO: 324723 - DNA, 1497 bp, Cannabis indica
gttaataattgaataaaaaaaagtatatataatatgacaataataaaaaaaaaaaagtagtaactgtttcactgaataaaggctttgaatgatctgactcctcagctggcctgtggttggagcaatagaattggaccaactttggtaaagactctaaatgcaagcagcgtaattgcaaagaagaagtcgactgatcatcatcttctctgatcactatgatctcttccatcgtctcacagtatcttactgtaatttgatgaagtagtttggctacacacaaagggaacaaattctttaatctatcacaagcactcacatccacctttctcaatccattgaaggagcctcttgggagtttattggcatgacatataatgctttccaagcttcttaaatctccaagtctgagtgactccaaacacggaaaggctacctcagtcgaattaatgatacattggaccccatcattatcatcaaattccaaatgctttaatcgaggaaaaccttcattaaccaaagacggatcaccattgttgatagacattgatccagctaatgacaaacattcagaccttctcatcaaggataccagttcacgtgcatacacttgatccaattgagagaggcttaggcccaaccactttcttgaaacttcgtctctggaaaaagagaaatgttctaactcgtagatccagcacttgcaaacgctgcaagtttcctagttcttttggcagtcgcgtaatggaataggacatggatagatcaagagcttttaagttttttaactcaccaatcactgctatgtcttccagagaagaataacgaagacataatgtttgaagattttgaagagaagaaaagacgaaggtaatgatcccaggcatgtaccattcatacccaaaactttaagctgcactgtttgttcaaaaaagtcattcggaattgattccaaataagacccactagatagaagaagtaattctagcataggacaatccaatttttgaggaagattgtaataatcatcatagtcaagaaaagaaattgctttagatgctttatgtctttcatggaatacaaattcttcatacatagcagcactagtaatattattcatcatcctatgcccatgctcttccttcgcaattactatgcatacatcccgaatgacatcatgcatcttcactctacttttactcctaccatccaacaaaagacaatgagatttcagtgaatcaaccaatgaattaaccctgtttcttgtatctttcactgtgtagacgcctcgaagcatgtaccaacccatgctgtatctgattaagtcttccacctctatttccacatcttccttatgtaaagcatgttggacaccacaacacgtgaaaaacgtaattactttattattgtaaaagcaattacaccaagacttgaacactttaacttgaccacaatacacactaagcactcactcttttattttatcactagacaccttta

SEQ ID NO: 324724 - DNA, 667 bp, Cannabis indica
aaaaaagtaaaaagaaaaatatatgaacaaaataatcgactaattatgataaattcttatattatatcattttattttttaaacagagtttggtgcttatatattcaaaaacctaggaaactaataatatacgtgtactcaccatcctctaatgtgccaccattgcctcaatgtttgccgttggagcctattacgttatgaaatccaaagtatcctcgcccaggagagttaagacgtgctcttgaatcatgatatatatgtatatccctctcaaaaaatttattgtgcctttattattatcactataaattattatttttctcttgtagtaggatatgcatccttaaaaattaatagatcggccgaacatgtatgtaaccatattattaaaacttgtttttttaagagataaaatataaattaaaaaaaaaaaaccatgcctaatttagttgctgacaaaattaattactgttaaaatttagcagaatcattctttcggtgcttctcatcctaaagcccgatcaatgtatttaattcaaagaatggttaaacaaactacatataagtgatacaattatttaaattatcaatccataatttaaatgaatagtttaaaataatataaataaattaattaggtttaaaaaaaaattactcaataatttct

SEQ ID NO: 324725 - DNA, 1061 bp, Cannabis indica
atataatgcttattgaaatcaatgcatgagaaagagatgggagaattttgtttaatattgagaacctcctcaaaattggcttgataatgttttgtcaacaagtttatgttgatactcgcttctctgacgattcttgaatgatggcaatcgaacaagatgaagaggatgatgagagtgcatctatcatcttgtctaagacagtgtcaggagacaagaactcagttcaaaacaatccaaaatattcaaggagaatatctgtgttcttagaccgagatgatggagaagccacttctagtcaaactgttccaaaaaaagatagagaatcagtaggtcactgatgctccatgctttgtagttgtatcttattgtcttgcttttcttctgctgtactaaccacttgtcttttcttcttcatagacaatatgagtttcttggctgctatggaatcctattcaaatttgaagcggaagataccagtgccaaaggagactgaacctccagtcagggagattattcaaggtatccatgctacttcttctgctcctatgaagaaaaggctcagaaaaaggattagacatgtcaaagttgttccccctacctaagacttcaacaaggagaagtccaaaggtgttggagctgatgaaggatatcccattgacatattctaaatgagaatgtgaatggaattctgaactcggggttcaaacctgatagatcaattgcatgtgcaaggctcctagattcttgccaatggtgaagccttgattggttctaaggctgagaacatgccattgcagaagttggttagatctaaacctccgtatgccattactcaaagatgctttattgatatcttcaagttaattatctcactattatctcctcttgaattgaatttcttttacctatcgtcatctgaaggcttcttattccacaacaacgaaagcactttttaactctttcatatactaggggattccacttggaaaagaaaatgttccatactaatggattcgggtccataaccatgggttccaatgtacgagatcttgtagcactta

SEQ ID NO: 324726 - DNA, 994 bp, Cannabis indica
  modified_base (861)..(861): a, c, t, g, unknown or other
ggtatatgtacaaagtttaaggaaaaaaaaatcctaattagacaaaaaaaaaaattatagtgcgtaaaattattaaaaaaaaaatcatttttaattaaaaatgtgaaggaaaaaaaaagtgtcaagataaaaatccttaaaaattattaactcctcatttaaattaaggtaaaaatttgggtcttttttatttttacacttcaaaatatattttttttttgtatttgtacggaattatacatagaaatccctactgcaactagcgctgtaacttaaattgcaataaaaaattgtataaaaatttctattgcaactagcgctgcaaccactgtagaaactcaaatcgtaaattaaagaaaaaaaaggttaaaaaaacatgaggtaatttcccacatttattgataaaaaaaaggcaaaaaaataaaggaaagaattcttccaaggatcatgtacaagaaccacaaacaaaccaaaaaagaaaaagtagaaaaaaaatctaaactttgatgttaaaagaggtgataggtttgtttgtataatggaaatgagccacgtctacatgtgaaatgaatgaatgaatgaatattcatagagttgaatcggtggataagagattttttctctcctttgtctctatctatctccctctctcttacttcccaaatattattattattattattattatttgcaattggtttcctattcaatcatttatacaaatttccatttccaccacttctctcactcctactactagtcactagttactagttactacatcaaactaagcttgtgttgtttttgggttgattttaatcagtcatcactttgatcagatcagactgatccaaaaccccngttgattatggaggctcaagctgttgccagacgcagaatcagcaccatcgcttctcactttccacttgatgatcactccttgccctcccactcatgtccctccccatggtattctctttctctctctctctct

SEQ ID NO: 324727 - DNA, 3649 bp, Cannabis indica
gtggtcctctcgtattcccaggggtttgtacattaggatctatcaccatcgcgtcacccagatcaactaggcatttgcgagtttacaccaccgtcttgtatgcatgttataacttaagacaaacaacaaacttgagtttaactctcaatgaaagcatcaaaatattgacctcgcttttagccaacgacagtgagtcaattattaagcgattaagaatataattaaaatagagcaaaaacaaataagtaataaaaagcaccagattttaaagaggttcaacaccgtaagtgtggtaatagcctactcccctttgattgtattaacctgagacaaagaacaaagtgtttttctctctcaaagctcttataatgaaatctctgaacaattctcttagatctctctctgaaacagttctttcgatcccattcatagtgaagctaagtcactatttatagggccttaatgcatgaggaaaggtttcccttttgcttacaatgtataaaataagaaagaatattcattacatattaaaaacacaaaaaaaagaaattagaaaaagttgccatattcctctgactcaatcacacgatcctagggattgtcttcgtgcctagacttcacgagatcattttgaagtagtgaagtcctgataagtagttcggaaaactagatctatgcctgctcggatgatctgcccttaaccctactcgggtaattagaagttatacatgtagatgtataatatgaagtctgctgaggacattcatctccgcccagattcgaggaatgcaggacatgtgtcacttgtgtattctgccacgtcattgtgcaaaaaatgtgataacaaatataattgattgtaggtttgaaattcaaacttaaacctaaaaccaaattaagacaaaagttatcttaacccaaaataaataataaatgttattattttaagacaaaacttcaaagataattaacttgtcttaaataaaaggtttatttaagaattatttaattaaaattgttttaattaattaaaaaggtttaacaagtgtattaaattaaaagttaatttaatattaattaatttaaattattttaattaattttgagggttacgacgatcataaaaaattataaaaatatcattgatactatggatattagttttgtaatttagtttctaatttcaaaggttacaaaattagaaatatcaaatttatacgcgattcatcattattgtttacttattgcttttaaataaatattcattaatagttggttaataacatgctcatgcattgaataatatggcatacatagaaatcccacacagtttaaattatcgcgcatctcatagtaaaaacatggcatattaggattgtcctatgtatttatgtgtttaccatttttgaaacttaagcatgtgaactgactaaatttaatttagaattaacttgataatttaaaattaatctattaatttaaaaaagttttaaattatgaattaaagagttaattcaaatttaatgattatgacaggaaaattatttataatttgaggcttttattataaataaattaataataattgttaaagtggttaatgtgtattaatattatgaattaataacccaaacacattaaccttaaatagtgagtaggagaaggagtacatattaatgtaacctacaatctccattatttatcaacactaagggagtatagactggcctctagacggttttattttttccccctaatatgtgtctatactgtttctcaaggttgatctcttgattaagataagaggaagcgatgtattttagtgtgacattgacccttaaggcgacacactaagttaagtcatgaaatctaaaataatggattacactcacaaattgcaactaagcttcatagtggttagttgttaacttggtcaaaaagcagtactttatattttgaaaatgaaatatgagatattcaggtttcaaaataataaagatgagatgtgtctcataggcttaatgaaatttactcgataccgaccctaaggcggtgatcaattaacaaagagctttatcgtggaataacttaaataagattttatgtgttttacttgtatgctctcatgcatcacgtttatagtactttcaaaatgatatttattattcatgcataataattatgttactttatttatttttagtcttgtctactaccgaatccccttactactttaagagcacttgaaaactaaatggtgataacttttataaatggaaatcaactctaaatttcatatggtttgtgagaatcacaaatttgtcctaactgaggagtgtcctaaggatcccatttccaatggcccaaaaaatgttcgggacatatatgatgcttggattcaatccagcaacaaggctaaatgtttcatgcttgtaagcatggatgatgttctgcgtaagatgcatgagaagaaggagaatacatctcaaataatgaattctctacaggccatgttcaggcagcagtctaattaaacaagacatgatgctactcgtagctacataaattgtaagatgaagaaaggtgtcactgtttgatcttatgtattgcacatgattgagctattgcatgaggcagagacacatggggctatcattgatgacaagactcaagtgagtatgatccttgagtcactatctccttacttcaaggctttcaccacaaactatgtgataaataagttagagttcaacatgactcaaatattgaacaagtttaccgcacttgagaaccttaacaatgatatgtctaaggaaggggaatcaaacatagttgaagcaaaatccaactctcctccttcttctagtaagaaaaggaagtggaacattaaggataacaacggtggcaagcccaaaggcaagatgtcacccaaggccaagaagaacaaagccagccctaagtccaaggacaagaagggtaaaggcaagtgtttctattgtggcgtaatgggacactagaagagaaactgtaccaagtatctcttcgaccttaagaaagataaatatgatttattcattcttgaagctagcttagtggaagatgataaatccttacagattgttgatttgggttccactaatcatatttattcttctatgtagatacttgaatcgtcaagggaactgccgatgtggagatgactatgcatgtgggtaatgtagcacaagtgtctggcaaaagtattggtagagtccgtttgaaattggataataaatttttattattgaacaatgtttattttattcctagatgtaccaggaatattatttccttatctctttttcatgattaatttttcaatattggttttattaataatgagattattatttctaaaaatgatatgcctatttgttttgcaaaacaaagtaacaaactttatgtgctcaagccaagtgagcaattaattttaaataatgaattatttagagtagcgataccttaaacgaaaaagacgcaaaaggtttatgatgatgatgaaacgaatctatcacatctacttttaggtcattttggcctagaaagaataaaccagttaacaaatgatggtccttttagagaactaaaagttggaactcttctggtatgc

SEQ ID NO: 324728 - DNA, 1784 bp, Cannabis indica
gaaatccgcaaaattactcgttcaaatcaaacgcaaaatcttaggatgtcgacggagtcagcggaaccgttcaagccctacaccctctcccaaaccctaaccggtcacaagcgagctatctccgccgtcaaattctcctccaatggccatctcctcggctcctcctccgccgacaagacccttcgtacctactccgtcaatctctccgatgccggcgccgccctgacccctctccatgacttccacggccacgatcagggagtctccgacctcgccttctcttctgactcccgcttcgttgtgtctgcctccgacgacaagaccctccgcctctgggacctcaccacagggtctcacgtcaagactctccacggtcacaccaactatgtcttctgcgttaatttcaatcctcagtccaacatgatcgtttctggttcgttcgatgagactgttcgcatatgggatgtcaagaccgggaagtgcttgaaggtcttgcctgcccactctgatcccgttaccgccgttgatttcaaccgtgatgggtccctcattgtttccagcagctacgacgggctttgtaggatttgggatgcttcgactgggcattgtatgaagactctaattgatgatgaaaacccccctgtttcatttgtcaagttctcacccaatgggaagttcatccttgttgggactctggataatgctctggtaagcttttctattaggtttagtttgcaatattcagttcaagtttgagttatactttattaatttatatgtttgtaaatataaaaaactatctttgggtttggctttttagaaactgaaagctatagtgggaggtattgttgttacctttgatattctttaagtacacatggaggtttgtttccatgctcttgctctagcttatcacattttccttgtttagtactcccaatctagttcgctttattctttttgctatatgcttgaactttctagcttaggacttactcttgaagcttggcaaaagtaattgttaatgcttatgttcaatttggtcctgttgctagctttgtatctttatctttagctcttgttttatttggaaagcttggtcttggtttcggcatctcatgtaaaggggatttcgtataatacactctcaatttgcacactcaaattagtattacacacacgtatgaacctgcaagtaatcttaaccatgaatgtttttaagtagagatcacatcatatttgtcaatatgttgatattatagtgtatattgaaactgtatgtcattactcttttttgcacattggcagttggcaccgatacattttaagccaatttgactagtttatatgctgttcgaccattgtttcctacccattccatccatagtggtttcttttcactctaatgtttaaagctcattttttaaacttgattttgtgttaacagaggctttgggacttctcaaagggcaaatttttgaagacctacaccggtcatactaattcgaaatactgcacttcggctaccttttccgttacaaatgggaaatatatcgttagtggatctgaagacaacagtgtatacttgtgggagttacagagcaggaaagtagtacagaaattggaaggtcacactgatacagttatatcagtaacttgtcacccaaatgagaacgtaattgcatctggttcactaggcaatgacaagactgtgaaaatctggactcagtccaaagattgatccatttctccaaatggctgtgtaatataattgcgcactggtg

SEQ ID NO: 324729 - DNA, 1549 bp, Cannabis indica
ctagtataatatatatacgtatagttaataacatacaagattatatgatatatagtagtttgtttttttttttttgttttttttttttttttatgtaaagtcatatttacatatatgagttagtatatttagaaaaatagtttaaataatgaacatagggttagatttgttagaatagatatttatttaacaattattattatattattattctgaaaataataataataataattcgaatagataagggattttttctataatagttagaattttaatttaaaatttaaactacgataggtgatatatgcgtatatacctatgatatacgatatacatttcaaaaaacttaatagcaatatttatcataccatttttttctctctaaaagtaatatcatctttactataccaaatcgagagttttatttcttttcgtgtcttctaaactgagcatctcaaactattgaggtagtttttaaaggtattaacaataatgtaatctaaatttgcagttgtttttaatttttgttttcagagaaatagtttttcataaaactaccatatctccctcctcgtatgtttaatttcagtgatctaggtacagttttaaagataatttaatgatccacattttttgtaaagagacttttctctaatttagattcttttggtatcaaaatttcagtttttatgttgattgttgaataataatttttctaaatttccttccgatattttcttagtaaaagtgcattatctctctcgatatttattcatttctagcgctcttggtaccattacaaagataatttgataatccatattttctttcaagaaatatttccttaattcggagctcttacttgtcaaaaatgtgtatctttactcaattatgatgttttattttatgttttgtttcagaaacaatgttctcagtaaaaacttaatatcaatctcaattttgatccattctaaaagatccttatgtcgttttaaagcttaagagaataactacattttttgtgaagaaaatattatctagatcgaggtgtaactatacttaaaattattatttttggactaaatttagaaattggctgtttcaagattttaaatgaactgttttgataaaacattcgtaacttctaggttataactctgattttgatgatctctatactgttagaaaggtattttaattatctcaaaactttgtgaattgtagaatatctaattcaaatattttatgagtcaaattgtgagctaaaattactttattgaaagaattacggatatattgagtttattggtggtcttagggttcgctaattgttgatagggcctaaaagatatcgtaagagttaattacaatgaagttgaggtaaggaaaaatagttacacttattccttgtgctttcttatgtatggtttgagtacttaatggggcttgttgaattgtattaaaaactgtagaatgtgatagtttcggtgaaatcgtatttttcaatggattatacaaggctatttaatcatgttccaagtacttg

SEQ ID NO: 324730 - DNA, 1411 bp, Cannabis indica
gggatttttcccgcccacatattagcggcgaggtattagcagcggggtccgctgctaatagtaatagcggcgggcaataaatttttgaaaaaaaataatttttagccacccaataacggcagaaacgggggtccgccgctaatacggacattattagtggcagaatagctccgccgctaatactcccgccgctattgggtgtaattcttgtagtgtttaactaagcaacctttaatatcatttgaagttgccaaaattctaaatgttttattacaataactaaataactttaatactcaagaattaatattagaaggtctaaatagctataatatacatatatcagacaaattatgatatttgtaactatgactgtctaacaacacacaaaagtatagaatatatatacgtaaaagaataaaaatcttaataagactcacaagtaaatcaattaaaataatttaaaaatattaaaataatgtataacatgcatatcgaagtaataattgaaattatatacttcatattaagcgtaacatcaaattaattattagatttaaaatattcgctttactatatcatcaacaaagatttcgaatatatatatcatcaacaaattaataattaatatattaatgcgatggctattggttttgttatttcttttcatgtttgtttaaattattagaagtctatcaatcttcctactcctttgatgcttcactgtaagtgatttattgatctgctagaattttctttttcattataattgtaaatggtgtgattaaattattattttttattctgttatttgagcaatgttattatgtaatgaattttttttatttacctattgataatttttttttattattttcttagaaagacagttgaaaggaaaatataaataaaaaagaggaatgggtcaaaaattaaaatgaaaaatttgtgagaaaaaacttataattttatataagtaaatagaagatcttccatcttctcttatctcataaaacatgagattagaatgtagattaaataattagagaaatttatcagtgatgagagttatggggttatatctcaaaattaattggtaatgagtgaagtaatgttcttatatatgactcaatatttttacatttgattcatgtggaatatgttatcaattatccccataagatggtggttattttttggtacaaatcttgaattaccttatcacaagcagtgcaatttgctcacttatttcttttttgtttctcaagctagcgtatttgcactatctggatctgtgcagctggctttactatctgaataggtgtggatcgaaagctcgctagtgatatgactctaataccataacagaatcatggggttccatttcaaatattttttaggtcaaatcttg

SEQ ID NO: 324731 - DNA, 645 bp, Cannabis indica
aaacgagtacgaggtgtagtgttgagtaagatacctttgagattatgtgcacgtgttgtatggagaacaatcgattgacaatgcgggtagtttgtgcaatctaattaattgaataatgattagaagcaaattgttgttgaatgaatacaaagtcaagactgaaaggatgacaatgtgtgctagagctagtggtggtttcacgtcttggttcatctgagctggtggtggtggaatttgtggatccttcaaagctggtggaggtatgtggcatgatgttgaagatcaaagccataactctgataccaacttgaatttagagagaaagagaaattggatgtgaaagtgaaatgtgaaaaataagctcaagctctaacgagttggctttgcttttattttgattaagagtagattacttatgtcgtttgaaacgtatacgtaacaatatattctgatgtatgaaaaaaattagatatgggtattatttttgcccctattgagtatatttcatattttaattcggtatataaagaaattataaactaattttttattgattgggaaaggtcaaatgtgatgattctgagactgtgtgtaggtatgagactacacatttgaagatggcttaaatggattgattggtattac

SEQ ID NO: 324732 - DNA, 749 bp, Cannabis indica
atctctcaatttttagccaaatcacctaagtgttgtttcctctcctaacacttagtcatttcctagtgtggctccctcactataagtataggttgtacttgaaaggataccaaaggaatgtacgaccaagggcgagtctgttaaagctagcacgccttcaacaatgcttgaagagacgaggtggttgtacaacaaatacaagtacaagtagtggagacgccattcatctcaatttaggtacaagttgacatccgaccaatactccttaactacccatctgacacgtttgccttcattgtacaatcagaacttgtccccttatttttgggacaacttatattttagagccattagagctcaagtataaaagccacatttgaacactagtaaatgagttagaaaatcattacttgtaagagagctctaatattaaattcagtaatattttactccattgattactgggttttataaatatttcttaagcttttcattttcaactctttgcatttaattttttaactaaaatttagttgataagttcttaaagtcaaccattagtgcaaatcgtatatatgttagtattcgtattataaactacgaaacaaaccgcgcttcgcgtacagttatattttgtttagtaatgattaagttataaatttatatcaaattttgaattttgatatttttttatatgatatattttttcatttactcaaaaaaataaattaataattttaaaaaattat

SEQ ID NO: 324733 - DNA, 1130 bp, Cannabis indica
agttaaatattaccgttaaatattaactggatgaccactatatacacctgtgtatatgtaacggtaaaatcccgaagtcgatacagtagtaatctagttagtatttaacggtaatatctaactaaaactttaaatttacaaagaaaagtaaattgaagggggtttttccaccaaaacaaaagatagagggattaagtgtataaaaattaaaacataagagggtttttccatcaaaaaaaaagataagggggttaagtgtattaaaactaaaacataaagaagttttgccacaaaaaaaaatgagagagttaagtgtgtaaaaattaaaacataaaagaaattcgccgtaaattactcgtaataaaataattttagtccaatatttttcgtgtatcatatataagatatatatatttgaatttatatatatatagtattttatatgtgacttgactaagcaacactacttatttatattaaaataataaacattgacatacttgtttatgtcatattttccaaggatataagtagagttaacaactttgtttgtgtaacttttataaaatattatattataaatattttttcttttgtttttgtttttgaaaatggaatattttttgtttataatatccaagtttttttttttgatatattatccaagttttaatatttaataattagtaacacttatttaatatttatagattgatactacaaacaaagaagaataaatatcttaataataattaactatagcataaggaatcgtaatataattaactaatataatgtgacctatccatttcatgataataatcataatgtgtattcatgtctattatctaatgttatatacacttaaattatacacactaattacacataataatattatttactaaatattaactatttatatttttaggtggagactacatcatttttaattatatggttaagattaaatatatattattatatgtaattagtgtgtacagtgtatttctaacattactcatattttaaacatacttgaattttatagggtgaatttggtaatacttatttaattatttttttgtttttaaaattagaaaagtgaaaatattttccaaaatcatgtt

SEQ ID NO: 324734 - DNA, 772 bp, Cannabis indica
aacataatctgaaatggacatattacctttgtagagattagttaattgactcttaagttgaaaaattcgtgccttagattagcttgcaactttctgttccaaggctctccagacaaaatttgatgtgttgtagctagccacagtagccaaaattccttctgtcatagacgatcgtagccaagatagcaacaattgatctttacacctccattgtactgaggattatcattaccattgatgagttttgattgaggagcatcattactgaaaagaagattatcaagatcctgacctataatagtaggtatgatttgtgatttccaggagagaaaattcgtgcaatcaagcttcaaagtaacagaagttgtcagatagttcaaaaacggattccatggtggtgccgtcgaggaggactgagctggcaccactacaggatcagaacctccagcttgagacgagtggtcaccggaggaagccattgacgcaagtcaagggctctaataccatgaacgaacaaagcagtagagagaaaagagaagaacagaggatgttctaaaaccagagagaaaatcagaaaaactctaatctttattaatgaccaaatgagagtttatatacacattgaaaagtaaagactgttacaaacaaaacaaccaagaagctaacaaaccaaataacaaacttaactaacactaaccaactgtcaaaacagttagttagttaacatgaagattaaaaaatatgaaaactatttcatatattattttttaac

SEQ ID NO: 324735 - DNA, 887 bp, Cannabis indica
aaggcaataatagtctcattcaagcaactgagatcagctccagtattcaatatattaagacacacacggattacctctgtgttgactgaaccccaaaacttttggtagaaaagcgccggtagaccgtcctcccccggagcctttgttggattcatatccttgattgcccgaatgacatggtcctcagtaaaaggctccaataaatgttcattcatctcctcagttaccctcggccttaccacactaagaacttcatcaacaacccccgtatcaacttcggaagccgaaaataaattttgaaaatagctctgaataagttgcatcaccacagacatatcggtttgccaaacccccatagaatccatcatccctcgtatttcattctttttacgtcttaccgaagctttatggtgaaaatacttcgtatttttatcaccccatttcaaccacaaagctctactcctttggcgccaatactgttcatccttctccatcaaagcattcagttgcttctcagctttctttatttcaggccaactttctggttgttgacacaaggaaagttcggacagaagctttttggccttattaacccttctatttaaatccttcttcttctttttattccagtcgtgaagacgcttcccaagccgactggttttcccacaaagagcctcagctgaagtacatctttccccacttttccaactaatgtccacaatttctttacactcctcctcctcacaccatgcctcctcaaaatgaaaccgcgtattccgtttagtttttccacattgcacagcttcgtcttgaacaggtatatcaacaattaaagctcgatgatccgactcccaccaatccaataattgaatatccgctccctcaaa

SEQ ID NO: 324736 - DNA, 847 bp, Cannabis indica
caataaaaatgtaaccattaagtagtcacccatatatttatatataaaaatagggataattacataagacgctatttttagtaaaaaaaaattacattcttattgtttaattttttttattttttttttttacattttttacgatttttcatagaaataatacgaaaacaacaagaaaactatataaaagtaatataaaaataatatttaataacatcaaaataataataaaaaataatatacaaataataaaaaattgacaacaaattaataacagtacaacatacaaataccgcattttttgtaaataaaatcaaaaaaatcgtaaaaatatttaaaattccgtaaaaccgtatttttataaatttttttgttattttttttatttatgaaataatccctaaaaaataatgtcaattatttttgtaaataagccttaagacttggcaggcttgatccgtaatgatgggccgagggcattctgatacccaaatgaataatgggtttacaatgggcctaagaagatccacaaatcactatactgatcaagcaaacactttttctcttcttcttctttctgtttttacgtaacaataaaaataaaatgaaatgaaattatatacgctcttcccatattcatagaaacataagcttttgtaattgttagtgatgaaaaggtataacttaaataactacatgtaaataaaatattgagctaaggggaaatgtatacatctattatatatagaaacatggatatgctttaagtaggttgatgactttccataataataataaaaaagggaaagggtcatcgaggtacatttttttttctttcacaaagtta
